United States Patent Application Publication US 2014/0325702 A1 - sequence listing, part 26

SEQ ID NO: 37711 - DNA, 1290 bp, Heterodera glycines
  unsure (1)..(1290): unsure at all n locations
atgggttttcctataaatggattgacagtaaaagtctaaattaaccgctgcaaaaaagtttttttcatatagccgctataattgggaacatactgtagcctttactaggaacggaaattacaaattggcagatcncaatctgggattggattttgcgggcgcgggactaatctcgctaatcactcattcttctcaaaaaaagttcaggataacggaccgggaatcccgtcccgcgtctgcctctagtttttactattttcctgaaaagcatctcatttgccactttataatttggccttgatgctcattcagtttttttctgactaaaaattcactggcttcctcaaacatgccccccttattaaattttttttacctttcttatcatcagcagggctcgaaattttatggtttgcatatatttttttgcgcatatgctatgaagaaaggggcttggatttggtgaaggtttttagtccatataaatccatattttgggggttttcgggaataaactcatattccaccatttttgccttttttagtccatattttcaggcttttttagtccaataatttcgagccctattatcatttgattatccaagaagtgtttgcccctttttgaaggtcttgttggcggctttgttctgtctctgcttgcccagtggaccgctccgacaatgggcagcacatcgatcggactgcttttcagtctctcgaggtggattctctatcggtttttccgtccgaatcccgagagtcccgacattttttaacgtccgagtctaaaccccaagagtcatgaatggatggacatttttaacattttcaaacaatttttgttttagaaaaaaataaagcaattttattgtctgtttttgaatgccttgcggatttcagctaaataccattttcggcttcttaattttcagtaatttctttctcttccatttacgtccctttttccgagggcatttccttgaaaattttatattacatggaataagtataacccttttttattgtcttcataaagtatctttttttagtttcataattttttcctttgtccttgaaagtcattttatctgtccttgaaaaccagttttctgatgctcatgttcctccccccatgttcaaacaacaattctgccttttttactgaccacttgtctcctattcttttcagttttccgtgccactttttagtgcaatttcgcacaatatgccaatctcagaaatctgtaaacaaaattttctcggcacttttagccacgccgccgtttt

SEQ ID NO: 37712 - DNA, 929 bp, Heterodera glycines
gattttaagcccgaatgttgaattttcttgtgattcacctataattttcagttaataagttgtcagttttattctttaattctataggtaaatcccgaaaacattgcaccaattgacttttctccggattataagcccgaatgttgaattttcttgtgatgcacctataattttaagttaataagttctcagttttattctttaattctattggtaaatcccgaaaacattgcaccaattgacttttctccggattttaagcccgaatgttgaattttcttgtgattcacctataattttcagttaataagttctcagttttattctttaattctataggtaaatcccgaaaacattgcaccaattgacttttctccggattttaagcccgaatgttgaattttcttgtgattcacctataattttcagttaataagttgtcagttttattctttaattctataggtaaatcccgaaaacattgcaccaattgacttttctccggattttaagcccgaatgttgaattttcttgtgatgcacctataattttaagttaataagttctcagttttattctttaattctataggtaaatcccgaaaacattgcaccaattgacttttctccggattttaagcccgaatgttgaattttcttgtgattcacctataattttcagttaataagttgtcagttttattctttaattctataggtaaatcccgaaaacattgcaccaattgacttttctccggattttaagcccgaatgttgaattttcttgtgattcacctataattttcagttaataagttctcagttttattctttaattctataggtaaatcccgaaaacattgcaccaattgacttttctccggatttaagcccgaatgttgaatttcttgtgttcacctatattttcag

SEQ ID NO: 37713 - DNA, 146 bp, Heterodera glycines
aaaaggttcataaagttggaatctcctttctcgttttcgttgttgtctttcttctgctttctatttaatattctcaatactctatatactctatatgaaataatgacaaactgtcccaagaacaatttttaaggttccacttaaag

SEQ ID NO: 37714 - DNA, 961 bp, Heterodera glycines
gtgtgccttctgcgcaattctgatggccgtcttttggacctgtgaagtgatgcccatcggcatcaccgctctgctgcccaccgtactgttccccgccctgggcatactgtcggcccgtgccgttgcccatgagtttttaaatgtatgtgcgtgcgttagttactgtaaacccctcacagaaccagaggcactagagacggatcgggggaccccgagatagggtctcttccaaatcccgatcgatcatgaagattttggaaaacgatcgggacggatctcgagtcgaggtctgtcaaaatttcccggtcaatcctgaaaattttgaaaaaaatcgggacgggtcccgagtcggtatccgtccaaacccccatcccgagcaatcccaatgaattaaaaaaaggctcgggacggatcccgaggtaggcaaatcctgcaggataaagcagatcccgtccggtctctatcaggcacacacattaaagtacattttgggtgtgggtctttttggtcattaaaatgcttttcaggacaccaactttctgttcatcggcggcctcgttgttgcggccgctgtggagaagtgcgggttgcatgaacgcgtggcactcagtgagtgcgaagatttgcacactttcttaattagattaattactttattttatttaattacttaaataaatttttaatataattaattttattggtataatattaatttaacacatttaaattaaagcaaattaagcattaattaatttaataatagataatatttttaaaattcatttattcaaatcatcaaagttaaatttaactttactgatttagtttgtaattaaaatctattcttctaacgctttaagttaaatatttattttaattaatttaatttaatccaatttcaatttaatttttcaaaattaattgaaatacttatttcattttcacttacactttattt

SEQ ID NO: 37715 - DNA, 65 bp, Heterodera glycines
ccaggatctcgcaggccgccgccggcgggtgcgccgccagggcgcgcaggcaggccagggtgtgg

SEQ ID NO: 37716 - DNA, 1068 bp, Heterodera glycines
  unsure (1)..(1068): unsure at all n locations
aatacanntttttgaaaaagattcggcaatggtcaaatattgtcgatgtaaatacaaaaggagataaatgttaatatttttgaagccttttatgattattaaggaaaaactattaaagaactgtaataaatctctaaatatttttttaaataccaaataaatatttgagaatttaattatgtcatattttattcgttatatattaactttgttagcaaaagcttatatttattattaataattttttcttttaagcgtgtgcaatttataaaataaatttaaaaaatgaattcatatttatttaacattaacgcttgagtggcattaaaaatatgttttgtttttttcattttataaaaatatttgtttttaattttaagtatcctcttgtagagatttcattcaaccaatcaaaaaaaatattaactttttgaatttatatgtttttcataataaattcatttatttttattaatttaaataggtttgcaataaagtggtgttattgcctccccaaaatgcattaataaggtggaaatgatatgcttgatttaaaggtttgaaatatataagagtagtttacataaatattcatcaattcatcaaaagatttatttaaaaagtgtttttgtgatatgatattttttatttgaatttctacaaaaaaaagctttaacaaataagttattattttattattaaacaattatactaaatatacaatgtttttatttttaagtttggtttaaatttgcatatttttgaattcatttttccatctcgttttctcattcactaatacatacataaataatagatacgattaaaattatattcgttttatttatatattataataaaattcttttttgacttttgaatactcaaaaacacgaattttttgacaaaaacctgcccattttgtgtgaataaaccagtaaggagtcacttttctgactttcagttgttaaaagcaaatataataattatgttgctagatattatgtttggggtgattcgntaggaattcttatatatcaaactcctatatttctggggcaatttttt

SEQ ID NO: 37717 - DNA, 1099 bp, Heterodera glycines
gtgacaaaatcctcgctgaaccagaccatgccacaacgcgaaactgttgccatcgtggcaaatttgagatcagcaacttcgaaaatgatccgaacctaatataaaaaaataagtttgaaattaatattgcctcacatttggtggaatagacagccgttccccgtttggaagagtaagcaatttgtagtcatcaagtacggaattcagattttcaacccattccggatcaacatctccatcaaagatgatccattgccgcttatccaactctccacgaacattgccaatgattctaaacaatgtgtcattgtcaacatattaaaaattaatagtaaattgactttcgaataatatgcgtaaataatccatcagtccattcgcgtgtgttcgggtcgagagtgccgtagagagtgtctttgctgatcgatttggcatcaatgacatgagacacgccttcaacgcgctcatgattttccaacgccttcaaaagtgtcttccacgcagtggttttgaccgatccactcgcaccgacaagcattaggccatgattgcgattggtgatttggtaaacctgaagaactttctccagccaaagatttcccttctccccagtgataggtgaacatgagaagtgttcggttttgcagatgtcaaaacttcgttcttgaggctgaaaataaaacaaacaatttttttttctaaaaacccagaaatctgcacctttccacttgttttgggctgttgtcagggaaaaattgatgcaaaggtgatttaaaaagagatatcctcagagacaagcttcggtgtcaaagtgtcgtacacggattggaagagcatttgttgttcagacatttggcttgccactgcctgttctccagctccatccccgctttggcttggttcatcgtaagaacgttgaatcgcatcgcgtttgatattcccggccgaaacaagcacatatttcaaagcacgcaatccaaagtcgtaatgacattggttcgaaagctgttccttgcagagactaaagcaaccatggaatttaatttgaaaaatgaatattacgtaaataataggacaattttgtttgcgagtctctcgg

SEQ ID NO: 37718 - DNA, 912 bp, Heterodera glycines
  unsure (1)..(912): unsure at all n locations
atagcctgtacttaattgtgcgttggattttcgctccacataattgtgtgagtaccacacacgcacactagaaaatatcgatttttttgttttcggggcagtccccccgaaccgatgcgcccagatttatggggagaccgaatccttcgggaatagcttccctatagcctgtactttaattgtgcgttggatttttgctccccataaatgtttgagtaccccaaacgcacacttgaaaaaatcgatttttttgttttcggggcagtccccccgaaccgatgcgcccagatttatggggagaccgaatccttcgggaatagcttccctatagcctgtactttaattctgcgttggatttttgctccccataaatgtttgagtaccccaaacggacacttgaaaaaatcgatttttttgttttcggggcagtccccccgaaccgatgcgcccagatttatggggagaccgaatccttcgggagtagcttccctatagcctgtactttaattctgcgttggatttttgctccccataaatgtttgagtaccccaaacggacacttgaaaaaatcgatttttttgttttaggggcagtccccccgaaccgatgcgcccagatttatggggagaccgaatccttcgggaatagcttccctatagcctgtactttaattctgcgttggatttttgctccccataattgtttgagtaccccaaacggacacttgaaaaaatcgatttttttgttttcggggcagtccccccgaaccgatgcgcccagatttatggggagaccgaatccttccggaatagcttccctatagcctgtactttaattctgcgttggatttttgctcccccataattgtttgagtaccccaaancggacacttgaaaaaatcgatttttttgt

SEQ ID NO: 37719 - DNA, 1090 bp, Heterodera glycines
  unsure (1)..(1090): unsure at all n locations
gcctgcannggtcttgaaaaattaaaaaaaaattaaaagtatttaatttaacttgaatattaattaagttgacgcgacgatgaaaaagtgaacagctgaaaagatatgaatttcctgatcatgattttgttaaaatttggagatgatgacattgtgattgattgtattattgttggtttttatttttcataatttatttaattgccatttcctcccagaaatcttttgttttaatttctaattgtaagttcgaaatttaaaaaaaaatcttaaaaattttgtttctaagaagagaatatagcgttttttttaaagttttataaagaaccaagaactaactttattcaaaaaaatttgccaaaaaaaatatatttttaggaaacttttcttacattttcaagctaaggctcgatcaaatttaataaaaaaaaaactatgaacttgattaatttagattagaaagtccggagactttctgtttcatagcaaattttcagtctcgaagccaattcccgaatccgaatttaaaaagttaaaatcccgagaaaactacacaaaatactgaccaacaaatccgacgcgtcttcaattggtgccgccagcgtctcctcatgcgtgtcgtcaaccattgcgcgcagcgtttgtgcgtcgcgatgcagcgccacgtggtgccagccggacgccaactgttggccaagttcagcacggacagcgccagccgagtcagtgccctcggcaccgtttggcttgatcaccagtgttgtgccattctcgatcagcacacgcacaatctcttccttgaattttaatttgtatataaaacgttttccaatcttcatactgtatgtaaattactgtacttggtcattgttggcgaatacggtaagcaggtggacaatacggtcgggcacataggcggcaggacggaaacggaaggacactgcagctgattgttgctggacagtttgagtcccggtgaattgggcatacgcacgctcggacagcaaagtgccaatgcgaaccttcaattggaaaggatttaaaaaatgtataatggttaattgaaaatataaaaataaaacgaattttt

SEQ ID NO: 37720 - DNA, 1809 bp, Heterodera glycines
  unsure (1)..(1809): unsure at all n locations
ttcgtcgagaaattctgctgacattcgtcgctcaacaaatggaaaatgcctgcggatgagaaaaataaaatgaaatagccgaactaaaagaaaagcncaactcaaaacattcatccatcactcgaaactctcgacaagaacataagttggaaaaaataattacccgtggtgtgacaaaaaccaatgggtaattaacggacaattatcaaggaacaaatacagagcaaataaatctccaagttaagaatgagcctggtaaaagtcgcaacaccttcagccggttcaacgacggcaaatttggccaattcttcacgcaattgctgctcactgatctgcacttggtcgagcagttcattcagtttgattctgaccgattattttaaatgaaaatttgcgaatgaatgcctcggcacttaaattcatttcaaaatgggccaaaaacatttatcattttcgaatttcgtcctctcattccttccattgtttcaccgtcttttaccctttcgattcctccgccgccggtgcattttcattgtaaaaatcgagcaaattttgctccaaaagcgccttcagacggaacgtttggtcgggaagaaaagcttcggaaagctccacaaagcgatttgtgatggagacgatatgttgctgctgttccgtaaatgaattaatagccacgtgtaattaattaattaattgaaaaatgatagccccgagggttggaccacccgtcgtaaagcaaaagcattggtggaccattcaaaggtaatagtgccgatggtagccccccttttttgcattgtcggtgagtttcaaaggatttttccccaatatattccaaaatcgccccacatttgctccggcgctgtttggcgtcccgtcgagcaacagcaaagtgttggacacttcgacgtcctttgcgccgaatgttcgggacgaagtgcacacgaccaaagggtcagagcaatggccacggattgtaagcgaaagactgaaaatggaagtgcttttcaaaatccaaattatagaccaaacaagggctccgatcgatctaatacagaaacgaaaaagaccaatcgtatcacaaaatggacctttcgtgattaaattgatcagtgatcatattggacgaagaaaaagcatcagccaccgacttttccacctccaaaagcacaaaattatttgggaaaaacggccgggcaaaattcaaagtttggcatttgggcgaatccatcggaaattgcaaataaaaaaactaaagaaaaacgaaaagaaacaaataaagtgaacgggggaaaaacaaccaaatggaaaagatggaatgcggaaatcatttaaaagatatttaaatcgacaaatgttcgtttgtgttttctttggctatgtgatggacatcagtttggcattcagttccacgttgtaaaagtcggaagatgccaattcgtccaaatggttctcaaagtcggacaaactccgatgcaatttgttctgcaccgcgacggaggccaaaaggacggcgtcgtcagatttttccaccgaataatccgcgggacgccatttggcagcacttaaaaatgattcagaaattaggtcagatgaaagtcagaaatgccggcatcccgaaattcgcaaatcaaatttggtcctttgggtttacctttccaattcaaacgcctgcaaacacggcgaagtcgcgttcagtgacaatttcgcgttttcgatttgcaaaagaatgggctgtccaattttatctgccgcaatccgtgcccataaatcatccaaactgaacgcataaaaaaattaataaactaa

SEQ ID NO: 37721 - DNA, 1001 bp, Heterodera glycines
taatataagaaaaaagtttacaaaagcctaagcttaggcctagtctaaccataagccattgttcgagttgcctgtgtataagttgtcatgataaccttaggtttaacaacgaaatttatagttaaaaactttactgaatacctgacaaaaaaaatagtttttctcttagttattaggacaactataataccatgagaccagggatggcacggaattccgatttccgaaaatttttggggcctcggaatgccatccccgccatggacacaaaatgtcatgggacgcgtaaagtgttgttgggacgcgtaaaatgtgatgggacgcgtaaagtgttgttgggactcgtaaaatgtgatgggacgcgtaaagtgttgttgggactcgtaaaatgtgatgggacgcgtaaaatgtcatgggacgcgtaaaatgtcatgggacgcgtaaaatgccatgggacgcgtaaaaccgactagaaccaaaaattttattaacgctttttaggtagcaaaacataaaaaaaggcgaaatgaatgtttttggcttagtaggcgaaatgaatgtttttggcttagtaggcgaaatgaatgttttttggttagtaggcgaaatgtcggtaggcgagatgtcgagtaggcgaaatgtccgtacaccgttaaaagtaccccgtaaaccaaaaaagtacccgtattttgtgaaatacggcctgaaatgtgatagccagctgattctcgcatgtcagctggttggattcttaaaattccattaagtcaaacgttaacacaccatcccagaaatgagctcctgtaccagaaaagatttgcatgtgtggctcagtggtttttgtaagatagtaaagggacaaagggtggtggttcgagtccgttgtgcaacatgaatattttcatttatttttgtccaaaatattaaaaaatgacgatatttgggaattatttttgaagctttttcccaaccaaattggacaatcttagtatcattcgaaa

SEQ ID NO: 37722 - DNA, 648 bp, Heterodera glycines
tcaaatgtggtctagtggctaaacctactcttgaccttcattatttgttgcttgggttcaattccccaagggaaagaaaattttttatattttctttacaattatttcaattgaaattaattaataaaaaacatttcaacttaaaattatctttttcttttttttaaacagcctaaaaccgcaaatttaaagcaccgccaaaaaaagtggtttccagcttcgattgttttgaacaagcccaattttcgaaaatgaattactagattgaaagtccggcttaaatcgcgaatttttagtggcggatgatcacggattttaagtgggggatggatgatctcggatttttaggtgcagatactggcggataatcgcggctttttagaggcgggtatcgcggatttttaggggcggatactcccattaaaacaggactaataaataggggcaaaaaatgtaaattgaggtgtaaaatattccttttttttcatttttatggttccttcccaatcctcgatgagagaaaaatcggggatcggtgggaaattccccgacaaaatctgttgggaatgattggagaaaaggtaaaaaatgtccacatgcataaccctcagcagggagtaaattttccaaaaatcgtaaaattactaa

SEQ ID NO: 37723 - DNA, 1152 bp, Heterodera glycines
gtagttggacatttacggtgctttggctgccaattatggtaaaaaaacttattagtggaatatcgtactgagtgttttgtaaatccgcataaatacagtagttggacatttacggtgctttggctgccaattatggtaaaaaacttattagtggaatatcgtactgagtgttttgtaaatccgcataaatacagtagttgggcatttacggcgctttggctgccaattatggtaaaaaaaattattagtggaatatcgtactgagtgttttgtaaatccgcataaatacagtagttggacatttacggtgctttggctgccaattatggtaaaaaacttattagtggaatatcgtactgagtgttttgtaaatccgcataaatacagtagttgggcatttacggcactttggctgtcaattactgtaaaaaacttattagtggaatatcgtactgagtgttttgtaaatccgcataaatacagtagttgggcatttacggcgctttggctgtcaattacggtaaaaaacttattagtggaatatcgtactgagtgttttgtaaatccgcataaatacagtagttgggcatttacggcgatttggctgtcaattacggtaaaaaacttattagtggaatattctactgagtgttttataaatccgcataaatacagtagttgggcatttacggcgctttggctgtcaattacggtaaaatctgtttcttcattttcatttatttattactgtggtattattttctcatcaaagtttttcgctaataaaaaaaattatctatgaaggaaaatgaattcctaattaattaattaattattaatttaattaattaattattatccgtatttaaagatcatcctttgtttgggattaacaatttatcatttgcttgttttggatttatcgtttgcattaacaaatatttttgtgggtctgtacatcggagcaatgatcgccagtttaatcgaaatttttgtaagttaaaaatttaatttattatttatatatatatattttttagattttttctttggtcagaaaatctaatcagaaattgtttgatttgcgccctggaaattataaaaatcaaccattaaggttcggtaccaggtaaaataaaacgaaaaatatat

SEQ ID NO: 37724 - DNA, 369 bp, Heterodera glycines
cggtgtcatctatgttactagatcggggatcgatccccgggcggacgctcgagcaggacctgcagaagctagcttgatggggatcagattgtcgtttcccgccttcagtttaaactatcaagagaggaaaggtcagtgtctttgaaggagcggaggagtagcgtcctcttaggcccatttcctcgccctattcgtcggcacagagaggagcacgaaggggaggggagcggcgcgtagcgggggaggtgggtggcggaagaagaaaagggtggggggagtatgagtatgatggtcaatatggagaaaaagaaagagtaattaccaattttttttcaattcaaaaatgtagatgtccgcagcgttattata

SEQ ID NO: 37725 - DNA, 1013 bp, Heterodera glycines
ttttctgctcaacagtaataggaattccaaccgcattctcagaataattacgccgatactaattgttctggaatttgtttctctgcgcgtttgtttgggaaaaaatttggaaaattggctatctctttttctgctcaacagtaataggaatcccaaccgcattctcagaataattacgccgatactaattgttctggaatttgtttctctgcgcgtttgtttgggaaaaatttggaaaattggctatctctttttctgctcaacagtaataggaattccaaccgcattctcagaataattacgccgatactaattgttctggaatttgtttctcggcgcgtttgtttgggaaaaatttggaaaattggctatctctttttctgctcaacagtaataggaattccaaccgcattctcagaataattacgccgatactaattgttctggaatttgtttctctgcgcgtttgtttgggaaaaatttggaaaattggctatctctttttctgctcaacagtaataggaattccaaccgcattctcagaataattacgccgatactaattgttctggaatttgtttctcggcgcgtttgtttgggaaaaatttggaaaattggctatctctttttctgctcaacagtaataggaattccaaccgcattctcagaataattacgccgatactaattgttctggaatttgtttctctgcgcgtttgtttgggaaaaatttggaaaattggctatctctttttctgctcaacagtaataggaattccaactgcattctcagaataattacgccgatactaattgttctggaatttgtttctcggcgcgtttgtttgggaaaaatttggaaaattggctatctctttttctgctcaacagtaataggaattccaaccgcattctcagaataattacgccgatactaattgttctggaatttgtttctctgcgcgtttgttgggaaaaattggaaaattggctattctctttttctgctcaac

SEQ ID NO: 37726 - DNA, 1592 bp, Heterodera glycines
  unsure (1)..(1592): unsure at all n locations
cttgaaagtggtctccgttttccccggaaaaatcgttaaaaaatcctaaaattcaaaaacccgaaaacagttttttaggcctagctcgaaaaattttgaaaattttcgaaatttttaaatttggaaaaatcgagcttttcaagctctacaatagtcccgctggcgaccccccgctcagatcaaaccataatgagttattcacccgggactgaactggacaaagttggtactgaaaaagtctacgcacctacagccttccctattataggtagaggcctggaattttttttaaattttagtcaacacttcaacttaggtccctaccagcggaaactttttgattcgggttttaggaaaaaagttatgggccctaaaatgagcgaaaaagtgacaaatcacttcccgggactcagtcgtccgcgctgaatttttttctatagttttcccggattctcctcaaaaagttgtaagacccttccaccactttcagggcgctcccggccttcggccgggagaaaatggttttagcaacgaaactccttgtcaatataacgtatatagtaattaattaaagtcatccatctgtttttaccaactcctggttataaaatatgctttttattaaatttcctttaaaatgttcaatcttgaatgaaccaggtgtcgttggattaacaacaacgatcttanataattcttcggtaaagaagtttgggagatacccctttgcaaattttcccttttccttgctaatacaaacgatatcgccaattttaaatttgttctttttcgaaattttaatttccttctccttatataatttttcccagaacgcccgggcattttcaaaattaattgaagacggtttgacccccaatgtcctattcacactgttgttaatgtttgagactattttatctattacgtcgacccatcgtagagtttccatctttgtaaaatatcagtataaccgttactttattgtacgattttgccctttaagctactccggtgtggaggtcgggactatacatgacatttttgataataaattttccctcaaaatactttttcatttttccagcctggaattcgattccgctatcactatatattttcattgggataattttcgactttttgaacacccgatcaaatacctcgatcatgtcctcactcttctttgacttggccggtgcactgaaaatcattcgactcagcacgtcgatgcagaccaataaatatctgtaaccatcgttatgctttttcaattgatcaaatatgcacaaatcacactgccaatcggtgtggaagccactcggtactgtatttaatctcgcgaatttttttttaaattttttgaattcctgccggagatttgaattttctctatagtcttgcccatattaatggtttgaattcttccccgcgagatacaacagaacatctctataattactgttttcaatcggtaaattcatgttcgactgtacttttccagccgccgtaattttaaataaatctttgttttcctattatgtatctaaaaagggggagtaaaagagtcggatgaataatagttttggtcggaa

SEQ ID NO: 37727 - DNA, 1654 bp, Heterodera glycines
  unsure (1)..(1654): unsure at all n locations
cctgggaattcccccgtggcgaagataatttcacttcggaacagtgcacgtctcatcagcagattttttgtttatctcatggctttttcgttttcatttttttgcatatgtccctgttcttttttcataattcttttttttcttcggcatttgtgccattgagtccctcccctccgtctttttcagtcccttttcgtctgtccgtttcagcgctgcgcctccgtttccgcgccttctgttcgcgttttggccaaagtgcgcgccgtcggcacagtcaaatgcgcgcgtcgaagcgcaccgagcgccacatccgccgtttggtgccatttctgctcgttctctccgttttcgtctacgttttgctgggcgcacgctgcctttctgttcttcgagcactcaaaccatgagcagagcgtgcgcaattggttcttcactctgatcacgaataggtgaaaagcgaaaaaaaacattgcggggatttaaaatggaaaatttttgactgaaattggctaccgtattctcccattattttgcttcccgtattctgtgcactttttagacacaaatttgcgcgccaactttcctcacgccatatttaatggcacgtgcaacatggtgataattgtcgactacgacagttccgaacgcattcaagtcggtgggggtagggaggaaggccaattagccaatgggtgagaagataaatgacaaaattcaaaaaaaattgaccattaatttggcgcccggaaaatgagtcagtggaaaatgcgtcagtagaaaatgcgtcagtgaaaattttattgtcataaaaacaagttccttgcgttttcgggggcactgaccacgaatccggtatctatttcggccaattctgaaccccggaccagaattcaaacaaaaagtctaaagtctaagttttcgaatttagcatttttggttcgaaaaacggcataaatgatcacttattgaaggattgttggcttttagtttgtttccgtgtatttaaagcgatttttaagaaaaaacctaatttcgaaaattttgatttttcgactttttgttaaagttcgggtacggggttcggcatgcagaacgatgttcctatagagtttacttctatattacaatattaatgccatagaaaactttattttaaaatatttgtatcaatgacgtctactgacgcattttcaactgaccgattttccggtcacgctcccggcacgtttatatgtgttacttttttgttttccttcgcttggcggaatttaaaaaacgactacatagcaatttttttctcagcacatttctccttttttaggatggtgtgcaaacaaagggcagtaaatgtgctgggacgaaacccgaatattattttaaataaaaataatatttaagaattttaatttttatattttcaagcatttggtcataccgcacaaaaccatgaaatttcgactatttttatttataattccatcaatcatttgaattaattcattcgggataaattgagctctttaatttaaaatatttttgttaaatgaaattatttactaatgtttaaagtttgaggcagaaggaaaatagttattacagaaaatttttcaattatatttttaaaccaataagttctnngtgtagtgaaacatta

SEQ ID NO: 37728 - DNA, 973 bp, Heterodera glycines
ttgctccagggaaacttttttttaaatcactccgtcgatgttttcttcgattccccccccccccccctcctcttctttttttcaatggttcacattctttttatccgccggttctgctgccctttgtttacccaatgaaattgagactttcccccgttcgtttcactgaccatttgagaaatgaatggcgccatcgctcgtcacttctgtcgtcaaaatgcctttcttcagaaatatgtccaataatttgaaaagtggaattattctgaaactctttaaattcattaatgggatgggattgtttaaccaaaacagaaaaagcattcttttgggttagccgggggtggggggctaaaaatgctcaaaagaaaagcgacggattggcggcgaaatgcctttgggttgtaaagtgattcaccaattttttgcgcacatcaaagcacgagaaacgagaagcagcgatcggactgatgagaaggacaaataaaaaggaaaacgcggagaagcgaattatgcgaagtgaccgaaagtttagccgagcgtcggtcgactatcggcgggaaaaagcctttcccaatgttttactacaaatgagaaaattcatccattgcgaatttttctgtttgattcgcccgccctttccccgcgatcggtgatttctcatttctttttaacagttttaattgctttttacaattcgtgatggttttgttgaataaaaatgagaaagaaatttcggaggagagacatcggtgaggggaaaagcaaagggagggggggggggggggcaattgccttcattgggaaacgaaaaaaagaaaatcatatttttatggatattcaattttaaaaaaatcttaaatcttattgaagataagttcaaaagaaggagatgggattggcttttacccttttttcctttgaaattgcatgtgaaaataggcgcctttttcaaaagaaaagggcctgataa

SEQ ID NO: 37729 - DNA, 964 bp, Heterodera glycines
  unsure (1)..(964): unsure at all n locations
aaaaatttctcactccaaaggtgcaatgtgcgatatgctttggtctgatcccgaagtacggcatttttgtaccaagattttatgttattcttatntaattttttgaattattggtaaggagtgcgtcggcttcgctatcagtcctcgtggtgccggctatctgttcggttctgatgttgtgaaattgttttgtgaaaagaatggcgtagaaatgattgcccgtgcccaccaattggtcatggaaggatacaaatggcactttgacaacaccgtaagtaaaacgcaatgtttaacagagaaacagcgaaagatatttcccatctttcataggttctcaccatttggtcggcacccaattattgttaccgttgtggcaatgtggcggccattctcgagatggacgatgtactgaaaaaggaatttttgattttcgaggcggcaccgcaagtggttggaacaatatttaaaaaagaatattttgaatgttttggtttttcaagggacgaaacacaccaatgaaggggcctatgcctgaatatttcctttgattcagagttaaaatgatgaccatttcgatgtttgcaacattcatttctaatttgtttattttttgcatttatgtggggatttgttgccattgttttcttttatattttaaaataaaaagtgctggagacagagattttcaaatcattcgactcgagaagaaaaaattaaaccgactgacaatgaggcacaaaagccaaattttggttatagcgctaattcttggtatcaatcgaaggcaaaggtaaagaacattggtcccgaaaaaaaaacttttaaattttttaaaatgatttttaggggtaatcctaggcgctgagcacgaatctgaccttctttttgctcaatttcgaaccccggacccgggttcgaacattaaaaaaaaatcaatttttttttttttgcaaattttgctaaa

SEQ ID NO: 37730 - DNA, 618 bp, Heterodera glycines
cgttaccgttccgctcgcctaccaacacttccaacaagtgggcacccaaatgcaaaacgaaatggacttttgcaaattgcgttccggtaacatttggagagaggtgagaaacgaatagaaagcattgggcattggcactgatcgatggaaaatgttttacaggtgacgcgcacccaagtgttgtcacagttcactggtggcgttcgccaaccgcgtgccgtaaataccggcaaaagccgtcgtattcgccaatatgagggtgcagcaggcagtggtgcgactggcgtcgccgcaagtggcgcggcgggaggtagctcggctggcagtggcgcaggaggcgcggcgggcggcgcaacaagtggcgcggcgggcggcgcagcaagtggcacgggaggcggtggcgcgggaagcgcaagtggaggagggcagtatggtaccgcgggagcagttagcggtggtggaggaggaggcggctgctgcggctgtggcgtatctcagcccggtccacccggtcctcccgggccctccggaccgcccgggaggagatgggcagccccggagggtcgggacagcccgggtctgacggtttgaaaactcaaaacaaagctgaattgaatt

SEQ ID NO: 37731 - DNA, 1090 bp, Heterodera glycines
tgatagcttacactcatacacttgaacaatgtaatcagatcctgaaaaattgcatttttgaaaattttataaaccctcaatcctcagtttttttacatttatatgaatttcatgatggtaatagaatttagacttttcttaaatatgtacaaaaatttaaataaacttaaaaacttgaaaaattctaaaataatactaatttattttaatgatatttttttggcaaaactattatttttatttttttaattagtgcattgtgtacaattggtcatgactagggctgggaatttaagtcacgaaaaattctccaaaaagtctactaaaaaaatcataaaaaaaccgccaaaaagtcacaaaaaatgccaaaaaaaagcacgaaagaaatgggaaaaagttttcaaaaataattaaaagtggaaaaaaaatcttatttttatcaatttattgaataaatttttataaatagagatcggatttttaggaactttattttataaataggagcttaaactattattttttgcctgaaagaatctgataaaattcgactcactatatctttgtactaaataagcaaaaatttctgcaggatttcaattgccttttcatcgaacggattatttttcgaaattttcttcactaaaattcgaattttgccttaaaaagtgtaaaaagtcatgaaaaaattcacaaaaacgcaaaaaagtcataaaaatcccaaaaagtggaaaaaagtcaaaaaaaagtgacaaaaagtgcatgttagaagcttcaaacaaattattatgtctttttttttttttttgcctttttcgggattttagtgccttaaatgccttttttggcattttgccgttttggtgcctttttggcgtttttttccgaaaagttccattataaatgcaataaaattgggaaaatacatcccataacccaaaaaaaattccagcaaatacgcccataagaattgaaaaattttctcaataaattgatctccacatcttttttttcaagataaatttaaatataaaaattttctttattagaggcaaattattaattgtttatttaataatcatttaaatga

SEQ ID NO: 37732 - DNA, 1123 bp, Heterodera glycines
ttttgcctgagagaatgccaatgggattcggcaccctggccaaatgagaatgccatttccggcaattccccccggggatgagtgccgctgtttttggccaatgccatcgttccaaaatttctccgcctgcggcggctttgttcgtgcactcaccttgtccgagggggatgaatgtggctaaatggatgatcaattcgtttgtcttctgatcagtccccccccccacctaccgccgttccccgccggaattgcgagtccgccgccgttgaggccaaggccgaggccctgcagggcctgcaattgttgcagtgcctgcagctgttggcccagctgagcggcgccgaggccaatgcccggaatccctgcagggagatttgttttgccataggcacatgaaatgggaacggtcggcaattaaagcagcacagcacaaaattggcatattcaaactgtggcccactcgcgcataaacacaaaactcatcagtcagtaccagtgagtccgttcagtgtcggcagaccgacaaagccggccgaggacgaagccgcttgggatgcgagtggggcgacgccggacagagcggcgagcgacggggccgcgggttgttgggcgagaatggaggcggccttggacggaaattgtgaggggcgggcaaattcagattttgttcattgttctaccgcttggttcagcggcaacgcagagaaagcagaggcgggttgaaattgtggggtcaaattgagattattaggcggaaattgggcacgagaaacggcgaaaaaagagagaacgaacaaagggcggaggatggccaaatgcggcaacattaagacagaatttttattgatgaagtaaaattgccaaaatcgttgaaaaagcggcgacagggcgcgactgtaatggatgccctttaaacaactgaaaaatgcgtttaattgtccatgctccgttaaattcgtaaattttaatgaaaagcgatagaaaatttaaaaaatgaaaatacaaaggggagaaggaaaagcatcaaaaaatgagtgatggtaaaggggtgaggaaatgaatgatcaccgactaagaaaagcgaacaaaatgccccaataaagaccagcaatgaatgaatgaa

SEQ ID NO: 37733 - DNA, 504 bp, Heterodera glycines
tggcaccggagtggcaccccttttcattcaccctcgagacaattgcgaaatcgctggccacgtgtcttttttaggccggcattgaatgtttcgtttcatatttgactaagaattttgtaatcagtaattaatgttttttttcaccaactaaatattgattaattagttttgaaaccgaaagttgtgaaaatgttttaaatttttggtcactttttcaattttaattttttaatttggtcagacatttttcatttttatttggctatttttacttatcattcaaattttaatacaatgattgtttttttcatatttgtaaatttgttttgaatcacttttctttgtcttcattcagcccttctatggaagttaagcaatttttgatcagaaaatagttcattgcagacgggtgatgcataggagaggcgtgcgtgcgtcgcttcgcgaccgtcagttgtgttggggttgatggggatgttcaggctgtaggtgggggcggaaatg

SEQ ID NO: 37734 - DNA, 1774 bp, Heterodera glycines
  unsure (1)..(1774): unsure at all n locations
taaaaaatttctgcaattatatgaaattctttgttttcccattattttgacttttaannttcacttcaataaaaaaaaattttaatattatttgtggtgtaaagccattttttgactaatccattttttagtccgtaaaacttaaaactntacatataaatcaaatcaaattaatctttgattaaaatttatttttatgatgacctttaaaatttagttcgtggtaatgtttagctaattttttctacatattttgttaattgatgataatgttcatttgtttcgtcagttgggtttgtttgtgtttagcaaaagccgcaggataatggacactccgttcccatttgtgcttgttgactccgacacaaacccaattcgacctttgtcggacagttcggctggccagagcccaacgggggaatctcgtcgccacaaccttcaaaattataaatttttaaaatatttattcgatatatttcttttttaacggatgcacaatatcaggagactgtaaatttttacaaatttaactaatgcgtaaatttatattgaaattggggtgtattaaggggttaatttgaatttaaatgcccacattttcccgccatttttattgccctaccctaaatatggaacctaatatctacaaaaatgaatgcatattttccattgaagtaaggctttaaacgcatgaaaaaaagttctaggcttgatttggaaatttaggatcgacttttgtatctagagaccggacaagagggtcggtcggtcggtttcggttaaaaaccgaaaaaaaccgaaaaactcaaaaatttgtcggtcgggtttcggttaaaaaaccgaaaaaacccgaagaaaaattttcggtataccgtttcggtttcggtttttatttgaatttttttatcttttcccaaaaaaaacaataaaccatttttatcaatagaaaaagcgaaagatcacctctgagtaacagcaaaatttagttttttggttagtttttacgtgttttgctccctaaaaatcattaataaaaaaatttaaatgccttttttcatgccttttcgggatttttgtgccttttttcagtgccattttgcgctttttggtgccttaattgtgagctctagccataactttagggccggcggtgctgataagcgccgccaggaaatttttttttgtaattttaatgctatttgtgagcagattttgtctaaaaataccaaattttgagattttgggctaattttttaagaaaagatagatttctgtggggtcgggatcaaaccatatgtgaattcttttgttaggaaaccatcccggaatactatcagtatgcaaattttaacgaggaaagtagaaaccaatttcttcagaattgtcataaatagtgtgattcgacctttcctgacttgaagagacgtcggatcaggtacaaaaagtcgtctcagttcgagcgtgccttcatccggtttaatgacaaatcagctttcgttcttttcgtgtgttgcatcctcctgatcggcttcttcctgattgcttcgagtatattctttgctctagaagtttattaaaacaaatgaaagactagcatagattactttacggctgatttctttacgcttttcctttttgcatggttgtccgtcccaaaggccttcaactttttcaacggttttttgcccaaaaattctccccgggctccacgtggcatcacttgttcttaacccacccagcgcactttccaataatcttttcctccgcttacttt

SEQ ID NO: 37735 - DNA, 472 bp, Heterodera glycines
atttatttatttatttcatgaataaaaaagttatcagaagggcaaaaaccacttactctgacgactgttcagataatatgtcgtagagtaagtgataaatatatggatgaccaaaaataaaatcaaaatatattaataaaatgaggtcaaagtcaatgaggtcaaagtcaattgagatcgacagcataaatgccaaatcactagggctgcaaaaaatacagtcatggtcataagtgttgtcccatcatgctttgaaaaaaaaaattgcgtataaaattgtcattttccaatttcaacagataagtaacataccattggatatcattttttatgggctttccaatgataccatatttgcatttgtgacataaacatttatttgatttattttaccatattcacaatttgatcaaaatataggagcacaaaagtgatgtcccatttcatttttaacatattgcttctctggatc

SEQ ID NO: 37736 - DNA, 931 bp, Heterodera glycines
aaagtttaaggtgttgctgtatctttttaaaattaccctaaaacaataataaaaatttattaaattttaaatgtatattgagtagattcaatttttttttaatttccattctcggaatcatgcttttagttatcatatttttttatgtattcttccgactcaaatgtcgattggatattttttcgttgttatactatatcagttttttattaatttacattcatttcggatattaatgatttggtgctttgttttcatatttaatgaatcaactaaattttatattttttctttcaatatattttaataatataatgatcatatttattttatttagcatttctcttcaaaaattcatattattctgaaaagtacgaaacgaacaggaatttaaaataattctcaaaaatacacattttgaatttgtgttatacaattgtaatataatttccggaaaagtatgcctttctggtgcaatttgaactggaatatgcattttcagtagttccttttttacaattataatctaatttcagcaaaaaatttaatttgcagaaatgtatgcattttatgtgttttatatttgtaatttaaaacagaaaaatatcaatcaaaattggactaaacatttaacttaatatttaaataaaatgcatatttgtctattatttgaaatatcactttatataaagtaaagattgaaaatgatctttcctttttaacagagctcacaactgaaaatattcaaaatcagctgacttattttcatttgggataaaaaattttaaatttgaatgtaacatgttaacagattttcactaaaaaacgaccaatttttgtgaatttaagccaatttattaatgaaaaaataattttagaggcacggcggtgccaatagagcgccgctgggggaatttttttagaaaatttt

SEQ ID NO: 37737 - DNA, 100 bp, Heterodera glycines
tgcagtacatctcacaagttcacatactctttttaaataggagtggaagtggcaaatgccgcaaacagcgaatcgaaggcgatcagccaattacaaactt

SEQ ID NO: 37738 - DNA, 963 bp, Heterodera glycines
tttaacccgtcacatttacacgggcacaggctgcttgtgcatcgacacgggttacgggctaaaaacccgtgtgcccgtgaaacccgtgtcagccgaaaaaaacgggttacgggctcgtgaaaagccgtgcaagggtccggcccgtatccgatctctaattctgagtatattttcacgaaacaaaacacacaatgataagcaccaaatgtatgtaaaaatatttggttgagatcaatttgaccaaaaatgaaaaaaagaacaaatggatgaataggatatttgaagagcaattgctgggttatcgttttttaaattttgaaaagcaaaattcaaaatttaatcaaatgccaaaaaaattgatttgtgtgtaaaagtacgatcacacgacaaacggacccagccaaagcccaataaaaattataatgacaaaactcaatggtggataaataaaaagtataaaaattcaaaaataaataaataaaatcgaatatttgatctctcgttttcctgtccctcaaatgtcgtcctcgaaattgtatttgaaatttggcccaaagttggcctcaattttgtccccaggatggtacagcgtaacgcaggcaaacaaatcaaccgaatcggcaaacaaattcgacgcatctgaatatgtaaataataatttcaaaaatataaaaaactaaattcaaaaaaatttggaaatttttgtgaaaattttgaaattattaattttgttttccgacaacagaccaaccaattcgctccccatttttggtgtacaccaactggcgtgtggacaaattgacgccacatccgacgacgtcgccggccccccacaacggcacccttttgcccacaaatgcccgactgctgctgccgctggcacattcgctgctgtgccggttgcgatgtttcagccggcggcacccgttcagccaaatgtcccattgctgtcatacgcatagg

SEQ ID NO: 37739 - DNA, 942 bp, Heterodera glycines
  unsure (1)..(942): unsure at all n locations
taattctntgaggaatttcccaaagccatgcgcagctttgttagaccgatgccgaaatggcaatataattggaaaaggacagacaacaatgcttttctttatatcagctgatggtttatttacaaaaatcgaaatacttcctgattactttccaagaaccatgagaataaatatcgcactagcgccaaaatcgaacaagaacgctaatcatcagaatcatcttaattttccccagtgatttgtgagtgataagaaaatagaagaaattcagggattaattcctgaggaatttccaaggaccacgtccatcattgctacaacggtgccttaatggcattttaatgtcaaaatgcccgacactagcgcatttctttagacaacgaaaattaattcctgaggaatttcccaatgcattcgcagctttgttagaccgatgccgaaatggcaatataattggaaaaggacagacaacaatgcttttctttatatcagctgatggtttacaaaaatcgaaatacttcctgagtactttccaagaaccatgagaataaatatcgcactagcgccaaaatcgaacaagaacgctaatcatcagaatcatcttaattttccccagtgatttgtgagtgataagaaaatagaagaaattcagggattaattcctgaggaatttccaaggaccacgtccatcattgctacaacggtgccttaatggcattttaatgtcaaaatgcccgacactagcgcatttctttagacaacgaaaattaattcctgaggaatttcccaaagccatgcgagctttgttagaccgatgccgaaatggcaatataattggaaaaggacagacaagaatgcttttctttatatcagctgatggtttatttacaaaaatcgaaatacttcctgagtactttncaagaaccatgagaataaatatcg

SEQ ID NO: 37740 - DNA, 1237 bp, Heterodera glycines
acactcccggaaaaatcctctcaacggagagcatgggaagcgtggtccaacgcgagaacagagcaaacagtgtgctttgcatgaacttaagtgccgcgacggacgatcatatggcttctcgcattcaaaacaatagttttggccaaacagcccatactccttctgcaccccatcgaaatggtcgttgttgaagtacagcacaattggggtgtcatagcggtcgtttatgtatttgtagagaggcttgtattgtccagaagagccgaaaataaacacagcaaatcgctgttgttgttgttgttgttgttggtcattgttgttattccaatagtcaaccactcttggaacaaaaacttcggcttcgtaggcattaagaccaggccgagcaccagtttgctgcattaagtccaaaacatctctctgaagacagccctgttgaccatatctgctatgcatgtagttgtaaaattgccacttaggccatccacgcgtttttgccaccatcgttgcttgtaaggcgtaaaaaagacaatatccatcctggtttcgaatcttaattttttctcgtcaaaattgacattctttggagcgaactttgatcaaacaccgatcattgatacggtgatgtacagatgccagactgcgccgggcgccacctttcagacttcttttgtcgggaagtccagttcggtcaacggtggtcacagtaactgtgaacggctcgccccatagggtcacattttgctgttgtttgctttgcgcaactttattgaattgattaaggatggtgtccacggtgttgtcagtgatttggcgaattgggatgggtatgtcaccgccagtcaatagtgggctgctgatcaaacacccaagatgagttggttttactccgcgctgttcgctttccacgacggcctcatcaatgcaaaattggaaaatgccggcaagcagcccttcgggattcgctgggacgtcctcgatgctgaacttcgatttggccttgacgtattggaaccgtggcacatgctcgatactgctttccaattttttgacgaaatcctttgctgacttagccgatgaagttccagctcccgcttgaatgccatgacgtggctttttcgcaggaatggacaaaatgtaatcaattgaaaattttgaggggcactgaaggttgcgattttccatttttaaatctagaagaaatccataaatattttttaaatattattttaatgat

SEQ ID NO: 37741 - DNA, 909 bp, Heterodera glycines
  unsure (1)..(909): unsure at all n locations
cacgttcgggattatggaagtttttgcagaggttgcagtagcgttcgccacacacgtgtccttttcttccatttctgttgttgtcattgacgtcccaaacaacgccacagtccttacactttttggacctcttgcagaaaccggactggagatggtgccggaagcagtcattgttgttaaagtttttgttgcacccagcgcaatgcataaagaatcccgcatgtgattgacatggaaatagaggccccgtccgtgaacataatatgcagcgagctttgcacgatttattgtgtaacaatgccctcgaatatggtcgttcacactccaaacagtaaggccttccgaaaaggccaccctgcttctgcaccccatcaaaatggtggttgttgaaataaaggagaagtggtgtgttgtaggtgttgtccacatatttgtagatgggcttgtagtgccctgtggtgccaaagatgaaaacagagaatcgatgttgctgttggttgttgttgttccaaaagtcgataacgcgcggtacatatgtgtcagcatcgtacgcgttcaaattcaaaggtgcaccaatctgattcataagctgcatcgcatcgtgctgaagctctccccgttgaccatgtcggttttgcagataatcgtaaaacttccatcggggccaccctctggtcttggcaaccattgtcgcctgcagtgcatagaagagacagaaattgtgcctgtccgggttcctgatcttaaactatcacattgatatatgtcaagaggcttccaattgaggtaaaaccttgatcaaacagttatcatngtatttgatgtcgcactggagccaattgacgagcggcacctcccttcacttgtcgttttggcggggagcgcagaccgatcgactgctgtcacaac

SEQ ID NO: 37742 - DNA, 1124 bp, Heterodera glycines
attgagccgtacacttcaaatgtgtacagccgtcgtgtcctttcgggagactttcaagtaaaattgccaaaattttatggatgaccaaagaattcttaaacatgtaagattagtttctctatgtgttttaagattgtcaatccgcatttgatgaaggatttaattgaactcaatctttgggatgatcaaatgaagaacagactaatcgcggagaacggatcggtgcagaacatcaagcagttgccgcaagaaatcaaagacctgtacaagaccgtgtgggaaataccgcagaaggacattttgaaaatggccgccgatcgcgccgctttcattgaccaaagccaatcccttaacattcacatagcgcagccgaactatgctaaactgagctccatgcacttttacgcctggtcattggtcggttatcgactaattgttaataaataaatggttgtatattagttttatgccttttattccttttttataaaattgcgtaaaaaagaacacctatacgtttaggacgataataaaaataccatgaaaaaataaattcaaaaaataatgcaaattcgaccaaacagggggaggggtcactatgtatgttacgactcattaatgggtaccatcgtttagggacttaaaaccgggatgtattacctgcgcactcgtccggctgtcgatgctgttcagttcactgtggacaaaatggcccttcggggaacaattgccaaggacgaatctgtcgaaatcgacgttttgaaagacaaggaaaacatttctgccaattcggagttgcgcttgccgtccaaacgcaaatacaatgaacaattggaggagagcgatgggtgtttgatgtgttccggttgatggattgtttttccatttatttgattgtatttttgggcattttttttatttggctttaaccattggttttcgttaacatatgataaattgatattttgcttgtttaaaacattcccttctcttttggtgtatattgttaatacataaacatatttttaaaaattaccctttctttttcaaagtttataaatgaataagtaattgtaacatctcggcacctttttgatttattccgcctactaggaagggaacag

SEQ ID NO: 37743 - DNA, 960 bp, Heterodera glycines
attttggaacttttcgcattttttcgtacatattttgcaatttttgagaatttttaaggaattttttattaaatgcccaaaaaaaaatccaaaattacacaatttttttcaaaaattttgagaatttatagaaatttcttgtgaaaatttaaaattttttcttgaaaatgttcccaaaaaatagtttttttttttttcaaaaaactgataccaaaaattaatcatttttgctaaataactaattagctaattgaccattgccatatgccccgaaaggcaaaaacatttaagaaaacattaggaggaggacagtcaaagtcagcagaagcacataatagggggaggctaacaaatacaggggggtgatgcgaatttgcggcgctgacatttgcggcgttacatttgctgcgcccagtcaacgacatttgcggcgcagaatttaatggctccaaaccagaatttttattttattttatccattcattgctgtcctgccataaaaatttatgaattcggcataactcaagagattcttaaaaaccctctgaaaatattttaaaaatgaactaattcagcgggttcgtttttgctttggaaaaaaaatttcttataacaaaaaggaaaatagaagggcaataataaaagagatttaattttgcacattaattatgggccgccacaaaatgtcggggaaaagtcgcgtgctcgcagggatttgtcgccaactcggctttacgttttgcggttggcaaagttaaatcttaaattttgtgatcaataaattttccttcttttagtgggcatataaagcgaataaaattcaattagtgaaagttgtgaagtcgggggaaaagggaatcttttgaggatgagatgacaacacatgggaaatgaggcgaagggaagcgaaggacagcttcttcccaccagcatatacatttctcacagagaacggtcgat

SEQ ID NO: 37744 - DNA, 1050 bp, Heterodera glycines
  unsure (1)..(1050): unsure at all n locations
ctgcannggtctgaaaaaaatattttatgaaacaaaaaaatcgattttttcaagtgtccgttttggggtactcaaacatttatggggagcaaaaatccaacgcagaattaaagtacaggctatagggaagctattcccgaaggattcggtctccccataaatctgggcgcatcggttcggggggactgccccgaaaacaaaaaaatcgattttttcaagtgtccgtttggggtactcaaacaattatggggagcaaaaatccaacgcagaattaaagtacaggctatagggaagctactcccgaaggattcggtctccccataaatctgggcgcatcggttcggggggactgccccgaaaacaaaaaaaatcgattttttcaagtgtccgtttggggtactcaaacaattatggggagcaaaaatccaacgcagaattaaagtacaggctatagggaagctactcccgaaggattcggtctccccataaatctgggcgcatcggttcggggggactgccccgaaaacaaaaaaattgattttttcaagtgtccgtttggggtactcaaacaattatggggagcaaaaatccaacgcagaattaaagtacaggctatagggaagctattcccgaaggattcggtctccccataaatctgggcgcatcggttcggggggactgccccgaaaacaaaaaaatcgattttttcaagtgtccgtttggggtactcaaacaattatggggagcaaaaatccaacgcagaattaaagtacaggctatagggaagctattcccgaaggattcggtctccccataaatctgggcgcatcggttcgggggggactgccccgaaaacaaaaaaatcgattttttcaagtgtccgtttggggtactcaaacaattatggggagcaaaaatccaacgcagaaataaaagtacaggcttatagggaaagctattcccgaaaggattcgggtctcccccataaatctggggcgcatcgggtttcgggggggactgccccgaaaaacaaaaaaaaatcgatttttt

SEQ ID NO: 37745 - DNA, 986 bp, Heterodera glycines
  unsure (1)..(986): unsure at all n locations
ttggttagatctgttaacagattttgtccaaaatatgctaaatgtgnnaaattcaattaattactaaaattcgatcagaattaaatgcaaattattgattgtttttgatcagggctggccgactaaatttgcaattaacaggcttaattaagtcttttcatttgttcttttggcgctgtgttgtaaaatgctattcgattaatgatcattgaccatattcaaaatgatcagagcaacaacaaattattgataagccgccaaaaaataacaattaattttataaaaaatcaaattaaatttttaattgttttctccaccatttcgatctttgtcccttttatttatttattttttatttatgtcttttatcattttgtcctctcttttttttaatcattcaatgattaaaaaggggaaaattttttgcagtttttctttgttttatatatatgaatagataatttcgaaagaaagtgttctcattgtgtcaatttattaatgcaaacttcagaaaattcacaatttttcgaaaataattttcaattaaattaaaaatttaaatttaaattaagggaatattttaattatttggcatgactttgttgacttcatcaagttcatctttggaagatttggctgcccttgacggctgctcaaacacatcagacattttggtaaaatcatagaattaattaacaaatcaataaaaaatatatttaaaatcttttggaaatgggatcccttagtttgagttaattaaaattcgaatttaaaataggtaccatttaaaattttatttgtttttagcttgccgactctttgctcagtgacattgaacattttgccacacattgtctggcacttcgcaatttattggccacaacagcagcagcaacagcacacaaaaacggagcaacagcaggtaaaatgtgataaataaaaaatggtgagaaaaaaaatgaaaggctatcattaaatggtaatta

SEQ ID NO: 37746 - DNA, 778 bp, Heterodera glycines
ttttttttggctcaccgcaataaaggagcttatgaccaagacgcagcacttgttccatatagtcataaaggtgtagacgagcatatgaagtgacaaaaattgcaattggtaagcagttggttgacggtgcttttgcaaattcagcctttttcctcactaccactctgtccatatggtgagagacgtgatgaaagtcaataatgtcgatgttgcgattctcgagcagtgcatgaaactcagctggagttcgggtataacgaacttccgttccaccgactcgttgcgcaagttttccccagagggagtttgcaagaattttctgtgtgtgtgtgtttttttttaagtttaaaaattgtaattctgtattttttttttaccgcaaccatccgaagtccagggttgtttgaaattttgttgtggtccaactgaatgccttcaacccgcctaaattcatctacataggctctgcgctgttcatcggtatcacaaccggatggccaaccgcttgcttgaactttaagacccacaaaggtgttcatatagtcacgaaacagttggttatcccattcttcataatgccatacctttttttttaaagtttagtctaataaacgatacgttatttttacctcaaataaatcaataactttatagccaagctccagtgctttgttcaatcaacatgggtgtatctaaacaccggggacaaaaaaagtaaattgacatgggattaatttcacaaaaattacgcggaaaacccatgccccttgacgcatca

SEQ ID NO: 37747 - DNA, 953 bp, Heterodera glycines
aaaaccaactgaccggatgtggatggcacactcgcgcaatgtcctcacaggaggcaccgtactccagcgcaagcgtcgcttcggcaatcatttcacccgcattctgtgagcaaaaaaaaaaaacattggggtgatggacaaaatgcaaaataattttttgaatgaaattttaaaaccaaccggtcccatgatatgcacacccaacagccgatcagtgtccttgtcgccgatcaccttcacaaagccttccacgtcgttgttggttttggcacgcgaattggcgacgaaagggaatttgcccactttgtagttgacaccctgagtgggaaaaacacaaattgtaaggcattttgaaaaccttattaaaagcatgaaaaaatgaaatttcctgggacggtctcacgaagttcattaaagattaaaaatagaattcgtcacaaactattcaaaaaagcaggaggttgggatcctctctgaattggaaatgagcaaatttcggccgggcattctttgccggtttccaaaagtctgaaaaaactgtttaaaaattatatttaattaaaaataatttatatattttttaatttatttttacagtcacctaacaatgcctgttgggccatgaggaatgactaaggtgaccgaaaccgcatcatgtgccttttcggcattcattgcagcaacaatgccaagcatttcacctgtgagttaaatggggtgaacagaggaggggggacatatttttctaattgattattttggggatattttggcatctctgaatcagtgacggtttcagtacgggatatcggcttggagaggcttaggagtacccgaatatgaccattttttttcttttgctcttcagaacgccaaattttcctctctatttttaaacttttttggggagtgaggtcagtgcattttgtacctcatcgcccatttttgaattt

SEQ ID NO: 37748 - DNA, 1329 bp, Heterodera glycines
  unsure (1)..(1329): unsure at all n locations
agaggccgagtgagtaccttcggtgcaggaaaattataaattttaaaattttttaattgcnttttaaatatgccaaaaaatgtaggctaacttttntagtgaaattcgatcactcatattttttgctaattgagcagaagcgtaccaaactttgcagggatactccccggtaaaggactaacttacactgaaatgagcgccgagctagctggctcaaaaaaatttttcgaaaatctgagtctttcgtttttatttatttgcaaaattaattcataaatattttttcagaaagggttctgaaacgcaccaaattttatttacatgttagtttaggcactctgatgctttttctatcaataatggaggtgaataaaattttaattgctttttaactttgggaaaaagtttaggcttaactttttagtgaaagtttgatcactcatatttttttagtctaatctactcaaaacggttcagaattcaataaaaataacattcacggtgcgaaaaatggggtttgacaagtttattggggaaaaaaagactttacaaaataatacccctgggagaagggagtgggaaacatgatttcaaaattttcaattttttctagtctaatctactcaaaccggttcagaattcaataaaaataacattcacggtgcgaaaaatggggtttgaaaagtttattttgaaaaaaagactttacaaaataatacccctgggagaagggagtgggaaacatgatttcaaaattttcaattttttctagtctaatctactcaaaacggttcagaattcaataaaaataacattcacggtgcgaaaaatggggtttgaaaagtttattggggaaaaaaagactttacaaaataatacccctgggagaagggagtgggaaacatgatttcaaaattttcaattttttctagtctaatctactcaaaacggctcagaattcaataaaaataacattcacggtgcgaaaaatggggtttgacaagtttattggggaaaaaagactttacaaaataatacccctgggagaagggagtgggaaacatgatttcaaaattttcaattttttctagtctaatctactcaaaacggttcagaattcaataaaaataacattcacggtgcgaaaaatggggtttgacaagtttattggggaaaaaagactttacaaaataatacccctgggagaagggagtgggaaacatgatttcaaaattttcaattttttctagtctaatctactcaaaccggttcagaattcaataaaaataacgttcacggtgcgaaaaatggggtttgacaangtttatt

SEQ ID NO: 37749 - DNA, 976 bp, Heterodera glycines
  unsure (1)..(976): unsure at all n locations
cttgttaggccgcttcacggcctcagtcgagcgcttcttccggtttttcaatttttgttggccttggacgggcgcttcttgcccgttttttaaattcgttgaactcatacgggcattaaccggccgatgacagtgccgcggcatcggatgacaagtggtggccaaatggcttttcatccacttcaaaacaatgtgccaaaggtgttcaaatgcgaattggacaaggatgatgggaatttggcatcgaacattgaagacttcaaagaggtgatttcggattgatttagttgacacttttacgctttttgggttcgcttacaaaatcattattattcgcctaaaaagatattttcgaaccaaaaacgtctcgtccatctgttggcattttattattaaatggccaagtgccgtgcccatctttggctttttgtgccgctccccaaccgtaaaagttttatcaatttcccatcttttaggcttttgctggtgcttcttccgccgtcaatttcatttttgtcattcgatttccgccgtcttttgctaactccgttgtgccatttacgctgaccaatgaattgacccgtgaacaattggcattgaaaaggattaacaaacgttttttgctgattcgtttcgttgtccaattgcgcgagacgaaagcaaatcgacaaaatgggaaaaggaattgatttattggcgaattgagaagtgaatgaattgtgaagaaatatgatcaccaatttgaattatggaaattttgacgtgctcataatttgggcttccaattatatggaaatccatattttttcctggactgtgggaggtctgaaacgcacgaaaaacatctttttaacttggtttaagcttctaggatgggtttccatatccattttcccatattttccatatttcgcgatttatgtccctaacaaaatttnaataggcaaacttaaaaaaatatccatatttaaaaagc

SEQ ID NO: 37750 - DNA, 1290 bp, Heterodera glycines
gctgagcggcgcaagtgtcgcggcgcaaaagtccgctaaccaacgcaaattaaattaaattaatatattcgaatcattgtgactattaattaattttatattaatatttttgttattctataatttttatttttacttcaatataattattttaatctatttccacttgagcttgtaataatttttttggtctccattgaattattatttaaactgatcagatttgattgcatttagtgttcacttcaactctagctaaaagcaagatgaaacaattatgtcaaagttcttttttgcttcaaaacgaatttttttttttgcattttgcaataattttagcaattttatattttgaaaacttttttaaatatttgtaattatactgtgcgttaattttgggtgttattcacataaactgttacttttatcttaattaaatttaaagaatataatggaagatttggtgagaaaattgtatttattatagtaaacaagcaaagaatttaaagaacgtatattaatagttaaatagttataaacgaaattcttctttaaaataaatttgattatgtttaatttatgttgcgcatattttattatttaatgccttttgtttttattattaagaaatttatcattattcaataaatatataaaacggaaagtgtgataatgaattatttcgaattctattatttttaaatgaattattactaacttgatattattcatttaatttcttattgtcagaatgaatttttaaattctattttggttttattttaatacccatgcaaattttaaaagataaatttaagaaaaatcttttgctaaacttattaagaattttaaatatgtgttattatttatgcccatgtattccttttttcaaatcatttgatttttatcaattaaaatgaaattctgttgatgattatgttttgtatttattttattgattttttaataggaaaatgcttcgccccttaagtaacagattttttgtattaaaactaagggaaacttaatttttgattttattatcatttgaataatttatgcctgattagaaaatttcattttcttaatattttttatgtattaatgagaatgtatgagaggttggacaaaattagcccagatcagtcatttttgtgcgcagaaaatgactgtttctgtaaatcattttttaaatgaaaattttgcctttaattatagatttttaaattctttaatttataagtattttagcatgtaaaataaaggtgtttcaggctcggaaatttgatc

SEQ ID NO: 37751 - DNA, 960 bp, Heterodera glycines
  unsure (1)..(960): unsure at all n locations
cttcttcttaattgcctgatcattctccaattttttttattttggacagtcaaaaagtccgcgcgtaggtccaatttcaaatgatcttagtctgttttgttggtattattcttcattttcatttcttagatgaacctatctatttaggttaaagctatgtcaactgagatttagaattatttaatttttaacctttttatttgccctcaatcccgttgtttgtgcgttattcttcaagcaacaccaaattatgttaaattaaaaatgtaaaactttactttttcattaatttcattttcaaataatcatttatttttgcaattaattatatttgttttactggatctatgaaaatgtgcaattagtaattcagaatatcttagaatttttattttgctaacatttatttttaaattcaaaatattttttagatttgacaaatataataattcagcttttcaccaaaaataccaatagaatagcttctctattcatgtcataaaagttagatattatacattaattattttcaaaaatttccccggcggcgcctatcggccgggaaatttttgatcccggacagcactagtatttatcttgcttacctattctttaaattccacttgattagcatagaattgattattcctttcttatttattttagtttccacatcagcgaattaatattgcttttgttagaatttcgaattcgttttatcttaatttttattttactcttctttattatcttttacaaataaatataactttttcacataaaaaatatttttggataatctataccttctcatttacataaattattaattttttgaaaaaaatcttgaatcggtaggtaatcccgtcaaaaaataatggtagggattcaggtccgtttttncatgatttgattntctatttcccttaaaaaatcatactctaatatttcagtaaacta

SEQ ID NO: 37752 - DNA, 719 bp, Heterodera glycines
ctcttcctttcagtatccctgcaaagtttggtgcgcttctgatcagtttctgaaaaaaaagttaagcctaaactttttggcctgtttaaaaaggaattaaaaatttttaaaaattttattcatctccctttttgatagaaaaagcatcagagtgcctaaactaacatgtaaataaaatttggtgcgtttcagaaccctttctgaaaaaatatttaagaattaattttgcaaaaaataaataaaaacgaaagactcagattttcgaaaatttttttgagccagctagctcggcgctcatttcagtgtaagttagtcctttaccggggagtatccctgcaaagtttggtacgcttctgctcaattagcaaaaaatatgagtgatcgaattttcactaaaaaagttaagcctacattttttggcatatttaaaaagcaattaaaaaatttttaaaatttaataattttcctgcaccgaaggtactcactcggcctcttcgcggcctcgtggtgggccttcgcccccccccctcccacgcccttcagagcacgacaaatatttcaacacaaattttgaaatcatgttgtcccactcccttctcccaggggtattattttgtaaagtctttttttccccaataaacttgtcaaaccccatttttcgcaccgtgaatgatatttttatagaattctgaaccgtattgagcacaatagactataaa

SEQ ID NO: 37753 - DNA, 964 bp, Heterodera glycines
tctacagtaatcgcttacctaaggcaattgaaattagcaaatgctcccttcggaaattgggtgcaatttcggacgtcactttgctaatattcatcggtttgaccgccaaaatgatgacgtcattctctcgcgcgactgttttttttggtaaattaaaaatccctttgttgaactgctccacttctcgtgttgtcactcgtcgttccaatccccaatttctgcaaaaataaattttgaccatggccattccttcgatcgttcttctgtttttgctcactttgcattgctccaatagtgactcatctgtctatcaaaaaattatttattaaataattttttttttgcttttgcttggttttacgtacctttggacaactcgccatcaaattctctgatggataacgccctaattatcacaaatttatccgacttttctttttgcccaattcctacccgaattgataagtcctctcgctaaacaattgtttttttcaaattaaattatgaattttctcaattttcttttgctccgcttacccaatgcctgtgccattttcccggctccgataaatccgattttcacggtttctgtcatcaatatttatttttttaatttaatttattttttaaatttttattttcctaatttccttaccgcttaacatcgtttggtcaaattgttgcaccaaatgttgtgatttaaatgggaagtgataatcgactaatgaattgggctgagaatcggcggaggcggcggtgatcgattcgtgcggtgataaaatgcgaagagtgagtgactagtgacttcatttattattattatttgctgatttggcgttgggtttgccccgcggagtgtccgccgtgggaatgcccacgcccacacaccgaccaatgaatgctgctaatggtaactaattattacccattaattagcatgtgtttgtcgtttcatgcaaatgac

SEQ ID NO: 37754 - DNA, 982 bp, Heterodera glycines
aagctcaacggtcaaacaacagcattttggatctcgtatgatcgacaaaaggcactgaccttcaccgagacacatgccgtgcaagcatgcgacgggagacaaatcgtcttatcagagcagaacttcggcattccaaaagagcaattcgacatcatcatgagcgaccacacaagagcgaaacgcaacgtgcaacccgaacaactcgcttcacagctttccgctgctcaacttgccacaacaatggcactctcgcagctctacttgaaggaatgccagcgcaacgtgcgcgtcagcaacccaacgcttcaggcacgaaaactcctcaagcgcgaaaatctgcaagcccgatggatcagcgaaacaacaatcgaagtgtttccctgcgttccaatctccctatccaacatcagctaccgaacaacaaaggactgctacaagttcattcctgtcacaatccatctgctaaacacaacacaagacgcattcctcgacccggagatgcgcatcctctcactcatctcaaagatcgcaagttgctctcaatttcgctaccatcatctgcaagtgcaacaaaaacccaacttgtgggtgcgaatcgactcaaaaaatggaaacgtccaacgattggcacaaacagccatccacgagctctacgaaacaatcctcaacaaaacggacaacgatttggatctccacccactgatcttccatcagtggcagctcgacaacgacaccaactttgctaactttccgcacatcgacgaattcgaagactcggaagacttcaaaaacaagctggaacaacacacgacccaacgagccgaagcactcggagctttacccggcggaatcgaaggatggactatcagatggctccaagaacggctacaggaagcaatccaatggtggatacgtctcgcctcggcatattccacattcctactttgccgtgacgtcatcctaccctgcctaatcgcttact

SEQ ID NO: 37755 - DNA, 914 bp, Heterodera glycines
tcccctttctctctctctgccacctcgtcgtaattggctcttcgacccctccggggagtccgtaatacgaagaagaacaatcactgcccaaggtggagaaacgcatggcggaagcccggccagcgggcaaaatgcgcgagttggtcagttgagggagccgatcggtccccgaggggaaagcgcaggaagggatgaggacgggatcagagtcgtagggagaagcagtcgagcaaggatcatccggatcagagggaccacgagggatcagctaacaaacgaaaatgggggaggaaatgccaatgggtggggggaggaaatgccattaaatttcaaaatttggcggcgttcattagattcaacttcccataaataaaaacgcccatcaatcattggttagcttacaattagcatttcttctcaatttccattcgttccccgcttttcctccaaaacctgttgtgcttgcgaatgtgtccgctgatgaccatgaaaaaaactggacattttatgtggccgatctgctgactgttgccacgagtcttttttagtaatttattttattcgccatttaagcttaatctgccaatcgattgtttatttccctttttctgtagtacaaacaattaaacattagtaattgatgttgggcgaaaacggaataggtatgtattaaaaattaattgataattatgtagttaaattgggcaattaaaataaattaaaaattatttcaaatttctaaagttcatagaccaaactcaataatataacgatagtaattaaagcccatttgttggattcaattttgggtccaaaaatcgaaagtcggtttttaaattaggattacagcattgtacgtgccatagatagcccctctctcgctctctctccctctcactcttgcttattgctga

SEQ ID NO: 37756 - DNA, 936 bp, Heterodera glycines
gagaatagatattataagtttttcctttataattgacaaaaaaaacatttgtaacagttatgttcaaaaacagcttgtcgttctaatcagaccctcgtactaatccgatcgtactaaaccgaccttcgtactaaaacggccgtactaaaacagcgtactaaaccggccgtactaaaccggacccgaccggaaaaaaatatgttagtaaatacactgtgttgcattagaataaggacaccctattttttgggagtttgaccacttcccatgaaccaatcgatctgaaattttaactgtacgtagcaattctgaaatattaagattctaacaataagaatacgaaaggatgtcggaaaaaattttacgaatttttttccaaaattggggtgttgcattagaataaggacactttggaaaactaagaaaaatctcaacaactactaaaaagaaactgataaaacaagctataagaaagaacaaatcttttttcacatttctgtttattttgcgtacagaaatatgtcttttggggagagttatgttgaattttctaagttttcaggagaaattaagggccaaaaggcttaaatcgcctctaacattcgcccaacgaatcaaactgacagcaatcaacgctaagataacgtacagacatcctttaagcattttgtattcattttatgccataaaaaaggcattaaacacaaaatttttgcgggtgaaaaaatacgaaaatctgagtaaattcgaaaaaaaaattctagggggttggaaaaaattttccgtagaagatgattatgacgaacagaaagagcacaaaattctctacaaaatggcctttgaatgattgctctataggaagtattcgctgaggggtgccttgttgaataccgactatccctaaaaagacgcgattccagggatttttcctcattt

SEQ ID NO: 37757 - DNA, 1597 bp, Heterodera glycines
cacatattgggcacatccaacatttttctgcccaggggaagtgtacggtgccaaaatgcaatagactttgtgtcctacatcttttacaaatttcataatgacatggacagtaatgacaacattttacttgatgaatacaaattttgttcatttttaataatttgtaacaaattgaaaaaaacagaattgtttaaatagtgtaaatatgtaggggcagttattcgggtttcatgatgtattcgagccattgtgttaaatctgccgaactgccagataattctactgtttccttctgcgaccactctgttgtcaatttggctgttttaaaaagagtttgcgggtcggcctcggatattatggcaagtggtggaaatttatcgcaagacaaatggttgacaaacatccacgggagtaaggagaaacgagcatttgtctgatggcatgggcccttggtaacagtcgtcgatcgtttggggcgtcagagcccttccccttttgattatccattgatcacccccctactcccttctctttaccattgtgccgtcaccattggcgtgccattgtactgccgtgccgttttctcctgctgttcctccctctccgccactcgcacttccccgtccacttggcccccgctcggcgccgctgttgcgcttccatttggccctccctctccgtccccgttcttttccatcaatgcgttcacaatctcggatagcgaagttgctgccgtgtcggtggcatttgccgagggctgtgctggccatggtctgtgcccgctcctttcatttccattcagacccttttgttcttcgttccaattttaccttgaaaggatcgtccaattgtgtgccgatttcatctattattttgttcagtcctgccatgaagctctttgcgctgaacagtttgtactcgtggaacacccgctgcatcaaatccgccggcattcgaaagtcttttcccgtcttaacaaacggaggaaccgacaaatgagaacaccgcgagggccgcctttaccaaccctcacataagcgagttttgctgcttcaattccaatcagaagaaggaatgttttgcatgacaaatcattaaggccgtaccgatgggccaattcatcgccaaaatttgtctaaaaaagtcaacaattaatgaattggcgttattaaatctgttctttcgtcacctaccaaatcgtttccagggatacttttgttatttggtgtccaaatttgtttggccagcagcacataaatagtgatcctctcgctttgattttggcattctgccggcgccttttccgctaacgttacattggcatttgtcagttctttggttttccgctttttcccgttaaccaatcccctcttctacttgtcatttgacttcggatgttctcgttgatctgtgccctccattggtccgtcagaatgtggtcggggtcgcacagcgtggagttttcccacgtgttgcagcccgtgtgattccgccgtgggttcggatagatttgtgacgtccatcgttcggtgtcagccttaagcactgtgccggaagcgagcagtaaggagagcaaggaaagcattgaaaagctatt

SEQ ID NO: 37758 - DNA, 1259 bp, Heterodera glycines
acggacacttgaaaaaatcgatttttttgtttcataaatatttttttcagaaagtgctctaaagcgcaccaaattttatttacaacttaattttagcactctgatgctttagtatcaaaaaggaagatggagaaaaaattttttaaaaaatttttccttatattttggttatatcgttttgcttttggtggggtgcttggaacagtggaatcatgcgcacccgtccgatctggcaagttaagcaacgattgctgactagccaaaaggttcggtgccgtgatgaaacgaaccagcactgcttaccccgcggcacccggcacggtcccccgaaggaatggatttaattaaattctctccttcggggatttttttccattaggtcgtccgttagcgttcgattgctctagtcaatttttaaaaatttttgttgaaatatttgtcgtgctctgaagggcgggggggggggcgcgttgtgtgttacgaacgaaaatttaaggtgttttggcacaaaatattactttttgctggacattgaaacgaaaaatgggttaattaagggaagaaaaaagttggaaaatgattgatgctactgctttttctgctgatctgattatagtgtggtcgatcatcagccaagtccgttgtcttcaaacaatccttgcgttgtctcctcctgaaaattgagccaatcattaaaaaggttcaaaaatttagccttactattttttaaagaataattaaattggaaaacttaataaaatccataacaaaagtaagaaattagaaaagtaagacaaatgttaatcggtgcaatttgagttgagaatggtgagagtcaactggaccacacattctttcactgttccttactgtttattattcaatatttaactttatcgataaaaaacaaaatttcaaaaagtcacttttataaaaattggatgaaatttcaaaaatattttttttttgtgatttattcaattttcagcaacattttctcaacttaatcaattttgagggcattaaatttgtttagtgaaagtggcacagatttgccggttcgatttgagcatcagcgatatataccagggatgtgcctaggtttcgcttttcgcatttcgtcttattcgcattttggcgcgaaaagcgacttttacacccctaagaattggattagattctcataaaatttttcaaaattttacctataaattgcctaatttcagtgaaaaccagtttataaatgatcacaatttcca

SEQ ID NO: 37759 - DNA, 905 bp, Heterodera glycines
tcgattcgtgaaaacgaattgaaaagggtgcgcaaaatggggaggaggcgcagggaattggtgctccttccgctcggtgtgtcctcgaggctgcttttcctccggatgcttttcctgcgggtgcttttccgccgccactttccgttgcgactgttggcgggcggtggacgctctgctcgactgggcactgcgcaactcgtcgctgtcctcctaaaagcgaaaattgcaaataaaaagaaaataatttcgaaagaaaaagggggagagaatggcaaatcaaagcaaaagtaaaattaaacttttgcaatgaccgaaaggcattcatcggacggacggcggcgataagaaatgtcggttttgggaaaggtcactcactcagtgagcgaaccgaaaagtgaccattccgagggtcagcaaacactcccccggggggaaagtgcgccctttttatggtgggcaatgtgcggggaaggaacggcgggggacgaaggcaaatggacgggggaggggtcattcattcatcgtccattgattggggacggacgaaaggggagagggggggggggcggggacagaccaaactaatctttggcgatggatgagaagagaatgaggcggggatgctaatgatgggttgcgaaaagataaaggattcaaactgcgaaggtttcctcccattatgctaattgattatacaggctactaattgggcaatgcttttccaattgaattttcattccaattcgatgctttcccttccctcctccggttggaatttctcacttccgaaatggcgtccaatcggccaaaaagtgtcattctctgctgaaagtcgtcctcctcctcttccccttcttcttcttcctcttcttctcctccttctctgatgacaaatgccattcctt

SEQ ID NO: 37760 - DNA, 1041 bp, Heterodera glycines
catcattttccatttccgaatcgggcgactaaatttgttaattttgaatttttaaattatttttcaataatttttgaacaccgtttcggggctcgaaattctttttatgaatggtcgagtttcgaccaattgtccgtattcatccaaacattcttcaacaattttcagcgcgagttcactgacaatcggtgaaaaattcaaatgggctgaaaatttcaaatatttttaaaattattattttaaaaatttttttcaatttttgcttttaaaaataaaaatttaacttgttgctttcaatgcacagaaactttctatgaaaagaaaaaagaagaaaattgagcagcaaaacatttttatgagcaaagaaatgaaaaaaaattaaaacatcaaataaaataaatgttttaaatttatctatggaaaaatataataaaacaatcaattctaattgattgccaaataattcatccgccctgctgaagctgaagaatgcctacgcttccgttcgtatgttgaaaaacaaatttccataaaaaatatattttaattatcctttttcatcaattatggtaattattagggctataagttttaaggactaaaaaactcctaaatgacaaaaaatatagacgaaaaaagcccgaagtccggactaataacccaattatgagcaaacatagactaaaaaataatcataaattgttttaaatcctcaaaaaatgccaaattgacttaaaaatcaaaatgaccggcactttcgatgggacgatgaaacccaaaggggggaccaattcaataattttgaatttgtattttttctgagtcgtgatcaaagacatttatttattttgacccattaatgatttaagggggcctcctttgtgatgaaaaattttggctctattgcatttcacatgaccataaaaaagacaagatcaaaaaagtaatggtcaaaaatgtgaaaaattatagaagtttgcccgctaaaaaaccgtccaaaatgagttccaatcggcataggtctagatcattagtcccgaa

SEQ ID NO: 37761 - DNA, 1227 bp, Heterodera glycines
caaccaggtgcaaagtggcattactgactgacattcttttggctttttggcactttcagttggccgagttcaaagacagacgggcgaacgccagcgaaaaagtcattaaaatggaaacaattcgggagagcatcggcgacaaggcggagcaggtcaaacagttggagcagctgattgccgccaccggttgcgagttgtccgagacggaacgtcaattgcgcaccatggaacgctcgaagcaggcaaaaattgatgttcaaaaatcaattttgctatggttttcaaggagttggaaacgactgtgcagcaaaacttgcgcaaaatggcactcgacgtggacagcatcaacggcacgctggacaaaatcacggagattggcgaggtaaatgtcaattgatatttttagcattttccttctctttgttaatgtatagtaatcatttatggcctataggtgttcctgctccttttgacggctattgtcatttgcgagtgcggcgcaggaagaaaaaatggtcaggcgggatgtgagcgacacaccgttggacggggcggcggaggcgcaaccggccgaaacggagcaggatcgaagcggggaggaggacgtggcggcggtcgcggtggtggaaaaggcaatggccgcggcggtggaagaggcggcggcgggaagggaggagggagggcgcagcagccggaagctgaggaggacgaggtgggagggggggggaaaagcaatatgtgcacgagtgttagttaacacacatttcaattttggcctcccagttccaaaaatatttgtatgtgtggcgaagtggttttttgtaagatagtaaggaacaaagggaggagattcgagtccattgtgcaagctttttttaagcaaatgttaatcaatttgatgaattcgagaaaagatatggttttctaaatttttttttttgaataaatttcctatttaatccattttaatatagacctgacatgttttttctttacactctctctttattggttcatctctcgtttttttgaaacgttgtagtactataagttaacatttagatgtagattaaaaaatgcaatggtttttgatcatagatcttttgggcatttgtttttatagttaagcgtatacagtaacccaccccaccgcatcaatcattcattcccctcctccacagtcgcattgtgttgtggccttgtcgcacactttgtggccaaataaca

SEQ ID NO: 37762 - DNA, 993 bp, Heterodera glycines
aaacaaacaatgccggagccaatggagttggatcaagagcccgggacgtcaacgtcaacaagttcagcccggcccggaccatcaacaaatcaacaagtgatcagctcgctaatgctgatcagcattctttgcctactcttcaccggcacggcacaaggacaatcaagtcgacaaaagcgattcgccgaaatcaaaacatggcatggcggccatgtttccaacttcttcaacatctttacggagcgcgaccgacgagcatcaacgaaatacagcccttacgttcaacgatacataaacaaggttctcgcattaaaccgaagtttgagccaatcaacaaatccgctgacaccgacaactccgacatggacaacgacacaacccacaacaaccacaagtcaaccacgcacaacgacaacaactgcgactacaacgaccacacgcacaacaaattggccaacaaagtcaaacacacggccaaccgcacgaataacaacgacaacgccaatgccatggtaaatagatcatcgaacaacaacagtgtcaaaatcacgtccacaacaacgatcacgaccaggaatcaagttgattcgttggcccaagagcccaatcacaaacgagcaaggacgcgacgtcttctggtgctcgaatcatggcagcacactctgggaactgaaaggcccggaaaactcaccattttgccgtccaccacctgcactcactgcgcaatggacaccgctaaccatcacgttgtataccaaaatacatcgaccggaaccaatcgcaacagcatggcattgctccataaaaacgacaacggaaaattattacacaaacatcgtcggcgataagttcgtcgaaatcaacaaagaatttccgttggtctccaaacgactctgccaacgaatggcacatcagcaagaatgcccactcgccaaaacagaaatgcaccacgatgacaacaatcgcatttgggcaacaaacaaccaactccaa

SEQ ID NO: 37763 - DNA, 1475 bp, Heterodera glycines
aaaaaaatttaaggtgtcccttggcgattgcctggaatgagcgcctcgtgggttggagtggcagcaaaaatcaggtgggcattttttttgaattttctggattaaccccccttcccccttcgtctgcctgtttttttttgatcggcctgctcatttttagcagcaattttcaaaaaaattcccgttgactatttttttttaaattctttaacaaaaatgaacaaacgttctgaggtcggtcggcccggcggtcttcctttccatcagcaggtcacagagctgaattaggagcatcattaattagcattaattttttttgtatttttttggcacttacccgcaaaacatccggccattcggcgtccaactccttccgggccgttctcatggcccatccctctaaccgccggacctcccgcttgacaaacgccctcttctcctcctccccttcaatctctgcccatcttgtcgacgtcatggcaagcttaaattataagtttatttatttttgtttcacttttttaagtcttgaggctgcaattaaacggcaacaatgtgttttactggtcccagaaatttttttttttttttgtaatttctaaaaacacgtttcgagaattcggcatccctctcgaccaattctaatccgaattcgaacaaaagctctaacaaatttccatttttaatccaaaaatagttgaaattatattttattgaaacagtgatgactttcgctttgtttccatgtatttttaaacaaagttttgagtcagaaaatttacaaaaaatttttttttgagaccgaaacgcatggttttgccaatttgaactggtcattttcaattcatttttcagttacctttctggcgacgcggcaccaatccttctcgtcctcttcccagccggacgaatgcccgaccgccttcacctcggcaaccttccccgctaccgccagcaccataaggcgcttcatttccctccgcgtgtaagtctcggggtctggcccgctatgcatcgtccagccttctctcgagctcaaaattttcatcttaatcaaaaagggattttttcaagaaccccaaatattttatatgagaaaataacggaaaatgcatttaaattttccatttgttcaaaatttagatgaattgcttagtttttcaaaaattttctaaaaaattgttcaaccaacatttttttaaatttttggggaatgaaaacgaaacggggggggggggggtgatgaagtgcacccggacatccatgcttgaacaaacctttaaaaatttccttgggctgttgcgccacgttattttggcgtggcccgcctcatgggagacggtgccggcgatgttttggcggcccgtcgtccgggatctcttggcaagttggccaaacttattttccctattgttgaagtgccttttgctgccttctttttattttttcttcggccggcataatattttgccatt

SEQ ID NO: 37764 - DNA, 1198 bp, Heterodera glycines
  unsure (1)..(1198): unsure at all n locations
tgaatcagtgttcggaatgaccgagctgataatcgtcaataatattcgattacattttcttggtcaccttttggaattccaccatttcaactccttatcctctaaatataaactgaatcagtgtttgcggaggaccgagctgataagtcncaataatctccaatttacaattttcatgatcacttttgtgatattctcaatatttcaatttcttatatccaaatgtaaactgtataagtttacagtaggaaattgtaatttgggggttattggcgatttcaaatcgatccttccggaacactgatgctgtttatatttagagcgtaatgagctgaaaatgtcagaattcaaaaagtggggtcgcgaaaatagtaaatctgaggttattggcgcttatcaacctgatccgtctgcaacacttaaacagtttatatttaaagcctaattagcagaatgtgaaattctctcatttgttactttatgatcatttttgtctaattcgcaaaattacagctcattctccgcgaaatataaactgaatcagtgtttgcggaatgaccgagctgataatcgccaataatcttcgattacaattttcttggtcacctttttggaattccaccatttcaactccttatcctctaaatataaactgaatcagtgtttgcggaggaccgagctgataagtcccaataatctccaatttacaattttcatgatcacttttgtgatattctcaatatttcaatttcttatatccaaatgtaaactgtataagtttacagtaggaaattgtaatttgggggttattggcgatttcaaatcgatccttccggaacactgatgctgtttatatttagagcgtaatgagctgaaaatgtcagaattcaaaaagtggggtcgcgaaaatagtaaatctgaggttattggcgcttatcaacctgatccgtctgcaacacttaaacagtttatatttaaagcctaattagcagaatgtgaaattctctcatttgttactttatgatcatttttgtctaattcgcnaaattacagctcattcttcgcgaaatataaactgaatcagtgttttcggaatgaccgagctgataatcgtcaataatattcgattacaattttcttggtcacctttttggaattccaccatttcaactcccttatcctctaaatataaactgaa

SEQ ID NO: 37765 - DNA, 575 bp, Heterodera glycines
aataaagctttaaaaatagagaaaaataaggagaattttatgggatttatttgggatttctatcctcaaaagaaaaaaagttattccagaatttctggaaattttcgatttttcagaaaaaaattcgtagctaccttctgaaaagctattcaggaaaagtaaaatactacaaaaatccgcaatttttttctctataatataaattttattttacatttttatcacatttttaaaaaaagatacaaaaataaaagtgattttggggttcgggaccaaaggggggtgacaggatttttgattgaaaattttttttcacccaaaattttcctaaaacatgtcattaggggttatttgggccgctgatcacgaatacgtgatcagattttacttttgacatcgtcaagacctcagaatccctgtgtgattggggattctgaggcatcattttgagggggggggggggcaggttcgaatccggacagtgtacattatttgatctatttattttttgggtaattttcactgcatttaataaattaaaatagtttggttctaaattatttaaattaattttt

SEQ ID NO: 37766 - DNA, 607 bp, Heterodera glycines
agcacttgtaagacctcaaaagagactttaaatgtttgtttagtgactgggagccctgggttattgaaaataaaaagttcgaacaaaaggtcgaacattgttcgaactctaccaaaatgatcaggaagacatttccagacagggggttgctccaaggggggtcgaaatgttgttatttttgctccaaaacgacgtttagacccactttttggagttcgaacaaatttcatttgttattttcgctcacagagcacttgtaagacctcaaaagagactttaaatgtttgtacagtgactgggagccctgggttattgaaaataaaaagttcgaacaaaaggtcgaacattgttcgaactctaccaaaatgatcaggaagacatttccagacagggggttgctccaaggggggtcgaaatgttgttatttttgctccaaaacgacgtttagacccactttttggagttcgaacaaatttcatttgttattttcgctcacagagcacttgtaagacctcaaaagagactttaaatggttgtacagtgactgggagccctgggttattgaaaataataagttcgatcaaaaggtcgaacattgttcgaactc

SEQ ID NO: 37767 - DNA, 1594 bp, Heterodera glycines
  unsure (1)..(1594): unsure at all n locations
atcatagaaattaaataatcatgctataggtagatgnagatttaagatattctatgcncaaaattaaaaaatcattgtttcaaaaattatatttttntatcnccaggctaatagagagagaccatagggctattgaaaaatttttatttttaaagaaaactcaccagcacgaatttaaatattggtgacaaatttccaaatctccaactatttgctaattaatgcgtgtaattaagtttntaatttgagctgcgataaaatcaaatatttgtttatcnttaattattcattttatttgttagtgagcagtccaactgagttcagttngcgcaaattgttgtcggatggcatccgcgcggccgaaacgtacaacgccgagaaattggtggtccgcccaaaagcagtccgtggcttttggattcacaatgcacagaaattgggagccaaatacgaatggcgtccggttgttaaccaactattcattgattttccatttggccaatgatttggtaagcgataagcgttgctttttctatgttatagtgggtttggaatgaaatttcggcgttataacgttagttaaacaaatttttacacagatgttaccaatttttaagaaatttgggaaatttgaatttaacaatatttcgagaaaattaaaaaaaatgattttttttcggaaaatttccggtatttagagttcaaaaaggccaatttagctgatggggaatctcgaatagaggtttttttgataaatgccaaaataaaaaatgtggaaatatggacataaatcgcgaaatatggataaaggactccattctagaagaatcaaaaagctgaaattatttatttaacaaataacttaacaaatagaaaattaacaacatcgattttgggttatttatgaatttaaaaaaattcttataaatttccgagtccgaaagaagtaatttttttaaaattttctcaagttcaaaatctgaaattcatcataagttaattatcccacaatatttttccaccctattttaggcaaaataaattcccgacaaatcttcagggttcttgaataagttttttctaattttttccaacttctctatatagttcgatagagctttcagagcgcttaatttatattttatttaactctgatcggataagatcctgactagtggttcgccagaaaatgaattgaaattggtacttacttaattcttgatatattttccatccttcctattatatatagaggcctgaaatttttttagatgtaatcaatattcagacttaggttatacaaattatgttttttttttgattcgggttttacaaaagtttttgactaaaaactgtaaacttgccattaaaagatttattttatggaaaaaatgccagaaaattgatttttaatggacaaaaggtcagggtttttgtttttcactgtaattcactctttgaacagcaaattaatttttagtccgaaactgctttaaaaacacagtatgatcacacataatttcattatctgctgatcattaataaacatttttaaaaagagaagttgatccggaagagtttcgcaatccattta

SEQ ID NO: 37768 - DNA, 678 bp, Heterodera glycines
aactcctgccgagactgagacaacaccggccgagactgagagttcaccagccgagaccgagacgactccagccgagactgagacaactccagccgagactgagacaactccggccgagactgaaacaactcctgctgagactgagacttctccagccgagactgagacaaccccggccgagactgagacaaccccggccgaaactgagacaactgcagccaagactgagacaacttcagccgagactgatacaactccagccgagactgagacaactccggccgagactgaaacaactcctgccgagacagatacaactccagccgagactgagacaactccagccgagactgaaacaactcctgccgagactgatacaactccagccgagactgagacaactccagccgagactgagacaactccggccgagactgaaacaactcctgccgagactgagacaactccggccgagactgagacaactccagccgaaactgagacaactaaagccgagactgaaacaactcctgccgagactgagacaacaccggccgagactgagagttcaccagccgagaccgagacgactccagccgagactgagacaactccagccgagactgagacaactccggccgagactgaaacaactcctgctgagactgagacttctcc

SEQ ID NO: 37769 - DNA, 890 bp, Heterodera glycines
tgacgggattgaaatttaatgaaaaggaattttcactttcaggttaacgaacaagaaagacatttgtcgtttattacgtaaatggagctgaattgtatgtcataaatggacgggggggggggtcagaaattgcctttaccaaataagaaatatcccccatcagaggccaaaattgaaaaaaaggctcaacattttttttaaccttttttttttgcgtggcgcgctttttccaaaaaatttgcggaagggggcgggggggggggtccggcggtgctaatagaccccgccggaaaaatgctgcaatttattaacagatttattttcactaaataatccaaattccataaatgattgaagaggataatatgtgggcaaacagaattgcagattttcaggccgctccagcggatggcataagaggtccacacgaccgacggaaggcaaaatacatacggcaagacaacaacctgcaagctttagtcgctgatttgaccagcgtgatccgcttgaataccttcgcgcatgtgcctaccacttacacttttaaaaaattaagaaaatcattcaaaatatatcacaatttaaactatgtaattattttaacaaaggtattccaaatatttgtgcgataaataaactcatgaaattaagtggaattcggttagaatacatatgctataatgttagaaaattaaagatagaaatccaattttatatagtattaatttgcccatgggttgatttggtccgatctggcgaaaacaatcaccggcgaattcacttactggcgaaatcaaatacagacgccgaaaaaaaaagaaatagttcactggcgaaatcactcactggcgaaatcaatcactggcgaaatcactcactggggaaatcac

SEQ ID NO: 37770 - DNA, 1007 bp, Heterodera glycines
gatttaaagccatccatttcctgcccggttctcggcaccagcaaagcactaatagggtggtttgactcacttcaaaaaaataattccttacacaaaagttttttacaaccacttattgccaatctaatttcttgcagatttaaagccatccattgcctgccggttctcggcacagcaaagcactaatagggtgtttcactcacttcaaaaaataattccttactcaaaagttttttacaaccacatattgccaatctaatttcttgcagatttaaagccatccattgcctgccggttctcggcacagcaaagcactaatagggtgtttgattcacttcaaaaaataattccttacacaaaagttttttacaaccacttattgccaatctaatttcttgcagattgaaagccatccattgcctgccggttctcggcacagcaaagcactaatacggtgtttgactcacttcaaaaaataattcgttacccaaaagttttttacaaccacttattgccaatctaatttcttgcagatttaaagccatccattgcctgccggttctcggcacagcaaagcactaatagggtgtttgactcacttccaaaaataattcaatacccaaaagttttttacaaccacatattgccaatctaatttcttgcagatttaaagccatccattgcctgccggttctcggcacagcaaagcactaatagggtgtttgactcacttcaaaaaataattccttacacaaaagttttttacaaccacttattgccaatttaatttcttgcagatttaaagccatccattgcctgccggttctcggcacagcaaagcactaatagggtgtttgactcacttcaaaaaataattccttacacaaaagttttttacaaccacttattgccaatctaatttcttgcagagttaaagccatccattgcctgccggttctcggcactagaagacactaatagggtgtttcactcacttcaaaaaataa

SEQ ID NO: 37771 - DNA, 1125 bp, Heterodera glycines
  unsure (1)..(1125): unsure at all n locations
taaaacgtggaaagcgggcttgataatccataaaagaaagggcggatgtgcctcggtagctcaatggtagagcttgcccatggaaagggtgcacgagtgggttcgattcccatccgaggcctaacatttgcccaattcttattattctaagagttttcttttaatctaagtgattgaaaaaaaagattcaaatgaaacttttgaaaatttattggctaatagcgaactcttagagctatcggatgatcattaatttagatgcctctgttggaaaaagttatgaagcgttaaagttgtctgttactttatgtcgtggatcattaaattttctatgataatgcaaagtgcaacagagccaattaatcatcctaattacgtgttaatgagttattaattataaattggcaattggcaccaatgagaatgggaaggtcgagcatttgtgcttggactgcgaaacgaaagccggacatcacagtgagtgaggagccgagcacaagcagaccagaacactcgttgatctgaataaagacgaaaattaattattggcgaaaaactcgatgaaacaaataaaaattcccctcattaaagaaactaaaattttacgataaaatttggcgaaatttaatcaaaaaaaaatacggaattttactaaacaaaatccacaaagttaggtatataatttttgtccggagccgtaatccagaattttttaaaaagtataaatttttggtacccattagtttcactccagaaattttttttgaaaaattgaaattttcaatctttcttataattatatagaggttttttctaataaaaatagtcagaaaaaaacatgaaaaaaaattctcatttttcgaagcttcaaaaattatgaaaaaaattctacaaaaatcactaaaaagttgtttctgtcacatcgccaaacccaccttagcactgcagtgcttaaccgactcggccgacacagtgtcgccgaagaacacgacgtccgtcttcagcacggagccggggccacatcgaggacagtgcggcacaacgaaggagtgcaggtactgttccggcacgtcgacgtcaccgtcccggnacgagttcgagctgttcggccaacgcattaccatc

SEQ ID NO: 37772 - DNA, 962 bp, Heterodera glycines
tagatattgggagggaaaaaaagttttttgtgactatttacaataaaaatttatgcagcatttctaaaaaggatgtaaaaataatttcttgcgtaatattttttacattatgttgtgaagaatttgaggctgcttctgatgcgattgaaaatttttcagcttttcttgaaaagtttttttcccagaatttatacagctttcccgacaaattgtttagataattattctagacgatttttttatatctcagtgcttaactattgcctttttgtatgataactggtagatattgggagtgaaaaaaagtttgtttgtgactatttacaataaaaatttatgcagcatttctaaaaaggatgtaaaaattatttcttgcgtaatattttttacattatgttgttgaagaatttgagtctgcttctgatgcaattggaaaatttttcagcttttctcgaaaagttttttcccagaaaacggatgggtcaaataaaaaactaaacatctcacatgaccaatttaaattcccttacattttgggtttactttattatgctggcccataaaaaaatggagtttttccggtgccaaatttttgtgaattttctttcggcccgtcataagcggattgtttgggggcaaatgaaaacaaattttgtgttattcgaatgcgctagccgagctctacattttcaaatgtatcaacaaagggtctatctccactctctggcgagttatgtccagccaaagcagagtgggccataaacacgaattttttaatctttggtatttcctctattttgagcctgctcaacatttatgtattgtgccaatatgcctattgcaactgaaatttattcaactttcccgacaaattgttgagataattattctagacgatttttttatatctcaaagctgtgtgattgcctttttgtatgataactggtagatattgggagtaa

SEQ ID NO: 37773 - DNA, 997 bp, Heterodera glycines
atcgattccttacttaatcggtaaaacgggagtgcgctcgcaagggtgtccattttggtgttaagtcgggccacccggtggcccggcgacccgcaccgatgacagtgtcaggcggggagtttgactggggcggtacatctgtcaaagcgtaacgcaggtgtcctaaggcgagctcagagaggacggaaacctctcgtagagcaaaaaggcaaatgcttacttgatcctgattttcagtacgaatacggaccgcgaaagcgtggcttatcgatccttttgaatgtgtaaagtttccagcaagaggtgtcagaaaagttaccacagggataactggcttgtggcggccaagcgtccatagcgacgtcgctttttgatccttcgatgtcggctcttcctatcattgcgaagcagaattcgccaagcgttggattgttcacccaccaatagggaacgtgagctgggtttagaccgtcgtgagacaggttagttttaccctactaaagacctgttgctatgatagtaatcctgcttagtacgagaggatccggattttaagctcgaatgttgaattttcttgtgattcacctataattttcagttaataagttgtcagttttattctttaattctataggtaaatcccgaaaacattgcaccaattgacttttctccggattttaagcccgaatgttgaattttcttgtgattcacctataattttcagttaataagttttcagttttattctttaattctataggtaaatcccgaaaacattgcaccaattgacttttctccggattttaagctcgaatgttgaattttcttgtgattcacctataattttcagttaataagatgtcagttttattctttaattctataggtaaatcccgaaaacattgcaccaattgactttactccgtattttagcccgaatgtagaattttcatgagattcacctattcttttcagttaataagttgtcagttttatt

SEQ ID NO: 37774 - DNA, 1067 bp, Heterodera glycines
ttttttacacccccatttcccaatttatttttttgcagataaaaagacatacatttcctcccgggttctcggcacagcaaaacactaatagagtgtttgtctcacttcaaaaaataattccatacacaagagttttctacacacacatatcaactatataatctctcacagatagaaacatacacatcctctcgcgtctctccgcacagcaacactaatatagtgtgtgtgtcactctacaaaatatatcactacccacaagttttttacacacacatatatccaatataatttcttgcagagataaagacatacatttcctctcggttctcggcacagcaaagcactaatagggtgtttgactcacttcaaaaaataattgcatacccaaaagttttttacaaccacatattgccaatctaatttcttgcagattgaaagccatccattgcctgccggttctcggcacagcaaagcactaatagggtgtttgactcacttcaaaaaataattccatacccaaaagttttttacaaccacatattgccaatctaatttcttgcagattgaaagccatccattgcctgccggttctcggcacagcaaagcactaatagggtgtttgactcacttcaaaaaataattccttacacaagttttttacaaccacatattgccaatttaatttcttgcagatttaaagccatccattgcctgccggttctcggcacagcaagcactaatagggtgtttgattcacttcaaaaaataattccttacacaagttttttacaaccacttattgccaatttaatttcttgcagatttaaagccatccattgcctgccggctctcggcacagcaaagcactaatagggtgtttgactcacttcaaaaaataattgcatacccaaaagttttttacaaccacatattgccaatctaatttcttgcagattgaaagccatccattgcctgccggttctcggcacagcaaagcactaatagggtgtttgactcacttcaaaaaataattccatacacaaaagttttttacaaccacatat

SEQ ID NO: 37775 - DNA, 358 bp, Heterodera glycines
atggaagtccgacttttagggtccgacatttggggatcgaacgtcatttggagatccgacacttagggaccccgacttcgagcccggtggattcaaacccgtcccgggttcccggaattccagatgtcaggaatcttatcgtgattccggaatttttccgggtccaccgggtttttacctagggtggaaaacagagtttgcataaaaatggtcaacttgtgggtttttggttaagtttgaaattttaaaatttggggccgggtcggtaaggctctcggaaaattagacaccaaacggaaacagaaaattggacaccagggttgtagcgaatcgaaaaataaaatgtcaattaaattta

SEQ ID NO: 37776 - DNA, 1236 bp, Heterodera glycines
ttttagaaatagcgtagaaaacagcttcgatatcaagaaaccaagtcaagtccagaaaggaatattttaaaacgatttcgttttgttttggcattatgataccgaataactttcggaaattatggaaacaaaattggagaaattcgaataattttttgactgcaaatttttttccttttttgaattgggttcaaaaaaattttaagagaatttttgattattaatttgaagtcttgaatttatttgacaaatccaagacttaaaactgggagaagcaaggggctgtggctgggggcctaaaatttgggccacattggagaattaattctgatttctgaaaaagtcccagaaataactattttttctttccataccttcttgtagagctcgagctgctctttccaatggtcttatcccggtctcgatccgtgccgaactcacaaagttatggagtgaaatgtgaaatattgttttcaccacaaggcattttttctgaaaaccggattcaaaaatctggggtttggtataaccgttttagaaatagcgtagaaaacagcttcgatatcaagaaaccaagtcaagtccagaaaggaatattttaaaacgatttcgttttgttttggcattatgataccgaataactttcggaaattatggaaacaaaattggagaaattcgaataattttttgactgcaaatttttttccttttttgaattgggttcaaaaaaattttaagagaatttttgattattaatttgaagtcttgaatttatttgacaaatccaagacttaaaactgggagaagcaaggggctgtggctgggggcctaaaatttgggccacattggagaattaattctgatttctgaaaaagtcccagaaataactattttttctttccataccttcttgtagagctcgagctgctctttccaatggtcttatcccggtctcgatccgtgccgaactcacaaagttatggagtgaaatgtgaaatattgttttcaccacaaggcattttttctgaaaaccggattcaaaaatctgggggtttggtacaaccgttttagaaatagcgtagaaaacagcttcgatatcaagaaaccaagtcaagtccagaaaggaatattttaaaacgatttcgttttgttttggcattatgataccgaataactttcggaaatatggaaacaaaattggagaaatcgaataatttttgactgcaaatttttttc

SEQ ID NO: 37777 - DNA, 843 bp, Heterodera glycines
agtagattagactacaaaaaattgaaaatttcgaaatcatgtctctctctcctttctcacaggggtattattttgtaaagtcttttttcccccaataaacttttaataccccatttttcgcaccgtgaatgttatttttattgaattctgaaccggtttgagtagattagagtacaaaaaatttaaaatttcgaaatcatgtttcccactcccttctcccaggggtatcattttgtaaaaagtctttttttccccaataaacttttcataccccatttttcgcaccgtgaatgttatttttattgaattctgaaccggtttgagtagcttagactacaaaaaatttaaaatttcgaaatcatgtttcccactcccttctcccaggggtattattttgtaaaaagtctttttttccccaataaacttttcataccccatttttcgcaccgtgaatgttatttttattgaattctgaaccggtttgagtagcttagagtacaaaaaattgaaaatttcgaaatcatgtttcccactcccttctcccaggggtattattttgtaaagtctttttccccccaataaacttgtcaaaccccatttttcgcaccgtgaatgttatttttattgaattctgaaccggtttgagtagattagactacaaaaaattgaaaatttcgaaatcatgtttcccactcccttctcccaggggtattattttgtaaaatcttttttcccccaataaacttttcataccccatttttcgcaccgtgaatgttatttttattgaattctgaaccggtttgagtagattagactacaaaaaattgaaaatttcgaaatca

SEQ ID NO: 37778 - DNA, 983 bp, Heterodera glycines
gctgttaaacactggacatatctcacaatcatcaccatcatcatcagcagcagcaaaagcagaggacaacaaaacgcatggaccaaaagtgataaaactagaaaattttttgaaaaatcacaattttctttgtttttttcagccgactcagcgacttcgcttggatggaaacattggcgtggctcggtcgtgcagaagtgggcatgaagctggcgctggtcaacacccggttcaacatgctggtggacaagcaattcatgctacggcagtggcgctttggcgagtttcacatctgcgagcgggaaggagcacaacgaggcggcgcagaaatcatgacatcggaagacggcaccaacttcatcacgttgccactgcccaccacgccgatgccgagcagtgtcgtcggcttccaatcactctccatttggttgaaaaaattcaatcaattttcacaatttccccccatttttgcaggttcatcaacgcggacgtcatcaaatttctgcgccggattcgccgtctgttcgccgaggacatcgcactggaattctccactcggcacacggagtttcgcagttggcaagtgattgcgcgacatgtttggccactgttacgggacgggatcagcacattggtgtgcctgaggaagtgcgatttggccatgctgcgcaaacacgtgtcgccgaccgtgctgttcgactgccctgacctgcaccaaattcgcacggatatggtgcccgagtgtccgtccgatgctgctgaaaatactgacccaacatgccgtgagctgtacacgtggattcactcgccgcgcgactatcgacaagcgccgatctccgtgaaactcatcaaatggaggcagaccaaatgggacgagtttatgaacaatttgtgcagggtgagtgagtgagtgctgcttgaattctctgggaacttccatgttttgctaccgcccttgaaaaatttaaaaattcttattttgg

SEQ ID NO: 37779 - DNA, 536 bp, Heterodera glycines
tgtggcccgaaacagaacccactaatttaccaactttttccaacctcggttcgcctaaactttgccaaaccgaaagctgtatgatcaacaaatgtgaacacgaatcggctgcaagcttgatctggtggtcattgacttgtaatggaatccaaatccattctttggtcgcaccattgatactgaacgtcgaaaccacgacgtgtgattgaacacgtggatgagctgaattgggcccataacttctctcaatttcatttttgtacaaaaattctttcttgtcctaaatttacatgccaagaggaatcgattgatgtctattttggggactaggttgtttcggcgcagtcgtttcggcgcaagggtcgtttaggcgccgccgtttcggcgcaagggtcgtttcggcaccaaaaaatgtaagccgggtccgggtccaagatttcaaccggatccgggtacccggtaaaaccgggtcttgaaaaaatccaaaaaataattatttttttcaaatcaggtaatttttttctttaaaataaaag

SEQ ID NO: 37780 - DNA, 1518 bp, Heterodera glycines
ttattggaggaaaccaagtgcatgtcggctgacgcacataccctaacagactaaaacgcgcctaggtagcgaagctcaagaagcgcgcagcgctttcccaagcgccaccctcgcatgcacacacttcagcgcggacgactgagtcccggggaccgatttctcactttttcttgcagtttagggcccctaactttttttctaaaacccgaatcaaaaagtgcccgctgagagggcactccccacaactgtcctctacatgctggtattttttatttttttattagagccaccccctggcctgcacgcttggctaattgaagtgtgctcaaaatgtacacttcagtaccaggcgaataactcgccaggggttgctttgaccgaaaaattgtttctgagcaaaaatgtgtagtatttgaaaggctatccaaccaagttttaaaatttcgaaaattttgaaaatttttcgagctaggcctaaaaaacggttttcgggtttttgaattttaggattttttaacgatttttcccagagaaacggagaccacttccaaaacatagtttttcgagctctatcgactggtatttttttcggaaaaatttcgattttttcccggaaatagaaaaaatttttggcctgagcgggacatttgagtcccgggtccataactcgtcaggggttgattttagcgaaaaattgtcttagaacatttttgtagagcattttaaatgctatcgaatggtgtactacatgatgtaaaattttcaaaaattttcgagctaggccccctagaaattttcaaaaatttttttggggtcgaaaaagggtgtgaaaaatatttttctggggtaaaataaggtgctgagtacgaatatgatgtctattttaagtttcagaattttgggaattttttaaaaattctttattttttggcaattttttggccctcgggattttggcctaatatttgaaaattcataactaacctcagggtaagtcaattttcatacaacaaagctctaaaaatagagaaaaataaggagtattttatgtgatttatttggcatttctatctttaaaagaaaaaaagttattccagaatttctggaaattttcgaattttcagaaaaaaattcgtagctgccttctgaaaagctattcgggaaaaataaaatactaaaaaaatccgcaatttttttctctataatataaattttattttaaatttttatcacatttttaaaaaaagatataaaaataaaagtgattttgtgattcgggtccaaagggggtgcacatggtttttgagtggaaaaattttttcacccaaaatcttccaaaaacatgtcattaggggttatttgggccgctgatcacgaatacgtgatcagattttacttttgacattgttaagccctcagaatccccgtgtgattggggattctgaggcatcatttgaggggggagggggggggaagttcgaatccgggcggtaacacattatttttctaagtattttt

SEQ ID NO: 37781 - DNA, 842 bp, Heterodera glycines
atcacttttgtaccacttcatccatttgtacctcttctaatctctgttgtacctcttctgatcactgttgtacctcttttaatcacagttgtacctcttctaatcactgttgtacctcttctaatcactgttgtacctcttccatttacttttgtacctcttctgatcactgttgtacctcttctaatcactgttgtacctctctaataactgttgtacctcttctaatcactgttgtacctcttctaatcactgttgtacctcttctaatcacagttttacctcttctaatcactgttgtacctcttctaacaattttgtacctcttctaatgactgttgtaccacttctaatcactgttgtacctcttctaatcacttttctaatcgctgttgtacctcaaaatttaaaaaacgggcgcgaaacgcccgtatgagttcaacgaatttaaaaaacgggcgcgaagcgcccgttcaaggctaacaaaaattgaaaaaccgggcgaagcgcccgactgaggccgcgaagcggcctaacaagctaaaaaactggcgcaaagcgcccgtatgagttcaacggatttaaaaaacgggcgcgaagcgcccgttcaaggccaacaaaaattgaaaaaccggcgcaaagcgcccgactgaggccgctaagcggccttaatagcccaacaaatttataaacgggcgcgaagcgcccgtctgaggccgcgaagcggccttaatagcccaacaaatttataaacgggcgcgaagcgcccgtctgaggtctcgaagctgcgttaatagcccaacaattgagaaacgggcgcgaagcgcccgtataagcccaac

SEQ ID NO: 37782 - DNA, 1061 bp, Heterodera glycines
  unsure (1)..(1061): unsure at all n locations
ttgctcattttttggcatttacagtgcccaaaacagcctaattgggaaccatgtgtgccgaaagagatcgctaatcaagttggaaaaaggctttatttttaaattttttgtttttcaaaatagacatatttaaagaaacatataggtagttttaagtgaaattattcggcttttgcttttaacttcaaaatttaattttcatgctttatttaaatatttttaagcaaatggccgtttttcaaatattttaattaacctatttatgttttttttgtaatgttcgaaatgttattaaaatttttgctagctctttaaaattctaacgaaaataaaattcactaaattagatgaccgtatttactgaaaccaagccccctgggctttatttctcaaccccatcaggggagggcggctttagttcaaatatggtaattacaaaagcgtctttttctaagcgatttcgtaattgttgtgcccgactcggcgacgggtgccaacaactgtgcagctatgatcagaacttgggcacggtaaattttttgttaattaggattagcgtaaaatattatcccatattttgattttaaaatttttatctattcttgaaaatctataaaatctcttaccattttcattttgcctttttcagatacaattggccgtgctgaccggaagtaagaaaaacaaagcgtatacagtatccactgacactaatccaacccccctccctcctactgtaagggtgtccggtgagtcgcgtcggtgaaatgatggtgagaaaatgaggcaaaaatgaacaaattatgaccaagtttaaatttaggtatgcgctagtggaaatgaggtaaaaaaaagggggaccaattaaaaaaatcacttctgaaaaagtaaaaaattaacggaaacaaaacattgtttagtgattttttaaattgttatttttagcgctaattggcataatgacttttttatacccgcctctttttcgcatgaaattgaaaaaagattttcaattttttcaggacgccaccgcctgttgccaagcatttgncgtttttgag

SEQ ID NO: 37783 - DNA, 69 bp, Heterodera glycines
tgaggccaaaaagattgacccggaaattacgacccgatgaggttaataaattcctagaaaagcagaaaa

SEQ ID NO: 37784 - DNA, 316 bp, Heterodera glycines
ctctcatcaggggaattgggtctgccctatcaattgcccgaaattgtgagtgtgcgcctcagtagctaaatggtagtttctcaagtaatgggtggacgacgagtgggttcgcttcccacccgaggcctaacattttgcctatttctcattatagtaaactccaccaactaattattatgatatagtaaattcaccatcgcctacaaatgcaatttgcagcttctactcaaaaaataggcgtataaaacggagaaaaacctcaaacttggattaaaaataatttttcgataattgttttcatcaaaatagataagaa

SEQ ID NO: 37785 - DNA, 931 bp, Heterodera glycines
gccaatttttcatttaatattgccacaaaaaaattaccctttgaaactaagttgcgcctccgctgcgatgagtgcagtttggagaacaaatgccaacaaagcatcagccattttgaatattctattattgattgcttttttagttgggcttggagaattatttgaggctcaatcatctattattttccgaaaaaaacctagggaatttcccgttctttatttttcgcaataaaaaccaactgtgtcaattttttacttactttagccccaaaaacttactgctcaagttaagatgtacgcctgacaaaaccacgggttgatcatgggtgccactacagccttgattaaaacttggatgaaaatttgttggatggaagacattttgacatactgtattacttaattagaggagcccaccctgaattagaacacctccccctgaaataaagtcccaattccgaggtgggttgtgaaatagactcccgggggcttgaagtcagtaaatatgagatgttagtttggctttgatgattttggttttgttttttgagatttgaaacagatgattttctggggccatcaacggctatttatgcagctcattttggtcggagtttcggctaaaagccgaccgatccgtcgatggtcgcccgtccgcttcgggggccccgccccaatttcccagcgacttgttcgccgtttttaaacagaaattggctttttgaattccattaatgatgaatcacttttttgcccattttgccctttcccaactgatgctcaattctgtccaattcgcccacataagcacagattagcatcggaattttctgattttcccgttgagtggcggtgattcatcaattttttgcccatttgtaaataatttatcaactaaaacagtgatcagaaaaataatttctctgctgat

SEQ ID NO: 37786 - DNA, 681 bp, Heterodera glycines
tggtgggttgagtcccagtgattgaaatgctggtgggttgagtcccagtgattgaaatgctggtgggttgagtcccagtgattgaaatgttggtgggttgagtcccagtgattgaaatgctgttgggttgagtcccatgggttgagtgattgaaatgctgttgggttgagtcccagtgattgaaatgttggtgggttgagtcccagtgattgaaatgctggtgggttgagtcccagtgattgaaatgtgtgttgggttgagtcccagtgattgaaatgctggtgggttgagtcccagtgattgaaatgctgatgggttgagtcccagtgattgaaatgctggtgggttgagtcccagtgattgaaatgctggtgggttgagtcccagtgattgaaatgctggtgggttgagtcccagtgattgaaatgttggtgggttgagtcccagtgattgaaatgctgttgggttgagtcccaatgattgaaatgctggtgggttgagtcccagtgattgaaatgctggtgggttgagtcccagtgattgaaatgctggtgggttgagtcccagtgattgaaatgctggtgggttgagtcccagtgattggaatgctggtgggttgagtcccgagtgattgcaataatggtgggttgagtccccagtgattgaaatgctggtgggttg

SEQ ID NO: 37787 - DNA, 798 bp, Heterodera glycines
agagttgcggaaattgtgaattaattctcagaaaaaatggctatctctttttaggacaattttctatctcgtaacccccgatgctaatccgttccacagagactcttcaaaatttttccattaccgcaagagctgcggaaattgtgaattaattctcagaaaaatggctatctctttttaggacaattttctatctcgtaaccccgatgctaatccgttccgcagagcctcttcaaaattttttccattaccccaagagttgcggaaattgtgaattaattctcagaaaaatggctatctctttttaggacaattttctatctcgtaaccccgatgctaatccgttccgcagagcctcttcaaaattttttccattaccgcaagagttgcggaaattgtgaattaattctcagaaaaatgctatctctttttaggacaattttctatctcgtaaccccgatgctaatccgttccgcagagcctcttcaaaattttttccattaccgcaagagctgcggaaattgtgaattaattctcagaaaaatggctatctctttttaggacaattttctatctcgtaaccccgatgctaatccgttccgcagagcctcttcaaaattttttccattaccgcaagagttgcggaaattgtgaattaattctcagaaaaatggctatctctttttaggacaattttctatctcgtaaccccgatgctaatccggtccgcagagactcttcaaaatttttttcctttaccccagaagtgcggaaaatgtgaattaattttctgaaaaa

SEQ ID NO: 37788 - DNA, 1101 bp, Heterodera glycines
ccaaacaaaagttgtgctgctctgcaaaagaagacttagccaactgtaaacagcaagccatccaaatgcttcaatgtaaaaaaaattacatttggatgcaacctttatttttcctcgcctctcttttcgaaaagaaaagctattagcaagcgtgtttggaccaattctaaaacaaatcggggtaattaatttaatctgactttataagataaatgggaatttaagcgaaggattcatgcagaataataatctatagaaattatcaaaaaagtagttcctcgcagattcggggaccgtttctataaagctagagacatatgcgctaaccataaaaaagatgaatcattttttgaaaaatttatatagttcgactaaatttgaaaatcgatttatggtgtacaggatgtttgtcgaaacataactcttcaggcctttaagatagacctgccattgctattcctgcaaatattgagtctagtcagcccaatcgattgctattcgaatggtttggggtcgttggcccaaacaaaagttgtgctgcttcttgcaaagaagacttagccaactgtaaacagcaagccatccaaatgcttcaatgtaaaaaaaaattacatttggatgcaacctttatttttcctcgcctctcttttcgaaaagaaaagctattagcaagcgtgtttggaccaattctaaaacaaatcggagtaattaatttaatctgactttataagataaatgggaatttaagcgaaggattcatgcaaaataataatctatagaaattctcaaaaaagtagttcatcgcagattcggggaccgtttctataaagctagagacatatgcgctaaccataaaaaagatgaatcattttttgaaaaatttatatagttcgactaaatttgcaaatcgatttatggtgtacaggatgtttgtcgaaacataactcgtcaggcctttaagatagacctgccattgctattcctgcaaatatgcagtctagtcagcccaatcgattgctattcgaatggtttggggtcgttggcccaaacaaaagttgtgatgcttcttgcaaagaagaattagccaactgtaaacagcaa

SEQ ID NO: 37789 - DNA, 804 bp, Heterodera glycines
  unsure (1)..(804): unsure at all n locations
tcagcaatttggccgttccgatgacaccgctcccttttgctgagtcggnccaccgcacgccgaagcagcaccaccagccgcactccgccgcggcacagccgcccccgtctaacatgccagcgtttgtgccagcaacgcctttctcaaacgcatccgtggaaatcccatcgccgacgctgcaaaatattgtgtcgactgtcaatttgggtgattttccgtgctgtacaacaacaaaaatgccttctttcactttaggcgttcaattggacctcaaacaaatcgccctcagagcgcgtaatgccgaatacaacccaaagtcggcgtttggcggtgtttaattaccgatcccctttttaaggcgttttgcagctgttattatgcgtattagggaaccaagaacaacggcactgattttctcttctggcaagatggtgtgcaccggggcaaagtaagtgccaaagtttaatttattaacacgtaaattgcttgcttgccgccgcttatcattccgatcaaaattaagatccgaagagacgagtcgactggcggctcggaaatatgcacgaattgtgcaaaaaattggattcaatgccaagttcacggagttcaaagtgcagaacatggtcggctcttgcgatgtaaaatttcccatccaattggaaggtacggattgggcaaagcgacgtttaaattgttttgattgactaattaaatctaaatttcaggcctttgcataacgcatgcccaattcagcacttatgagccggaactgttccccgggttaatctatcggatggtcaaggt

SEQ ID NO: 37790 - DNA, 900 bp, Heterodera glycines
aaaaaagagatagccatttttctgggatagagtataaatttaaaaatccctcaaaaataaaaggtctattgcgcaccgccctcccctatcatgctcgagagcatttgtatgtgtataaaatttatcaaaaaaagagatagccatttttctgggatagagtataaatttaaaaattccctcaaaaataaaaggtctattgcgcaccgccctccctatcatgctcgagagcatttgtatgtgtataaaatttatcaaaaaaagagatagacatttttctgggatagagtataaatttaaaaattccctcaaaaataaaaggtctattgcgcaccgccctccctatcatgctcgagagcatttgtatgtgtataaaatttatcaaaaaaagagatagccatttttctgggataacctctaaatataaaaatcctctgtgaaataaaatggcgattgtgcacagccctccgtctcatacgcaagcgcttttgtgaggtataaaatttctcaaaaaaagagatagccatttttctgggatagagtataaatttaaaaattccctcaaaaataaaaggtctattgcgcaccgccctccctatcatgctcgagagcatttgtatgtgtataaaatttatcaaaaaaagagatagccatttttctgggataacctctaaatataaaaatcctctgtgaaataaaatggcgattgtgcacagccctccgtctcatacgcaagcgcttttgtgaggtataaaatttctcaaaaaaagagatagccatttttctgggatagagtataaatttaaaaattccctcaaaaataaaaggtctattgcgcaccgccctccctatcatgctcgagaaacgtttgtatgtgtataaaatttatcaaaaaaagagata

SEQ ID NO: 37791 - DNA, 1070 bp, Heterodera glycines
caggtcgcctcgtttcaatggaccatttccgcgacccgcacaaaggcaaccaattgcattactacgcaagttttgggtcctttatgaaataaaattccctaaaaagtgtttaccaattctcttttttggcattttcttccatttcggcacttctttttggattttgcccccccccccccccctttaggccataatgcatcgtttttcgggctccgtttttcttaagcccgagccgatgagtttttcagagcttctgaaaactgcgcagttaagccaatgggaagggggagagaataactgggaattgcaaatattctcaaagagagaacgaagaggtggacatggcattgacacagctttgcgggcacgacgaatacggggacggccgagttcagttcagcacttactgggaaagagtgcccggggccgactcaagggtactgtagtagcatacggtagaccaaattccaacggacatttgattaaaaggagtgaatattccttgttggaattgcattccattcaaattgctgcagatttggttcgctggttcccccgaatcggacgtgcaaaaatcactgttcgaaaaagacggtttccgactgatcagtctgtgcgggtacagtataagaaaggtgagcgacagaaacagtatgaaaacatgggacgaaaagaaaaataatcagccgaacagattaccaattcaaacaatttttgtatttgatcagaaaactgcgcgatttgttggcgtctggcaaaagccggcactgcgcacggttccgtacgaaggtaaaaattgaaaattatgagaatttaaaaacgtaaaaaaataagcggaatatttggtgagctttctttcgtcccattagttagctcattttgttccattaattagctcattacggcgtcacactttccgaatgcattgagttgaatgacagactcgcggcaaggcgagagaacaaagaaagtgttcgtcaattaacgaatgcttcagagatttcgtcgcggtgcaattccgcgtctttcgcaaaaggacgaagtaagcggcgaatcggtgccaccggcgt

SEQ ID NO: 37792 - DNA, 1764 bp, Heterodera glycines
ctgtcttggggcacaacggttaattgtgaatttgccacaaaataaataataatttccaaaaaaataattctgacagttaaagttccccacacttttacataatttaaaacaatgctttttcagctctttccaaaattggtggcgatgagttggctgacagtgtgcaaatgcgtcttcttcgtgatgaaaatgcgcgtcttctctcagcgctcggcagtgttaaggcggacaaagccgtgctgaagaaacagttggaccaactgcagcagaacgacgcattggcggagcaccaacagaccaatgttttgaagcaggtatttattggcacaagacgaattttaaacactaatttttctcaattcgcttttctctcattaattgaaaaaattttaagaaattcgaagccgtaattaacgaatgacagaaaattaaagatttttttgaataatcgacaaagcctccattcctggtttttacatttttttcaatcaaaaattcatagtttggtttttcagataaattattaaccgattacaacaaaaattgtcggaacaggtcgttctcccctgcgtcgtttcccccttaaaattaaaaaaaagtttggcaaattttctaaaaatcgttgaaaactttttcgaaatttttttaaattttccgatggggaaacgacagagggggttgaatgaactgcacctaaaaaagccttcaatggttaaatgtttttttttcagtcgaaactctcaccgacgagaacggaaaagtcgcagcaacggcatgtgttcactttgcacgacaacaacaacggattcactgggtgcacgtcggcgcacaaccaacaacataaatcaccgcaaaacatcagcaacagaaacagccgccgctgttccccccgctgcccacacaaccggcactgtcctcctccccctcctcgtgttcatcaccagcatcatcatcatccgccgcactgtcatcatcgcccgcaattcctccatcgtcttcgtcgttgtcccatgtatcgtcttcgtcttcctcattttccacaattccgccacgtccgcccgccatccgcgcgtccgccagctttccgctccatctcggctcttccccctcctcgcctcctgtttcattgtccttccatcaacaccaccattcgtcctcccctccatcggccagtggtgctgttgttgttgttggcggtggtgttgacaacaagaaacggcccaccaccgcgccggagggcagcagcagcaaccgaaggacggtggtggcaaacaacgggggacgaacaacgatgctcggggcaaaaggcattagcagcagtaacagccaacggcacatgaacatgagccaattcccggtgagttttgtccgcagaatggttaaagcgggtgccgatgcacttcatttcgaaagcaggacaaaacgtcgccacaaaaaaataataaaaaatttttaatttcatgaaaagttttaagaagaattgtttaagattttttacaaacctggaaacaaaatttgctagacttcccaaaaaaaaatatataaaccaaatttttttttgtttcttgaatttcttagttaaattttttcgaactaggctaaaaaattttacataggtcactaaaatttttgatatttttctaaaaaaattttctaattaaaagaaaattgcggtgactttatgtcccggcgatgttttggggtgtacccctttatttcccccttatcgtcgcctttgaatgattgggtttgatcactcacttt

SEQ ID NO: 37793 - DNA, 941 bp, Heterodera glycines
  unsure (1)..(941): unsure at all n locations
cgccacggttcagcacaaagtgttggagttctgaaattagtattcaaaactgttccatgggaacgccaaaacgccattttcagaaatctgattgtgagtggtttataaatttataaaaataaatgttacaatacctgtagccataaaaaaatttttttttggaggggtgaattcaaagacctttttttcttaggccaaaaattaagaaaaacagaaaattgtagcgccaaaaatgactaatttttgccattttgggatttgacaactaatccggcattgtgtcaactttgtttaaaaaagtatagaaaattaaaaatgaggttgaaaatagggaatattaatttggtgtccactattacctttttgcaagaagtcacgccacacgccctccaccacttcggcatcgtaacggccggcacagtgcagcacactcagcttcacctcctccagtccgtacgcgttcgccacccggtacaggtcggtcagtgagcacagctggaagctgagcgtgtccagcacctcacgaccacggggtgtcatctccacatcaatgccggcgtccgactcgagcagcgctctgaaatgagaatttatgcatccgtatttactgtgaaataaacccagctgggggcctcgaaccggagtttttcaaaaaaatcgtaaccaataaaaaaagctttaaagatgaagtgctacattttccagaaaatagctgaaaattttgaaatttttaaagtttttttggttcccagaaattttgtccaaaaagggggcagttagggaatgactcacttggtcctcagttgaatttgtgcaacgtcaagtttgtcctggacagcctgacgtaattcggtgtttgcgcgtgtttcgggtgccgattggacacacatcaaagcgtgngacaggtggtcaatacgtttggtgatgttcaatcgacttaa

SEQ ID NO: 37794 - DNA, 1262 bp, Heterodera glycines
  unsure (1)..(1262): unsure at all n locations
attttttatctctgttttttctttgatttcatatttgtccgaaagtttgtaacgttccaacagccacgcaaatgaacagtcgaattttttgccaagaattgaacaagattcattcatcttcagggtgtaaaccatctaaaaagcggagattttattgaaacaattgaaaaagaaaaataataaaaaaatgcattcgtcgattaaaacggaaattctcaaaaaatcggtcatttttaattgattttgccgaatttcaagtgtcatttacgttttcaccgcaacattcatcattgtccaattgtgctccgttcaatctgtggaatcattaaaatttaatataatatattaaatttgtttcaaattacgtgtgggaggaaaagcaatggccattagcgaagttaaagagaagggcaaaaatgagaaaattaataataattaaaaaatgatgcataacaaacttaaaataacagaataattagttaattaatataataaaaaaataaaatttactaaaagtgatttatgcatattttccttttttataaacattcgttatttatgttaattaattaaagatgaattacaaatgatttttctttaaatagagaaagaactatgtttgtcatcaattgtttgttcattaattaaaaaatttaaacgatttcaaagcgatgaataagcaaagaaaaagaaaaagaaagaaatatgtttatttattttttacaaagagacgacaaaaaagatgaataagcacaaaaaatagaaaatttaaatgaaaaatttaaagaaaatgctaagaatgaatgtgactcaaaatagcagaaaacaaaaaatcattccattttaaaaataatgtgtaaataaaaaattattaggaaaaatggttgaatttcttaacctaattaaaaagattatcacatgcctatgggcattcgccaggattttcggcaattatttcggcacttattttcgacattaattaaaattctcccggataaaaaataaaagtaaaaaaattaaaagatttatgacaagatcaatttccattcttgaattaatcgagagtcattgtgccgtcgatcagtttaatcggaacccattcaggcaaaaaatgttgtcgatgatgaagagctaaattgaaaagcaaataaaacattcattgcattatattatatattcacactttttaatgaagaaaaaatacaattttttaaagcccatggccanaaactttggcaaatttggttaaaataattttaaat

SEQ ID NO: 37795 - DNA, 936 bp, Heterodera glycines
ccaccaccttaaagctgcactgagatacgatgtgcccgttgcgcgatagtccgcgggtcctttcgtaaaaatgtggccggaaagcggcgcttcgcccttcgctttgaactctttgatcagcttcgtctcccatggctgtggcctgataatggaagcatttaaacaaattttattgtgttaattatttttgtgaaattaaaaataaaattaaatttacggtgttggtaaatattttccttctggtctacggtaccttaaaattggacgtattttgtcaataaaataaaaataatttctaaaatcatttacatgtcgacggaatgttgcaagtcaaagtcaaaatagtccttgtccaatctgttgggtcggctgtaatacggtcgtggcatatatggctaaaaataattagaaaccaatttaaaacacaaattattttttaataaaaataacacttttctcaccataagctcatcatcggccgccaattcgtctgtaatttttggcgcttcacgaaactctttccgcgtaaatgttttcatgtgctcgggaagaatggacgtctttaaaaggcgtgcttaatcacaatggaatggcataattaacactcattaaatgctatataaatcattaattaatttggacctctgatttttcttagttggccccacaaaatcacagaaaaattcagtacggaaattgcgcatcgcaaaatagaacagaatttttgggtcataaatccttttttgtttgactaaattcaacaaacatatggcattccctgaaattttcaacacaccactcacccgttacgtcgtcgaccattttggtgtagcgattcatttcgggccgctcaatgccctgcgacctgtcgacatgcggcgcgcaatacgggcctgaatttaaaaaatcttatttataaaatctattgaaattttt

SEQ ID NO: 37796 - DNA, 1386 bp, Heterodera glycines
aataccgtatatactctttttatatgccatggtatattatttttcaacctcttcagaaaggggtatataattggaggccggcagattaatggagactgggagattatttttcagctgatttatttagtggaaaatttttgaaatttttttgaacatgtcgccaaaaatgtcatcgcgtcaaaaaaaaaagatttctattgcatttctgttaaacaacttctgagaattgaccccaaaatggcaaaaatgtgtcattttcttgcttccaatatggataaaaattgaaatttttaatggtgaaagatggacgaaacgatcacgaagaagccttttttatttttgttcacagattttgttcgtaaaatgagtcaaaaaattagagccataaaaaattggtctcgagtctcgggaaattttcggtctcgatagtgaaaatttactatttcgacatttttagaaattccttaacaaaaatgcaataaaatcaaaaaatacacccctaagaaacgacctaaacattttggtaatactttggcttgttcgacccatttcgaacccggacccaaattcgaacaaaaatcgaaaatttatttttcaccaaaattcacactgcagcgactcgtggtcacaaaagacgttcaaaatgaaagagcgatggacaacggccaatagattttgaatggagaatcgcacgactgccaacgaacgaccatttcgtgcatttaaaaaaagagtatatacggtatgcgaaagttctagtaaattttctgacagcttaccgtatgtagaacaaatttttttttattgtattttaaacatgacaaaaagtccgaaaaatgattttttatttttttgaccataaattttaaaataggaaaattcttcaaattttatagtagaatgttttcattcatcttgagctttcacaattatataaagaatgtttgtgattggtttttcaatgaaaagttaggaagcgttagtgttcccaaactgatcgacctcatccgtcgacagtgtccaccagcgatggcatttcgaggcccaaattttttgaaattcctaaatctgtaattccgacccctaaaatgtaggaaaatcggaattccatgccgtccctggtgtccaccctttttggctatttctgtttttctttccatgtgcgcctcttttaccacgacattattgtcattctttccacatttttcaattggttttttaattactttttcgactgatgtgtgagaatgagcaaagtgataggataggggggatttgatcagcagagtgattggaaaataggttatcaggatgagcggagagagatgatcagatcggatagacgatagagggtgaaagccttttccattttgtgcagcaccgttt

SEQ ID NO: 37797 - DNA, 825 bp, Heterodera glycines
  unsure (1)..(825): unsure at all n locations
ccaacaccaaaaacctatctaaatntggagcttatttacatttaaaggcataaattcgtaagccggcccggaattggggccaaaaagcgacaaatagcagcaatttatggaaaaaaaaattgagaggccaaaaacctgtcgatgaaggtcaaaagcgataaattcaattgaaatttggagccgaaaaagacaatccctggaaatttttaaaattttagtttggctcacggatgaaattcaaaattcaaaatttggttgctttcgacaaaaggatttgatttaatttttgtttttttctgacacttggtggaattcacgaagttacctaacttgaaataattattttttaattaaatataaatattttttcccaaattttaattatttaaaatgtgatttccagactcgcagttttgaggagcgacccagcgcctctcagccgagaatggcctggcggcatgcgcgaagcaaccaatttgttgccgacgaatgggctgagatggggcagcagccgtacagtaattacccacagaacattggcattcgaactgctgggatacggtaaagcgtttttcgttaccctaagtttggcttgagagtcggaaactctgccgcccagcagcagaatgggttttttcggaatgccaaatcgaattccacccaatcagtgaatttattaataattatgaaatatgcgaccggccaggaccctgcggggaggaggagagagagagggggatttgtcttggccaatccctctacaggagctgggcgtggacagaaaaatgccgcggtcgcgcatcgcggactcaaattgccgcggtt

SEQ ID NO: 37798 - DNA, 1002 bp, Heterodera glycines
  unsure (1)..(1002): unsure at all n locations
agctcagttggttagagcacggcacggattgctgggcttttgggttcgagtcccaccgggcgagttacctttaatgttctacaaggcgcccctggggaatcccctccacagtgtcgggaccactggaccaaggagaggtccaagtccgtcggtgaaaggccaaggagatcccgagggaacggtcttccgagagaggcggaatgtgatgccagaaggaacggagtgtgggaaggagaaagtgggataacggagatgggaaagcttccgaatttgaacaggaggcattactcacaagtgccgacgtgtgcgtaataattttctaatttttgtctcagtttttattttgtgttttcttcgcaataatcccttttcctttagcttttctttaattgcatcaaatttatgaataatttcacttttttgttgatcatttgggtcagtccccatttcatcaaccatttgataaactgatgctaagttatcgttttgctctttttggccaatttgttcagtttttattaatttttttttctctttcatttttgtcccattcgttgccaaatatttcatcaaattttgtcgaattttgccggattcaattttagaagcaaaaaatatataaaaaatattaaataaaataaattcatttttgatattcgaaaatatatttaatgaaaaggacttttatgtgtatttattggaaatcaaatttcgtagtttgtgccaattattaaaattgaaagcaaataaatttatatatatttcccatctgttgccaaatattttctattaatttggtcgaattttgcctgattcaaattttaaaggaattaaaatattaaataccacaaaacacattttacaataaattanaaataaaatgagaatttatttgaatgaatttgctcatatttttaagttcaattatttaaatatttagctgaaaagctaaatgacatagaatttaaacaaatttaatttgatgaaacaacaaaaaaaatt

SEQ ID NO: 37799 - DNA, 798 bp, Heterodera glycines
  unsure (1)..(798): unsure at all n locations
cactcaaaagggcaagcaccaaatggaggggggggggcgtggagcgtataggctttgggtccatggcgatcggttcccattggtcagaatcggttgcagcaatccaatccgcagcaaaactgggcatacttttggcatctgtgttccgttcaatatccattctttttgcaaatctcttgtcaaattgcacacaactactcactggtaaacaatgtccagcaccggttcgtccgcattctcttcgtattccaatccgtcccgctcttcctccctcattcgataggcgcatgtttcgcgagtgtcaagaaaaaagttgttgtccaaagcgtaatatctcgtcccgaaccaataactccgtctgtagcgtgacagaaacacgcggtcgttgaacattttgatgcgtctcacggcgtacccttccaaaagtccgaccttcatcaacttgagcactgttgcgacggtttcgttgcttcctttggtcgcataacttccggtcaaacttctgttatccagagaacattttatcagggcaaagtcttacgtaaatagaaaaagagaaatgccttgtcattcccgggtcgtaccaattacacaaaatgcacagaatacagaatgacangccaacaatgacaaaaggttgacggattatggattgngccattgtccacaaaatgcaattatattacgattgcttaaantggataaacattcagagattgggggtcacacaattaagcaatgatggggtgggaggccattggttaaagcaaagaatgatggtgcggagggggggggggg

SEQ ID NO: 37800 - DNA, 892 bp, Heterodera glycines
gttgaggttcctttcttcggattgcttttttatctccttttttgaagatcattcggtccgagcctatcttcggcttcatccctaggattcgcttcagtgacaagggttcctacgtcgaatcggccaccaaagactacgaccatgtgagtcctccttttcaattatttactcctttttctcgcttaagatggccttcaaatatttgtcatgggcactctttccgcttttgggcagttacgccgtctattcgctggtgtacgatgagcagaagggctggtacagctgggttctgtgagtttgtcggcgcattttccctttgtcattatttccttcttcaagtggcatgttgtacggctttctgttgacattcggctttattatggtacggatattcaaaattcccattcaattagcaaaaacgccgttcagatgactccgcaattgttcatcaattacaaattgaaatcggtggcccatttgccgtggcgaatgctcacttataaattcatcaacacttttattgtgaggccactcaaacgatactcatttagtcccctcttctattaaaaggatgacctcttcgcctttgtcattcgaatgcccacactttaccggctcggctgttttcgcgacgacatcattttcctggtccattaaatggctttgtagtgcgatatttgggaacctgcatgcgcagattgaccgtcataaaatttaaaatatctaaatctgcaaaaatctgtccgcaaacttttttcagtactcgaaaccccttttttaagatttacatttaccaacgatggatttaccgagtggacccgaaacgtgtcaacgaattcggcaccactggcgatgatcagacgggcacggaggaatttcgggcatcgaggcg

SEQ ID NO: 37801 - DNA, 1333 bp, Heterodera glycines
atatttggcattctgtcctttaaaatttcaaaaaaattcaatgaaagtccccgcagaatccatcacaaaaaaatcaattttgcgggtcccgctgcgggattcgagccaaaattttgcaggacgagttccctcatgtaaatcccgcaattccgcaaatcccgaattttccaaaaatgcggtttgcgggttgggaccccgcaaaatcccgcgcaggatcccgttccgctccgccaaaattacatatgcatttacttcggggaatatctaaattaaaaaatgtcattttttatgtttatccgatgatagtttcactgcactgaactaagcatctgttatacagagaattgcaacttttaaaattaaaatatcattagaaaaggatccaaaatgctaaagtcttcaataataaataattttattcattgttcaatttgtcaaaatgcacgatgcttttgtccctagtgatgggcagaaaatggatttaattattataattttagttgaccaagaaaaagcaaaaaccaaaaaggaggattaaggaagtgaagaaggaataaggaaggggagaaggatgaagaggaggagaaggataataaagaagaaagattaattaggtcaattctctttaaaattaatttgttttcttggcatttctctacagtcttgtgattttaatgatttttattatgaagaagtataaattggcatgcaactaatcaacttgagaagcgcgcaaaaaaacttacaaaaaggatgaagctgcgagcgacagcgatttattgggggtctaatagattctttgcttccaactagacaatttctaaggttttcagtcactctcattctctcttgttctcaaattacaaattacggtttttggtgttttggttttggtattaatcacgattttttgtcatttctttgtctccattctcgggagcaattcttgctcttaatcccgatagaaatcatttctcaaatttcaatgaatattacaaatttgtatgcattttacaaaaaccaatactctattttaattaaaaaaatttataaaaaggaataataattataatttatttttacattgaaaaaaattggttgaacattgccaagtatggggcggagaggagtccccgggaaaaattaatgagagaacggtgtgacgatgggaatgatgctggcggtcggcgtgggctcggcgttcgaattcgatgtagcacgagtggacaaacggtcaaagcggtgatggagcgagggttgtcgccttccctcctcctcggaggaggagtctttaaagggactgcggctgcgcgtggcagaaaaagaggctctg

SEQ ID NO: 37802 - DNA, 1058 bp, Heterodera glycines
  unsure (1)..(1058): unsure at all n locations
catcactcatcgacccaaccgccagatcaccatgctagcntcatccccttttctccaacccgccaacggatgcccgatttcaccccgaagctgaccactcttctcgaagcgtcgtttgggcggaggatggtggctccatcccganngggacgccgattggctgagagttttctgcgagaaaattggcttcgccactccatccaatggccaactcgtcaattgggaccgcttggactccgtcccggcccaagaacgtcgcgttcagccgcacttgtccgtcgctgaccattggagaacggtccgagaaactcctctccatcgtcctgagctcccggcggtgattcaagaacgaggagtgagaggaacgtccaggcgaagcattgctagacggcgccgcaccggaataccgacgtggctccgaggggctccccattttgatttcttccccttagaggctttggaggtggaacccccggacccgatctaccgggccccccactctcgcaccccctcggattacccatcttcggatgaggacgatcgaccaattcaactccaccgccgattcgaacgactcgccatatcttcacaggccaattggaacccgccgcaaaccatcgctccgccatcgccaacctcaggatggtcagaggcggagtcgccctcgggaggaaatggcagagagagaattgaaaattcggatccgagagcggtcccggtggtgaacaacccgtcgcatttcgtcttccagccctccccttcccacctcttcctttgcgggaccccccttcacccaatgttcgtccctgtgacttatgtgtttcccgcctctattgctccaattcattcatcaacgagaatggccgccggggatggacttcgggccctcccccctagactcgcgcgggatgaaacgcaaaccggtgcctcccctgcgcctaccacctctgccagtgtgaccgccgctcccccctcgaattccccccacccgtctcattatcgctcgtcatcggccccacgttttcagattaaaacggatatgaataagcgggccttag

SEQ ID NO: 37803 - DNA, 787 bp, Heterodera glycines
ccccccccccctttgttcgtcgtaagggggcggctgtaaaaaagggagggggtcgtcgtggaggttggtcgtaacgaaggggaaaattttaaaatttgcatgcgaaatcaataccaaaataaaaaaattttcccggcggcgcatatcggcaccgccggaccgaccgcccgccacccccttccccccaaaaaaggtcgttgctggagaaaaatttggaccttcgtatgaaaaatcggttccgaaacacaacagaaagacgaaaaactgacaagccaacggagcgaaaatcgctgtccgccccctccaccgaacacaacttgaaggttcttccaggaggaactcctcgaagagtgcagtgactcctcgtcgtccgtcctcttcccataatggtgctcttcttgtagtgcctcttaaaaatattttaaagagtaagagactgattagaggattgttgactttagttttgttccatatataatatgcaattttaagataaaaattgggggggctaccatccaaactatgaccataaaaaatattgtaattttaaaagttttgtgaattttccacataatggacaatagtaaaaatattaataacaaagggaatggcaaaacaatttatttttatgaacgaaccgaaatgaattcatggttattattattttttttgtttttatcgtaataaatcaaagagtaaaattaccgattccagtttgatcggtgcaaattgaggatatttgcgtgccgaacataaccgctgtgaatatttgaaacaaaactgcctc

SEQ ID NO: 37804 - DNA, 618 bp, Heterodera glycines
gaaggggaagaggaacagaataggaagagcaataaaaggtgaagagtatgaggaagaggaaaaggaagagaaggcgaagaggaagaagaagagaaaggggaagaggatcaggaggagaagtgaacagatggcgaagaggaagaagaagagaaaggggaagaggatcaggaggagaagaggaacaaaaggtaaagagaaagagaacaggaggtgaatagaaggtaaaaagaggaaggggcagagaagaggaacaggaggagaagagggaaagaaaagggaagagaaagggggagaggaacaggagggaggagaagagaaacagaagacgaagaggaatagaaggcgaagaggaagagaaaggggacgacggacaggataagaagaggaagagaattgaagagaagcagaagtggaacaaaaggcaaagagaaaaagaacatgaggggggtagaagggaaaaagaggaaggggaagagaagatgaacagaagaggaagagaaaggggaagagaaagggggagaggaacagaaggagaagacagaagacgaagaggaatagaaggcaaagaggaagagaaagggaaagaggaacaggaggagaagataggaggaagggagg

SEQ ID NO: 37805 - DNA, 968 bp, Heterodera glycines
  unsure (1)..(968): unsure at all n locations
atggcacataaaataaaccattaaaattaaatgcatccctttaaatcatttttgtggcttttaccgcggcacgtgtccattgcattcgcattcgccacgctctttggactgctcgccgctgccggggcgccacggcaaatcgttgtacaaatccttcaaattggcattattttgaaaggacatttgaaacaaatgtatgtacgttaattcacttggcactgttcacaattcaacccttttgtgttgtgtttgcattcgtaaatgtcatggacaacctcataagaacggctttaaatcaacaaaataataataattaatcaaattgaaaattgtggcacattgccgcgcctggcatggtggccgtactcatattttgtgtatcatcgtgctgaattaagatttaatttgaaaaatattcaaaataggaaactctcgcacattttggcgcactgcaactgcacacaatgcaaaaaaaacgtccaaaattgtgtataaaagtcgctgttgtgatgcatttttctcatattttactaaaggggcgtaacacaacgagaagatggcgcacccagccggagatgtggtgagcgattggtgcttttcattttcttctatgtcatttcattttttcaatttttcagaccgacgcccaagtgctggagatgtcttccgaccaaattgacgaacgcgtacgacagctcgacgaagaaattcgcgtcatgagggacgaaatgcgcaaaattgcgtacaacatcaaaacaatgggaacgaagacgaaggagaacaacaaacagatgcagaaagtgagcaaacaaacaaaaggaggaacgacaaatttatgacgaaaagcattttcagtacatgaaaatggcccgtggctggtggncaatggtcgtgggaaatctgngacctcgcggatgaccaaagcggaagggagaaagaaggctcgagcagcgacttggacgcgcgtc

SEQ ID NO: 37806 - DNA, 1128 bp, Heterodera glycines
agtactattttttttttacagagattctcaaattataataaaaaaaatgaacaacgagaatggaactcttccgagtgtcagtaccattaaaaagaaagccaatgccacggggggaggttatggcgtcgtaattcattccttcgattcgcaaaacaaaaacagtgcacaaagcattgtctacgtggaccacagtctgtccattcattcagactgactctcggtttgctcattcgctgctttttgttcagatcgacctctttatgttgtgccacgctatctcttcgacgtcacttatctgaccaaccaaggcttctccaagtcgcaagtgaacaaacggtccatcgaactcggattcggagctaacatccaatttgaatcccgaggcaaccaaattgtctatttcgaccgatgttccaagggacaggactggatcaagattggtgaacaactgctcttacaggacaaggacaggcgatttttttttgaagacaaggcaaagaattacgtgaatataaaatcaaaagcccattcttggtcctcttaataatcgtttcaaatttagttcattgatgcaaaaaatgcgaatattttggtgggttttgcctttgcccttttgtggactctgtcccaattcgcttgactccgtctctttgtcagcttcgtgcccacgggtgtgtgtcggatgaagaagtgcgtcgctttttctgccattccttccattccgttgattcgtttcgcgtgccttacgctgaactacaaaaagtgattccgaatgttctgtacgatttgtttgtgaacatcgacttggacatgcacggctacgaaccaaacatggaaagcgcccattgtcagcccactttctcactctctttcaaccgttggcacaaagctctgagatgggagttcgagaaaatcagagcggcggtaactgttaaatgttcacacgttaaacattcgcaattcagccttggcacaacattccggtcccaaggatcacttctatcaatcttcggtacattatccgtgcaattaatccaccacctgttagtcttgtacaatgtgaaggcaagaagccatgttcggctttaggctgtttattccttgtgcggtgtgttgatcagtgagaag

SEQ ID NO: 37807 - DNA, 882 bp, Heterodera glycines
tatcgattagtgatgtttttagaaaattttcgattttttccaggaaatagaaaaattttttggcctaagcgggacatttgagtcccgggcccataactcgtcgggggttggttctagccaaaaattgccttagagcaaaattgtagagcttttaaaatgctatcgaatggtgtactacatgttcgaaaattttcaaaaattttcgagctaggccccctagaaatttttgaaaattttttttgggttgaaaatgggggtgaaaaatttttttctgtggtattttgaaatgctgattacgaatatgacctttgtttttcgtttcataatttttagaattttttaaaaattcgaaatttttttcattttttttgaccctcgggattttggggtaaattttgaaaattcataactaacctcagggtaagtcaattttcatacaacaaagctttaaaaatagcaaaaaatcaggagaattttatgggttttatttagattttctatcatgaaactaaaaaaagttattccagaagttctggaaaaattcgaattttcagtaaaaaattcataactcggttctgaaaagatattttggaaaagtaaaataatataaaaatccgcaattttttgctctattttataaaatttatttggtatttttatcacttctttaaaaaaagatataaaaataaaagtgattttgtgcttcgggtccaaaggggggtgaccaggatttttgagtgaaaaatttttttaaccaaaaatctttcaaaaacatgtcattagggctattttatgacgctgatcacgaatacgtgatcagattttacttttgacatcgttaaggtctcagaatccctgtgtgattggggattctgaggcatc

SEQ ID NO: 37808 - DNA, 287 bp, Heterodera glycines
gggtctcattttttatcccatctagcagtcccgccgtatcgtgcgcgatgtgggtcagatcgatgatctacaggcaatgccattcccctccccctcccctcccctcatcccatcctcttattcagcccgaccgaccaacactacgataaggaaaggaaagggaagaaatatgtgaagaggaatggaaaagagaatgagtggggacgatggagtggggaaaaagaggaggaaaaaaggaaaacagacagacaaagaaacaatgaaaatggggggggggcaaaggaggg

SEQ ID NO: 37809 - DNA, 488 bp, Heterodera glycines
tcactcgttgatccgtcctttttgctggcaaatgagtgggaatatcgttttcgcattttaatttgctgctttttccctaatggatttcctccaactaaaaatagccattcctttttttgttgccttcggggcattaataattgggcaattaacggctgaatgaatggctaatgagttgggctatcagtgtaatgagaaaagaatggacaaatttggtcaatcgtcggagaatgtgaaaaattctttgatcgattgggcgggaatgaatccttttttatcgccccgcttttttgttgttgttgtgcccataaaacattgtgtgtaaaacaagtgtagtaacacacaagcaaagcatgaaaagcgcaaaagaaaaagcaattagaaaatgggggggggggattaattataggcaattaggtgggcggggggacaaagggacaaagtcccgtcaacgccccgggcgatgaacggtgggaggtgccttttta

SEQ ID NO: 37810 - DNA, 876 bp, Heterodera glycines
cattcataacaaaaaaccccaaggcatatacatacattccccccggccagagagaataacattaacatatcccttatgagctgtatttgcatgattcatggctaacagttttataattgatcgatcagagtaatcaactgatcatgacactttatggcactcactcaacaaatttgtgatgtaaaatacattatccaaaccagattagcatggatcaaatattgctccactccatgggcactaatcacattttggtctgcagttatttttgcggtttttcccttctctgtacataattaatatccaaaaacaaattgtctaacctgtaaaaatactccctatcattaattcaaaaattaaattatcaattcttgggcgttttttttcgtttttcatggtgatggtctcgttggtgatggtggtagttaatgtgttgatccatttgcttatttattctcttttactgctcattttgtcctgttgttgatgttgttgttgttggcttattattttttgtttctaattaatttgctttttcttttggtgatggtacgcccttttattttccatatttctctctggcctagtaatgtgcaaatttcaaatcggcatttctgatgacgagactttgataatcggaacggattttccaattcaagccaattctttttaataattttatgagaagtccattccggtaggcttcttcccatcgcacaccagggatataactgagttctgattttccaaaactttttgaggcgtcgtaattcggtccctatcgcattactttaggactggtggtcaactgagccccgaacaactgtgcccttttggggtataactcatttcataattgttcaaattgaatgaatt

SEQ ID NO: 37811 - DNA, 873 bp, Heterodera glycines
ttagtcccacaaatcccgcaaatcccgcactttccccttttgcgggattgcggactgggatcctgcaaaatcccgcgcgggatcccgtcccgcgccggtctctagtaaattgtactaataatggtactagtcggggttgggtcccccctttgggtcgaaattttttataattttattttgctttaaaagatcctggaaacaaatatccgggggttttcgatgaaacccaggattttcagaattctcactattgctctaaaagtgattagactaggtaaaagttgatacaaatcctgagaaagcatctaaaaagatatcatacttgggtcgctttcctaacataaagagtcaaatttctaatagaattcttattgatgtattatttgagctagacattgaatgcatattgtcaagaattgttagattgtaatgtaacatttaagatcaacaaagacgtatttccagtatttagggtagttcttttcatacaaagaatttgggtccaaatgtgtaaaaccatgtaaaattttataagtagataggaggtcaaaattttttcatctgttttcaagagtagctaatctattaaacagaagtcgttaatttttattggataaatgcgtttattgagctcctttcttaaaatcaatcgcgcttaaaaaaaatgtgttttcactagaaatcgcgtcccttataatacatctaatcataatattattttggaattttttataatattctatttattgaaagaaatttttataggtaggattcttttttttgaaattttgaaaagtgaagatgagctcattttaaattgactaaaacctaaaaccctcagttctgttcagaacatttttctaaaaaaataaa

SEQ ID NO: 37812 - DNA, 852 bp, Heterodera glycines
  unsure (1)..(852): unsure at all n locations
atcctatgaaaatcccgctcccgttaaaatcccgcaccttttctaggcatctctctctttctcccccctccctctttatctttcttctttctcccacatctctcttcctctctctctctctctatttctctctctctctctcttttatctctgaattttgcattttttttatttatccttctctcatagaaacaatcgcgtcaaaaaaaaagattcaaattctttgtttactttgtgacatgaaaggcaaaaattatttctcccgttctttctctcttcctctctctctcttcccccctctctctctctctttctcccccctcccactttatctctctctctttcttctttctcccccatctctcttcctctctcccacttctctctctccgccccactctccctcactttctctctctcttttcattctctttccctctcctctctttctttctctctttctcttttctttctttttatctcctctctctttttctccctctctctctctccccctctcgttctctctatttttttctctctcccccatttccctcttttcctctctctctctctatttctctctctctctctctcttatctctgaatttttcatttttttttaatttatccttctctcataaaaacaatcgcgtcaccgaaaaaaaccgactggcgatttgaagcgacataacccgttaataacaatttttggcataatatactgtttgaaattcgatgggtttttgatagagcccgggtaaaaaaatttttccgggaaacgggaaaacgaaaatgaacgggngcggattcccgaacgggattcccgcctttttccccgttcccgtaaaa

SEQ ID NO: 37813 - DNA, 945 bp, Heterodera glycines
  unsure (1)..(945): unsure at all n locations
ttcggaatatgcgagttcggccatttttcaccgcccattttttcccaaaagaattttcctccgtttttaggaccgtgtcgaatacagtcgcacttggcagggcatttattttaacatcgccggccattttttctccgtttattgcatatggaagctgatcatttgcacggcaagttcattttttataaattttgtttgaaatttaccttttttcaggttaatattgtgttcgaccgcgtcggaaaggtcgacccaatcaccaaaggcattgaaatcattgtcaaacactttggctaccaaattgacgtaagtcaattgcctttgtttttgctaatcatttgctggcaaatgccttttttcatcgaatttcccaatttggccctttttaggtccctttttggtcccagcagtgctcctttttggtgatcggtctgatcgccgtcacatccatccgcggccttttgctgaccatcgccaaattcttcaacgccatttccaatcgccagtcctccaacctcattgtgctggtccttgcccatgtcatggtctgttgtgccgatttgaggactgttcagtgccaaaaattggcatttttttaatttcagggaatgtatttcgtgtccagcgtccttctgattcggatgaatatgccgcccgaatatcggtaaacctatcaaattactggcaaaatatgctattttaatcaaaaaaaaaagtttttcctggacaatttattaacttacggtctttcaaatcgactattaaaaaatgtcagacatttgctttctctctctctctctgttcagaacgatcatcaccgaagtgcttgnggaactccagttcaatttctaccaccgatggttcgatgtgattttctcctttccgcactctcttccattctctttttgtacttggcgcacaaaagacaccaaatcaataggcaaa

SEQ ID NO: 37814 - DNA, 1706 bp, Heterodera glycines
  unsure (1)..(1706): unsure at all n locations
gacctgtgcccatcagcggacggggcattggtggtgccaacgctagcccacaggacnagcaggtaggtggtgaataggaatcacttgggtaatgatccagcagcaggttcacctacagctaccttgttacgacttttgcccggttcaagccactgcgattaaatcggttccagtctgcataccgaccgaagccggaacactaaccgtccccgaatttctcgaaatggctcagtcccgggcagcgacgggcggtgtgtacaaagggcagggacgtattcagagcgagttgatgactcgcccctacaaggaattcctcgttcacggacaataattgcaatgtccgatcccaatcacggcaaattttcaccggtttaccaacccctttcggggaaggacaagcacgctgattttgccagtgtagcgcgcgtgcagccccggacatctaagggcatcacagacctgttattgctcaatttcgtgcggctgaacaccgaaaatccctctaagaagttgtgcccacagaagcaatgagccaactatttagtaggctagagtctcgctcgttatcggaataaaccagacaaatcgctccacgaactaagaacggccatgcaccaccatccaccgaatcatgaaaaagctatcaatctgtcaatccttacggtgtccgggccgggtgagtttccccgtgttgagtcaaattaagccgcaggctccactcctggtggtgcccttccgtcaattcctttaagtttcagctttgcaaccatacttcccccggaaccggaagactttcgtttccgggaagctccccaccagggcgaataaatccgccggcggatcgctagttggcatcgtttacggtcagaactagggcggtatctgatcgccttcgaacctctgactttcgttcttgattaatagaagacattcnttgccaaatgctttcgctgtagtccgtcttgctacggtccaagaatttcacctctcacgtagcaatacgaatggccccgtttgtctctgttaaccattatctcggtcagcaaaaccaataaaatcggaccgaaatcctcttctattattccatgcacgaacattcaagcgaaacgcctgtttgaagcactctgatttgttcaaagtaaactcgccagcccaccgacgccgaccggtaaaggccaacgccggggagagaccggcagaaaagccaaccgaaccagtaacacacaaagtgtgcaccggacggctagcacagatccaactacgagctttttaaccgcagcaataattctatgcattttgagagctggaattaccgcggctgctggcaccagacttgccctctcatagatactcgttaaagggtttaaattgtacccattccgatgaccggcctcataagagatcggtctcgttatttctcgtcactacctcctcgcgttgagagtgggtaatttgcgcgcctgctgccatccttagacgtagtggccatttctcaggccccttctccggagtcgaacccttatcctccgttacccgtcatcaccatggtagtcagatacactaccatcgaaagttgataaggcagacacttgaaagacacgtcgccggtacaagaccgtgcgatcagcttagttgttctgagtcaacactggacgcccggagggcgcttggttttgtggcgaaaaatgcgctccgctctggggaga

SEQ ID NO: 37815 - DNA, 1110 bp, Heterodera glycines
ataatacggaaagacgggaaggcctaaaaataatgtttaaaacaacaaaaactgtgaattgttacgttttacatctctaaattttttccgcttttcgcattttatttttcaattttatgttaaaagaacaaaacacagctgaaattttgaaaattgtgttgagctaaaggcatgtttttgaggaatgaaaatgtgcccaaaaaacaaacctccgatgtcgccgaccaccaaaaaattcagttgcgaggtgtcagacaaaacgcatcccgcctcagtgacacaggacaatcggccgacggttgtcagcggaatttggcggttggcatctgttaaattaacggttttatatacaaagaaattcgaaattaaattcaatttgccaatcgacgccttgctctgaaggtgtgctgctgaaagagtgaatgtccggcgggagaaggaacagcccggagatgaggcaaagcattgagaccattgcgctagcgaggagcagaaagaggaggacgaatttggtgttgcggggaagtgagacgaagggatgcaaaaagtgggagggatgagacatggcgaacgaagaaaacgaagaagtgagggggggggcgaatgacaaaatgagaaatatgacggaagaagcgacggggatggacggagaagggtcgatgattcacctaacgccaatgaaggcggtcgctcaacgaaatgaatgcgttgtagttctctttctttaggaatgcatcaaatgcaaaaacagttaacgcaacccctcttttttatcagcaaatcaaacaatcgcatgttttcgttgatgattattaaggtttgtaattatatggatataaaaacgcgaaatatggccataaaatatggacaacaaatagtgaaatatggacataaatttttccaaattaaggtgtaaattttcaaaatttcttcaaattcgctcaatgtaaggcaaaacgctcaaaaatggctaaatactatattaaaaattattttagaagaaaaaacacgatataccttaaaatttactcattttagcgaaaaatcaacctgaaaagcgaaattttcgctttttgtttatttttacataaattaacaatttttaagaaa

SEQ ID NO: 37816 - DNA, 810 bp, Heterodera glycines
aatatttattaattttaattggggtgaatattaattaccttccttaagttctatgattttaaatgtatattatataagaatctaatagggttcgagccccgctcccgcccccgtccccgggacgggacaggtttttggggctcacccccgtcgccgccctcgtgactctgatcccagcatcccccgcccccgcgacctttttttaaaatatttgtggtttagtggttagtgttctggttttggggtacttactaccttattttcatctaaaaaagggaaatttctaaaaaatttggctaatttctaacaaaattcaaataaagtcttaaaaattttccgcttgcggcgcaaatcggcaccactggacctctcccctcgcacattcaccaagttttttggaaatgtgccgcaaaaaatgttaaaaatctgatttagtgatcccgaatgcactgaaatttatgaaaaatataataatagaatacattttggatcgaataaaatgtaaaaatatttgaagcaattttgcaaaatgttcttatttttgaccctaaaatttttagacaatatctgtgcaattatacctaaaaagaattgaatcgaggcgatacatcgaataaaggaatgtggagccaaacacatcattaaaaaaaattaatttttttttgtgagattttcaggagctaattaaaaacaaacccccgcccccgtccccggtggcgagaaatttctcacccccgcccccgcgactctgacccccgccaacccccgccgcccccgcgaaaagccacccccgcccacggggctcgaacc

SEQ ID NO: 37817 - DNA, 1232 bp, Heterodera glycines
  unsure (1)..(1232): unsure at all n locations
ttaatgatactantagcaaacaaatganggtgtttttcaatgcaaatattatctattttttggcctaccatcaaaaatgtgagtcaaatttgctgaattcatttaaaaacttatttttctattaaaatttttaggacaattttatgtttaaaactgcaatgcaactgtcaattattgaaaatggaatttgttacacaattattatcatttgtggattcaaaattgccaaatttgtcaataaaaatgcatacagaaatgcaacatgtggacaacaggttcacaaacagttgacaatcaatttgataattaaggtctattttaattaaaaagaacgatttttaaaataatgaaatttttagaaatatattttaaaaattatatgataaaaattctcaatttgaaaaacttcttaagaaaattggtagaaatttttaataatttattgataaaattgctaaaatctattaaaaaaaaatcaaatgcatttttaaacaaggagttatcattctaaaagcggggcttaatgatgcccaaaacaaatgagatttcaaaaagaaatctgataccgtacactcaattacaaaatttggccatttaattttttttttaattttgcaatttgcttttaggccctgctaccgttagcgatgaacatcctcaacttttccgtcgccatacaactgctattcttccagacggaaatgtcgccaaattttttgtttcttcaaatgtgtgcgtccgttcccgcctattggctgcccgtgctcaacccgttggttacgatatgtacagtcagcgactaccgtagtgctgtgaccatactcattcggtccacaacgagaagccgaagtcgggattccggtgtttttgctgctgctgatctgccccaaattcgtgtaatccgcccaacgaattatgccaatccgatcatcaacaattatgtttaatgaaggagttatttgtaccaaaattgcatttttttttcccctcttgaagcaaaatttctttaataaatacaattgggaatgttagcctccgttttcaagggttttaaatattttaactataagtttattttggtgcttctacgccatgttattttaacaattatgagtagggatgcgatttaggcacaaaaaatcgcgaaataggcacaaaaatccttgaataggcacgaaaataagcaaaaaaatttttttattaacgctttttaggtagaaaacacataaaaa

SEQ ID NO: 37818 - DNA, 692 bp, Heterodera glycines
agattcggattctccgatccttaaaacctcttatatgatcattccaataagggacctgtgattttggaaaagaaaaaattgcaaaaaaacacaccttaaaagatgaaattgtgagaggtcggcaaaagattaatttgttcatacaaaaataaaaacaggaacatccctggaaaatgcactcgccagttgaaaatacctaccttaatttgaatttagaaaatttttttacattaaaactgcacgaaaaaaaattttgaagttttttaagcgatttttaaaatttatgggcaaccagcgagaatggggaaacgcagtgcacccattcggatcagtggtttttaaagtgatttggacggcgcaacagctcggaatgttcccgtgtgaatgggtgccatccatcggagtcccaatttgatcggtgtgccgtgccattcattcatttgttcctcccacctgatcagattggccacccgcactgcgttcagcaggtccctctgctgcacaaagtgccggcagcgggccaacagctcgtacgggtcgtatctgttcaggtcgagccggtcgtcggcggagtacgcgtagggcagctcgaaggtgaacagcgactggagccaggaggtgacgtagcgccacagagtgccgccctcgtcgcctatctgtgccgtgcatcggtgcaatttgtacacctggca

SEQ ID NO: 37819 - DNA, 901 bp, Heterodera glycines
taggcttagatcacatgcgattttcgccactctgataattttagcgctcataatgggatgtataaaggcgattgtagaaggaattggaagcgctaaaattgtttgaggagctttttgagcgtaattacgattttacttacaccatttttttctaggcttagatcacatgcgattttcggcactctgataattttagcgctcataatgggatgtataaaggcgattgtagaaggaattggaagcgctaaaattgtttgaaaagctttttgagcgtaattacgattttacttacaccatttttttctaggcttagatcacatgcgattttcggcactctgataagtttagcgctcataatgggatgtataaaggcgattgtagaaggaattggaagcgctaaaattgtttgaaaagctttttgagcgtaattacgattttacttacaccatttttttctaggcttagatcacatgcgattttcggcactctgataattttagcgctcataatgggatgtataaaggcgattgtagaaggaattggaagcgctaaaattgtttgaggagctttttgagcgtaattactatttttacttacaccattttttgctaggcttagatcacatgcgattttcggcactctgataattttagcgctcataatgggatgtataaaggcgattgtagaaggaattggaagcgctaaaattgtttgaggagctttttgagcgtaattacgattttacttacaccattttttgctaggcttagatcacatgcgattttcggcactctgataattttagcgctcataatgggatgtataaaggcgattgtagaaggaattggaagcgcataaaattgtttgaaaagctttttgagcgtaattacgattttactta

SEQ ID NO: 37820 - DNA, 188 bp, Heterodera glycines
tgaaaagttgcaaaatccaacgcaacgaaccagcgtaaagccaacgaacaattgaccgtatcaacacacacaagcaggagaattcactccatagaaaagaggggggggggggggattggatttgtaaagtggcagcagtggtgacggattactttgttggactttgctggagcaggaaaagtgagggg

SEQ ID NO: 37821 - DNA, 1661 bp, Heterodera glycines
  unsure (1)..(1661): unsure at all n locations
ttacctgataacgaatggatagattagcgagccaaggttttgcatcattttntgataaatttttgaattgtatcggcataactggtagaaaatgcctaactcaatgcttccgatcagcgattggacggcggttgtgatcagatttgttctcggttggttttgatcagattgtgtggaggtggagaaagcgaatgtaaatgggaaatgatcaactgaataccaaataaaatgcacttaattagtatttcgatctattagagtctgtcgtgcccaatatttgtgtttttattataattgattgtaactggctaataaattgtaattatcccaccgcaaaaggcgtccacagaatggtgaacaggtggccacgattcttttcatatgtttggacaaataaagtggccaagatgcgttcaacaatcagaacgtggggtacaaaattacgggagtaaatgccgatcaaatacatttttataagtgccggaaaaaactgcacgatattcggcaccaaattggtcccaaaagataaatttgaatagacaaatgataaaacgacaggaaccacgcttaatttgcaaaaaatgatcgatgatttttaagtacggtaagcttatgattggaaaatataaggacataacgtgaatttttccaattaaaattttttgatttattcaatatttaccaagagaataaagaaactctggaagatgagaatggctttcgatgttcgggtggatgaccgatgtgcgagccaccgaaaatcagattggcaatggacaacggaatgccaacaaatgtggtcaataattcaacggcatcgccgcagaacaaaagaaatagttcataattatttggtgccgtggtgttcaaagatgtcatgttagcaattagttgcttaatttgtttaactaaaaatattaaaaaattaaaatttccattaaattttattcgttgcttattttaattgcaattaaatttgaattatttcgcaataaattttgattgaatttgtcaaacacttatcctttgctttccaactttaatgaataggaacaattttttttggtaatagaaattattaaatgaagcggcgattaatattgttcagaatcacttttgttaattgccaggtgtaaaatgaaataattgttcttgacatgcgattaatgtttacagacaaatgggacaaacagatgcaaaattctctcaacaagtaaagcttttaatgaaataattggcttttcaaaatgcaattattaaatttcaataaatgatgaaatataatgacatttaattagagttgagcgggacctggaattttgggcaaaactgggaccgggactttttggctgggaaaaccgggaaaaaacccgggaatttcccggtcccggtcaaaaccgggaccttggtactcagttgtactcagttggccgtgtccaggtcccggtcccgctcaactctacatttaattaattgctatgaataaaataaaaagataattcattcagtttcatattaataaaataatttcatatattttatattcattattatttatatttgttccatcatttatgaataaattttagggttgggcggtgcgcttttttgagtttgttaaaggaaaaatgaaacttcaattaagaaatcagtcagactct

SEQ ID NO: 37822 - DNA, 863 bp, Heterodera glycines
aatggtttgagtaccccaaacggacacttgaaaaaatccttttttttgttttcggggcagtccccccgaaccgatgcgcccagatttatggggagaccgaatccttccggaatagcttccctatagcctgtactttaattctgcgttggatttttgctccccataattgtttgagtaccccaaacggacacttgaaaaaatcgatttttttgttttcggggcagtccccccgaaccgatgcgcccagatttatggggagaccgaatccttcgggaatagcttccctatagtctgtactttaattctgcgttggatttttgctccccataaatgtttgagtaccccaaacggacacttgaaaaaatcgatttttttgttttcggggcagtccccccgaaccgatgcgccagatttatggggagaccgaatccttcgggaatagcttccctatagcctgtactttaattctgcgttggatttttgctccccataattgtttgagtaccccaaacggacacttgaaaaaatcgatttttttgttttcggggcagtccccccgaaccgatgcgcccagatttatggggagaccgaatccttccggaatagcttccctatagcctgtactttaattctgcgttggatttttgctccccataattgtttgagtaccccaaacggacacttgaaaaaatcgatttttttgttttcggggcagtccccccgaaccgatgcgcccagatttatgaggagaccgaatccttcggggatagcttccctatagcctgtactttaatctgcgttggatttttgctccccataaatgtttgagtaccccaacggacacttgaaaaaatcgatttttt

SEQ ID NO: 37823 - DNA, 942 bp, Heterodera glycines
aggtcaaaaccggaaaagtaccaaaacaacaaaagacgggcagaattgcaaaaatatttattccaattgaataaattaacgaaagggcatttgcttcccacttcactattctaattttataacccttttccaaaaaggatctctaataaatttcgaatatgccaaaaaatgtagcgcagatccatttgaagaaatcttagcataaattgtggcatttatgcccccaatgtaattttggcggtgctaggttattgcgcgaagtgcaaaaatgatgacgtcacaaaaagggcgtttcgcgaaaagtgcaattttaacaaaagagaccgaccacatcagtaaggtgaactttgtgttaaaataatttttaattatttaaatttttaattatttcaaatgtgtatttcgaaaggcaaagcaaaccagattataataaagtttattatttattaatacattaatttttaagaaattcatttaacattattttaattactcgtaattttaccgtactcattgtcaactaacaaacgattaagttttcatttatgtaattagataaatgtataagctggttggagcctttagcaagctcgaatataaaaattatttaagctttctttgctaaaaaaattaaaaataataagcttaattaaaatttggtttactttgcttgtcgaaatacacatttggaataattaaaaattattttaacataaaagtcgacaccatactgatgtggccggtctcttttgttaaaattgcatttttcgtagaacgcccttttagcatttttcgcgcaatgacctagcactatttggtgactatgataaatacatgcaatgcttgaagttgttgagcgatcgtattgacacaaaatagttttttttttaaaaaaagctcaaaatttaaattgaaaacgttacttgagagagaaatacttta

SEQ ID NO: 37824 - DNA, 925 bp, Heterodera glycines
  unsure (1)..(925): unsure at all n locations
tttttaaaatgtttcttgctccgtcccacgctgtcattcgatcagaaccgtagccaaaaaactttcggaggtaggagggaatccgaagagctttatttttatctccgtgattcaaaatattttgtccagtgatatgtgttctttttcacaatttctgtgccgggcgaaaaagcggtggcaatggtaaagaattgtggtccctaatttacatcaaaataaagttgttaaatgaattagaatcttttaccccagaaaaatgcatccttggaaaaaaatttcacctttttgttcgagttcgggtaaatccgagttaagattcgtaatcagcaccctcgaaatgatattttttggaagcttctcttgaaacttattgtatataaggatataattgtgagaacacctgcaaactctgcaaatacgcgtcccatcggttgccgatcacttttccgcacgtaaagcagcgaattgggatgatcatttgtgaagggaaattggaagacttttaaaagctaaaatcatttctcaaaaaagtgaaaaaagcaaacactggttttttaggagtcaattaaatgcaaaaatgacattttcaaatccaataaaaccaaaaatgagatgaataaaaatgaaatgaaatatttccgttggtcgacggatgaaaaaaatgggaaaaaaatgagaatataatttattaggccaacaaaaaacagctaaataaaatataaaaagcacaaaacgttctctctcggccgtccctcagcatcgaatgccttgcgcaacggtcataaaaacgccgaaggaaccgcccatttgcgccgcgattttgcccgtctgtctgagcaactcgcgcccacggaggcccatcctgggaaagaattagcaaaataaaattgngaaatatgtacaaattcagggaaaatattttcat

SEQ ID NO: 37825 - DNA, 1290 bp, Heterodera glycines
attgcgcccttctcgaaagcccacctctgcatccgcttctcggacatcggcagagtccgatccgtccggcagcccaaccaatttgtgtttttcaattccgtgtcaaccattttgcgggtttcatgctcttcgtcatcatcatcgtctgtctcttcgtcgtctttgcccgcttctgtccgttcgtcgtacgtttccccgtccactttagaccattgtcaacgcggttgctgcctttgtcggtgccatcgtttgtgctatcgtttttggcttttcgctgttggcggtaaaccattggcaccgggtcaatgttggccaccagaagtgccatcatttgctgtaattgtctcgcttcttcctgctcctcctcctcttcttgttgcttttcgttgcctctgtttgctgctgtactgcttgtcaatgttgccttctccgcctcctcctcttctgctcgtacggcatcgtagtaatcctccctctctcttaaagtgattaatgccattggtgccgtcggaaaatttaaaaatttaattattatattgtgaataacatattccagggatggcatggaattccgatttcgaaaatttttgaccctcggaattccgatttgcaaaaatttttggggccttggaatggtatccctgacacatacaaatatttggtgtcaaaactcaaaatggcataatatttaaaaacccactctgatttatgccgaggtgtttttggatgcaaaatgtaaggccaaaaggcggcaggcggcacacttttctcttcaacagatttcatctttgggtcaccattgcaattagcaatgattgttccgaccaacagaaggaatagagagagtgccatatcttttttaattaaatgtgaatatttgacctacaattaaagagagataatttataaaaggtgctaattaatgtctatgtaaatacgttcttttctcgggccaattacaatagaacgatttgatatggatgtgactaatttaacacgtacaaaatgccaactaaaaatattttcttcctccgactgactcacactgattcgttagtcggtcgtgaaatcttaggcttaagttcacatagtcttgcttacatagacacatagttaccttcattattctttgttcatgataaggtctaaaatggtcaatcaaattcttctgcttaaccaaaaatcttttgcatcgcttctcaactgggacgtcattccaatgctttcaagggtttggttctcacagtgcaaactttgtttatggcgagtgacctacatcttcctcctccc

SEQ ID NO: 37826 - DNA, 913 bp, Heterodera glycines
tttttaaagttggactttgttttttaaaatccataattttaccaatacgtttcgaaaatttctgcattgaacaaattaataaaattcataaaatttaaaaacaaaattttcccgtcgaccctaaaaatccttattttctctcagctcaaaatcgcaaaatttgggtcatttgttggtgcaaatctgttaacaaatcctcttcggtcctcatgtagctttttctcatggagcgggttgacctcctctactatttaatgtattaaagttgtgcccaaaatgtttaaataagcatgtatttgtgctcttttgacaaaaatttttttcaaacttaagaaaaaattttcaaaattttgcaggctaacagaggaaccttaaatgattaaaaattttgaatttcgccattcatacctcaatggtactagttgggtttgagtcccccttttgggtcaaatttttcaaaagcgtaaccagacagtcagacagtgcactatttccttctttatttttctcacttcttcccttttcccacacacaatgctgctgcacagcgagcacacggctgtttactgtctaccagggatgggccaaattgaaaaataaaaagcgaaatgcgaaaagcgaaatttgcgaaactgaaaaatgcgaaatgaaaaaaaaagcgaaatgcgaaaagccaaaatatgcgaaaatgcgaaaagcgaaatgcgaaaagcgaaattttttctacaactttttaatagttaaaatcataaagcaaaaatcatttttttaaattttattccacatttaaaaatcaataaaacgcttttttgaggcgcgctttttccaaaaaaactttttgggaagagggggcaggcggcgccgggaaatttttgaaaatttgattaaaatttgttgacagattttcaccaaa

SEQ ID NO: 37827 - DNA, 601 bp, Heterodera glycines
gccaagatgggactcatattgttgcatcaaatcctctttcactttttcaaaattttcatatcctttaattaacttattaaacttctcaaaatttgttgcatgtcctttcacaaattctgaaaataaagcatcttcaacctaaatttgaatttatttgaaatttttttttaaataaagctaacccaattatctaagtccttgaagttcggacacaaaattataaaatgcgtattatttcttgtgccatttctttcacttttttatgcatttcttccaaatttttgtcgaaattttgtcgaattattccgtctaaactttcatttgtttaccaatcattcgctatgtcaattgtcaattgcaaaatgatttcgttaatggtcttttctttttcattttctaatttaataacataattcaatctctcatcattcaacttccaatatgattgaacattttgtttaatttattttcatatttttgtcccaacgattttataaaataaaatgtccaaatatttacgatgtttttggcattctgtccgttaaaattcgtcaaattcatctgcaattttatcacattgccaattctttctcataaaata

SEQ ID NO: 37828 - DNA, 951 bp, Heterodera glycines
  unsure (1)..(951): unsure at all n locations
tttcnggggtactgtatttaaaaaaaattttttaaaccgttcgggtgtgggggtggaattttaccacattttttcctcattattctgtaattttaataaaattttttcctatttaaactgtaattttctaataaaaatttatacatttcgacggcatcgatattacataaattttaattcgataaagtttggcgtcgttggctgctgctggtcagtgaacgttggcgggcggggggattagtgaagggggggggggcattttttttgcgctcaatattattgagtggacggtgtgtgtgggggggtcatttttctctttttctctcccccacatttatgttgttatctcttcttctctctctttctctatcttttttctctcttccttttcattctctatcgcacacagcgcaatgtgccgtagagtggactcatacagccaaaaactcaacaacaatttttagcgtctcaaattgattttttgtaattaaactttactaacatattttcccaacaaccctttttttaatttattttaattcttttcaattgccagccgtttttaaaaaacttttacattcccagcttattaatattttaaattcttttcaattcccagccgatttatatttttatgtaatcctttcatagcttattttttaatctctttttcttgcactttaatttttgaaatttttactcaacattaataaaaaaattaacagatgatttttgatcgatttcaaaaacatttttttttgaaaattcccccttttcaaaaatggcgcatttctttccccgttcaccctccccgccccatgctcgttccctgtccatcacgcccgcgcctcggtcggcttggtttaggcgtctcctgcatttcatccctctcctcctcctccagccctctaagcttcttcgcctctctcgctttatctcgctgtctttttc

SEQ ID NO: 37829 - DNA, 932 bp, Heterodera glycines
ctcatagtaaaaaattatttcgttagaatacgagaaataatttgaaacgaaacactggttactaatttgcatatatctctgcgaaaattccagatccaaaaaaatcagctataccattcgaaagctgctttcaggcgctctcagaaaacagtaaaaacgctcctattcatgcactaggcgctgagatatatgcacttgactttctgcatataattgccattctccgcagcaaacttcgcgttctcaagcgtgaatagttaatttttttgtgctgaactgtgtttgggttctccttgcagtgcgctcaactaagtctcttggagttagagcatttttcatggtattttcaagaaaattgtgcaatgtgggcgacccggaacattttagacagtttccaaaccaaacactcatagtaaaaaattatttcgttagaatacgagaaataatttgaaacgaaacactggttactaatttgcatatatctctgcgaaaattccagatccaaaaaaatcagctataccattcgaaagctgctttcaggcgctctcagaaaacagtaaaaacgctcctattcatgcactaggcgctgagatatatgcacttgactttctgcatataattgccattctccgcagcaaacttcgcgttctcaagcgtgaatagttaatttttttgtgctgaactgtgttagggttctccttgcagtgcgctcaactaagtctcttggagttagagcatttttcatggtattttcaagaaaattgtgcaatgtgggcgacccggaacattttagacagtttccaaaccaaacactcatagtaaaaaattatttcgttagaatacgagaaataatttgaaacgaaacactggttactaatttgcatatatctctgcgaaaaattccagatccaaaaaaatcagctataccattc

SEQ ID NO: 37830 - DNA, 788 bp, Heterodera glycines
aaaatgataattgaatttgattgggtttttttattcgatttttttgcatttccatcaattgtttgttattgttgaaaatccacattttgacgaaaattgtaatattttgttatttgttccgccaataattaatttgttaatgctatttaaatgatattttgagttaattaaagaaatgaatgcaacaaataaataaataaaaatgtgacaataataaacaaaatggcggtgaaattggacacacaattcgacgagaggggggggggggggggaaagcccataattatgggccactctccgccgtgccatgccgtcttctcacgaagtctctctcatcaattcaatgtgtttctactggtggtggtggtggttgtttggtgttgttcggcagtgaagggacactttcaatgaatggatgagaaaaagagggagcaaaaggaaagaggaaaagggagaggggaaacgggggagaagagagagaagagaaagagagagagagagggagagagagagagagagagagagagaggttggaggggggggggaaagaaaacgatagaaaagggaaactgaggagggagtgaaggatgtagggggaaaagaaaaaagaaatgggcaaaaggaaaaataaataaataattaattaattaattgccatgcgagtgatctgctgtaagctttaattgcttattattattattctttaagtaaagtgtttatgcctgctgctgaacgataaaatttgcatttgaattgtttctttggtttggaattgagccttatctccc

SEQ ID NO: 37831 - DNA, 967 bp, Heterodera glycines
tgcctttgtcatttctactaacaataagttttgcttcttttttaattcacattgaattaaatttaatggctataaatgcttaatgacttcaccatttaaaaagttgctttcctgattcaaattcaatatatcccttctggcaaagggaaacaaaagctttctaccaaaagtttcaatttcattaaacttccattaaaataggcttacaatcagaagtgtttttgggccatgtatagtttgtttgttctcagtttgtacagaaattttaactataacaaaacaacaatgatatcacgataaacaattagatattttcttcggtcccatgtgagaacactttcaccgtcgagtccaccgaaccgctgcaaatacggctcggcactgtccaatcaacgcacagcacgcggtccgaatggcccatcaaatcatatagagccgccctggggctgctgaaattggacacaaaaaacattagagcaacagaaaaaaagaatttcttaaaattcaaatcctcgaaatacacccccccccttcacagtcaaaaatttatgaagacaatatttagtactaataatgacattctaaatataaatttgttttaatcattcgctaaatacctactcgacgcttgtgccagaaactcaccggacgtcccacattttaactgtgttgtcaaagctggccgaaacaaacaaatgctggtcggttgagtgccaacagacatcggacacaacgccaacatgaccatggaacgatgccttgaccattgagccatctaatggcgaaattaattagaaaaaaggggaggggcatttagttgggtcaccaacccctggaacgaaaatcccaaagccgaaccaacgaatcgacagaggcggtcagcacaaggccattggccggacagaccgaaagtgctaaaggctttgttcgaagtgagcgtggagatgggccctgaaaaggcagaaaa

SEQ ID NO: 37832 - DNA, 1335 bp, Heterodera glycines
cagataatgctgttcaattctgcagaatttcgtccttatggtattgtttcaccgccttgaatctaaagatccaactttgccgtaaaattgtaaacaaattaaaataccgagataaaatgcgatttgcacttgatgacaatcttgatgaatgtgtcacaggccatgtcctggacaccttcgtgcgactcgtgcatgaattcaaacagtttgttgatcacagttttcaggaacttccaatgacagcgaaggaaacgcgggtattggcccacgacgtacattatgttggaggcaatcaccgctttgttgtctttgccacgcttttgttcacacaaaccaagcaaatctacaaaaaaatatatatttatttggtgcccgaccctttcactcaccgcgaatgactgtgaccaaaaatcgcttctcgtcgtcttcatgcatcgcaccgctaattgagccgattgcccagcacagcttaaatcacttttgaaagacagggaagaaactccaacaaaccgtgttcaaattcttccaggaccactcactgccattaacttgattttgaagtttttccgtcattttcaactcagtgtctcggtagtccaaatgggtcagcaacactaaaatcacaaactgtgaaatttgcctaaataaatcgccaagaaaccaagtgtttcccgcatcgttttgtagagcacaacggagtccgtgtccttcacaagttccctgactgcctcattgttctcgttgacaacgacaatgacttcttcgggtttggccattctgctaatcatcagcaggcgaagttctgagagcacttcgatgtacagcttccgcttgggcgattcttgccggttatagcgcttcagagcgtcgatgatcgaatgttcagattgttcaaatggagattctcgaaacagttccatgcaaagccaattccaataatccaaacaaatctgagtaattggagagagtgtaataagggttccgtaaagaaaagagactttgaacacttcgatgtcttcgacttcgctgctgatcttcaacaaatacttcaacgccatcaaatgtgcttgcttgacagctttttgttcttcgtccggatgaggaaaggttatttcgaccaatgcagaatgttctttgaagaaagtgctaagcaattgggcgaaatttgacacaaatttttggtcttcgttagttccatttgcgtaggaagtggcaatgtcaaaggaaagtggaagttgttccgatataatttcgatgaccttcctgagcaaaaagaccaatttgccgccgtattgcggattgtcatcgatgctgatggacgacacctcaaccaaa

SEQ ID NO: 37833 - DNA, 974 bp, Heterodera glycines
  unsure (1)..(974): unsure at all n locations
atatcacaaaagtgatcatgaaaattgtaaattgggagattattggggacttatcagctcggtcctccgcaaacactgattcagtttatatttagaggataaggagttgaaatggtggaattccaaaaaggtgaccaagaaaattgtaatcgaatattattgacgattatcagctcggtcattccgaaaacactgattcagtttatatttcgcgaagaatgagctgtaattttgcgaattagacaaaaatgatcataaagtaacaaatgagagaatttcacattctgctaattaggctttaaatataaactgtttaagtgttgcagacggatcaggttgataagcgccaataacctcagatttactattttcgcgaccccactttttgaattctgacattttcagctcattacgctctaaatataaacagcatcagtgttccggaaggatcgatttgaaatcgccaataacccccaaattacaatttcctactgtaaacttatacagattacatttggatataagaaattgaaatattgagaatatcacaaaagtgatcatgaaaattgtaaattggagattattgggacttatcagctcggtcctccgcaaacactgattcagtttatatttagaggataaggagttgaaatggtggaattccaaaaaggtgaccaagaaaattgtaatcgaagattattggcgattatcagctcggtcattccgcaaacactgattcagtttatatttcgcgaagaatgagctgtaattttgcgaattagacaaaaatgatcataaagtaacaaatgagagaatttcacattctgctaattaggctttaaatataaactgtttaagtgttgcagacggatcaggttgataagcgccaataacctcagatttactattttcgcgacnccactttttgaattctgacattttcagctcattacgctctaaatataaacagcatc

SEQ ID NO: 37834 - DNA, 895 bp, Heterodera glycines
  unsure (1)..(895): unsure at all n locations
taaaaaacgggcgcgaagcgcccgtatgagttcaacaaaaattgaaaaaccggcgcaaagcgcccgtctgaggccgcgaagcggcattaatagcccaacaaatttagaaacgggcgcaagcgcccgtctgaggccgcgaagcggccttaatagcccaacaaatttagaaacgggcgcgaagcgcccgtctgaggcctcgaagctgccttaatagcccaacaaatttagaaacgggcgcgaagcgcccgtataagcccaacaaaatttaaaaaacgggcgcaaagcgcccgttcgaggccgcgaagcggcctaaaagtcccagataattttttaaaaattccaaatctccacaaccagagctaatctaggtagcgaagctcccaaagcgcgaagcgctttttcccagcccagagccgactgttcacgcacccgctagttatatatatgttagaatgataaggggtttcgtttcaaaaactaatttgagaagaacgggaatagctagggggctgaaattttgcaccaaggggtaactcgtgacggcgcatctgggaaaactataggtttttttctccgagggccaactgagtaccagcggcttattttccatttttgcttgcgtttgaaggcccataactttttttctaaaacataagtcaaaaagtttccgctggtaggaaactaagttgaagtgttttctaaaaaacaaaaaaaattccaggcctctacctataataggaagggctgcagaaaaatggagaaattcagtaccaactttgtccagttcagtccccgttgaataactcattagggtttgacctgagcgcagggtggccagcagacttatttaagaatgtaatgagctcgatttttccanaattttaaaatttcaaaa

SEQ ID NO: 37835 - DNA, 928 bp, Heterodera glycines
  unsure (1)..(928): unsure at all n locations
atatgcaaaaaaatcggaaaatatttgaagaaaaatggcaaaatatgcaaaaaatcggaaaatatttgaagaaaaatgtcaaaatatgcaaaaaatcggaaaatatttgaagaaaaatgtcaaaatatgcaaaaaatcggaaaatatttgaagaaaactggcaaaatatgcaaaaaatcggaaaatattttacgaaaaatggcaaaatatgcaaaaaatcggaaaatatttgaagaaaactggcaaaatatgcaaaaaatcggaaaatatttgaagaaaaatggcaaaatatgcaaaaaatcggaaaatcggaaaatatttgaagaaaaatgtcaaaatatgcaaaaaatcggaaaatatttgaagaaaaatggcaaaatatgcaaaaaatcggaaaatatttgaagaaaactggcaaaatatgcaaaaaatcggaaaatatttgaagaaaaatggcaaaatatgcaaaaaatcggaaaatatttgaagaaaaatggcaaaatatgcaaaaaatcggaaaatcggaaaatatttgaagaaaaatgtcaaaatatgcaaaaaatcggaaaatatttgaagaaaaatggcaaaatatgcaaaaaatcggaaaatatttgaagaaaaatggcaaaatattcaaaaaatcggaaaatatttgaagaaaaatggcaaaatatgcaaaaaatcggaaaatatttgaagaaaaatgtcaaaatatgcaaaaaatcggaaaatatttgaagaaaacgggcaaaatatgtaaaaaatcggaaaatattttacgaaaaatggcaaaatatgcaaaaaatcggaaaatatttgaagaaaaatggcaaaatatgcaaaaaatcggaaaatatttgaagaanactgggcaaatatgcaaaaaatcggaanatattttgactaaaaatgggcaaaatatgca

SEQ ID NO: 37836 - DNA, 601 bp, Heterodera glycines
attttgaattttaccaaaagttaaaacaacaggggggaccctttggtttgcaaaaatttttaatgtatattcatgaaagtttattccctggggttattggggtccatgacctcatattagatgtcagattcgtgatcagcgacctctaaaaccccggataacaaattttcatggttttttatcacaaaaaaagttttgcaaaacaaaagggtcaccccttttgtttttgataaaattcaaaatgcgggacttttaatatagtgcccaattttttcttactttttcgagtaccctcacactctttttttttaataaaaaatcgcataatttcccgggtgttttcccattttcagcttcattatgctgccctggtgtccacccaaatgttggagacactgcttgaacaagaggcgggcaaggcgttgatcaattcgcggaacaatgcgggcgaaacgccgtcaatggtcgcgctgcgggcggtcaatccgttgtgcatgaaaacgctgttcaaccacgggggcgacctgttgaataaatcgacggacaaaaacccactcatcgaactcatccagtccagcaagggcaacacgccggagaatgt

SEQ ID NO: 37837 - DNA, 1017 bp, Heterodera glycines
cccccccccccagcccccctcagtaattagccaattcgtccaaaattggctgaaccataatggcacattttaaatttaaattttaatatttacattatccttatcatttttttctccttttttcttccttcacactctcgtgccctctctaacatttttttaaatttttgttcccaaaataaaaaaatcacttggcttatttgctcattattttcaatccctttcaaacacagtcaactttggcacgggccaattccggttgtttgttggcaaactcactcacaaataacggggcatggcacattttaatttctatttgtactccggttttgcaccccacaaaaagcaaatatatttatttgtaatttcattacagtttttcattattctttacttcttttcaactgtgccgacatttggcacttccccccccccccgcccccaacagctgtaccattggttgaaatgccgaaatgccaaaacaatgaatgccacctttatttccattaaacgtaggttttgcactccaaaaattctatttatattttcaattatttatttatctctcgtgcctctctaatatattttttgatttttaaaaatttttgtttccaaaatataaaaatcgcttggcctttttttgctcattatttttcaatccctttcaaatagtgcccacaaaacgcttttcgtgcattatataagaagaaattattttttttggtactgaagtgtccattttcactgggactcagttgtccaagtgcttagatggcgttggtttgatttttaccgcttttttctttaatctttcgacttaactcgtcaagagctttcgaatgatactaaatttgtatgggtttgacccttttaaaaggctataattgcccaattttgtccatttttcgataaaaaaaaattgcatttcgccaagaaatcgtcggttttacgccaaaaaatgatcatacctattaattatatgacgtttaagaatcattaaacatatttttgctttac

SEQ ID NO: 37838 - DNA, 1051 bp, Heterodera glycines
aattgtagaggctgttccggaaacaaatacttttttagcaacggatcctctcttgccttttcagcaaattccttatagcccacaggcggccctttgaattcgcttcgcttgtccctgttcaacaaatggctgacaattgcctccacgttgctcgttttaaactcggacccatctgcgcgcaaaacctttccctgatcactgactcccagactgtgccccttttttcgaatgtgtgtgatcagtgcatttttggtcatctggtagttgtgttttggttgaaggcgatcagccgtttctcctcctcctcctcctccttttcctgcttccccatctcttgctctgagcactctttttgctgcggcaccacctgttgacgccgtggacgatgatgattgtgcgtcgtcccactgttccccatcatcttcatcaccctcttctttttccgtttctccatttccactgctgtttggtgtttctgctgctgctgctgcttttctttgttgtttttgggcaggtctgcgatttgataatgcccccgccttttgtgtgtagtggtgtctttgcctcctcaacccaaacgctgatggtacaatgtttttctccaatctttttggcgttgaatgatcgatcgtttgcggcggcggcggcggcggcggcggcggcggcggcggcggcggcggcggcgttgctgcatttttttctctctccttttcgtgctgaagtcgaacattgatcggctgctcctcctgctcgcgcaccagtttgttgagccgtttgaattcctgatggtattgcgcggccttctgctcttcgttcagctccctgctgcgctcaatttgttggatgcgcgagcgcaaaagcccaattggtgtgccgtcggcaccgtctgctgctgctgctgctgctgcttggggttgaacaaataccgactgaaagacgtcctccgggacgagaaacattcgcattgcgtgacgcattttttttgcgctctcctcaaatatatgagtgttcctgttgtttcgcttttatatatttatttattaatttcccc

SEQ ID NO: 37839 - DNA, 1039 bp, Heterodera glycines
  unsure (1)..(1039): unsure at all n locations
atgtgattttggcatttgtcgtgtgaattgatgaattgtcgttcatcacaattgatccgagaccggttttatgtttttttattgaaaatgaaatttaaaaaaataaacatctatatattcccttaaaaatttcacgattagggatgcaaaaaatatgcatataaatcgtaaaatatgcatacaaatcgaaaatatgcacataaaaaatagaaaatatgcatataaatttttccaacgattagataatgtaaaatttgttaaaatttcattgaattcattaaatttaagcttaaaaatatagaatatggtgagaaaatagattttcgaaaaacaatacaaataaaactatattaattttgaagaaaatagacgagaaaattttccattttgaaacttatttttggcttaaatttcttatttttaaaaaaatattttttaaattaatattttcgagtaaatacgcaaaaaagaaatttttttgaaaattttccagtccatcctagaagcaagctttaaaacaagctaaaaacatgtttttcgtccgtttcaggcattccacagatcaagaaaaaatatgcatgtgtgcatactaggtagagacatgaaaatagtacgccaaaaagagggaaaaacaaatgcattttcatgtttctttttatttgtaacttttgaattaaacgtataaaaaaaatgaaaatgtattaatcgaataaaaaaaaatttcactctcgatatgcaaaatttggtgtggatttaacaagcagaaaaaaagttgaacaggatgaagtaaatgttgttttttcattaaaaattggagagagatagtacgccaaagtgagagaaattacaaagaaaaagagcaacaacgagatagatgtactaggcctttctctgcaccgtggagttgatcaaataatgcccctctgtcttttgcataaataccctcccctttcctcccctcagtgttttttctccgttcattcattcatttgtttcccttttttcccnnagcgatatcgtcgccctttgtccttttctg

SEQ ID NO: 37840 - DNA, 702 bp, Heterodera glycines
atttgttggcggcggtgcccttcctccgttggcatttccgtctccgccaccgccaaaattgccaacacttgcggatgggccgaacccggcttgccttttgccgtaccatccgccgtagggataggcatatgcgtagccaccccacttaacgaaatacaaatttaaaatttaaattattttaaaatttctcacataagcttgggactgttcaatggccaagccaatgcaaaggacaagaagaaaaagggaaaagcttaaaaattaaatttaaaattggaaaatgattgacaaattacattttgatggttgaagaagaagccatttccaatgataagcagcgaatgattgactttttgcagaatgaatattttatgaatgtgcgaaaacattttggagccctttaaatactttcactttttggcaaaacaaatatttgctttttatgtgccataacaattgtcaaaatcagtcccaaattacgtcctattttcgagatttcttgacaataaaaggcaaataaagcgaacggatcactgggatttttagtggtgatgaatgtcatccattccaccattctcagcacattttgcccaaaatatcagaacaatgaaacgaaaagagttgtcgcgcggtgaaaagggaactcaaacaaaaaaataaaaataaaaacattcactcgcgtataaaaaagacagaaaataa

SEQ ID NO: 37841 - DNA, 1086 bp, Heterodera glycines
  unsure (1)..(1086): unsure at all n locations
aatctacacgggaacgggcgtggaacggagcccgcacaatttcataaacatttaaaggcgtagttcatttgccttctccctctcccctctgtcgtttctttcccaccccctcttcaccccgaaaattttaaatttcatgcgattttctagagaaatttttgaaaaaaagccaaaaaaatttcaaacagatttttttctaaaaaattattgtttttttcaaggtgggaatgacttaaatgaatgcgcaacttttcttaattttccccccatttttttgccaggaccgttgaggagcttcgcctgaagagcaactccgacctgcacaagctgtggtacgtgctgctgaaggagcgcaacatgctgttgaccatggaccacgcgtacaaagtgcgccttcgcaacatgccgaaccccgagcgaattgaccgggtggccgaggtgtgcggtgtgctgcttgctgatcataggatcatagctgtgcaaagggggtgggggggttgtgaagccgaacgcaaagggtcggcaggcatcgatcacatgagaacggggagggtggtcgagatgaatgaaggagaaagggaaaaaagcgagaaagggagcgtcgagatcaaggagagggtcgcgcattgcgttcgactaacccttaatgagggatttatcgaacgcaaaagaggagggagaaaactcaaattaagacaaattttctcgctttaaactcccgcatttttatgcacacatacncgtattttttgattattacaaaatcgaaaaatacggttggcttttcacacacattttctactgataatgacaattagtaataattgtcaatttgattccattccaagagcatggaacgccttgaggcggtggtgcacgaacggaacgacgcctttttgcagttggagacgggcgacagcgcgtcgcccccgaaaaggacggtcacttccttcatgggattcacctacgagtgagaaaatgttaaaaaacaaattaatattatggcattttttcctcaaaaacctttaaatttgttaaatattatattttggaggtttcctgtttttgaaggcgtgcaactgcatt

SEQ ID NO: 37842 - DNA, 1394 bp, Heterodera glycines
  unsure (1)..(1394): unsure at all n locations
atttcctttttttttggtttgccaaatattgacataatttaaatatgaaatctaattggtcaatttataattaaaatactttaaggctgctatcccaaactcggcatcgtttgactcaacattaaatggacccaccatgccgaacacgtaccagcaggacaacatcagcaattccattgataaaccaccacaacgcgctacaaaaattgttcaacaacgtcccaccactttggcacccattggtggcacattcattggcacttcacaacaacaatgccatcaacggcaaacaccacaatgtatagaaaatattgcttttattttaagtatcgagacaataattatttaacatagaagcgatatttcctctgtaaattttggtctggatctaatcattttcggatgagttatgagtattaatttgctaaaaaagagttaatagaattgtaatttttttgtaaataattatttttgagaaattaaacaaaatttaattttttcgaaaagatctggcataattttgcttaaagtaacgaaattttagattcttttactttattcgatagccatgattttctctattagccttcaaaattccaaaaaatttggtcaccttaagaaaaagttgtatgaaaataagtattttttgccataacttatatgatttaataattttaattgaaaattttgcaggctaatagagaaaaacctgggctaccgacaagccaaaacaatgtaaaattttgttacttttaagcaaaattatgccataagcaaccaaaaattatcgggacttggcattatggctgaaaatgtgaaaaatggtaaagcattcatatttagcatttgatccaagccatcagctgccaccccatcagcttacttcaccaatatcatgttcatccacacagggcacaatttggcggttgtgccgtcggcaacgaattatttgagcaaaattcgtctggctggccttgtatgctttttcnnntggtggnttttggcctttggcnnnttttntttnnngtttngttntgccggttgnttcgncccgntcgcccgcgtcggcgcgntgccgttctcggcctntgccccnncnttgtcgnccgtctcttttgntggcnccgccgccgctnttttcngctggnggnggnccntcgtctgccggttgtngctgtcnncgncnncctcnncnncctctgccggtgctgntgctcggccggcgntttttgcttnttcggcgcnncttttncgntnttggntttcctccgccgtntnnttgctggtcgtgcnttnnnttctcgtgcccgctaaaacngccttnnnnnnnctcgtggcccgatgaggtccattagggcactaattgatattggagaacttagatttgcttggtg

SEQ ID NO: 37843 - DNA, 1667 bp, Heterodera glycines
tggcggagggtggaggaatgaagcgcacttcacatacaactctaatccgtttaaatttgaatgacaacagacaaatagcggcgtccctaagctaaaaaagcgtcgttttgtgacgccacgacccaaacgggtcggggtcaattcggcgcggaccatttcggcgccgcaaattttgaaatgctataacttttttatttgtcagttagctttagccaatctggcatcatttgaaagctctatgtgtgctctatatttacatgtaaaaatagaaatgaatgattcaaaaataaaaaagttatgccacgcggcgccgaaaaagccaagaaaaagtcaatttttgaggttttttggccataacttttttgtaaactgacgaaattttttgaaattttacaggctaatagagaatctgaagagctatcgaatgataacaaaaatttttaatttggttgatcaggaaaaaagttgttagcaacggcgccgaaaaggccggcgccgaagtgggcggttccccccccccccaaacataatccatccaatcagtgggcattgccactccccccgccacccttgacaacagtgtgcgggggtacacaacgttttccctccctccgaaaatggtttaaaactgaaattccatattttaaatatttttgtgaaacattttgaggaatgtttttgcttcggctaatttcgaacacctgacccggattcgacaaaattcaatattttgaatttttcgaattcgaaggattttttgggttgttggcaaagggccaactgaagcggctgttcaattttgtaattattttggcaattttttcctctgtgtttactgtgttatttatttatttttcttgtgccttaaagggtaattatcgggcggaattagcgaccggcggcgcattttgttgacgacgacggcctattggagaaattgttggcatacggtagagtgttttgtttttttcacatgactcgtggatggatcttagttcataaaaacggctttttgggtcgtaaaattcgtttctgacatctgtttcgtctaatttcgaactgctgactcggactcggaacaaaaatggaaaatcctattttcgaaagaattcaaaatattgaatttttgttcgaatccgggtcaggtgttcgaaatgagccgaaacaaaaacattcccaaaaatatttcataaaaaaatgcaaatatggaatttcagtttcaaaacatttttcggagggagggggaacgttgtgtacccccgcacactgttgtcaagggtggcgggggaagtggcaatgcccactgattggatggattatgtttgggggcgtggcgtcacaaaacgacgcttttttagcttagggactccgctatttgtctgttgtcattcaaatttaaacggattagagttgtatgtgaggtgcgcttcattcctccaccctccgccaaaaaaaaataaatttaaaaatcgaggtttggaaaaaaaacgaaaatttttaccacccctctcacattcttctccatctttcagtgagtacgacttgcccttcgacatgtgcgtgtgcattgaccggcagcagttctttttcggccgatgtcacaccgttttgggccgtaatccgtccaccaaattgccatcaatctgtcgcaaagaggcattggtgga

SEQ ID NO: 37844 - DNA, 948 bp, Heterodera glycines
tttccgtacaatcggaaaatttctgtctctcaaataattaccgatcagatcagtccatcagccacactcacttacccgattccaatttgccctgaatacaagcgagaaaaagcagcttctgcgcgtcaattccctcatcatctgcagtttccatcgcttgcgcttctgctgataaaattggtagcaacgccaaaatgccaattgaaaaagctgctaatttggtaaaatttgctgacaatggcattccaaagcgataaatttccacgttcccgaatattaaaaaaatacaattttttgatttaaaaaaaaagtgaaatgagtgctttcgttttgtgtaaaaagtccgttcaagttcatgtgtcaaaaggaggagctctcggaaaatacttaacaaacaacataagcaataaaatctcgaaggaataaaaagtcacacacaaaaaaaaccaacatatcgccataaatttgaaaatttgagagtttttggtagcagttttagcaatttttgaagattttttcttaaaattagaacaaatcagcatcttaaaaaaaaattcaattttgacccctttaaaactgctgataatcagcagtgctgctggaagtcctggttttaatgtacaaaaatatttgtaggtgcttaaaagaattttttttttataaaaaggaaaattttggataaattttttggaaattaaaaaggaaaatttttggataaaatttgttggaaattaaaaataaaataattttataacttttttggcgaaaattggtaaatattaagcataggctcccaaactcaaaactggacagtcttttgggatcgatttaaaaaagtagattcagggtgcttagtatcctaatttgcattttttttgtttccatcgttttatatcgtcttaaatccattccgaccgtgtttaagcagtttttaagttttggagctac

SEQ ID NO: 37845 - DNA, 832 bp, Heterodera glycines
agaaaaatggctatctctttttttgagaaattttatacctatacaaatgcgcttgcgtatgagacggagggcggtgcacaatagacattttatttcacagaggatttttatatttagaggttatcccagaaaaatggctatctctttttttgataaattttatacacatacaaatgctctcgagcatgatagggagggcggtgcgcaatagaccttttatttttgagggaatttttaaatttatactctatcccagaaaaatggctatctctttttttgagaaattttatacctcacaaaagcgcttgcgtatgagacggagggctgtgcacaatcgccattttatttcacagaggatttttatatttagaggttatcccagaaaaatggctatctctttttttgataaattttatacacatacaaatgctctcgagcatgatagggagggcggtgcgcaatagaccttttatttttgagggaatttttaaatttatactctatcccagaaaaatggctatctctttttttgataaattttatacacatacaaatgctctcgagcatgatagggagggcggtgcgcaatagaccttttatttttgagggaatttttaaatttatactctatcccagaaaaatggctatctctttttttgataaattttatacacatacaaatgctctcgagtatgatagggagggcggtgcgcaatagaccttttatttttgagggaatttttaaatttatactctatcccagaaaaatggctatctctttttttgagaaattttatactcacaaaagcgcttgcgtatgagacggagggct

SEQ ID NO: 37846 - DNA, 952 bp, Heterodera glycines
ttatatacctcgccgttagagcactgccgagatcggccattacttcggttggcaatttgccagaatttgggccaaattttgcgttttgcccaagacttaatggcctcgcaaagagaattaaacaaattttgtaaaaaaatttttttgaacaatttgaattaatcacatttttgcaattatcaaattaaaatttgtagatataaaaatacgaggaagaaaaaattataatgaaaataaatagttaaactctaataatttagaaatctatctgttttttcttagctagcaaaattgggccttttacaactaattaggtaattatataattgccttcccaccgccttcgctccttttctgctgaaaaggaagaacacacgcacgcaatttcgtaaaagagaattaataattagataattaaaatgttttatcatcaaagaaaggcacattttgcaatttttttttttcgtttttcatcaagcatcgattgagaaaatttttgggcaaatttggggcgtaaatttttggattgtgagaaacagaggggcagagagagagagagagagaaacactttagtgatacgagagaaacagagggacagcgagagagacaattcatttttgagagagcatcaacataaccggttggggtcaagagcagcacagcggaacaacggcacaatgtgaggacaaagatttaaagaaaattaacaaatcattctttcggacggtaaaagagtgattttttctggacaaaattagaatatagagacatcctttcggacgggaaaaggatgtgttttttttgttgatatttttggcaaagcaccccctaattaaaaaaaaaaattaatgacacgaaaacacccttttggacggtaaaaggtgtttttgtttttaggaattttcatgtttttcaattcgagtgcttaatgccaaacctaaaatgtaatga

SEQ ID NO: 37847 - DNA, 977 bp, Heterodera glycines
  unsure (1)..(977): unsure at all n locations
ttgtgcctgttgatcatttcgcacaggcacgccactgggttagtgacgcggtgnccaggcacagttccgcagccaattcaccctcgtccacggtggcaatccgagttctgcatggaaaagagctgacaatgaatgctaattgactaaccatcggacggacgaaatcaaatagctgagctgatttcccttcccctccccgataaatttatattttcgaagtttccagtttttttaatattaatttttgatttttttttgaaaatggtaataaaaaaaatgatgaatttgaggacaaactggttgagcatttggccaagccaacagtgcagccaaatgtccattcccagcgacacattgcaacggttcacatgcgcaacagcgttcggactggcccagccctgttggttggcgcacagaaagacctggaattttttaaaaataacctaatatttgaaatttatttttattaaaaccgctatttttttttttgcatgccaaagaaaatgccgaaatttcccgtacacaattcactgtcccccgcccgaaaaattttaaaaaataaagtttttttcatacaaatgtgccaacaaaatgtttattttcatcgctttattgttgttgctgttgttttttttgccgtccattctcacctccttcagccgctgcttctcctccttcagctcgtccttgtccgtcctcaacatgctcagtttgcgcaccggcagcgcaggcaacggacgctgggcaaagcctaggagaaaacaaaaccatacaaaaatataaagatatctcaatttaatttaaaccttccaagacattaattagtgattgatggaaggatgggtgattaagtcgagaaaaatgtagaaaataattaaaattttaattggtattaacaatgtgtccaaaaggccatgtagtatgcggggtattgcttattttaaaatgttgaatatcatatcaaaaattttaacaat

SEQ ID NO: 37848 - DNA, 1009 bp, Heterodera glycines
  unsure (1)..(1009): unsure at all n locations
agtcatcgcccgaaaatgacaaaaaaaaattgggaggaaaagcaaacaaaaagcacaaaatgttatcaccaattggttaattatcatcaatcagcacaaacaatgaaagaagaagaagaagaagaagaagttgttcaattgtattttgaggcaaagcaatcgaaaaaaagaagaattcaatggccaaagaacacagtgaaaaggcaacacaatttgagaaaagatcaaacaaatacaacgacacactcattaagcaattaattaattatgtcattaaaatttaacaaaaatcttttccttttgagattaaaaatgaaaaaataaatacaataaatacatttaacaattttatttctatagaaaatgttgcaaattgtcgctagtctttttcataatgtccttatcagcttatcactttacaatatgaaaaaagtgagcaaaaaatcgcatgtgacaggattcgaacctgcgcgggtcaaaccctttgcgtcttaagcgcaacgccttaaccactcggccacacatgcagtggacaacggacccaaattatcattttctgtgtgaaagggcataaataaataatcagtgattggtatttgaccacccgaatgtcacgccaaaataagcacaaaataatcaaaaaataaaacaatttattaaaaaaatcaccgaaatagtaaaaatatcaagcacaattattctgagatcagaacaaataaacatattttcaattgatgcgtccttttcacagttgagttgcgcgactgatctgaaccggatggatgccgcggcttcgcagcaactgaacgaaaaggcgcacattttatacgaaatataattaatttaaaatctcattanaattttccaagaattacttagataattattatgacatgccattgttcgaatgcaatttgttttttattttatcccggagaaacagtacacttctggcacttccaccgtacctcttcgaaactttcgtcagctttgtcaaatgactgtgccg

SEQ ID NO: 37849 - DNA, 1432 bp, Heterodera glycines
aatcaataactggttctgatcagctaggataaaaaaaaattgcaattgtttgggtgagaaaattctcggtttttttttggcatattgccattaattaaaaaatattattctattgttgctattacatacatcgacaatacggtcggcgaactctttgccggtccgttggagatcagctaagggatgggaaatggcaatttgttggcattttgcacacaggaaaagtgccatcaccaaaaggcaaagacacacccacccggtacctaaacccgactttttgaaaagtccactacacgaaatctgacacggatctaatcataactcagccctcgaatattgtaacccccggcattctcaccgtcgccacgtgagtccaattcgggcaatggcacaattcgcttgctgagtacttcttgccgttcttgctccttcatcatctgctgcttcttcagatcttccgctgctttcaacatcaacaatttctggaaacggaattttcactcattttatggctccaattttatccatttatcttttatttaatcaattgtcagttgtcagttgtccgtctccatttttaatgtcttaattacttaataatgtctcacattccttttgctttttgtccatctaattacataatgttcaatgactatttactaattatctccacccatttgtctctcattatccgcttatcacttaatcacattcaaattaccgtctcccatcctttttgctgtcattatccgcttatccaattaattaacatttgctaattaccaaatcccatccttttttctctctttatccgcttatcacttaatcacattcaaattaccgtctcccatcctttttgctgtcattatccgcttatccaattaattaacatttgctaattaccaaatcccatccttttttctctcattatccgcttatcacttaatcacattcaaattaccgtctcccatcctttttgctgtcattatccgcttatccaattaattaacatttgctaattaccaaatcccatccttttttctctcattatccgcttatcacttaatcacattcaaattaccgtctcccatcctttttgctgtcattatccgcttatccaattaattaacatttgctaattaccaaatcccatccttttttctctctttatccgcttatcacttaatcacattcaaattaccgtctcccatcctttttgctgtcattatccgcttatccaattaattaacatttgctaattaccaaatcccatccttttttctctcattatccgcttatcacttaatcacattcaaattaccgtctcccatcctttttgctgtcattatccgcttatccaattaattaacatttgctaattaccaaatcccatccttttttctctcattatccgcttatcacttaatcacat

SEQ ID NO: 37850 - DNA, 421 bp, Heterodera glycines
ctgacaatgaggcaaaggcactgcatcggtgcgtcttctggtcggccaaggtaggtagttcggccttgtcccagaccaataactctaaaaaaaataatcagcttatcagtcatttttcgggaggggtggggagtacgggggaagttgtgtgaagcgcgcacacgaaaagggtggcaggaggggccttttacccctcccgaaccgctgacaaaaaaaaattttttttttttttgaaaaatttctttttgaaatttctttacactttttcgctggggggggggggggaaggacgggggaagttgtgtgaagcgcgcacacgaaaagggtggagggaggggccttttacccctcccgaaccgctgtcaaaaaaaattttttttttttttggacaaatttctttttgaaattgctttactctttt

SEQ ID NO: 37851 - DNA, 1586 bp, Heterodera glycines
  unsure (1)..(1586): unsure at all n locations
aaaaatgcaaaganagttctcgaaaaacaaccaaaagttacaaaaccaacccttattttntaaacaatttttttgaataataagcaatttaaaaacggttaattttaacgaaaaaagaatcatttcactttatcagagacggatttttagacaccaaatttttttaaataggcacctaaaatagacacgaaaaaggcttaaaaatgtagaaaagaataaaaagcacaaaagattgaaaaaagcagtaaaaaattgatattcttggattaatatgttgctacttgtttatgtagagtagggccgaaaaccaaccgcgggggaccctttttttacattattaaaaaaaatctcttggcaagtcaaaagccttcgcaaaaaaaagtaccaaaaaattaaagctagaggtttcaaaccaagttaaaaactcgttcttcgtgcgcattaggccgtagcaagttagcacaaaaggcatatgcctcaaaatacaggttttgtatcattcgaaagcaaaaagtctcaaaaaccacaaatttttaaatttttttttacaaaatttgttagcaaattacatttttttctaaaatttttcccggtggcgcctatcggcatcgcccgacctcctgtttctcaagtttttggaaaaagcgcgctgtacaaatcattttcattgattttttcatttggtaaaaaatttcccaaaatgctgattttggatcataatgttaatttttggttggccaatgctgattttgaaaatcctgtgttttatcggtttaagatgctctttcatgtttttagagttttcttagtgttacaatttgttttgcaaaaatctaatttttcgggtctagatctgtgaaatggagggaattgggtgacaatttgccaccgacacttagaaatactgaattaacgcaatttttaggcgctcacaagaagcaccagccaaaaattcaaatgaacgaaaatgactgaagctgtgcgcatgcactgaattgagatgtatattttaatagttcttttgtatgggatgcatttggtagaagagaaatgaaaaatagtgtgggaaaagaagagaaaaagacaatgctcagagttttcccctccatcttttccccttttctttttcaatgctattttccactttttctgttaatttaaactaggggttggatcgaatatttttatttttaaaataagaacattgcaaaattgcttttaatcgcttatgtaacaatttattaattaatatagcatcaaaaatcatatttttcatgggtccagccagtaatgtaaaacgacgatctttttttcaaatcaccttttttcggcgcgctttttcaaaaaacaatttcgtggttgatgggggtccggcagtgccgataggcgccgccggaagttttttttgaaattttgtctagatttataacagattttgttcaaaaatgaccaaatttttcttaaaattaaaaaattctaaacaaggtatacattacgtcataaaatgtcaaatatttttatgtatttctgtattttctatgcagaataagaacatttctttataacaagaacaaatccaaaccctg

SEQ ID NO: 37852 - DNA, 1236 bp, Heterodera glycines
attaatggacacaatacttggtatgagaactttttaaaataaatctaagggatttgaatttaatagtaaacgcgttttttattcgtacacagtaaatacaacaacacaaaaattaaaaataataaaaaacgtttattttcccattatttttcttccatcgacgcgcggagcgtcgcttcgtcccacgggccacggattggtgctgaaaataaaatttgtgtacaatgattttccaatcacttcagagaaggtcagtgaccacctttttaggctttgcattcgaatgaaaagcaacggacagaaaagggcgacgaacaaatggagaaacgagaaacataaaggcgaattggagaccaaccaaaagggagagggcgaggagagaaaggacggagaaacggcacgaaacagaggggcgacagaaggggccaacgcgcaaaaagggctgatcgaatggtcaaagtaattaggaaaatgactaatgaattgaattaaatcaagatgcaatggcctgtttggcattgtgtttcttttttatttcaccgtttctcagtcgaggccaaaaacagaagagacaaagcgaaagtgcgagcagaagaaaggccacaaagtcggattggagacgagaaatcaaaaaaacggaagcggcgaggcaaagatttgccgacaaaggcaaactgacgctaaaacgggaaatgccatcgttaaaaagaaaataaaacattggcacgaacgaacaccggcacatttatgccgtagtcgtggacaaaaagactggcgaaaaagagcagaatggcacaggcgtaaatggtgtcagtgctaattgaagtggtcaatgtcctaaaattgcaattaaacaattattggtcatttatccccctttctcaccttatcaccggagtaaaagcgtaaccaaacgcgagaattgtgacaaaagttcggcaatattcaacaaaatcggaagacgaaatttggaacagatccgacgatcggagaagcgcaaaatgagccaaaagagtggcggaagaagcgaaggaacaaaagcaaaacaaagcgaagggaccgaagacatcggaatggacaagttcaaagcagcaaaggaacagaacgacgaggtcaaaatgagccatgacagtgcacgcggcacaaacggcggaagaaaaagtgaaagggacgaagccaactgaaaacggacagtcaaaaacaaaacaaaaaagtaaggcaaaagccaaagagact

SEQ ID NO: 37853 - DNA, 756 bp, Heterodera glycines
tcgaatctcagtatttttgtccccggtttcctagtcttttcgggctaacgaattccgattttttgggtttttatttttgataggccgggttccgggtttcagaatttttaagaggcctggcttccgctttccatgaatttttataggacatggattttggaatttcataaattttcaggggaagggaagggggaggggggcctccgattaagccactgttggtgggtgggctcttatttttgccaaaatatttaccgcaaaaagcggttcgccgttgaagaattcggcaaaaatgcagccaagtgcccacaggtccaccgccggactgtattgggtggcgccgaacagcaactccggcgcgcggtaccaacgggtggccacctgagcgcgagaaaacgaagaactgagtgattttctggtcactgatcagttgtgtatgtatgtaaataaaaattaattgtctgatctatgactaatcaagattctctgtatgtggtacattcatggaaatttgaaaaaataatctgaaaatttgattaaaaattttttactgaaataaaagagacctagatgttttttaacccccgcccctcaaagtggggggggggggggggggggagtatttcaggggttctaattcagggaggcttaagaaatacgatagatttacgcttcgatggactatttggtacctcctccaagacatcactcaccacaattgccaaaaaatttcgccaaatttttcaacaatacatc

SEQ ID NO: 37854 - DNA, 923 bp, Heterodera glycines
attttcggaatagtagcgacgaccctaatttttctggattttctttctgggcgagtttggctctgaaaattttgtaaaaacgtctatctctttttctgctcaacactcacatgaattccaaccacattttcggaataatagcgacgaccctaatttttctggattttctttctgggcgagtttggctctgaaaattttgaaaaaacgtctatctctttttctgctcaacactcacatgaactccaaccacattttcggaataatagcgacgaccctaatttttctggattttctttctgggcgagtttggctctgaaaattttgaaaaaacgtctatctctttttctgctcaacactcaaatgaattccaaccacattttcggaataatagcgacgaccctaatttttctggattttctttctgggcgagtttggctctgaaaattttgaaaaaacgtctatctctttttctgctcaacactcaaatgaattccaaccacattttcggaatagtagcgacgaccctaatttttctggattttctttctgggcgagtttggctctgaaaattttgaaaaaacgtctatctctttttctgctcaacactcaaatgaattccaaccacattttcggaataatagcgacgaccctaatttttctggattttctttctgggcgagtttggctctgaaaattttgaaaaaacgtctatctctttttctgctcaacactcaaatgaattccaaccacattttcggaatagtagcgacgaccctaatttttctggatttctttctgggcgagtttggctctgaagatttgaaaaaacgtctatctctttttctgctcaacactcacatgaattccaaccacattttcggaataatagcgacgaccctaatttttctggattttctttctgg

SEQ ID NO: 37855 - DNA, 515 bp, Heterodera glycines
tttaaagtagggttcgagccccgtggggcgggggtggcttttcgcgggggcgggggttggcgggggtcatagtcgcgggggcgggggcacgataattcggccaccgcgggggcgggggtttgctttgaattagctccaaaaaaaactattttttatgaatgatttctttggctccacattcctttattcgttgatcgccttgattctatttattttgacataaattgcacagattttgactaaaaataaccaaatttagggatttttaggtaattttttaagaaaaaaaggtttttttttggggccggcgtgccgatagggcgaccaaaaaaattaagatttttctataaattttcgttttttaactttattaaaattatcatgatttactcaaggaaattaaaactcagacttttaaaaattttccgccacatttttccaaaaaacttgatgaatgtgcgagggaagaggtccggcggtgacgataggcgccgccgggaaaattttaagaattt

SEQ ID NO: 37856 - DNA, 949 bp, Heterodera glycines
  unsure (1)..(949): unsure at all n locations
ggggacctctagagcaatttttgggaaaaagaaaaaaactggtagagggagaatttgttcaattttttcaacaatttcatacatatcagattccaaaaacttgacaaaaataagacaattagttcaaaaaattcgtttcaatttcataaaaatttgattttcgaggtggaatggatgggtgttatttagaaaattgtgaccccacccttgtccatccatgtgtgctcgagagtctcggcaaatgatgccatggtaagcaattaacagacccaatccaagctctccatcttgacacatcaacgaaaatggtgaacggagcccgtcgttcccaaatcattcgcactggcaccgtgatccagcaaacaacggacaatgttcacatgagtatcctcctccagaacggcatgatacaacgcggaaaaccctaaaatttcaaaagactacgaaaagccaaccgagataaattggaaagttcccgagaaattatgacacaattttctgatggagtgccgtcccagttcaccccaagaggtcgccaccaaaaaatataatcaattttagaaaaccataagaatttaaaaaaaaattattttgatgagtaccatagaaacagtcaatttttgatcattttcacttgaaatacggtagaaatcagtatttttgagatttccaattttgacaccctatagcgctctgcgggtataggtcatagacgaaccatccgaaaggcaattcggtagagaaaaatacgacctttttaaaatcattcatttctgagaaataggattttttttaaatttgagtctgccaacacatggccagtttaatcaatgtgttattanaatagttaggtatttgataatccggaggtaaaaattcaaaaattttgtcaaatattcgaaaataagggcatttgaaagtaatggttaagctgccgccgcccccccct

SEQ ID NO: 37857 - DNA, 958 bp, Heterodera glycines
  unsure (1)..(958): unsure at all n locations
cagctttcttctggctcctcctcgtccgcgtcgggtgcagcagcgggacgcgacgtgcacgtgcggacgccactgaacgacccgcggtcaccgtttaagccattggcttacacatcttttgagccggagaaacaggcaaatggaaaaatttatcaaaaaatgatgtgttttaattaaaactcttcatatttcatttaaatgatgtctttagtggagttcttccatatttaacatttcgagatttcttaaatatctcagtattttggcattatgttcatgtttcgcacccatttctgctggcatttaaaaaaccaaaaccacttttcgattagatttttaactgaatttttatgcattttaagagattttgagaatgaattttatatccatataatccaaacctctgtcatatctgtctaaagctaggcggtccatgataagtgtattttaatttgcattatacaatttaagatttaaaaataaacgtacctaaggcttgaattaaattttcttgtcgcattttttcaattaattcaaataataacaataggtgacaaattttccaagtttcaattttctcaggcacaaattcgtcttgaaattggctcaaacggcccctccggcatccgacgaatggtcgaccgctttcagaagggtcaatgtgcagcagttgaacaacagcaaaaacagaatgaactgaacaacacgaacaacgatgaggatgcagacgaacacgatgagttggtgcagcagcgccagcagagaacgccaattgcgccaataatgcgccaaaattcgctccatacgctcccagtgagttgaaagagcatgggtttttggtacggcattttcttgttgttatctgagagtcgagaagaaaactccaaaaaaccgagaaattttttcactctttgtaaaaatttatttggctattttcctgctgnggactcatctgcat

SEQ ID NO: 37858 - DNA, 1198 bp, Heterodera glycines
  unsure (1)..(1198): unsure at all n locations
ctttgactcagtcgaaaagtgactaagaagagaacaactgtattttttagctgacgcttattttaaattttgagtcaagtctcggcgatttttcggcggcaaaattttgaggtgcacccctcaaaatagggccccttttcctctaaaagtgggacaacgccgcaaatcaatcggaagtataaattaaaaaataacaaatgtgaatagaagaagatggcacatacttttttaagtcactcgataatttaatttagtgagatcgtaatctcaatatttgattgagaatttttaaaaattacaatttattataaaaaagatgacacggagccgttctctgtggaaatttaaactttatgggtgattggaggtgtgaatagggcaattgtgaatgagttgagaaaaaaccaggaggagaattagagaaagcgtaaatagcacagcgcagaaaaagggcgagaatgaaaacaatccctttgtcagagagggggattttgatcaaagaaaaggaatggcatttacaaagaaattgcattttattatttgagaagcgggagtagggtcgagaaatacatttaggggggggggggggtaagcccaaagtgaatgatttgccacctctccttcccttattcacctgttgacttttttgaattggcactaatatccaatcccatacgcttctcaggtgccgctaccacaaaccgcccatctactgtcggtttaagcttttgcatgtgcctgccaagaacgtgctttaccatcgcatgtcccacaaccatccgatgccgttgagcactgagttggcgatgcgttttagacaaaaacagagaataatgtataagaaaaaagtgaaaatggtggcaaaagcaaacgaccgcacaaccaatggaaaggaaaagcgtgggcagcagaggaaaaaacagaaagtcaagcggagaagcagcagcatcggaatttctgacggagctggtggatatttttggatttgcctctaattagtcgggataatgacaatctaaagaaaatgacacaattaaactacattttaggggggtcttacctgatttcattttggaatatgtttttgatttgggatatccactacgctttgttaggccaaggttcagcacnccattnccattcgttgattaaaaaaattgagcaaggatcggtcgcctatgccttttggggggggggg

SEQ ID NO: 37859 - DNA, 1020 bp, Heterodera glycines
  unsure (1)..(1020): unsure at all n locations
ttgtccatcggagcctcgtgcgaattgtgaaagtccttctaatgacgaacaatcgtctcacgcgaaaagtgaccctaaaagacaacataaatgtgaacacagtgggagaccaagtgaattccacaataccaagttgcactgttggcacttgaacaggtcgcacccctccaagtgagagtaagcgtgatcagacagacgattgatgacgagtttgccacatttctgaaaaaggggaaataaatacgaaaaacaatgaggaaaggcgacaagggagcatagtgatttttattgtatattttagctgtcatatgataaatggggtaaaagacagcctccgatcagtaaatcatttcgtattgcccagcaattaccaccacattttacctcacaagaaatggcttcgttgctgcgcttcttgaaatactgagcaccgccaagtcgcatgctgacctcgcgcagtttgatcatcacatcccgcgccttacgcgacattggcttcctacccctggaataaggtgaagccgagcgatcccataatgacctacgataagtgttgtgtccaacaccagattagtttttcccggttttaaagcaagaaaagcaaaactcttatttgttaaagaccaaaagtttattaagcaaaaataagaaagcttcaggcagggaacctgaggtttaagaaatggtaaaggaaagtcctgaatgtgagggcaaaggcatcgcttaaatactgacatgagtaaaggggaggagacgaacagatggacaacaaaacattacataaattgttgagttgtggaaaataggtcatcattgggggatctttaggatggacagaaacagagggacttaaggcaaaaacaaataaataaagcaaaagaatgattatatataataagaaaattattattatttcaaattgtggnatgcacattcttnccccttncnngcaagtcctggaccgtttcatgcttcccatgcagcctcagtgtccacggtgcgatgggcccgcgtgctgct

SEQ ID NO: 37860 - DNA, 822 bp, Heterodera glycines
ttttcttgcataaaaaatgccaaatacttgctatactttgctggcttttgcattaattaatgtccatagaatatttggcgattttgccgaccaaatccgtcatggaaagcgatagagccgaatcatttgctgatgaatgcgcacgagatgatggacttgttgcggggcgagtttaaaaaaatgggaaacagacaaaagcaaaagacatttgtggcacggattaaaaaatgccaacaaaattaaaagaaaaaacgcggcgatttaattcatttgttataaaaaatatactttttcaaaaatcaaaaatattaattagttttttaaatatagaaatcggacaaaaattctttctccttcatttattgggcacttatatgataagcaaagtgtgcagttacgacactttattagcaggtgccgtaatggcgcattttatgcaaattgaaaattctgccgaattgtacagtaattctgccaatattcgcaatgcatcaaaactgtgcccaatgcgtttgtttgtaggtgccatgttcagcagattaagggacgatttcgccaaaatcgaaggtagcgaaaagtggcatttcgatgtggtacgaggtctggcatatttggatttggaattttccgatgtcgcattgaagaaacgcagaatcagcgaagaacaatgcactaaaatgtgaggtttttgtgttcttaaatttaagtcaattttcgattcattaaattaattaaggaataatgacaacaacgcgaacaacccaaggcaattagcgaagttaattagcattaattggaatggccataaaaaaatatccctga

SEQ ID NO: 37861 - DNA, 946 bp, Heterodera glycines
atttgtagagcccggacaggaacatgagccgtgcaggattttccaggaatcccggtcctattcccgcatttttgaggggaatttgcagaaaataaatccagtaaaaacatctttttccgctggttactattcggcactattttcaaccctgttcctgttcggcattttcaaatttccgtgctttcgctttgtccacctgccgaattgcatgcctcctgtcctaactcagtctcttcctgttggccgttcgctgttgccactttcactacacattgcctgtgtcttttgcgtgtctcaaaaacactgcaagacgcacaattggtccattgggaccaatttgaccactgaaaataaaagggttttgtgtgtgtgtgtgtgtgtgtcgtttgtgtgaactgcctgcgggcatgggccaagaacgcatcgcttttgctctctcaaagcttccccgggaggacaaagtccgttcaagcatcgtcgaaagcgttgctgaatgccttggccacaggtccgggaacaaacgctccacagggaccacccactccacacgggcatgccgaggacgcgggaacagtcctaagaggcaagtggccaaggctttggctttggaattcacctgaacgttgcatgtcctcgcctgcttcccgctgttggcacatggtccgtctgcgcaaagtctttctctgaactgaaatccgatgccgcaactcactgagcacggttgccactgtaaattggcaaatgattttgcggtttttatcccccgggggtcggtaactcacttcgccccattgccctccgtcgttcactggtgacaattcgcactttgtgtcgttacatctctctctttgaactgattgtcccccacagcccaactcggcatcgcccgccccttctaacaaatgggtcattttcattaattaccttaatgtgcataattgcccct

SEQ ID NO: 37862 - DNA, 900 bp, Heterodera glycines
  unsure (1)..(900): unsure at all n locations
tgcccgcctccnccaattagaaggcactcttcctcatcattccttccctttccatttgtatcccttctttttttcctttattttcaccataatattacatttgctcgaaaagccaaaaaaggacggaccagcagcagcaaattggaatgagtggagaaaaaaccaaaaggaggccaaattcggcacgaatgggccaaactttggctcaaaaatttaaagtgaaattttaaatatttattttatacttttgatcaaataaaaataaaatatgccaccgtactaatattataagtttttttttgttaattataaattcacgcatcacaacatttggcaaattatcattggcttctgcctaattcctaaatggcatttggcatcattcatcaatcatttttagccaaaaactgacgcatgaaaataatgggagaaaaatgacagggaaaagagaaaaggaaaaaggcggaggggtgcaaagagagctttggaatatcattttaaagtttgaattaagttttaataagtggccaaaattgtgaaacttttcttttctttttcggaatgcgtcactttctctcccccccccccttttcccttcgcaacttgaaccaaaaatgggatgtgaaataaaatgatgaattttgcattgaaaattagagaaaaagctcaaattcccacaattttacgaaaatacaacaaatggaaagattggtatataagcaaaaaagagaagccatttcaaccaaaatgacttttttacatttattttaaatgccaagaaatgcaatattaatttattaatcaaaaattatgaattccgtcaatgtcaaaaagcaattgtgataattcttcttccgtttgtttattcattttcgttgttctacccctcccttactttta

SEQ ID NO: 37863 - DNA, 931 bp, Heterodera glycines
  unsure (1)..(931): unsure at all n locations
atttcgaaaaatttcgttaaggttcaaaaaaagttatggccagaagaattcaaaaagccagattttccaacttttttgggctcgaactttttttaaactcgaacaattttttttggaattttgtaggctaatagagtatcttaagggctctcgaatgataccaagatcgttggatttggttggaaaataaaaaagttatagtcaaaaaacatgtgctcgtacgaaaacggcccggccccttaattttgtgctttaataatttggaataattaaatgacttcattcttcactttgtccagctatcattagccactctataaaatagaaggcagaaatgataagacgagaaaattttgtttgcacaaatacatgcaagctttcaattttcatacccaatgggtatgttaattaatgagtagggctgtgaattttagtgacgaaaaatcccaaaatagttaactaaaatagtgagtaaaaatgtagtgaagaaatagtgacaaaaagtccgaaatagtgacgaatagtgacataattttcagacaaaaattaagcaaaaataatttttattcactgattgcagttgcaaatgagtaggactgggatttttaagggcaaaaaaacaaaataggtacataaaaaaataatttttaaaattaaaattcttgccacgaaaatacctttttgagaaaattttttcatttcttaggagtgctttttgaaattttttttgtcgattcttaggggtgtattttttgaaaaaaatttttaggtcgattcttaggggtgtattttttggttttattgcatttttgttaaagaattttccaaaaaatgtcgaaatagtgacaaaacgccaaaaatagtgatttttaactatttaagttgacgaagtcgccanaatagtgatttctagtgaccgataatgacatca

SEQ ID NO: 37864 - DNA, 935 bp, Heterodera glycines
agccggccaccaaaattggcattgcaaacgcaaaagcaccgtaaaatttgttggcgaactgtgcaatggcgaaaaattttaaatttgaatttgtgattgaacaaaataaaattaacaaaaaataattaaatataaattcccactgtaacagcgatggcctttgattcgagcagttcgtctggcgatgtgccagcatagaatgccacatttgcgagcacgtaaaacagggtgcacaatgtgcaggaaatgaaaatggcacggggcaagtcgcgcaccgggttgaccatttcctaattgaccaataagaaattaattatgggaatcaattcctaattggttacaactatcataaggttatgaaatgttttattgagttaaaaggtagttaaaagaacaaaaatcttaattttgcgagttttttgaaaaataaagtttgattaagtatggaaataataataataataataattttaactaaattattatcatttaaatagatatccgagtcaatttaaaatattaaaaaaaataaagaatataaatttaaataaaattctcttcaaggcgcacctccgtgatgaagttcaaatagttccacccgttgtatgcccaaagtcccgagtaaaatgcgatggcaatttgtcccgtgccaacactctccggcaccgtaaaagcatcgacgaacgagtctcgataggcttaaaaataaatattttcattataatattcctatttatttcattattttttttataaaatagtgtttttcatgttatgcggaatttaaaataaggacaaattttggcgtaatgaatcgcagggacagttccgatttgaaatgtttaccatttttaatagaattcactaaaacggtgtccttggaaatcagaaaagcacgcttatcatcaaaataactaattccgatgtccttgaat

SEQ ID NO: 37865 - DNA, 1429 bp, Heterodera glycines
  unsure (1)..(1429): unsure at all n locations
aatttctcttttttccaggagaagaacgtgcgtcgccttctccgaaacgttggacgaagtgcgtgtacagcatcggacaacaaatcgacaagacgaatttacgttttaacatctttttttctttaaattcgccttataaattttcccaacactttttaggaccaaatacagcgtcttacagcagccttagaagcggagaaacagaaaacgaaactcgaaaataagtttttttttaattcggaaactaaaagccaattaaaattaatcgacaaattttaagacgaggagttggcgcgtgaacgggtggcccgtgcgcaagaaaatctaaaacataaaataagttttttacaattttttattatttttttttaatttttatcaatttttcaggaggaaattcgtcatttgtattcccaaattcactaatctgaagtcagaaaatggggcgactcgaaggagaccatcgagcgtgaacgagtcttacatcaaatgggaaattgaggacctgaagataagttaataagccgctttttaagaaaaaataatttaaattaataattttattttttacacttattaataagtttttagtgcttttttacgaaaaaataaaaatttattaatgctctttgaagaaatgataatttaaagaaataatttattatttactattattaataaatttacagtaattatttaattcatctataatatactattaattaacttttcacaagcaaatcgggctgctggttgacagcttggaaacagctcaaaaaaaaatcattgagctcagtgacagtttggaagccgctgatcagaaaattgctcggctcagtgacagtttgaaaggcgctgatcagaaaattgctcagctcagtgacagtttgaaaggcgctgatcagaaaattgttgaactcactgtaaatcattgaattgaaataatatcttttaaatcaatttgaaaatataataattaaataatattttgattaaatttccgtcaaaatcaggcggaggtgaaggatttacgagctgcggctgaactccaagtgcaaaatggtgctgtgccgccggtgccgaacttggttgcagaacggtatgatgaatagtaaacgcatttttctttacttttggggcttttttcataattacgcattttataatgactttttaagaaaaaaattttaatgcccaaaaaattcaaatctcgaattttttttttttttacttattttgagatgttgtggagaattgaattaaatttttctagttttttttttttttgaaaaaatttccgaaaaagggatatcaaaaattaatattaaaatagctaaaactttagtacaaatctaatttggtgattttatgtccttttcccanaaaaatactaaaaacacaagttttttttataatatgtatatattgt

SEQ ID NO: 37866 - DNA, 283 bp, Heterodera glycines
ccccgcctcccctccgtccatccgacgcctttttgcttcccctttgaggtcaatgaaaagctggacaaatgatcagcttttgtcgctgtatatgctatgaaatcaatataataatagtataaatcggaacaaaaaaaaaataaatttcgattattttaaaaatattcccgacaaaaaccaattgcaccgacgttttgcgttttgttcacctgctgctgttccaattgcgcaaggtcgccgcatttccgaacgcctcgagcaacgggttggacttcaaaatggt

SEQ ID NO: 37867 - DNA, 1002 bp, Heterodera glycines
tcacggacaataattgcaatgtccgatcccaatcacggcaaattttcaccggtttaccaacccctttcggggaaggacaagcacgctgattttgccagtgtagcgcgcgtgcagccccggacatctaagggcatcacagacctgttattgctcaatttcgtgcggctgaacaccgaaaatccctctaagaagttgtgcccacagaagcaatgagccaactatttagtaggctagagtctcgctcgttatcggaataaaccagacaaatcgctccacgaactaagaacggccatgcaccaccatccaccgaatcatgaaaaagctatcaatctgtcaatccttacggtgtccgggccgggtgagtttccccgtgttgagtcaaattaagccgcaggctccactcctggtggtgcccttccgtcaattcctttaagtttcagctttgcaaccatacttcccccggaaccggaagactttcgtttccgggaagctccccaccagggcgaataaatccgccggcggatcgctagttggcatcgtttacggtcagaactagggcggtatctgatcgccttcgaacctctgactttcgttcttgattaatgaagacattcttgccaaatgctttcgctgtagtccgtcttgctacggtccaagaatttcacctctcacgtagcaatacgaatggccccgtttgtctctgttaaccattatctcggtcagcaaaaccaataaaatcggaccgaaatcctcttctattattccatgcacgaacattcaagcgaaacgcctgtttgaagcactctgatttgttcaaagtaaactcgccagcccaccgacgccgaccggtaaaggccaacgcccggggaaagaccggcagaaaagccaaccgaaccagtaacacacaaagtgtgcaccggacggctagcacagatccaactacgagctttttaccgcagcaatattctatgcattttgagagctggaattaccgcggctgct

SEQ ID NO: 37868 - DNA, 1012 bp, Heterodera glycines
  unsure (1)..(1012): unsure at all n locations
gagaagacatcacgcgaatgatgacgacaaaggaaagtgagaaggaaaagtgaggaggaccggcggggaggagggggcgggggaggttaaagaacgaaacataagacaaaatgggactttcgaaaacgaacacaagactaaaagaaagggaccaaccatacaaaagcgaaactaaaacataattcaataaatattgggaattcgtacgtatacatacctattcaaagttttgacgattaaaacagtgaatttgtctcttaaaaattggaccaaacaccaactgcgtatgaaatggcagggttaatttgtaaatggcaatgcgttaataaattgtgggtcaacggaagttttcacggtttgagcttttctctgttgactgcttttaaaactacaaaacatggcttaaatactaataatgtgtcaacaaatctgcatcaaagtgaatactgaatgtacacaccgtttcaaaaaacgagagatgaaccaataaagagagagtgcagagaaaaaaacatctctctttttggcgtactatttctttatctgtgttaatagagaaaaactgaatttacttcgctacgtttaattttttttctatacgttagatccactccaaattttgcataccgattgagaaaaaaattctgcatagaacgtatcaaatacttttttgagttaaacatcccgtttttgcatgaaaccattatgaaaatttgaaactctcactactcttttctgagatgtcaaattgcttagcatttgcttagaaaaagcttctccccatcaagggctttcgaatgataccaagatttaccaatttggttggcaaaaagcttcaaaaataattcccaaaattcgtcattttttaatattttggacaaaaataaatgaaaatattcatgttgcacaacggactcgaacttccccccccccctttgtccctttactatnnctacaaaaaccactaagccacacatgcaaatctttttggaactgggaggncaaattgaaa

SEQ ID NO: 37869 - DNA, 861 bp, Heterodera glycines
aattttatttacattattattttggcatttctttagcatggattggtagatttattagtgctgacaattatattaagtagaaatcactcaggctgtcttttaaaatttttgacagccattcaaaatttttttataattttttgttctataattgaactcattgaaaatttagactgctttgcctctaaaaaggctcttgagagatttattttagaatgtgaaaattttatttacattattattttggcatttctttagcatgaattggtagatttattagtgctgacaattatattaagtagaaatcactcaggctgtcttttaaaatttttgacagccattcaaaatctttttataattttttgttctataattgaactcattgaaaatttagactgctttgcctctaaaaaggctcttgagagatttattttagaatgtgaaaattttattttcattattattttggcatttctttagcatgaattggtagatttattagtgctgacagttatattaagtagaaatcactcaggctgtctttttaaatttttgacagccattcaaaatttttttataattttttgttctataattgaactcattgaaaatttagactgctttgcctctaaaaaggctcttgagagatttattttagaatgtgaaaattttattttgattattattttggcatttctttagcatgaattggtagatttattagtgctgacaattatattaagtagaaatcactcaggctgtcttttaaaatttttgacagccattcaaaatttttttataattttttgttctataattgaactcattgaaaatttagactgctttgcctctaaaaaggct

SEQ ID NO: 37870 - DNA, 887 bp, Heterodera glycines
  unsure (1)..(887): unsure at all n locations
tgccacacgttatctcaccaatgaatttgctggtttggtgttaatggtggacaattacagctcggacaattgtttgaaggtcgtgttttggattatgaattaattcgttttgtttatcttttttgctcaaagaatccatttcttcctatttgcgcattatttttcgaattaattcccatatttctcatttaaggtccattccgattgtcaaaactcaacaaatgttctttccactcgttcttctttgcttgcgttcgattccatccctccgctgcatcgacaggtccttctttatcgcctgtgacttcaataattgtttatggacaatgattaaaattgcgtgtcatatgaacattttgccgttttgcaatcttttagtgattttaaatgaaaagcaaaatgagtccattttaaatgggaattgctttccctgattttttctgtaaaaaagtcccctccccactttcttcaggttgtcactcttttgacgcacttcgaaccctcccaatcttttatggtcactcatcgatgggtttaccaccaaacaaaattcccacaactgcgcgactttgtgccctgcactgaatttgcttccgctcagaattttccaccgttacaaacggaaacaatcggttatttgcatggcccttttccggtctataaatgatttgttcacatcttctaatttcgtcaaacatatcttttctatttcttttgtggatttattttttcccatcttcagcatctcatacatatcacttccattgtatattttcctcctttcatncatgaatttattgacttanagaatttttacgactttataaccgtcattcctcccgacaacccattcctaatggaagcgtagcaaaaaaaaaaaatttatg

SEQ ID NO: 37871 - DNA, 908 bp, Heterodera glycines
tagggaacaacgatatatcttgccaaagcggcgtacgtaatcaatacaattgtttacactgctgaaaactcaaagatcaatccatagtttcttatcgtaacacacaatagaaatcctttcttcattatcgattattcacaaaaatcattcattgtctatttcatcatcagcaaaaacactgtaaaatttgctatacatcatcggcatgtacacgcatcaattgttcaacttgctcaacattatagttctccctaattcttgatttgcttcatctttcctttcttctccttcatgttcggtgagaagcaatgtatcttcaacatcaccaatttgaatcaataattcttcttgttgttctccagtttgtttcaacagttcggcttgttgtggttcaggtagtggccgctgttccagttcttgggcatctggcgacatattaaaaaccttatcgtttgcgggcattggcataatttaaagtttttagaagcgcgaggtgagccaattttatagacagtaccatcccgaggggagtcgatatagagagccaagaaaatcctgaaaaaattattatcaaatcaacgaacggtctcaaaaaaataattcaccttacagggggcggagtcagttgattgcgtcatcataaaggggggggggtcagttgactgcgttatgctaagggggcggagtcagttgattgcatcatgataaagggggcggagtcagttgattgcatcatgataaagggggcggagtcagttgattacgtcatgctaaagggggcggagtcagttgattgcgtcatcataataaggggcggagtcagttgattacgtcatgctaaagggggcggagtcagttgattgcgtcatcataataagggggcggagtcagttgatgacgtccatgag

SEQ ID NO: 37872 - DNA, 1186 bp, Heterodera glycines
ggacaactcagccgaggagacaatttggcagatggacaactcagccgtacaataaaaaattacaaaataaagcctaagcctatgcctcgcctaaagcttaggcctaagcctagcctaagccattgtatgagttacgttttgtaaattctcgtaaagctgagttgtccatgagccgaattgtcccatcagctgagttgtcctcggctgaattgtcctaggctgagttgtcctcggctgaattgtcctaggctgagttgtccccagctgactgtgacgcgatttttgggcaattttttaataaaataaatgaatttatatattcagtgatttatgcttttgaggtatgcgttaattgagaaaggataggaatatattagaacatatgaacagttattttttgtactcgggaaacaattagctaaagcccagaaaaaaaggttcagaggaaacatctcgaggattaataacagcaaaataacaaaacaataaaaaataaagctctaaaatgataaattcgcaaaatgtacaaaaatagggaattttataatgcatttattttcgaatatcaatcacaacagcacatttgtgaggctgggcggcgaggtcgacgagtgttggctgatgctgccattgctcggcggattgaccatgccgaccaatgggttctgctgcttttgaagcagcgagggggaggacgaagaaatgtcggtggattggtggtggtaatggtggtgaagcgcggaggtggtgattgcagtttcgtgctgtaattttgttttgtttaatggcaaattaagtgatcaatgaaagtgccaaattaaagagaaaaaaaaagtgtcaaccgccaaattccctgaaaaaggtcggaaaacaaaaacaaaaggacagagtgcggaaaggagatgtgagagagaaagggagaggggggagagtagggaaaaggagagagagaggagggagagagagggggagaggagagaaacagtggagagagagagagagtgaaagaggagagagaaagatagagagaggagagagtatgtgagagaaagactaatagagtacatacattaagagcagtgctgtgccgtgctgatttgtgaatgacaaacccgcactctgacctcaattggttgcaatgcttcgacaggtaaatgcgtctgtaatgagttgaatgatgtcatgc

SEQ ID NO: 37873 - DNA, 1097 bp, Heterodera glycines
  unsure (1)..(1097): unsure at all n locations
caaaaaaaaacantttttcgccattaattgtttgctttctggatggattgttagtttgttgttatgtatttgcatggcttttttttggctttttgggaattttctctaaaaaggtgccgacgatgtaaaaaataaaaataaataaaaatccaaaaatggcttggcgcctcactaaattgaaattctaaaaaatgttttactccactaatttaaatttttttaaaaagtactttgccccatttaaaaaaatcttggccctattaaattgaaattcttttaaataatgcttatcccttttaaattgaaattttttttaaatgcttgactccaataaattgaaattcttttaaaaaaaatgttaggccccattcttaaaaatgcttggccctattttgaaattaaaaaaaaaagtttttttaaaaagcttggctcctctaaattgaaaattttttttaatgcttgactaaattgaaattcttttaaaaaaatgttaggccccattcttaaaaaatgcttggccctattttgaaattaaaaaaaaaagtttttttaaaaagcttggctcctctaaattgaaagttttttaaaaatgcttggccctattaaattgaaattctttttaaaaaatgcttgacagtttgcgagccatttatttattgactgttcccatttcaataatttgctgcgagtgttaacaaatgatgatgatggattgggatggttggttcttcgatggtttcactgataaaatgtgtgtaataattagtgacaaatcatcacacaaattttctcgtcccctttcttttacctccgtttgctctccaaatttatacttttataaagttattatattttaaatttactaattttgtaaaggacaaaattcgtcttatgactcagagaccgccacaaagttttaaactatgatctttatttacctttttaattgacatcatttttaattagccaaatatccaccaaaaaattaaataccgtactcagagaatgataaacaattaaacgggccaccgtaccaccacatttcattaaataggcaattttactaaccgttatgaaatatattcatattttcaact

SEQ ID NO: 37874 - DNA, 1098 bp, Heterodera glycines
aattgccctccccccagaaaatttgtctgaagtggtcaattcactgcagtttgacacctgttgggcgaaaactcgggtttcctttgcctttgactattttgtattggaaaggcaacgaatttgggttcgaaaccaaaaatgggtggaagaatagtattattagtattaaagacgaattattttcttttagaaagcccagcgcgacttggcccaggcgaaggatctcctcgggaacgtggcacaacatttggcacccattccacgtggacaacttcgcaattgtaagttcattaagtgtatcttaaattaacatttaccgaattaaattccttttagtgatcgcgtctttttttgaggtcgggtacacctttggaatgactccgccccacgaagccaatcatgccccgactcaagaaaattttaaagtgcagtttgacagaatcaccgaactgcttcaaaatgcagatgccacccgaattaacaaggcatcacagtgttagtcgtaaacactgcatgttaattataatatataacataataaataaaataatttgaagatgtcattactcattaagttctgttcacgctgtacgaacactttggttcctttcatcagttggcaattgataacaacgcaactcagactcgaaaccacgcctttcgggccgagaatgtcgcccttcgggctgagaatgttggacttcgggctaaaattaccagtctcgagggaactcttgagtcaatgctttgaaagactgacgataaatgttttttgttgactattgttgttataaaaaaatcacctgcacattttttggataaaggtcatcaaatcaatgaaaagcttagtcagtgggacaaaggcgaaaaggcgcgccgaaaaaataactttttgaattttcttttttctcggataaatttcaaattttcagttaaaagtggggaattactttgggtttgtcccccccccccccccttttcgaaaattttttagttttcaaaagtcatgaaaacatgtgtatccatgggttttcggggtcgcgtgaacacgaatccggcatccaactgaaagccctggagacatgcttttatgactta

SEQ ID NO: 37875 - DNA, 999 bp, Heterodera glycines
tcgagcatgatagggagggcggtgcgcaatagaccttttatttttgaggaatttttaaatttatactctatcccagaaaaatggctatctctttttttgataaattttatacacatacaaatgctctcgagcatgatagggagggcggtgcgcaatagaccttttatttttgagggaatttttaaatttatactctatcccagaaaaatggctatctctttttttgagaaattttatacctcacaaaagcgcttgcgtatgagacggagggctgtgcacaatcgccattttatttcacagaggatttttatatttagaggttatcccagaaaaatggctatctctttttttgataaattttatacacatacaaatgctctcgagcatgatagggagggcggtgcgcaatagaccttttatttttgagggaatttttaaatttatactctatcccagaaaaatggctatctctttttttgagaaattttatacctcacaaaagcgcttgcgtatgagacggagggctgtgcacaatcgccattttatttcacagaggatttttatatttagaggttatcccagaaaaatggatatctctttttttgataaattttatacacatacaaatgctctcgagcatgatagggagggcggtgcgcaatagaccttttatttttgagggaatttttaaatttatactctttcccagaaaaatggctatctctttttttgataaattttatacacatacaaatgctctcgagcatgatagggagggcggtgcgcaatagaccttttatttttgagggaatttttaaatttatactctatcccagaaaaatggctatctctttttttgagaaattttatacctcacaaaagcgcttgcgtatgagacggagggctgtgcacaatcgccattttatttcacagaggatttttatatttagaggttaaccgagaaaaatggctatctctttttttgataaattttataca

SEQ ID NO: 37876 - DNA, 995 bp, Heterodera glycines
ataattggggattgtttttttatgtaataaaaaagcgcgaaatatgtaaataaatatgtataaaaaatgctaaaatatgtaagaaatatgtacaaaaatgctaaaatatgtaccaaatatgtaaataaaattttttttaatgtttatttttttggaaaaaaattcctagtaaatggtgaaacaggcacaaaatgctttaaaaattacctaaattggcttagaatcattttattattttaaaaattatttttgatatctcattttttgaaaaaaaaaatagattttttagggataccttttcaaaaaattttttaaatttttcacaaaaaattttctataaattagagaccggacaagagggtcggtcgaacggtttcggttaaaaaccgaaatcgaaaaaaccgaagaaaaattttcggcttatttcgattttttttttttgaatttgtttatttttttcccaaaaaagcaataactatttctattaatagaaaaaacgaaaaatctcctccgagtaaaattgtagggctattgcaacccttttgaacggtgtactataggttgtgagaatgatttaaaaaggcagccaaaaaacatgtgtttgctccttgattctaaaaaccccaagattagttttggcgaactggtgcctttttggcgttttttccgaaaaattccattaaaaattcaattaaatcgggaaaataaacccctaagaaatgctctaaaaaaattttagaaaatataccattaagaattgaaaaattttctcaaaaattgttcgccaaaatttcatttttttttcttgataaaaattttaggtttataaacttccttattgaaaaacattataaaatattaatattcatttaaatgatcaagattccggcggtgccgataggcgccgccgtgggaaattttaagaatttttaatgaattttgttaaaaaatggccaactgatttttcataaaagtcggttgattgtttcggtttt

SEQ ID NO: 37877 - DNA, 1336 bp, Heterodera glycines
caaaataataacataacaaataaaaatttacataaataaatctaatactaagacagtttaccaacacacaaatgatgctaatcgaatttcgaaagatgtaaaggaaggatttttaggaataaagaaaaaaaagcatgaaaatgattatctcaataaaaattcttttaatatattcagggttcgcagatgaaaattttcaaaagcctcatttggcaagcaaaaaagcctcattttgggtcaaaaagcctcattgcattaatttgcttacgagcctgtacagactgggaaaatcagcgctgaaaattctttgccatttttgctctgttgtcagtcgcatgaattctgcttcgtcgatgctgatcaaaatgtggttaacctgactaacttcatcgaacaaagtatcggacaaatcagggggaaaagttgaggccaattcaatgacattctcatggactagttgccgatctgtaagcgaaagccattgaatatgatccggataacgttcggtgcgaaaccatttggcgacataatccaaagttgttttgtatgactgaaaatttgtaatatttaaaaacattttagctcaatctaccgtgaaagcatttttggcacgtttaattcctttgaactcagaataacaatcaagaaattttcttttcaatgatattgaacctagcaaaaaaatagttacacttacaggtcatttgtggaatatagatataggtacatatacaggcttttttcgaaaatgtcgaagctctattaaacccaaagtactaaacaattgccaaacattatgccaatttatcaaaatccagtcttacgaattatcagcatcatttgcatcccatgaaaaagaaaagtggtaaaacagaaaacacagtgctaatcaaatgatcaacaattttctatctaagctgttctttctgatcagctgatcaccatttggctgatcattggtccactttctttggtcgtcctcatatttgccgatcacttcgaaccattttggtctgatcttagaagacacccttcacaccaaagttctgcaaatccttaatccgttgatcaattcaaagattaagttttctcatgtttttttcatgtacaataaaattcaaaaatttcgttggcggtttgaaaatctctaaataaatattattattaaaaatttttaaaataaaaaaacattcctccatttttaaggaataaaaattaattgttaaaataaaaatgtgacaaaattaattaaaataataaacggtttgccctctgctcaataatttaaaatagagagtattacatgtagtttcgtttttattttaaatatgctttt

SEQ ID NO: 37878 - DNA, 1142 bp, Heterodera glycines
  unsure (1)..(1142): unsure at all n locations
tttctttttcccatattaacgcccccttcagcagtccctccatttgtccctcggacagtacaagtctccctcgaacaaatacggaatttgtccgccctttgagtcggcgctttgccaccgcatcctcaaaatgttccgcggcgcatcgttcgtccccngcggcacattcctccgccactttcagccccttacaaatcatcatttgtttcccaccggtgggtactgcaaattacaccggacaaaaaattgtgaagtgttcgctgaatttgttcatgttttccatgtagcgatccagcgaagatattgtggggaagagatcggggtgatcagtcataaattgtttacggaaattggatttgaagtggtggaaggatggaaaagcggacttaaagaagacaaaagggggagggaggggggggggcaggaaaaaaacatcgccacaaaggcaattatttagttttaatttaccaccaagggagtccaacaaaagcaccgcaaaatcagagcccaaattgaagcaatttttacaacaatttttttcatggaattttcacataaattaattattaaaaataaaaataacaaacatgtgctttagagcgggaggaaagaaaagtgggcattcacaaatcacaagctgaactttcaaacttttaaataacaccggaattagtcacaaaatttccgagtaaatgacaaacagtgaatttatagagaaaagcaaaaaaaaacgcgaacaaattaatttttacatcaccgaaaaaggacccatttaaaaatgcaaaggcaaaaagtaccaaaatgggaagaaagctcaacaaaacaaatgatggaatatgaaaataaagaaaaagaaggcagacattccgtacaagcttctgaaacattcaaattccctatttgtttggcggaacatccgactcggtggcctccgtttgttctctcctgtaaatgtgccttttctgtttggcaaatggcaattccatcgccgccacttgcagaggccatccattgaccacaacgcccgcctgaacagcaacgccaatctgagaggaatttcgaacataaacaaaaaaaattggtctaaacactgaccacgacagacaattcggggtcaacgccgaaattggcgattcctgtaa

SEQ ID NO: 37879 - DNA, 800 bp, Heterodera glycines
ccccgtaaaaaaatgggtcaaatgatataccaatcgattcgtctctaggagctaagcatggaaaaatatgtctcgagttgcggaaatgccaaaaaaccggtttttgaaccggtttaaaactcgaaaaattgactgaaaaggggggctcctgaccctttaaatggccaaattcggacaaatttggtatcattctagaagctcttgacgagcttaacctaaaaatcatgtaatgaactctaaccgacgccatctaagtactgggacaactgagtcccagtgaaaatggacacttcactaccgaacaataataaaaggtaaataagaactcaaaattttattttctctatatgaatcatgaataaaactaccaaataatgctgaaaaattttaaacaaatctagattacctaaggttatggaaaaaagtgagaaaatttgtcaagccaagttttcgtacatttgcaaaaaaatataacgcttggcgccgaaaccacccccgcccggaagcaattaggatggacatatattttcgagttattgaatcttgtgttttggaattatttttaggttttcaaataaaatcatagaaaattgtaaagaagccatacccaaaattcattaacacaaagataacaaaaaatgaaaaaaaagtcactaataaaagatttaaaaaatttcaaaattattaattgtttctaaaaactaaaaatttcgtccataaattgtcgataaatcttcaatggagcatgaattttgggatgatatagctcaaggatcaattcactgtcgtgatgcacatgg

SEQ ID NO: 37880 - DNA, 981 bp, Heterodera glycines
  unsure (1)..(981): unsure at all n locations
tgactggagcaatcgaacgctaacggacgacctaatggtaaaaaatccccgaaggagagaatttaattaaatccattccttcgggggaccgtgccgggtgccgcggggtaagcagtgctggttcgtttcatcacggcaccgaaccttttggctagtcagcaatcgttgcttaacttgccagatcggacgggtgcgcatgattccactgttccaagcaccccaccaaaagcaaaacgatataaccaaaatataaggaaaaatttttaaaaaaattttttctccatcttcctttttgatactaaagcatcagagtgctaaaattaagttgtaaataaaatttggtgcgctttagagcactttctgaaaaaaatatttatgaaacaaaaaaatcgattttttcaagtgtccgtttggggtactcaaacaattatggggagcaaaaatccaacgcagaattaaagtacaggctataggaaagctactcccgaaggattcggtctccccataaatctgggcgcatcggttcggggggactgccccgaaaacaaaaaaatcgattttttcaagtgtccgtttggggtactcaaacaattatggggagcaaaaatccaacgcagaattaaagtacaggctatagggaagctactcccgaaggattcggtctccccataaatctggacgcatcggttcggggggactgccccgaaaacaaaaaaatcgattttttcaagtgtccgtttggggtactcaaacaattatggggagcaaaaatccaacgcagaattaaagtacaggctatagggaagctactcccgaaggattcggtctccccataaatctgggcgcatcgcggtttcggggggactgccccgaaaacaaaaaaatcgattntttcnagtgtcccgtttggggtactcaaacaattantggggagcaaaaatccaaacgcagattaaagtacaggcctatagggaagctatt

SEQ ID NO: 37881 - DNA, 874 bp, Heterodera glycines
  unsure (1)..(874): unsure at all n locations
tttcattattcatcgtttttcggcctcagtttccctcgctcatctggtggtagggcggcggtggcgtctgaactgcttgcactcgtcgtgctgcgccggtcggcactgtgtccatggacattgcgctcacttcttcgagcagtgagcgacgcgtccgcccgccgctcttcggcggtccgttgctgctcaccggactgcccatggtcataatgcacccgtccacctcgccctcctcctcttcgtccggctcactgcccactgtcgaagtgttgtcctccgcggcgccgccgccccttcagcggaagggagaaaatcatggccccgtgggatgagttaatgaatcagttccgaataagggaaaacgagcaaaatgaatgatgattagagatcggcatttgaaaaaacctggacctggattttctgaaatttgtttcaaaaagcaaaccaaagtttgaaaatgaattaattgctaccgacgtgtaaaaaaagttataaattaaaatatgcaaaaattctgacttttggtagtattcatcttgcaacttttttaaaagttgttcaatcgcttagaaatagttataaaaagcttctaaacgtgtagggctttcaaatgatgcgaatttataaaatttggccagctgaaaaaaagttatgatgctctaaacttgtcccagactaaaccggccagataaactgtcccctacccgcttaggtatatctaaaaaatttaaattatataataataatatgtttttaaatctatttaatcatttttgataagttgaaaaaaacattggtcacttaaaataattaattctaaaattttttccaggaaatcncaggtttttcgtgttatttcctggacaaaatccag

SEQ ID NO: 37882 - DNA, 191 bp, Heterodera glycines
  unsure (1)..(191): unsure at all n locations
tgcaggtcccntttaactctcgctaaaaacaggatgtgcatacagtgtttgtatgcgatttcaacaggagatgagttattagtggtggtgatggtaaagacagccgcggtcctggcggtggggtgaatggtgggccgacggagttgggtggaggtgtggatgcatccgatcactctggctggagctcggag

SEQ ID NO: 37883 - DNA, 986 bp, Heterodera glycines
  unsure (1)..(986): unsure at all n locations
aaagcttctcaacaattttaacgcttccaattccttctacaatcgcctttatacatcccattatgagcgctaaaattatcagagtgccgaaaatcgcatgtgatctaagcctagaaaaaaatggtctaagtaaaaatcgtaattacgctcaaaaagcttctcaaacaattttagcgcttccaattccttctacaatcgcctttatacatcccattatgaacgctaaaattatcagagtgccgaaaatcgcatgtgatctaagcctagaaaaaaatggtctaagtaaaaatcgtaattacgctcaaaaagcttctcaaacaattttaacgcttccaattccttctacaatcgcctttatacatcccattatgagcgctaaaattatcagagtgccgaaaatcgcatgtgatctaagcctagcaaaaaatggtctaagtaaaaatcgtaattacgctcaaaaagcttctcaaacaattttagcgcttccaattccttctacaatcgcctttatacatcccattatgagcgctaaaattatcagagtgccgaaaatcgcatgtgatctaagcctagaaaaaatggtctaagtaaaaatcgtaattacgctcaaaaagcttctcaaacaattttagcgcttccaattccttctacaatcgcctttatacatcccattatgagcgctaaaattatcagagtgccgaaaatcgcatgtgatctaagcctagaaaaaatggtcaagtaaaaatcgtaattacgctcaaaaagcttctcaaacaattttaacgcttccaattccttctacaatcgcctttatacatcccattatgagcgctanaattatcagagtgccgaaaatcgcatgtgatctaagcctagaaaaaatggtctaagtaaaaatcgtaattacgctcaaaaagctttctcaacaattttagcgcttccaattcttctacaatcgcccttatacatcccattatgaacgctaa

SEQ ID NO: 37884 - DNA, 1528 bp, Heterodera glycines
  unsure (1)..(1528): unsure at all n locations
gaagaaaatatttatgacataaaaaaatcgattttttcaaagcctcctttgggggtactcatgcaattatggggagcaaaaatccctcgcagaattaaagtacagactataggtaagctattcccgaaggattcggtctccccataaatctgggcgcatcggttcggggggactgccccgaaaacaaaaaaatcgattttttcaagtgtccgtttggggtactcaaacaattatggggagcaaaaatccaacgcagaattaaagtacagcctatagggaagctattcccgaaggattcggtctccccataaatctgggcgcatcggttcagggggactgccccgaaaacccaaaaaaaaatttttttgaataaaaattatttaaatgacctgactagataatatttaaaataggttatttctcttcctttcagtatccctgcaaagtttgctgcgcttctgatcagtttctgaaaaaaagttaagcctaacatcggttcagggggactgccccgaaaacccaaaaaaaaattttttattgaataaattatttaaatgaactgactagataatatttaaaataggttatttctcttcctttcagtatccctgcaaagtttggtgcgcttctgataagtttctgaaaaaaaagttaagcctaaactttttggcctgtttaaaaaggaattaaaaatttttaaaaattttattcatctccctttttgatagaaaaagcatcagagtgcctaaactaacatgtaaataaaatttggtgcgtttcagagccctttctgaaaaaaatatttatgaattaattatgcaaaaaacaaataaataatgaactctcttccttaataattttcctgcaccgaaggtactcactcggccgcttcgcggcctcgtggtgggccttcccccccgcccttcagagcacgacaaatatttcaacaaaaattttgaaaaattgactagagcaatcgaacgctaacggacgacctaatggaaaaaaatccccgaaggagagaatttaattaaatccattccttcgggggaccgtgccgggtgccgcggggtaagcagtgctggttcgtttcatcacggcaccgaaccttttggctagtcagcaatcgttgcttaacttgccagatcggacgggtgcgcatgattccactgttccaagcaccccaccaaaagcaaaacgatataaccaaaatataaggaaaaatttttaaaaaaatttttctccatctccctttttgatagaaaaagcatcagagtgcctaaactaacatgtaaataaaatttggtgcgctttagagcactttctgaaaaaatatttatgaaataaaaaaatcgatttattcaagtggtccgtttggggtactcaaacaattatggggagcaaaaatccaacgcagaattanagtacagactatagggaagctaatcccgaaaggattcggtctccccataatctgngcgaatccggttcgggggggactgccccgaanaacaaaaaatcgattttt

SEQ ID NO: 37885 - DNA, 1014 bp, Heterodera glycines
actttctcttaaactttctattccttttccactttctgttcctcttccattttctcttccactttctgttcctcttccactttctcttccactttctcttaaactttctattccttttccactttctgttcctcttccattttctcttccactttctgttcctcttccacttttctcttccactttctgttccttttccactttctcttaaactttctattcattttccactttctcttaaactttctattccttttccactttctcttccactttctattcctcttccactttctgttcctcttccactttctcttccactttctcttccactttctattccttttccactttctcttccgctttctattcctcttccactttctcttcctcttccactttctgttccttttccactttctgttcctctttctattccttttccactttctctactttctattcctcttccactttctcttcctctttctgttcctcttccactttctcttcctcttccactttctcttccactttctgttcctcttccactttcctcttccactttctgttcctcttccactttctgttcctcttccactttctattcctcttccacttctcttcctcttccactttctcttcctctttctgttcctcttccactttctgttccttttccactttctgttcctcttccactttctattcctcttccactttctgttcctcttccacttctgttccacttccactttctcttcctctttctgttcctcttccactttctcttcctcttccactttctcttcctcttccactttctcttccactttctgttcctcttccactttctgttcctcttccactttctgttcctcttccactttctgttcctcttccactttcttttccacttccaccttctgttcctcttccactttctcttcctctttctgttcctcttccactttctcttcctcttccactctctcttgcactttctgttcctct

SEQ ID NO: 37886 - DNA, 873 bp, Heterodera glycines
aataactaccaaaaagaaactgataaataagctaaatacatagaacaaatcttttttcacatttctatttcttttgcagatagaaatctgtcttttaggcggagttgtgttgaattttccaagttttccggagaaattaagggccataaggcttaaatcacctcaaacatgtgacccactgaattaaactggaagcacttaacactaaaataacttatagacctcccttaagcattttctattcactttatgtaagaaaaaaattcattaaacacaaattttttgtgggcgaaaaaatgtaaaaatctgggtaaatttgaaaaaaaaaattctagggggttgggaaaaattttccgtagaagatgattatgacgaacagaaagagcacaaaattctctacaaaatggcctttgaatgaggtctctaccagggatgggccgaggtttcgcttttcgcatttcgcctttcgcattattcgcattttttggcgtttcgcatttcgcttttcgcatttcgctttttggcgcgaaaagcgacttttacacccctaagaattggattaaattcccataaaatttttcaaaattttacctataaattggctaattttcagtgaaaaactgtttataaatgatcaaaatttccaattttttccccggcggcgccaatcggcaccgccgcgcccccaaaactcctattttttcttagaaaatggcccaaaatcgcaaaatttggtaatttgatgaaaaactgttctcagcggcgcgccaaaactcttatttctcattagaaaaatgataaaaatcacaaaatttgatcattttttagtgaaaaatctgtcaacaaattttaatccaaattttcaaaaatttt

SEQ ID NO: 37887 - DNA, 950 bp, Heterodera glycines
  unsure (1)..(950): unsure at all n locations
tggggtgcgattaatnagtttttggaaaacttcaaaaaattgcatcaacagcatctcgccgaatggttattaaataaaaaggctttcttcaacaacgccattaattcctaccaaaacatatcttttttgagccaaattagttcctaaaaaacaaaatccatattataaaaataagcaataaattgatttttaagcacttaagcattttatgaaaatactgctttgtatagaattttgaattttaatttagttttacatatttaaaatcttttccatgatatatcttaatgataaataaatattatataactttaatccatttactttttaatcttttaaaattttgaattaaatgtttatcacattcattgtattttatagattttataagaagcttttttttagaaaattgcaaaaaattttaacctttaaaaatatatgtgccattttgaaataaagttttttataatatgctaaaacaaaattacactttttataaactaaatattttcaaaaatctctaaaaaagttcaaaaattttcgatttttaatgtgttttttaattccaaaaagtcaatcctgagggggtgtgtttttcacttttcttgcatttttcatgccaaaatttccaaaaaatggctactctaaattaaaaataacaaaatataaatttattttcgaaaataccctgagtatgcattttatacattaaaaactttaccaaatcataaattttaacgtagaaattgcgatttttgagccaccttcttcatagcatatgcgtagaaaaaatgcaaaagcatataatttattgttctttttataaccatttgaattgttagtgttatacatattttgcattanaaatacatttgcttttttattttatgatagaataaagccatttatattcttatttattttgtaatcatcagaaaaataaacatcaa

SEQ ID NO: 37888 - DNA, 1170 bp, Heterodera glycines
gaaggcaccaaaacgcacaagaaagtcgtcagactatggtaactgcttttttaagtaggaaaccccggaaaaatggctttaaagtttgttcgagttcgaatcccggttttcgaacttttttggaggagtagacgaatcgccgcattttggctgagtagacgaatcgtctagtagacgaatcgtataatagacgaatcgttgacatttgaccgagtagacgaatcgtcacattttggctgagtagacgaatcgtcgagtagacgaatcgtataatagacgaatcgttgacatttgaccgagtagacgaatcgtcacattttggctgagtagacgaatcgtataatagacgaatcgttgaatagacgaattgttgagtagacgaatcgatgggaggcggtacccatagtgtatgtgtcatcgtttgaatgtggcgtttcgttttgttatcgctttgcgttaaaaaatgatttgaaaaatgtaaatgttttgttttacgttaaaaatgcgtgatgagacatttgcgccgctcagcaaagtcgacacttgcgccgcgacatttgcgccgcccagcaaaaatggacttttgcgccgcgcagtcaaaaatattatatacataaaaattccactattatcaataagttttactaaaactataagccatcgacaaaaataactaattgaaaattcgaaaaaattactagtcacaaagattgacattcaatttttaaccattaaaatcttaacattgaataggttcatcaaagatatgaaaaaatgattaagaatacaaactaacaaaaaactgaaaaaaagaattttctgtagaaaccccaattatttttttgcttcgaaaaaagaatgaaattcaattcctttgtaattaattttctcaataagttattttcatcgattttaatttaatttcattgaaaaaacgcactgattttcaaattttcgctcctattttaccatttttcgcattattgccgattcggcaatattttttaaaacacggcactatgccggtcggtcaactgtcgtccattcatttgctgtgactgagattgtgtaatgtcagtttgcctggattagtttgtttgggattaggattttgctttctcaagcctaattatatgtaaaactttagaaagtaaacatcgaatgaaaaag

SEQ ID NO: 37889 - DNA, 1350 bp, Heterodera glycines
ggcattcattcttcggtcaaatcgaagaatattttaatctaaaactgatgggaaacgcagcgggggggggggcgaagagagtaaccaccgccggtgctattcatcataacacttattccgttgcaaaattccattcctccgtgtcaatgggctgtacaaaaacagaagggggaaaaacaaaaacagtgagtggcggggggggggggcaccgaaaaagcccctcgggggatggcacttgacctcccttcccttctcttcctcccctcccctcccttcccccgcctttgaaaatccgacccgaaaaaacggaaatgagctcggaccaaatgacacttccgtttttgtccaaaattggattaattaatggactactgaacgaacaatcaatgcattaattacttcaattaggagagaaaatcaaaatggtccaactaattaaagggtttctgctgcccctgaggcgtctctttggttaattaattcgtccgccgttaattgctttgttcgcctgccaatgtcactttcagctgctcatgtactctgcttctcatttgtcgcattgtcgtccagtgctttattgcgtatgtttgtgctgctgctgatcacttctaattactccaattagtttggccatccatttttggcacattttttcggtttttttggcgactgacactttttttggcttcgttttgccgactttttggcactttttggcatttcgccctctctccccttttgttgtctcttcatttttgactttcctcctccctccctggtcagctgttgctgatctgtccctgtcccctcttctcatcgattgtttgtgccttcgctcctttcgccccgtctgtggcactgatcagcgaacctacgacaacatttgctttttacactgtgccaaacgtttgaacgcaggcaaaaaaagatgcgagtggagggaagagaaagtgccaacgcgtccttttcagaattgcgattggcctacgacggcgtttgttgtcctcgtgccgaactgtgcacagactacgaggatacggtgtgtgaccaatttggtacggtgcttaagggaatgcgaagagaaaggggtgggtatttactgggtggccatttgaatcgcaaagaatcaatcattttttggcaaattgtctctctttttttgtccatttgtcaggtgttcggtacgacaacgactgcgtcttcgagtttcacaaatgcattcgccggcgacgcattggcggcgaacgttgcgcgttggtggggaggggcgagcgaatgtgcggggcgaagcggcggatggcggcgagcgagcaaagcgctgccgacaacggcgagcactgctcgcccatc

SEQ ID NO: 37890 - DNA, 916 bp, Heterodera glycines
ttcgggttcggggttcgacatatggtcaaaattaatgtctgattaggattctctgatccttaaaacccctaatatgaggttttcttaaattttcgactttttttcatgttggccgaattccaatacttttcagaacaaaaaaattcttcaaaaagggtggggtgccatctatagtattacctttttttcttaaacggttatataaaacccactttttgcgccttattttttgctcaaaaaatgtttaggcaaaaaatcccgagttattcaattggtgctgatttgatttggcatttttctcgtcagttttcttcatcctcaccaaatgttggggcttcgtattcctcgaaattcgccattgttgttcaactgttgcgtgtcaccgcctaaatcggaggttgtctgattggcataatttcaaaaatttcaaatttcaatttccacttttttagtttgctcgtttccatgtcgcccgttcgttgatcagtgggcccagcaatttccgtcatgcatttgaccatttgatcaaaaggttttctctttttttaacgagatctcatggatttattggccggtcatttgtctggttttttgtaagagtccgggcaggatcggtattaaaaattttggctgtaatgcacttaatgagtcaaagggtaatttttatgaatcctatcaaattcaaatctttgcttcaaagaacataatcacaaaaaaaaataataaaaactataatgaaaatcttaaaatgaattttgtaaatgtcactagcacaattcacttcgcactaaactaaagagaatttctttttccctcttctcagtgttacctttccaattcaaatttcttagtaattatttcttcactaatttttgaatttccgtctttaattttgaaatattgtttcagcattgct

SEQ ID NO: 37891 - DNA, 984 bp, Heterodera glycines
tttcagaaagggttctgaaacgcaccaaattttatttcctccatagtttaggcactctgatgctttttctatcaataatgtaggtgaataaaattttaattgctttttaactttgggaaaaagtttaggcttaactttttagtgaaagtttgatcactcatatttttttagtctaatctactcaaaacggttcagaattcaataaaaataacattcacggtgcgaaaaatggggtttgacaagtttattggggaaaaaaagactttacaaaataatacccctgggagaagggagtgggaaacatgatttcaaaattttcaattttttctagtctaatctactcaaaccggttcagaattcaataaaaataaaattcacggtgcgaaaaatggggtttgaaaagtttattttgaaaaaaagactttacaaaataatacccctgggagaagggagtgggaaacatgatttcaaaattttcaattttttctagtctaatctactcaaaacggttcagaattcaataaaaataacattcacggtgcgaaaaatggggtttgaaaagtttattggggaaaaaaagactttacaaaataatacccctgggagaagggagtgggaaacatgatttcaaaattttcaattttttctagtctaatctactcaaaacggttcagaattcaataaaaataacattcacggtgcgaaaaatggggtatgaaaagtttattggggaaaaaaagactttacaaaataatacccctgggagaagggagtgggaaacatgatttcaaaattttcaattttttctagtctaatctactcaaaacggctcagaattcaataaaaataacattcacggggcgaaaaatggggtttgacaagtttattggggaaaaaagactttacaaaataatacccctgggagaaagggagagggaaacatgatttcaaaattttttcatttttttctagtccaaatctact

SEQ ID NO: 37892 - DNA, 1011 bp, Heterodera glycines
tgcctcgcccgtcccccctctcatttcattgcttttttgtcaggtccacattttggagctgttggccacctcaagtggaaatgtgccgaggaaagcgcgcgaattgcttcagtccaatatgcctcatgggcatgatatgaactcattggcgcaatatttgatcacaagtattatgcggcttttccggtcgtctctttacggtcctttcaggtcgtcagtcgtacacaatgctcggtctccgacttcgggcagagcaggacaaaagtaaacttagttttccaattttaatttcgcaatccaaattgcgaagggtttcggcaaactttgatggaaacgggcgattcgcttctgattgtgtgcgaccggcgcgaccccgagttgggcattggcatggacgatgaacaatttgtggcatttgctcgtcaccggcacgccaacgccgaacgcatttcgacatggatgcacgacgaaaaacagaggccccgcgagttgggacagaaccaactgggcttctttctgatgtggttgcgatatgagttgaggtgaaagaacggactttataagtggttttgtacggcgaatagttcattgtgccagaagtttgaaggaatggaattttatttctatcatcagggaaaaagagaaggcgggatggctgtcgaccgttgaaattcgcactgaaggcctttccacggaccaagacgaccttccagtgtccatttccgtgtcttactttgcactcgcccttcaggggcccttccaacctctcagcaattattacgcgttgccatttgagttcaaaggtcacagactcaatggcactctctcgacaaaaataaacatcaaattcaggcgagtcctatcggtcggtcgaacattacgcctaccagcgccttttcgaggctctgaaatttccgcctgaggaagtgatgcgactgcgcacaactgttaaaccggcggacgtggccaaatgtgcgcagaaagtgttcgataagcagcaggtttcaaaaa

SEQ ID NO: 37893 - DNA, 1069 bp, Heterodera glycines
catcgcgaattgccattcaatacggaacttcgttgagttatgaattcaatgccaatttaaaggtatttttacaacaaatctttctggtgggccattggcaccgcctgacattgagccgtttttttaaattttgatgaataaaaacactttaaaaattaatacaaattaatttcaagtccattttcgaccaaattgaacctgcggatgtgcgtgcagtgccccctcgtgtccaccccctctgttggtacgcaatttggcgtgcaacagatcgtttccgtgcattgaatgggcgattccccggaagcattgcttcttctcagaagggagatgcaaaggaattgaaggaaatcgtcgggaaattgttttctgagactcaggtggtcgtttgttatcttttgcaagttaacaaacttccgaattttgcagaatgccgagctgatctccagccaggacgaattggttccaccggaaactatcgctgaagtttgccgttacggtggctcagagccgcacgttgtggccgctatcctcggcggctgcgttgctcaggaggcaattaaactgtgcacacaccaatacatgcccgtggacaattcgctgctgttcgatgcccattcccaacaggcggcctcttttcgggtggtcgcctcacaaagagaggaacagcggaccaggaagacccgttgatgccgtgattgttcgcaataatgaaaccaaaagcagtccgtcaccattttttttgtttctgttattcactgaccattgtattgctttaaatttccgctttcatttcacttgaaaaaaccatggtaaaatgaatgaattttgttatacagtgggaattaagggggtaattccaaaggttattagcctttaatttgtccttttaacggaaattcggcttcggtccacgttcgttctgttaagatacgcttccaacaagcccgcctcgctcagcaaaagattcctaaccgactgttcctggaacgcgttgttctgttgctccaaaatgacaatgcttaggcggaaagtgacgtgcaaatctgcgccactgggggagaggcgggga

SEQ ID NO: 37894 - DNA, 563 bp, Heterodera glycines
acagttcaggccccgtaaatttttttcaattaacaatcaaaaaacatttcaatatataggtttcggtagcacgaatccggcattcatttcggccaattccgaagcttaacaaaaatgtcctagattttataggtatataaataccattaaccattaatattgaattttgtcaatttagttcgcctattttttcatttttattttgattaccaaaaaaaatgtccgacaattcgaaagaagctgagaaagaaatggaaaaagcaatgtaacaattcaaatttgaattttccatgctaatcattttgctgtttcagcttcatctctgccgactgttggctcaaagtgttcgatttgcttccacgccatcagcttggcctcggaattgcgatgatcagccgccgatttgactgcttcgttgacgaacacttcaaaacgcgcaaatggacattgggcaaattgaaaattcgactcaaatttggaaagaatggcgccgttgaaatgaaaattgtcaattccaatggaaaaactttgccaaccccgcaaaatccgttgccgaataaagt

SEQ ID NO: 37895 - DNA, 1029 bp, Heterodera glycines
acgcagcagcaggagaacagcgacccgagctgggactacgcggttgaggacgtgctcttccacctgcaaaggccacaccccgtggccaaagtgttcgccgcgaaattcttaaaaagtccgtttccgcgcggcgaacaattcgaaaccccgcgggtcgtttagggacaaaggctttccgttctgccaaacgatgcgccgtgcaaagtgcatttggggcgaagacatcgaatggacagccgccgcagcagcaaacggaggggccgcggcggaaggccgtggcggtgccggaaagtgaggcggaagaggagaacgaattcgtggcccaataccggtgggattgctttgctgtgatccaattagcaaatcgatcgcttcctccaggccccgtcaggaaacgtactctttggcagactttgtcagggaaacctgctcccctccggtgatggttcggagacagcagaaggggacggaggcgcacttgtcggaagaggtgggaacggcacgcagccgacccccaccctccgcccccctctcctctcagttcgctattgtgccgatgcccgaatgcgtgccactctcttcccgctgcccttccgctgattctcctgccgtctcttcgccggcctttgccccctacgactccttcccaaatcgcctttcatccgccaatcccggcactttccttcgctttccgttcgccgccgatctttcgctttttaacgatttgaaggtttccaagtcggaatggcatccgacttggctttgtgagggcactctgatgttcgacttgagtcggcaattatcccccaaaatggaaacgccggtggcggtgatggtcagtcaaagaaaggcattgaatacatcagcaattggcataatttgcagattttggatggagcggaactgatcatcaacacggtggttccgctttcagcggattccgagaaactgaatgaattggtcaatgcatcggcggagttggggacggacagaaaaatggacgaattgctcaaagagattgggcccgac

SEQ ID NO: 37896 - DNA, 1121 bp, Heterodera glycines
  unsure (1)..(1121): unsure at all n locations
tcgtaatattcggctagggttaatttgntgtatatatacaattttggcgattttcaagcagtcatgatatttaattagtgaagttgaattattttatgcaactttttgactgattaattgggttttaaatntaaaaaaaataaagtgtgatctaatatagcctacttagttatttttcttactttttgatttgttataaattaaattaaattaaattttattttataaaaaaatcagtttatttttttattctaaatataccatttgtcgccattttcaatggttcatcatcaacagccgacaaaatcagttgtaaaattttacgttgccattgacgagatctatcataattatcaccatcatcatcctcaccggtttgaccatgattttcatttttgttaccgtaattctcatctactatacatttaccgttgaattccctgctgtttacccataatttggccaattcttttatcatgttcaagccgttttgtctattcaagggcaaaatttgatcatgcgaaatttggatgtgatcagtgagcagaaatgccgcatcaacaatttgctttttcaacattttcaacgcgtttacattaccaaaatctattaattagtgaaattggataaaattaaaataaatattattcaatacctccttttaaagtattgaaagaagtttgtaaaagcgtgaaaatgttggccaattgtggcttttcctgtttaataatggcccatttctctgacaaaaagtttgccacttttttctcccgattttcttcatttttcttctaaaactaatatttattttgttttaaataattttgaaaattttgataaaataattatctctgtatttgactcacaaatgaaatacttttttataattcaattattattaattatttcttttgttataatttttattttatgtatttcatttcattcaaataaattgcaataaaattccaaataaaaaatcttcaagcttanattaccacagttaattgatgaactaattgttttgatgtaattggaaataatttgtccaaaaataaatggtgctcttccaattcacacacnaatttgtgcaattcgccagtgccatcatttgcagccaa

SEQ ID NO: 37897 - DNA, 1103 bp, Heterodera glycines
gcagacacagagatagccaattttccaaattttcgcaaacagacgcgcagagaagcacattgcagatcggcgtaattattgtgagaatgcggtaggaattcctattactgatgagcagagaaagagatagccaattttccaaatttttcgcaaacagacgcacccagaacacatttagtatcggcgtaattattctgagaatgcggttggaattcctattactgttgagcagaaaaagagatagccaattttccaaatttttcccaaacaaacgcgccgagaaacaaattccagaacaattagtatcggcgtaattattctgagaatgcggttggaattcctattactgttgagcagaaaaagagatagccaattttccaaatttttcccaaacaaacgcgccgagaaacaaattccagaacaattagtatcggcgtaattattctgagaatgcggttggaattcctattactgttgagcagaaaaagagatagccaattttccaaatttttcccaaacaaacgcgccgagaaacaaattccagaacaattagtatcggcgtaattattctgagaatgcggttggaattcctattactgttgagcagaaaaagagatagccaattttccaaatttttcccaaacaaacgcgccgagaaacaaattccagaacaattagtatcggcgtaattattctgagaatgcggttggaattcctattactgttgagcagaaaaagagatagccaattttccaaatttttcccaaacaaacgcgccgagaaacaaattacagaacaattagtatcggcgtaattattctgagaatgcggttggaattcctattactgttgagcagaaaaagagatagccaattttccaaatttttcccaaacaaacgcgcagagaaacaaattccagaacaattagtatcggcgtaattattctgagaatgcggttggaattcctattactgttgagcagaaaaagagatagccaattttccaaatttttccaaaacaaacgcgccgagaaacaaattccagaacaattagtatcggcgtaatattctgagaatgcggttggaattctattactgttgagc

SEQ ID NO: 37898 - DNA, 1554 bp, Heterodera glycines
  unsure (1)..(1554): unsure at all n locations
gccaatgggagaaggcattgcaaactgcgaagcagcaaaatgtgagagaaaggaaacatggaaantgatttaaaataataataccatgatgccaattaagcatcggcganngctggacnnngatttgtccgtttacacggcacaattattggcccacggaaattacggcgacgcattggacgcactgcaaaaatatggcatttcaacacacaaacaaatgagggaaatatgcgaacaaattgcggaaaaggtcctcaaaaaggaaagaaatattatgatgttaaaaagaaatgtgtataatgaaaagggaaagaaaaaaggcggcaaaattttgcgattcctaagccaattttgccaacaaaaaaaaaagcaaaaggaataatttaatttttaaatgccgaaaaatgcaagaaaaaaaaccgaatgccccaaaaacgaaaaaagacaaaaaaaaaaagataaattgaaaattcaaacatttgtttgacgcaaataaaaagctagaaaaaaacacgtgccttaacatgggattcttaataataaattatgaaaaagtcaaaactgaaaagaatttaattaataataattttataattaactaaaatgaagagtttattgtatgtagttaatttattccgtttgaggtgataaatgatcgccaacaagaatttttaacattagccaaactgagggacgttttgtttgatttgtgccagcaaattcattcggaaaacagccaattcgatgctttgactgtgaaagtaattatcggcctattaaaaataaatatgaatttgctaatttagcaattacaaatttgctaatttagcaattacaaaaccatctttatctagcacatttttgtgtgttacgaaacgcattggacaaaattaaagaacagttgcaaaatgaggggaaaactgtgccggccgaacttcaaactttggcacttcatcttggcattagccaattacggtaatcggtgtcaacataatgaccagaaatgccgcgggtcgagaaaaataatgacataaagcaacaaataagcgagcttgcaaattcttccacttttcaaattttatttaagatacattgaacctctacgagcggataaagcattttacgaagcgggcaatgcttgtcgggtaatttgaaaaatatgaataagaaatggacaaagtgtttgttaggcatcgggtgggaatcgaacccaaacatccacccaatccgtgggcgacttaaccattgagccaccgaggcacatccgccttttcattacaatacattaaaatattatggcacttataaatcccattttccatatcaaaagtaaagtacccaaccataaatcattttttctactttatgactaatatttgctgtcattaaattttcaatttttaaatttgttttccacctcattagttatacggtggtgtcgcctacgagggcatggcgtttactctgctcagccattatttggccgnggtggatgngattcaggaagacgacccaaatttggtggacaattcggttttcgatggcacagatgtg

SEQ ID NO: 37899 - DNA, 610 bp, Heterodera glycines
cccccccccccccattgatccgtccctttcgttacaattatttctttcccttttcttccgcccttatcggtcggtcggtgttcagtgggacgaccttctcataaagtgaaagtgaaaaaaacacaaaacataacgagagagagagaagctcaattcagatccaatcgaatgagagaattagtgtaataagttaatagaagagtgttatgcacaaattgccacaagactttaacggtaagggtcagttgcatctgaggcacgggccataacttttttcgaaatatgttactttttcaaaattgatcaggggtgttattttacttggaaaaccgggcatttgcccggttttgggggtctgtgcccggtttttgaatttgcccggttttttgcctggttttgggggttttgcccggtttttccaattttcttgttttcctttcatttatttgatttttatgtatacatttcgccaagattaatagtctaatttttatagcccggcaaaaaaaaatttccgtgagcggcatcgggagttcacaattttccgctacgggatgcgcgatggagattctcgtgaaaatcccgctcccgttggaatcccgtccatttt

SEQ ID NO: 37900 - DNA, 965 bp, Heterodera glycines
gcaggacacgccaagtacctcaaacttgggtaattacactgaagaaagaagtgcagtggggaagaatgacgcccaaaatgaaggaaatattcgatgctgtgcgaactctttgtgacccctctctgactctgccaatgcagcagttgaccatttttaccactatttttctctcattcatcgtctgctcgtctctcctttattataagctattttcctaagccaacgcccttttctccctcttttctgttagtcatttctcattggtgttgacgatccaacattcagtgtacaaatttgttaaacctctcaacattttaaatcaaaatcctaataaaaatttcgttgaatttctccgcctcttatttgtgcaaaattttcgaaaaagtaattttctatttaaaattaaaaaattcagaagcaaattcaagaattttttttatttttaaatgcattttttaccacatgaattatgattaaatttttgcgtttcgaattcattttggaattaagaaaaataaaaattgataatcatttgatcatttttagcgcactttaagcaccgccgttaggcagcgcagttccaaaatttattccatgccacagatattatgggcaggacacgccaagtacctcaaacttgggtaattaaaccgaagaaagaagtgcagtggggaagaatgacgcccaaaatgaaggaaatattcgatgctgtgcgaactctttgtgacccctctctgactctgccaatgcagcagttgaccatttttaccactatttttctctcactcatcgtctgctcgtctctcctttattataagctattttcctaagccaacgcccttttctccctcttttctgttagtcatttctcattggtgttgacgatccaacattcagtgtacaaatttgataaacctctacacattttaaatcaaaatcctaataaaaatttcgatgaatttctc

SEQ ID NO: 37901 - DNA, 999 bp, Heterodera glycines
  unsure (1)..(999): unsure at all n locations
cctgggcttttatactccccggaaaattaggccacgcccactttttaaagctatttaagccaagattttctcgcaaaatcaaatcagtcttgcaaaatttcatcaacaacaatggtagatcaatttgtacaacccgaaactgcggaggagcaacaagtgaaagctaagaagccacgcgttgatgagcgatttctttggaaaatcacgcggggccaatttgtactagcgattcggctgtgttcaggttaatcaaatttttgacgaccaaattaattgacaactttcagaggactggaacaatttatttcacaacaaagacaagacacgtcggctggaagatgggcgagtggcgattggactcgagatgtgtgaagaatgtgccagaatcaattgctgtgtcagtgatatgattgccgatcaaaagaagaagccaaaaaccaccgaataattcatcaaatttttcgcattagttgtagccaataaataaatatttttaaatgaatgagcgtgtatctgatttgtacctctcccccataagccccaacattcccttctctttgaaacccagaactcggtccttcggcaatcagacctctatgagctcggcccaccaatagccagcatccctaagagttcggtcctccggtagccaatactccgaaaagctcggccctccagtagccaatactcccaaggactcgaccctccggcgaccaacactcccacggacccggccctccggcgaccaacactcccacggacccggcccttcggtagccaatactcataaaggattgacctccgatggccaatacacatttgcgttttcgtatttaaaaaataaaacaattgtcccaccatttttgacccgggcggcggttgtttcttctcgcctgctcctcctcctcgtccttctttggcttntcttcattntcgcttcgcctcccctctattgtttcttttcctcctcctntctctccccttcttccttcttttttt

SEQ ID NO: 37902 - DNA, 1051 bp, Heterodera glycines
gaacatttgcaaccacagtgccaaaatgacgtcagaatctcggagtgcttatccatctcattaatttttgtgactttggtggtttcaaaagtcggcaattaattcctgagatttttccctgggttacacgaacatttgcaaccacagtgccaaaatgaagtcagaaactcggagtgcttatccatttcattaatttttgtgactttggtggtttcaaaaagtcggcatttaattcctgagatctttccctgggttacacgaacatttgcaaccactgtgccaaaatgacgtcagaaactcggagtgcttatccatttcattaatttttgtgactttggtggtttcaaaaagtcggcaattaattcctgagatctttccctgggttacacgaacatttgcaaccacagtgccaaaatgacgtcagaaactcggagtgcttatccatttcattaatttttgtgactttttggtggtttcaaaaagtcggcaattaattcctgagatctttccctgggttacacgaacatttgcaaccacagtgccaaaatgacgtcagaaactcggagtgcttatccatttcattaatttttgtgactttggtggtttcaaaaagtcggcaattaattcctgagatctttccctgggttacacgaacatttacaaccacagtgccaaaatgacgtcagaaactcggagtgcttatccatttcattaatttttgtgactttggtggtttcaaaaaggcggcaattaattcctgagatctttccctgggttacacgaacatttgcaaccacagtgccaaaatgacgtcagaaactcggagtgcttatccatttcattaatttttgtgactttggtggtttcaaaaagtcggcaattaattcctgagatctttccctgggttacacgaacatttacaaccacagtgccaaaatgacgtcagaaactcggagtgcttatccatttcattaatttttgtgactttggtggtttcaaaaagtcggcaattaattcctgagatctttccctgtgttacacgaacatttgc

SEQ ID NO: 37903 - DNA, 1121 bp, Heterodera glycines
  unsure (1)..(1121): unsure at all n locations
agctggagctgaagaagacnccatcgctgggtgagagaaatntggggtagggagaaataaaaattaaacattttaatntaataaaaataaaaatttggctaggccatgccaactctcaaaatgccacaaaacagccacggcnctatcgttttacccgaaagggaagaggcgggaaaacctgacaaatcttatagaaagatcgggaattccatttctgatcgcaatgccaaagaaaaggaatttatgaaaaccgggaacaattgttgaagatcaagggctattttttgtggaaatgccgggatgaaatatcccagcaaaactcggagataaagaaagaatctcggtttagccaattcttatgaacattattcttaaatttacaaaaacaattaatgaaaatttttgtaaattaattaaattagaggaaaaataaaaatataaaatatgtactaattaaataaaaattactagagcatgacctggacctagatccaggcctgggtttttcaaaattttgagctctaaaaattatctattgcggaaaaagtaaaaaaaacagaaaataatgaatatggagatggggcggttggcggctgattgggaaaattgattacataatgaatgtgtggaggatgatgatgattgtgcaagtgaatgttttgtggtgaatgaaattggtgcagcaaattatgataacaattattaaaaagccaaaaaaataatcggaaaatttgccaaatttatttatgaaattttaatggaaatttaaaaataaatccttttttagctacacaatttaaccaggaagtactcccatcggcggtttgagctcgatttcaaagaaaatgcaacaatccgatttatttccaagtaaaattgtgggaaaaatacttaaaatccaagaaattctcatcatatacaaaaaagaaaaaaattgtatttcctttctaattaaaattgtcgaatgtctagacctatcggcagaatgggcaatgttcaagtacataaataaattcaagctcgcgagatttgttaagcatgttgccctatttctcacagtatttacctgctcattcaatatatgaaatgctgttccatggaaaaacgtaggtttcagcgcc

SEQ ID NO: 37904 - DNA, 983 bp, Heterodera glycines
gctcgagagcatttgtatgtgtataaaatttatcaaaaaaagagatagacatttttctgggatagagtataaatttaaaaattccctcaaaaataaaaggtctattgcgcaccgccctccctatcatgctcgagagcatttgtatgtgtataaaatttatcaaaaaaagagatatccatttttctgggataacctctaaatataaaaatcctctgtgaaataaaatggcgattgtgcacagccctccgtctcatacgcaagcgcttttgtgaggtataaaatttctcaaaaaaagagatagccatttttctgggatagagtataaatttaaaaattccctcaaaaataaaaggtctattgcgcaccgccctccctatcatgctcgagagcatttgtatgtgtataaaatttatcaaaaaaagagatatccatttttctgggataacctctaaatataaaaatcctctgtgaaataaaatggcgattgtgcacagccctccgtctcatacgcaagcgcttttgtgaggtataaaatttctcaaaaaaagagatagccatttttctgggatagagtataaatttaaaaattccctcaaaaataaaaggtctattgcgcaccgccctccctatcatgctcgagagcatttgtatgtgtataaaatttatcaaaaaaagagatagccatttttatgggataacctctaaatataaaaatcctctgtgaaataaaatggcgattgtgcacagccctccgtctcatacgcaagcgcttttgtgaggtataaaatttctcaaaaaaagagatagacatttttctgggatagagtataaatttaaaaattccctcaaaaataaaaaggtctattgcgcaccgccctccctatcatgctcgagagcatttgtatgtgtataaaatttatcaaaaaaagagatagccatttttctgggatagcgtctaaatataaaaatcctctgtgaaataa

SEQ ID NO: 37905 - DNA, 1203 bp, Heterodera glycines
aacaaagcacttttttttatttgattgcttatttgaaattatgaatataacgcgagaaaacatgcaccaaaagtgaaaagcatgaccaatcggtaaagatgagggttggatttgcatatttctgtacatattctattaagaaagggtctattatttctacgttaagtcgttttgattaacgttttaatgcatataaatacatatttcagagggttttcgagaataaattcatatttcgccacttgactaattttaaaaaaaatcggaaaatttaattgccatgtgagaattttagcaaatttatatttaaatcaatttcgaatttttccatatttttgacatttttttagtttaaattagggactgagcccgggctgggccccatgtttcataaattttccagtttgacaaaaacgtgaactttaaattttaccaacccaaaaaccggttctgggccgatttgatcggcttgggagaggccggacccgggaatcagttgcatttgaaaataccaaactcggtccggcgtatttgaaaatttcggtctctaatttaaatattttttgcattttttttggagatattttttgcatattttggcatttttcgaatttgagggcatgtttgtggttttagtgcatattataaacggtgctgggacattatataaaaaccggtgctagatcgaacctataaaagtatcaatggtgtgaagctaaaaaagtattaatgatagtaatatttataaaaagagtaaacttttgaaatttttttcactttttttttggtccaatttttttttttgtttatttttacacataataatgaatattaaacattaacaagacaattatggcgaatgaaattataattatggcgaagaagatcacagaaagcattaaaaatagattttcctttagtcttagcattaagtcgaaaaatttgttcacacatatatgaattcgttaaatttgtactggttccatgaattcttttcgtcttttgtttcaattgagcccagagtccttcacatttattcgtgttgacgttgaattcggtgccgtccgggagcatgacaatttttgagaaaccaccaccggtcgattttttgtgtctgatgagcatgtgttcgtactgtggcaagtgcagagccagtttcaggtacgccggccattcatcgctgatgatcactgagcctggacg

SEQ ID NO: 37906 - DNA, 903 bp, Heterodera glycines
attttccaatttttcccaacaaacgcgccgagaaacaaattccagaacaattagtatcggcgtaattattctgagaatgcagttggaattcctattactgttgagcagaaaaagagatagccaattttccaaatttttcccaaacaaacgcgcagagaaacaaattccagaacaattagtatcggcgtaattattctgagaatgcggttggaattcctataactgttgagcagaaaaagagatagccaattttccaaatttttccaaaacaaacgcgccgagaaacaaattccagaacaattagtatcggcgtaattattctgagaatgcggttggaattcctattactgttgagcagaaaaagagatagccaattttccaaatttttcccaaacaaacgcgccgagaaacaaattccagaacaattagtatcggcgtaattattctgagaatgcagttggaattcctattactgttgagcagaaaaagagatagccaattttccaaatttttcccaaacaaacgcgccgagaaacaaattccagaacaattagtatcggcgtaattattctgagaatgcggttggaattcctattactgttgagcagaaaaagagatagccaattttccaaatttttcccaaacaaacgcgcagagaaacaaattccagaacaattagtatcggcgtaattattctgagaatgcggttggaattcctattactgttgagcagaaaaagagatagccaattttccaaatttttcccaaacaaacgcgccgagaaacaaattccagaacaattagtatcggcgtaattattctgagaatgcggttggaattcctattactgttgagcagaaaaagagatagccaattttccaaatttttcccaaacaaacgcgc

SEQ ID NO: 37907 - DNA, 105 bp, Heterodera glycines
cgctgctgacgaggaatttgcgttcgatttcgatgcccatcgcgccattatgcgcgatgggcatgacagcccgtcagcgcttctcgaacaccgcaatgctttcca

SEQ ID NO: 37908 - DNA, 1397 bp, Heterodera glycines
ttattttttattttagtatcaaaatattcaatttcccatttgtttaaaattgtccaacataaaattccgtcgtttagtgaatcattggaataatttttaaacatcacaaaacatttgcaattttccatttatccgattttgtaaaaataaaatgcctttctccatatattttttgctgctcatttattatattatctccaatgaaaaagtttttgctgaaaatggagaaaagaagtttctttgcaaaattaatcacatttaaattattattattttaagaaaattgtttttggatttaaatggcactgatcggaccattcggctgaaaaactgcggcaattgcaaagggttttaaggcttaaaaagccaataaataagtaattgaggtgttaattaagtctgccatgtgctacaaaagtgtgttgtccggcgaagagaatttcccgtggaaagtgtcgcgtcggtttcgcttcttttcctatttgttggataaaagcggaaaatgtggcaaaaaagttcgtattgcaatgaatggcacgcaattttcaatgggaagagcatgcttcaatatttgactttcaatttttaaaataaatatttttaaattctaaaattatgaaattggctattttttgattttgaaattcaatttccaatttcaaaattggccctacaattaaagaattcattttaaatcgctctccctcatattttcagatggttggtggtgtcgaaattgacataaaaactgtgccgtggacagtgctatttcaaggcttagtgaaaagaaatgaacaaaataaaatgataatatttcaaaattgcgctagcatatttatttcgccggaatttgtgctgttagccgcgcattgttttgacaaaatcaaagagggaaaatactttcatttgggtaaaaaataaaaacaatttaaatgctctttaaatgctttgcttataactttgctctaaacaatccaattttaattctcgatatcatacgatagactaaatgttttctattagtctgccaatcaaaaaaatttgttaactttcaaaaaagttatggcctcaaaaaccaaggttttttgagttcctctagtcataactagggctccaatttataattgctaaaaactgccaatataattagtttttagtttctaaaaaacccccaaaatagttgctaaaaatgggtaaatatttgctaaaaactttcaaatttaggggagtaaaatcgaaaatttcttcaaaaagcaaaaatattatgccaaatcattaatgagatacataattttcaaaataaaaaattatcgtcaataaaataattaaattaattttggagatgattttttgaaataatttccatttcttatgggtgcatttttgaaaattttcgg

SEQ ID NO: 37909 - DNA, 1331 bp, Heterodera glycines
aacttccgtaagtcgcagcaacggactcggccggttcgtgttcgcggcttcgggctctattcgcgcgtaagccgaagcagccaacgaatcattgggtggcactcaaataaacttcccgccgatcgaaattcactctttcgtctaaatctcgggtttaaatctcaccatctttcatctaaggaacgatcggctctcgtatacgaaaacggtataagaaaatatacacaatcgaatacagaaattaaaaactctcgttagaaatccaacatcttatcttaaaacatcaagtatccaaagccggctccccggaaaatgcgagtattaaaaaaatatatttaaattttcgaaaactaagtctatatattttcgactcttcactacgctatagtactttatttttcgaaactcgtagttacaccattttctactcgacgcattttccgggagcctaaaaaacatccactcgtgattctcaaaaacattttaaccccgaacaacatttaaattgaaggaaataatcttgggttttgggtctttcttttcaggctcgaaacctccgctccaaaatgaggcggcatcacctctcacatccacagctgagcacacgtaaatgcgacattgatacttttttttttcaggcatatttccaagtgatgcgctctagagataataaattctggggaatcattttttagagaaacaaaccacagtgagtccaacagacgaccaactcttaggctggatgaaccccattgtcgagtacccggtatgcaactttaccggacatttgtcgtcaaatttaacatggaacgtgacccgaatctgaatagtattttcattcctgtagagaataacccaaaaactttttcgttgttttcgattatcaaaaacttgacagctccccccggttcgatgtcaacatcctgcgctttgactttcaattcgattcgaccagaaatttcaggagatgaagaggacgatttggaacgggaacgttggtgtgtgtgtcgcgacatcctaattaacaaatgcgcgacaaaaattagattataaacgtgatctctttgttaggttcgtaataagctactactacttaacagaactttattctttgaaatttctgtaattgtacggatggaaaccccttgtttgaaatttatttctaacgaaaatggttgttcgaatttgagatcagtaactccaacctaagaaaactttttaattattcgggggagggcgggataaaaaagatgtgccctcaattttacacaaattcacctggatgcaatcagactcttaaatgcacttcttcaattattgtcgtatccgat

SEQ ID NO: 37910 - DNA, 424 bp, Heterodera glycines
tcagggacggtcccaggattttggcttggggggggggcacctccccccgggcgacgaccttttttttttttgcttttcacacccgttttttatgtggcgaggtttttccaaaaaaatttttgggggacaggggatgcggcggtgccgataggcgccgtcgggaaaatttttgcggttttaaatgcggtttgttaacagattttgtccaaaaaatgaccaaattttgtgattttgagccatttttagcagattttcattaaaaatttgtggattttttgaaaaatttagcgacatttcttggaaaatttgggtgtggctaggtctggggggggggtaccagcccagcaaggaaaacctaaaattttcagccaaaatattatttttccttaaaaatttttggacccggggggctcttggggggggg

SEQ ID NO: 37911 - DNA, 1205 bp, Heterodera glycines
aaaaaattctcgctaacatctatgtataagtctcggatgacacgtatttgcacagacaaaaaataaaaaaaattctcgctaacatctatgtataagtctcggatgacacgtatttgcacagacaaaaaataaaaaaaattctcgctaacatctatgtataagtctcggatgacacgtatttgcacagacaaaaaattaaaaaaattctcgctaacatctatgtataagtctcggatgacacgtatttgcacagacaaaaaattaaaaaaattctcgctaacatctatgtataagtctcggatgacacgtatttgcacagacaaaaaattaaaaaaattctcgctaacatctatgtataagtctcggatgacacgtatttgcacagacaaaaaataaaaaaaattctcgctaacatctatgtataagtctcggatgagacgtatttgcacagacaaaaaataaaaaaaattctcgctaacatctatgtataagtctcggatgacacgtatttgcacagacaaaaaataaaaaaaattctcgctaacatctatgtataagtctcggatgacacgtatttgcacagacaaaaaataaaaaaaattctcgctaacatctatgtataagtctcggatgacacgtatttgcacagacaaaaaataaaaaattctcgctaacatctatgtataagtctcggatgacacgtatttgcacagacaaaaaataaaaattgccattgataaattatatattttatatattcattttatatgttatcaaaatcgaataaaatagttggcacttttacgaaacgaccacagtggcacttttacgaaacattcccaaggtggcacttttacgaaacgcccatagtggcactttttacgaaacgacccagcacgtaaaatttggacaaaaactgaactcgaaggaaacaaattaaccggcaaattacaaccaacctgagcattcaggtttgatctttcttcatcaaattttaatatttaatattgattttaacgattttaattgctaggacacggatttatgtggatttcaatatttttttgcacacatatttcggccggactcgaacagagttgggccccggctgataaaaattagagttgcacgggaccgggaattttttacaaaaacgggatggacttgccggaaccagaaaagtcgggacgggacctcgattttcg

SEQ ID NO: 37912 - DNA, 673 bp, Heterodera glycines
  unsure (1)..(673): unsure at all n locations
actttctgaaaaaaatatttatgaaacaaaaaaatcgattttttcaagtgtccgtttggggtactcaaacatttatggggagcaaaaatccaacgcagaattaaagtacaggctatagggaagctattcccgaaggattcggtctccccataaatctgggcgcatcggttcggggggactgccccgaaaacaaaaaaatcgattttttcaagtgtccgtttggggtactcaaacaattatggggagcaaaaatccaacgcagaattaaagtacaggctatagggaagctattccggaaggattcggtctccccataaatctgggcgcatcggttcggggggactgccccgaaaacaaaaaaatcgattttttcaagtgtccgtttggggtactcaaacaattatggggagcaaaaatccaacgcagaattaaagtacaggctatagggaagctattccggaaggattcggtctccccataaatctgggcgcatcggctcggggggactgccccgaaaacaaaaaaatcgattttttcaagtgtccgtttggggtactcaaacaattatgggggagcaaaaatccaacgcagaattaaagtacaggctatagggaagctattcccgaaggattcggtctccccataaatctgngcgcatcggttcggggggact

SEQ ID NO: 37913 - DNA, 1014 bp, Heterodera glycines
taaccccattcagagactagtcaaaaaaaataataatacggctctggactactatactaattagaaattttagaacgtgtccgttaaacgcaaaaccgtcgtgaaaaatcgttataactcctttcagagaagagatagaaaaaaaataaaaatagggttagagagcccgtgaacagctcgcatcggatgcaagtgccgccgttgctgtacgcctaacagttggtgagcaatgacggaaaattgcttaaaaaagaaaccaaacaaactcatcaattgttagctcccgttggcaaaccgaagggtacattggggcaatggatgttgggctaccgtatcagttattaaaatttttgtttttcaaaaaggatactaaaactgggataaccccattcagagacaagtcaaaaaaaataataataggcttggactactatactaattagaaattttagaatgtgtctgttaaatgcaaaactgttgtgaaaaattgttataactcctttcagagaagagatagaaaaaaaataaaaatagggttagagagcccgtgaacagctgcatcggatgcaagtgccgccgttgctgtacgcctaacagttggtgagcaatgacggaaaattgcttaaaaaagaaaccaaacaaactcatcaattgttagctcccgttggcaaaccgaagggtacattggggcaatggatgttgggctaccgtatcagttattaaaatttttgtttttcaaaaaggatactaaaactgggataaccccattcagagactagtcaaaaaaaataataataggcttggactactatactaattagaaattttagaatgtgtctgttaaatgcaaaactgttgtgaaaaattgttataactcctttcagagaagagatagaaaaaaaataaaaatagggttagagagcccgtgaacagctgcatcggatgcaagtgtcgccgttgctgtacgcctaacagatggtgagcaatgacggaaaattgcttataaaagaaacc

SEQ ID NO: 37914 - DNA, 719 bp, Heterodera glycines
tttaccatttattaaattaattttaaattatttttttcccccattttgatttgatcaatttccaacttctggatcggttcgacactgcgatcagtgtcgagcgcatgctttccgcgctggagtccattttgcgccggaaaacaatggtcacgtttgggtcgtcgttgaccaacgcgataaaatccgtataaaaatattggcataccctggaaaattaatctttttttattaattaggttctaattaaaattaattaattaaataagtaaatcggttggtggccggctgatcaaattaattaaatccgttggtgtccggctgggcaaattgttaaattaatctttttaaactagttagggcaaattaaattaattaaacaaataaattcgttggtgtccggctgggcaaattatgaaattaatctttaaattaattagtgcatcactaatttaaaattaattaaataaatccgttggtgttcggctgggcaaactgttaaataatccgttaaaactaattaggggcagcccataattaaaattaaataattaattaattacatccgttggtcgtccggcgtgtatacaaatgacacttcactccaattgtaattgcccaaaattgagcgaacagccattgcgagccttgaaaatagggttaagccccgaccccgagcctcccgacccccgacccgatccgagacgttttatggacctatt

SEQ ID NO: 37915 - DNA, 1034 bp, Heterodera glycines
agaagtttcccaaaataaaatcacatttgggagagtgcaacagcaaatgaataaataataacgggtcgataaaaaaatttaaaaaaaaattggccgcgcatttcggcccggggcatttttaaacttttgacattttatggccatacttcgcactcatttattcatttttttattttttatgggtcaaagtcaaaattgtaaaagtcggattagacataaaattagggggaacataaaatttaaagaaaaaacaacgaatttcaatcctccaatatgaatgaaattcatcaacattttctgcgagcgtcaaaaaataatcgacgttgactttgaacattttgttgccgcaaatgcaaaccgacgaaagcaaagaaaagcgacgacgaatggttgttaaatgtctgtttttacaatattaaatttcattttctccttatttttcaaagaatttttaattgagacgcagtgattctaagaataaattttggtggaaaagctgttactttcaaacaaagattaatacttgtgtaatacataacgtggtgagccgaagtgcaaaaagtgcgaatgagtggtgatcagaaggggcgggtcatttcagtaccgaagatttattctaatgattaattattatttaaatttataattgaatgataagctaataataataaaaaatatatttggctctatttcagtttacaagaccacgaaaaattgacatgacaatataataattttacaaatttaaggcaccgtaactttttcaagaagcatccaaattaaacattcttggtaccatttgatagcctaaagtgttccattatttgcctttaaaatttcaaaaaatttcgttgagtttcaaagaagttgtggtcaaaaaggtttaccaaataaatttatgaaaattacaagccacaacttttttgaaacaatgaaattttttgaaattttataggtaagtagaggacacttacagctatcaaagcataccaagattggttaatttggatgcttctctaaaaagcgatggcgct

SEQ ID NO: 37916 - DNA, 1763 bp, Heterodera glycines
  unsure (1)..(1763): unsure at all n locations
aattttaaatntaattcaaattattaaatatttattcattttatccccgtgcatcaattttttgactctttaattacttaaaatccattattcaattttaatcaaattcagttgcccatggcccgccatcaagcccaatgtgttggccagctattccgtgtccgatgccgtgtccacctattacctgtacaccaaatacgtgcacccgttcatcttcgccctgtgcacaatcatcccgctgggcccggacgacgtgagttggggtggaaataaatcccgaattccggcaatttcctcatcaaacgcttcaatttcgacatttttctcaactattcccgattttcaacatttttcggtactttttaagtttacgagggtatttttaacgatacattttcagattcctataaatgtgttttagaaattaatgaaaataagttttaaggggtcgtcgaaggtcgcctgatcacgaatccgggctcagatcgagcgctaccgattcactacgatgagctgtacgagggacaaagaattgataggcttcctgtaccaataataccctcattggcgagatgcccgtgaggatgggtgcactacgtttcccccccgccgtttcccccccgccggttcccccccgccgtttcccccccgtatcgagttcccccccgagctcggttcccccccgcgatcgtttcccccccgagaaaatttttttaaaaaaaattgctaacttagaaatttttcgagaaaaaaatcttagaagagtttttttacggagaaaattctaagaaaaaaaaatttttgagaaatttttatggtgaattactatgatttttcaaaaaaatttcaaaaaaatcgctaaaaatttctcaaaaattttttttttcttagaattttcttgtaaaaaaactttctaagatttttttcttgaaaaatttctaagttagcaattttgtttttttaaattttctcgggggggaaacgatgcgggggggaaccgagctgggggggaactgatacgggggggaaacggtggggcatcctaaaccccgaccttttcgcgacccgatttccaagatttttctcgtgtacccacaattttcggacggcccgaattctaagtaccccgaatttttctcgcctcgctacctaagccagaaattataacatggccgtccaggacccagcttctcccaaaagtgcctgccatccctaccccaaatagtcggcccggcttttaaaggtccggattctgtctcagccacagactcgctttttttgtcttgggctttatcgaatccctaaaattatcaaccaggtgtcattttgtcactggaaaaaagtgtgcgctgttgacattgggcactcgaagggctgtgtgaacgtacatgatagcgtcttcgcgaattatgggagatgcaaggccccaaggatgggatggaatttcaaaaaaaaaattggagtgaaccggaaaatttacgaaaaatttccgactaaattctaccccatccctggtaaagtaatacggaatttgggttctcaatttattgtaaattattaatcctaaatcttgcgggagtctgatctgaacatgtaagtttctctaatccattcaatgaatattaaattaagtataagattgaacattttggaataaaattaattatttttatcgatttaaatgtaaataaataaataaaattattaataccgaatgcccctaaatagaacagttgctaactgtgctatactgctttatctgt

SEQ ID NO: 37917 - DNA, 997 bp, Heterodera glycines
agaaaaagagatagacgttttttcaaattttcagaacttcctcgcccagaaagaaaatccagaaaaattagggtcgtcgctattattccgaaaatgtggttggagttcatttgagtgttgagcagaaaaagagatagacgttttttcaaaattttcagagccaaactcgcccagaaagaaaatccagaaaaattagggtcgtcgctattattccgaaaatgtggttggagttcatttgagtgttgagcagaaaaagagatagacgttttttcaaaattttcagagccaaactcgcccagaaagaaaatccagaaaaattagggtcgtcgctattattccgaaaatgtggttggagttcatttgagtgttgagcagaaaaagagatagacgttttttcaaaattttcagagccaaactcgcccagaaagaaaatccagaaaaattagggtcgtcgctattattccgaaaatgtggttggagttcatttgagcgttgagcagaaaaagagatagacgttttttcaaaattttcagagccaaactcgcccagaaagaaaatccagaaaaattagggtcgtcgctattattccgaaaatgtggttggagttcatttgagtgttgagcagaaaaagagatagacgttttttcaaaattttcagagccaaactcgcccagaaagaaaatccagaaaaattagggtcgtcgctattattccgaaaatgtggttggagttcatttgagtgttgagcagaaaaagagatagacgttttttcaaaattttcagagccaaactcgcccagaaagaaaatccagaaaaattagggtcgtcgctattattccgaaaatgtggttggagttcatttgagtgttgagcagaaaaagagatagacgttttttcaaattttcagagccaaactcgcccagaaagaaaatccagaaaaattagggtcgtcgctattattccgaaaatgtggttggagttcatttgagtggtgagc

SEQ ID NO: 37918 - DNA, 869 bp, Heterodera glycines
ctccatgaagccggggtttggcgtgatgcagtccctcttccgcttgacgtactccaacgcctcgtccagtccccagccgtacgctttcattgcgtaagcgatgacagtggacgcggaccgactgatgccctttttgcagtggaccaacactttggcacccttttccctgcggggaatatttttgaattatttaaaattggcacttttttggcaatttgcccacttggcctccttgataaagtcgtaagtgcgttgccaatgcatcaaaagttcggtggtcgcctcgtcggacacccaaattttaaggtaagtgaactgagtggggaagaaattgtccacttccttcgtcacgttcagaatgtattggacactgaaaaatcgagttaaatttaattaaaaagcattttaagttttttccgggataatcaaatttcaatccatacttaggcatttttcggtttcgactcatttttgccgacagatagtccgtaaattatctatcttttgtcccacccattcgccttcagctcctcccaattggacgcgttccattccgtgccaaggtaaaggtaatcgaagattttcgagggccgatccaattgacctggaaaacaagtgtggataatactaggatcagatatggtatatctgaccaaggatgacgagcatttggtggtcgatgaactctttgtagcgccgctggtccaccgaaatttgctcgctcaaccgccggcggatgtcctgactcgtcctgcaaatggggccttacgtattttttcaactttttccgcttttacacgtcgtccaagtccacgctttgcatgatttgcttcagtgccgttttgatgcgctgctccgtctccaattgc

SEQ ID NO: 37919 - DNA, 1217 bp, Heterodera glycines
  unsure (1)..(1217): unsure at all n locations
tatcatcataataaaataaactacanttttctccccacccggaatagttataaattgaatagaaaataaaagtacccccataaaaaaatttatatgaaaaatatttaaaccataaaaaatgtaattaaatacttatggattattttttaaatgcaaatttaagcattaaaatgataataaaattttaaaaaatatactcatattttctaacaacggactaatcttttttagtggatttcggttgatcgaatgaatttcaataagtattaaatctccaaattataaaagtgattaccaaaatttttgattttaaataaattaaatgccttttacttgattcttgtttaaataaagaatttttctattttaaaattaatttaattgagcaatttagtttatttttaagatttttacatttcatttttaaagaaaaagcgcattggattaaatcatgattttttaaaatttattatcagttaagaagaagaaactattaaaacatttatgttataaaatttttctacattcaattgtgcagaaaaggtggtcttgcgaatttcttttaataattctttaaattgctcatttttatcatgttattgttgactccttttttagctaaattttttatttttatgatgtcattccgatttaattatactaccctgattttacttgacaaatcgtgcctcggaaccatattgtccatttcacggcaagcaaaaaatagatttttgtaaaatgattccaaattttgagctttattttaattctccgaccaatagctttcaaaataattcggctgatcagaccaaagccggttcgtccgtctgtccctagctcctttgattaaattataatattataaaagtcttcagtttttcattattttaagtgttcaaaaaaaactaagctgagtgaaccttggaaatattcttggatattaaatttttcatgcactactaatggtgtctaatcattttagatttttatataagtttatttactttttatggtatattattttatattattataaagaatttttttgatttttccatttattgctgcacggtcctttatcgtttccaacatatggggcttcataggtttaaaaaatttcacttaaataatagtatttatattattggtatagtatttttattatgaaatttcaagaatttttttatttcataaataatgattaattagttaat

SEQ ID NO: 37920 - DNA, 991 bp, Heterodera glycines
  unsure (1)..(991): unsure at all n locations
gctgctgctgcttcttttttctgcttggcttacactataatttttgttttcattcgaaattaaataaaattgtaacaattttatcattttcncaataagccaccgttttagtgccaatttctgctgatggcacttccttgtgctcggctttgtgcccttttctcagttttggtcgtcacttggaatggtttcgtttcctttttaatgactttttctttcctttttctctctctctttttaaataattttaatttgattttaatttaattaatgtttttgaattcacttcagtttcccgtgcgtttattgtcgcgcgcgttgcgaaaaaggaagtgccggccgagtgccgaattctgaaccacgagacggtgtccgatcaaacggtgcccgacacgataaccgtcaacgagatacggtattgggtgtacggtcaaattcagcacggagccaccagcaaggcaagtcgcggactctgcaacgcacctttggcattatgtattttcacacttttgaaggtgttccatggggtcgaaagaatgccaatggcccatggaaatcgttgtgtggccatcaaagtggtggacatgaacaaaatcgagccggagaaggtgaatcagctgaacaacgaggcggccattctgcacgaactgaaagcgcgcggagtgaaactcatcccccaactgtacacaatgtacggtagaaaaacgaaaggggaactcatcccccaactgtacacaatgtacggtagaaaaacgaaaggggaactcatcccccaactgtacacaatgtacggtagaaaaacgaaaggggaactcatcccccaactgtacacaatgtacggtagaaaaacgaaaggggaactcatcccccaactgtacacaatgtacggtagaaaaacgaaaggggaactcatcccccaactgtacacaatgtacggtagaaaacgaaaggggaactcatcccccaactgtacacaatgtacggtagaaaa

SEQ ID NO: 37921 - DNA, 636 bp, Heterodera glycines
ttgtcatcccacagaactcattttagcgaaggtggcgttcgtaagacaattttactttttgttttttggctgcaattgggttagccatttctgaaaaatgtccaaatcagaatatacatcaaattggttaactatgtattaaaaaataaaataagtaaaattgtaaaaaatgagcgaatgttaattaaacctaacttatgccaagtggcgagggatccctcaggcttagtttttagaatcttaatttttaaaaaagcacatttttctatttttgggttgggccccaaacgaccccggggcccaaaaacgggggcccaaacgctctggcccatacgcaaatttggtatcattctaaagctcttgaatggtaaggtatgaaatcggaactgacgccgtccgagcactgcgacaactgagtcctgctgatgtatgaactttcatcactgcttaactatgccagatcggacagttgttcatgattttctgaaaaaaatatttatgaaacaaaaaaatcgattttttcaagtgtccgtttggggtactctaacatttatggggagcgaaaatccaacgcagaattaaagtacaggctatagggaagctattcccgaaggattcggtctccccataaatctg

SEQ ID NO: 37922 - DNA, 620 bp, Heterodera glycines
cggtgctgtttttgaactcgcatctccaaaattttgtcatcccatcagaactcattttagcgaaggtgtaaaggtggccttcgtaagacaattttactttttgttttttggttgcaattgggttagccatttctgaaaaatgtccaaatcagaatgtacatcaaattggttaactattaaaaaataataggatttggaataagtaaaattgtaaaaaatgagcgaatgttaattaaacctaacttatgccaagtggcgagggatccctcaggcttagtttttagaatcttaatttttaaaaaagcacatttttcgatttttgggttggggcccaaacgaccccggggcctaaaaacgggggcccaaacgacccccggggcccaaaaacgggggcccaaacgctctggtccctcaaatgtcgggtcctcaattgtcgggatactcaaatgtcgggtccccaattgtcgggatcctcaaatgtcgggtagccacgctttcgccggtttgggcccccttccacagaactctcagaatttcatgcacatgcaaagaaagacagccacccttttttttgtttggctttacatttgtcaattcttcatttttcctaatttattatt

SEQ ID NO: 37923 - DNA, 1329 bp, Heterodera glycines
agggcatgcccaccaactatgactatcatagcaagcgattatggaaccgctcatggaactcaaagtgtgtggcactaccatcccaaagtgcacggtttggtgtaggcctccctatgtcgggtaattactcccttcataaggcacttgcgccaacgcccacagcacatatgagttccgtcaacgcggattttaatccagggtgttgagtttgagcagctgcgcgttcgacactgctcagtgactcacggtcctccgggccagccagtcccggttattctctcgctgtaccaatgcagcccgtaggcagggtacattagggctaggaaccgccacccccgctgctaggaacaggcacaccttcaccctcaaggccagcgagtgaagggcccccgtccacaccagaccgactatctggctgggcttaaacatcgctgtgacacccggcgggctatgacggaaactgggtttcggtcagtcactgccgcagccctggataccagcggaataagccccgtggacagtgaacgcccgtgcccacccctctgggaagtaacccagtaccggggcagggctcctcggtttaaggatggcccccaggatatttgaaaaggcttaacaaatatcctaaaggggtttagtaccgagtaaaccaacaacataacaaaatggggtgagaaaggacagtacaaagtacttgtgatcaaagaaaaaaaacaagggaaaaatgaagaaaaagataaatttgggaataataaaattaattttaaaagaggaaaagaaaaaatttatagaaaaaatagtcaaaaatggaaataatttgaagttaaaaattttaaataggacaaacataatgccaagagtcaaaataatttttaaattaaaaaaaaaaacggaatgcaaagggttgaaataatttttaaatttgaaaaaaaacagaatgccaagggttaaaataatttttaaatttgaaaaaacagaatgccaagagtgaaaataatttttaaatttgaaaaaaacagaatgccaagagtgaaaataatttttaaatttgaaaaaaacagaatgccaagggttaaaataatttttaaatttgaaaaaaaagaatgccaagagtcaaaataattttttaaatttgaaaaaaaagaatgccaagagtcaaaataattttttaaatttgaaaaaaaaacagaatgcaaagggttgacataatttttaaatttgaaaaaaatgccgactgaaaataattttaaatttgaaaaaacagaacgccaataatttaaataaatttaaaatttgaaaaaacagaaagccataatttaatttgaaaaa

SEQ ID NO: 37924 - DNA, 704 bp, Heterodera glycines
tattagcattacaaaaagtaaaaagatttttcggcttttgaaaaagttattaagaaaaaatttcaaaatttcgacttttccgcaattttcacgtataacttttttgataattatctaaagaaaacctataaaagtgtttttatgtgttgtcatattcgaacaagtttttgtgggttttgaatagagatcgacattttgaaaaaagcctggacctggacctgggttacatgttggacctggaccttgatttcctggacaaaaatccaggaaaatccaggtccaggaaaaatccaggctcctcgagacctggatccaggcctggacctggattttttgaaatttattttaaaaatcaaaaaaatgtttgaaaaaattaattatttgcttagaagcatctaaaaatatctaataaataataataataatgtgtttttaaatttatttaatctgtttttgaaaacttgaaaaaacatcggtcacttgaaaaaataaattctaaaattttgtccaggaaaatccaggttttttcctgttttgcctggacctggattttttttcacatttgacctggaccttgatttcctggacaaaaatccaggaaaatccaggtccaggaaaaatccaggttgccgaaaaatgcctgggacctgggacctggatccaggaaaaacccaggactgtatccaggtccaggacgatctcta

SEQ ID NO: 37925 - DNA, 994 bp, Heterodera glycines
tttcaattcatgcaaggaatttcttgaatctataaattgattcactagaaaagcgttagtagaaaataaaaaataattggagcccatattttcgtcataaattgagtcccgaaagataaatagcatggcaaaacttgaaaatatttgtcgatttattgcctattttccatccatgtttgggatgaggaaatatataaaaagataaactttgtataagtatttattatcatggaagtcgtcagaataatatcaaaagacttcgtataaacaatattgcaataatttaagttcgttttatttttcagtcaacaacacggccgagagaaattttgatacatcaaagacacacctaaaatacaccgcggtgagagccctagcgaaggctggactataaaattgcacaacaaatatacctactgttcgagttatgttttatacgagtcagatatgagtttttcctatggcaaggttgtgaaattcctcccaaaaactttcttacggaaaataagcagcaaattttaataaaaataaatacttttcaattcatgcaaggaatttcctgaatctataaattgatccactagaaaagtgttagtagaaaataaaaaataattggagcccatattttcgtcataaattgagtcccgaaagataaatagcatggcaaaacttttaaatatttgtcgatttattgcctattttccatccatgtttgggatgaggaaatatataaaaagataaactttgtataagtatttattatcatggaagtcgtcagaataatatcaaaagacttcgtataaacaatattgcaataatttaagttcgttttatttttcagtcaacaacacggccgagagaaattttgatacatcaaagacaacataaaatacaccgcgggagagccctagcgaaggctggactataaaaatgcacaaacaatatacctactgttcgagttatgttttatacgagtcagatatgagttttccta

SEQ ID NO: 37926 - DNA, 992 bp, Heterodera glycines
aggcctgcaaatttggagagattatatcgattttagtgcgttaagttcgatgaaactttttaaaatataagcctaaactttttggcttatttaaaaaggaattaaaaatttttaaaaattttattcatctcccttttgatagaaaaagcatcagagtgccttgattaacctgtaaataaagttttgtgtgtttcagagcactttctgaaaaaatacttatgaattaattttgcaaaaaataaataattaatgaaaaagtcagaatttcgaaaaattttaaaaacaacaagcgttggcattttttcaggttaagttagtcctttacaatggagaaggcctgcaaaatttggagagattatatcgattttagtgcgctaggttcgatgaaactttttaactttttggcctgtttaaaaaggaattaaaattttttaaaattttattcatctcccttttgatagaaaaagcatcagagagccttatttaacttttaattaacatttggtgcgtttcagagcacgttctaaaaaatatttatgaattaattttgcaaaataataaataattaatgaaaaagtcagaatttcgaaaaattttaaaaacaacaagcgttggcattttttcaggttaagttagtcctttacaatggagaaggcctgcaaaatttggagagattatatcgattttagtgcgctaagttcgatgaaactttttaaaatataagcctaaactttttggcttatttaaaaagcaattaaaaatttttaaaaattttattcatatcccttttgatagaaaaagcatcagagagccttatttatcttttaattaacatttggtgcgtttcagagcacgttctaaaaaatatttaatgaattaattttgcaaaataataaataattaatgaaaaagtccgaatttcgaaaaattttaaaaacaacaagggttggcattttttcaggttaagttagtcatttacaatggagaaggcc

SEQ ID NO: 37927 - DNA, 1264 bp, Heterodera glycines
  unsure (1)..(1264): unsure at all n locations
aagtcaagaggctcgcgcaacacgggaaacgtgacagtgatgaatttccaaataccagcgtaaccgtgaaagatatccctttgcaaagcattccagggaacccaatgaattggccaccttcagtgtcaagttttcagaccatattttcatcttctgacccnacagcagcatcaacgacaaccaatgttgtaaacaaatctccacgaaaaaggcttaggccctcttctgttttgcaaatcggaacgagcacaaccactttgattttgttgctgatgatcgcgttggtcgccatacctgtgaacgcagaacaagcatcggaatccgacttgaaagccggaacgggtatttttctcacattttcggatttgttggcactgcttggaatcgtggtctctcttggtgcaatggctggattcattgcatgccatatgagtgcgctctcaaagaacaggagtttttgggctatggcctcatctaatcattccattatggaagaaattgttgctaatcatacaatgacgccacgcttaacagcgacagtccgttccctgattaacaacagaccagtaagctgtctggctgataccagagcaagtgtttctcttgcgccgatgagtcttatcaatgaattgaaatgcaaaatttttccgacaaatcacaccgttagttcagcctccgggcattggatcaacataacagcagcagccatggtacatatcgaaattgcaggtcagaaaatttttggcgaaataaaactcattcaggatgaagttatgagtgacagaagggattatcaagtcattcttggatgtgacttgatggcaaaacttccaccgattacttttgattttgttcaaggtctaatcagtatttcaggaaaatctgtaaccatgggagaaagaggtgacttgctttactccaatgtcaaagttgtggcacgtcatcatgttgacattcaaccaggatcctatagcatgctgaccggcaaacttgattcacaaattcaacttgatcaagttataacacattcactggatggacgactctccaaaatgcatctcgggatgatctcaactgtcgcaaagcccgtggagggatgcatcaagatgatattgaccaacccaactgatgcaccaatcagcatttgtgccggaatgcacgtagcacttgtcaatgaattgaaacaaagcgtggacggtccatggcttgaggaacaatcgcaagtaaaggaagccaatgtcaatccangaaattactacaaatg

SEQ ID NO: 37928 - DNA, 818 bp, Heterodera glycines
tgtcaatatataaacaaaataatgtgctgtttattatttgaattaatgtcgattaagacgtctattaattgtaatcataatttccggttgaatttgtttataacatttcttataacaaattagaattaattttaataggtccattcaattagtgtttgaatttaacttatcctgtttgctagagtatcatctcggcccagaacaaaaaattggagtaaattttgggattgatcgatgtacaattaattatgtaattaaatcagttaggtttcgatttatcagcatcttgcaattaatgttaattcttattatttattaattataaataatctgtattttaactttctttaatttcaaactaaattacgaaatttaacgatattcgtttaacaaagattaatttctacatgtagaattatcagagtagtttctcacttcatccttgggggggggggggtcttcattcaatttgaattttttttattcggtttgcgttatctcctcacgactcggcacgtaaatttatcagcatttatatgatgatttttatgattttcatttttataaataatttttttaatgtttttaaatatttaattccattattttatgcttgaaatttttagggtaatgtgctggttattatttattaaattcaatcaattaattttacatttctttacaacatttttaataattttgcaattctcatgctcgctgattgtacttctgttttgtctgagtcaatctcgattgatcgtctattgacacacgcggttccactcatcattttctcttttttcaaatcattatttctg

SEQ ID NO: 37929 - DNA, 825 bp, Heterodera glycines
  unsure (1)..(825): unsure at all n locations
aaaaaaattcccaatcgcttcgggaatttttttctaaaatttccccgattttcagtgtattttcgggtgttcaggtcaccatgaaggagtgatctgaccatgttggtctaaaagacttttttgatcagcataggaaatttttctggatttttttttctatataaaattgagtttttggtaaattaaacattttgctccattacttttgtgacaccgaaaaggggcgctgtttgggttatgaccgattttctcgacgaaaaagagagttatcgggtcagtttttgggtatttattaaaaaataatgtttaattgctttaacattttataaaatggcagcgtttaactctttttctgtgtaaaaagtaaaagatttgttaattgtaccgatggtactcccccccaacttccttttttgttaagaaaaatttcaattttttctcgagattgtttttttttgcataaatacgattttgttgaaaattgaattttcggctttttgtccgaattcggatttggggttcgaaattggcccaaacggaagtaagaggcgggttttccgaccctgaagacctctaagaggattttatctcaaaaaggaaattgaattaaataccatcggtaatttgtgcttttaccaaagatttaaattgcatggattaccttaataagttctttttaaggctatattgcataaatttctgcaaaatgttctgagtttatatcgcggntttacgattataatggatgatgacagaatcggaaggggaaattgtttatgancagcantgggtagaangagacacacactggattaaggatgtttt

SEQ ID NO: 37930 - DNA, 1191 bp, Heterodera glycines
catttggaacaaagcatttctacgaatgcatttacgccgcccagtcgacgcttccaagtgcaaaactgtcgcttttgtgagtttggagtgatcaacgacactttgtgtgcgcacaatgccgatcagtggcggagagaggaagctgtgagttgcttttgctcctctccgatcgcttttcgctcagatgggccatttcagtacaattggttcaatgatcttggcttactcattattctcggaattctcttcggtctcgtgttgttcctcgtcttcgtcattctctgcctttgttctaagttggcattttgcctttttggcattttctttttgccattttttagtcggcccaaaactcagagaaaagtgcgacggggcgaccattacagaaatggcgggccgggaacgtacagacgcagcgaattgagcgtcagcgaaaacggatttggcaatcggttgggcgaccccttggctcatccgctgcttctgaacggacacatcgacagcagcgactgggccaagcccaagcagctgccggcagcagtgcagcgaggaatgaacttacaaaaacagctgcagcagcagaagacgagcagtggcagaagaagcgaagaagatgccgaatcgacgacgacggcacaacggcaccacgggggaactgaagacaatgagaggagcccaaacaccagcgaaagtgtgaggaatgaatcgggggagggagaagggaagggattaagagagggagagagagagagaggggaggaggagagagagcgtgagaaatgtaatgagagaaacggagggagagagattgggagagggggaaaaggagtggacaaagagaggggaagagagagagcgtgagggatgagagaaacggagggagagggattgggagagggggggaagtgaggggacaaagagaggagaatagacagagcgtgagggatgacatactagaatggagaggaatagcgagaggagagaagttaattattaaacaattcaatttataatcttacataaatatgaggaagttttattttagttgaaacggaatttgtaccgttatcagtgtccaattcaatttttcattcctttaagatgtatcttgggccttaggatgttatttgcttactgaaaatgccaatcaatgcccattcatccaattttcacatttttttataagacaga

SEQ ID NO: 37931 - DNA, 1038 bp, Heterodera glycines
  unsure (1)..(1038): unsure at all n locations
atttctccgtcattctttttacagttttaaatcaatttctcagccaccaaagaacacaaaatgaatgaatgataataaatgaaagaatgagtgagtataaataaatgcaatcggcggagaaaacggagggaaaaaggggaaaaaagggggaaaagggaggcgaaaggggcggggcaaaaaatcgctgctaaaaatgggggggggggggacggaagaacnnacaacagaatttaatagctaattttattgtttgttgctgatactgctgcactttgtcctctctctcttcgaccaacaaattttcggaaaataaaaacttttaaaaaaaaaaattccgttaaaaccaagcggaattttttacattttttcgctgtattaagggggggagaggcagagaaaatggagatagcaacggaacaagtttttgtgctgctggatggatggatggatggtggtgagggtgtattaaaagcggggcgtcgtcactatttatggcacgtccgtcctgccctcccgcgcccaacccaacccatccaaaatgtctttaattgggcaattaaccaatcaatcaattaattagtcagtgtcattaagtctgtcgccgacagcaaagagcagcccaaattagaagcgcacgccgcccaatttagcacgccaatgttttacgacatacacagcaaatacgcatggataagcaaaactgtgtgcatttttacgatttatgatggtcataaatttgaaaaatgggagagaaaaacggcgctaaaaaattcgccggaattccaaagattcgccgagcgcatttttgtatttgtgcgaagaatttttgggtaaacattttgacaaaattttgcgaatttcgagtcaatatattaaaatgtttgttttgcgagtctttggacaggaaattatttaagaatagtgtaatggctgatcgaaaatagctgtgggagcaaagcaacaggggccaaaatgaaggaaagatggccccaaaacaacagtcgtccctccagtggtggatgtggtctagtggctagg

SEQ ID NO: 37932 - DNA, 876 bp, Heterodera glycines
tttctttcactgcgacggtttggcggcgattgttttgatttgtgtacgtggcacttttttatttacttcgtcatcaaaatgcaacaaattgtcaacataaactccctcaattcccccccccccccaacttttttggcattttgtcataaaatgtttcgttgtccctttattccctcccctcgtcgttttgctgtttcgtgtgcatccgtcgcgcttttccggaagaattgcatcggccgcgggttccgcgcagaatggaagatgattatccgtccataaaatgttttgtcctcctcgttttgattgcttccaaacattttatagtctctccacgttgaattggggtgaaaatgcgcgacaataaatccttcgctgctgggctttttttccccaaaattttgtaaaagtcgggtaaaattcgcggaagagtgcctaattagagggttctttgcgctggacagtcgagagtgacgagttaatgggtcggaaggcagtcgagattggcactttgtcgtcttctgcgggagaaggccaaatggctttcttttctggggaagggggaagccgtgggaaaatgaggctgactttggacgcaaacattgtcaactccatccatctgtccctacgtgcctcggggaaatcggcatcgaaattcgggtgccctgagggctttttaccgtattcctccggttttccggcaaaacaaacattcgtttcgtttcatttttccctcgtctttttaaaacgaattccttttttcccataaactaaatttcgttcacagttaatttgttcctttttttacgtttttcttcacatttttcccatttttcggtaatttgtccataaaacaaagcgaaaaatgcgataaatcat

SEQ ID NO: 37933 - DNA, 965 bp, Heterodera glycines
agatttacgatagccgacaaattttaagtgatgtaggcactatgccaagaaaaaaaacagaaatattaacaaaaataactattatattattaatttctcttttatttattataaaaattttaagttgagatttaactaggaactttttcttcatcgatgcataattaaaataaatcattttaattatttttttgtgaggcaaaatattaaaaaaatattttttttgcattcaaatttcaaaaatgttaacaaacagcgcgatcgccatgcggatccattcgatgatattttggcccaaattgttgcttttatgcctcccaaatacctagctaatttgtaagcgctgtttttgggtgttcagcgcgctctttgttaacatttttttaaatttggatgtgggtcccccaaacggaaaagtacctaaatgtttccttgttaatttcgttaggctttatgttaagctaaaaaaacaattgtctaatttttccaaattttaattttataaaaattgtcatcgacccaataaaaaagcagtttttcaaaatttgcaccactcttttgccattggcgccactttttcaactatttatttcgcaattttttgccagtaattaggtttgtttaaataaattcacctccccatgtgcttcccatgctgcctccatagccacgccagttcatgcttggcgaataggtccatgagcgatagccttgccaaggtcctccaccaccacaaccgccacaagtggaagtagcgcctctaccataatgcccgtaattgcgaccataagaaccgtagcgtaagccataataaccaccgtaaccgtaccgagctgtaccacgaccgtagccaccatacccgtacccagatccatggccgtaccgacgtgcatcagtggtgtgagcaatgagcagcagaatgatttgcatgaatatgaccaagacaaacatagtatacttactaa

SEQ ID NO: 37934 - DNA, 117 bp, Heterodera glycines
ctgacgcgatgcttgcatccactgatgaaggtattccgattgtctttgctcggcgcgcacgtcaacttgaagaggatctcgctgcagctgagaaaactctggcatcgcaggaaagag

SEQ ID NO: 37935 - DNA, 975 bp, Heterodera glycines
  unsure (1)..(975): unsure at all n locations
gcgctaaaattgtttgaaaagctttttgagcgtaattacgattttacttacaccatttttttctaggcttagatcacatgcgattttcggcactctgataattttagcgctcataatgggatgtataaaggcgattgtagaaggaattggaagcgctaaaattgtttgaaaagctttttgagcgtaattacgattttacttacaccatttttttctaggcttagatcacatgcgattttcggcactctgataattttagcgctcataatgggatgtataaaggcgattgtagaaggaattggaagcgctaaaattgtttgaggagctttttgagcgtaattacgatttttacttacaccattttttgctaggcttagatcacatgcgattttcggcactctgataattttagcgctcataatgggatgtataaaggcgattgtagagggaattggaagcgctaaaattgtttgaggagctttttgagcgtaattacgatttttacttacaccatttttttctaggcttagatcacatgcgattttcggcactctgataattttagcgctcataatgggatgtataaaggcgattgtagaaggaattggaagcgctaaaattgtttgaggagctttttgagcgtaattacaattttacttacaccattttttgctaggcttagatcacatgcgattttcggcactctgataattttagcgctcataatgggatgtataaaggcgattgtagaaaggattggaagcgctaaaaatgtttgaaaagctttttgagcgtaattacgattttacttacaccatttttttctaggcttagatcacatgcgattttcngcactctgataattttagcgctcataatgggatgtataaaggcgattgtagaaggaatgggagcgctaaatttgttgaggagctttttgagcgtaatacgattttacttacacattttttgcta

SEQ ID NO: 37936 - DNA, 948 bp, Heterodera glycines
  unsure (1)..(948): unsure at all n locations
atccaaattacaaattatggtgagttatcaagatttacaacaacaaaaaaaaattacgtaatttggaaaatggcagatcagccggtctcaaacccgtttaaacttggagtttccgaaaataggccaactgggttttcaataaagctactttcgataccaaattattaaattggttgcgataagacaatcttacggcaaaaaaacatcttggaacaagatatatgttatatctttttgtaaaagttttaaaacaaacttcttttcgtatacagaagaatggtttaaaaaagttttggtactatttggtggagttgtataaaggattcaagccggtcacaacgttggaattggcggaatttaagaaatttgtcaagttatgcgaccaacagaatattaaagatgtgggaaataacatattgaaattttataatgtgtattattagacaaaatgttaaatttaatttattagaatccaaaatgagcgaatattttatttattaaatatttttgccacgaaaaaaattataaagatttataaaaagagaaattaatgaataagaatttggtgataaaatttaaaaaaatgaaatcttttttaaatatgaatcaatatttttaaaaaatcgtttaaattcctaaaatcaaagaaggaacaggaaatattcgttcaagtaaagacaaaaaaaaaacacaataaaatttgccaaattattatttaaaattatttagggccaagcatgtgcagctaccataagtccggaagagaagtcccgtctccgggaattgcatgaggaatatttcaccaaacaaatcactcgctctctgaaggacatgctcggcattttcaaaatgccgtcaacaaaacacaaagccaaaattgatcttcaccggctgatcatttcgcngtatcagcacgatttgngtgacataatgcgcagcattgaccga

SEQ ID NO: 37937 - DNA, 910 bp, Heterodera glycines
  unsure (1)..(910): unsure at all n locations
tgaacctaaagttggtggtggtgttggtatacgagtgagtggcgtattgccatggttgacaagccctatgagttcgtggatcggaactccttgcctggggaccagtgtgcttgcattcgaaaaaacacgagacataagcgcccgaaggcctttggcctgaggaagtgtcctaaccgggaaatccggagtgctcgtgtgagtgcctgtgcactgccctcggagctgtgtccagcggcgagatggttcttcccaagtccgggaagctcggatgcctggccagcgctgtgtcattaccacttgctcggtcgccttcgccgcccatgcgcacgcttgcgctgaacggagttgtttctgctgaaactatccgtctttacaagacggctgtaatagcggcgcttggcaacgctcgctagcagctatctggttgatcctgcctgaactgatgtgttcatttcaaagattaagccatgcatgtgtaagtttaacctgccagacagggaaactgcgtacggctcattacaccagctataatttacttgaccttgacttcttacttggataactgtggtaattctagagctaatacatgcaccaaagctccaatctccccagagcggagcgcatttgttcgccacaaaaccaagcgccctccgggcgtccagtgttgactcagaacaactaagctgatcgcacggtcttgtaccggcgacgtgtctttcaagtgtctgccttatcaactttcgatggtagtgtatctgactaccatggtgatgacgggtaacggaggataagggttcgactccggagaaggngcctgagaaatggccactacgtctaaggatggcagcaggcgcgcaaatacccactctcacgcgaggaggtagtgacgagaataacgagacgatctctt

SEQ ID NO: 37938 - DNA, 1784 bp, Heterodera glycines
  unsure (1)..(1784): unsure at all n locations
gacggacgcattcaaatggctgaatcacatcaaaaaatattgaatatattgctaatgcttgncacgaagtgacgaaataggcgatggtgtaggaacacattttaaaggcttatatgaacatatgcattagtaaacgtataactttcacttagatgtcacattaatagtaaattcattttgataagttagatattgtttatttagagtctaataaaattcggtataaggtcactcaatttttttcatttcgcctacttcccgtggaccaaccgagcttgaataacaaaaaacttttttcaaagattccataaattctgggaaaatattcaacttaatcatttgcaacacttgcacagcttacatttggggaataaagagttgagatttgaaactctgacaacgatactaattataaacggcacgcctacatttcgcctactaagccaaaaacatttatttcgactacaaagccaaaatcggacatttcgcctactgacatttcgcctacttgtcatttcgcctactagccaaaaatcatttcgccgactggaaatacataatgccaaagagaaaataaaaagagaatatacaatatctatgtcggaccggatcagtttagtctggccggtttagtctggccgttttagtcagagggtcggtttagtctggcaagctgtttttgtccataactcttacaaatgttttttttgtcaattataaacaaggaaaaagcttcaaatatctatgtttagctacaatacaaatgaaatatcccaattaggaaacaagaaaaaagcaaaactttcattttggcgccgcctttattcagtcaaattttattcttcaggcaaagtaaaaccctaatttttcacgtttttttcccatataaagcttcaacgggcttatgcttgttcatatccaactgtcttccgcttcatcaacacaatttgatatgagataagtcaatcgatgcagacattgcacgatgcgtcgctggtgaagtccctcctcaaaaaacgcgcaaatatcgtgccgtcgatgcgagaattctcgactcttacagggttacaataccatcaacaacatcaaccctgcttaccaaaatgatcaaaattaccatacaatgttaatcctgataatatcttcaattttctcgttgaatttctcaaaaattatgaaatacgcccgtagtcattcttcaatgttttgttattttttcgttgaaaacactgataaatatgttatggtgttaattttaaacatttttcgaaaaaaaatctgagtagaatctattttggacaaaaacagcttgccagactaaaccgacccccaccgcactttcaaatgtgactcagtttattcaccgccaaaaaatgcttaaagtgcaaataaccaatttaacacaaagcgagtcaattttgggctcccatgcaaataagctggatttttcgtttcagtggtctgagttagtcaccaaaaagagggtccaaggttcaaagcctccttatgttgtgtgtaaaaaaatttcaattcattttgcattgggagccgaaaattgactctctgtgttagtgaatgaatgatattaggtatttttataaaataacagcgtgcaaaaacactaaactgtttcgtgttttataaacaaaagtgaaaagaaaaaaacatttatttaattattcctttgaaaaatacatataacaaaagtaaaaaatgaattgaaaaagtacataaatttgaagggagattacgtgcaaaaagaagctggtttttgacctaaaatt

SEQ ID NO: 37939 - DNA, 1553 bp, Heterodera glycines
aatgagagaggcactgtgtgtgaaagttcaggtacagtacacctaccgggtgtccagtgtgtttttgagggagtaccgtaccctcttgggcggcacgctaccgtacactgccatcagcacaaagatcgtttttgatcatctaaaaaatgaaagggccaacattacagaaatcccgcccactgaggtttttacacttgtgcaaaatcggaatgggccgaaaggaataattttcaaagctgaaactaaaaagtaaaaattatatttaagtaatttatcggcccatccgaaataaattagggaactgaaaaaaatctctttaatagctgctcaattgatgaaagttgtggagaagggaggagagtgttcgttctgtttcaaggtttatagcaaattgttctccggtcgtttttcaccggaggcacaaacgaccacaaattgcgccattaatttacattccttcgattttcagggaactcctaattcttccattaaaggcccgaatttatcgccgtcgtcctttgtcaaactctcccttttcactttatattattatttttgattacgattatttatcttttactttcttataataaatgtgtgttctttacagtgaggatggttttatatgttatatttttctgtggaataaaatataggggacgggacgaaatctcgccggtcgaaatctcgccaccaaatttttttttaattttcaaatttcaaaattatccaagaaaaaataaaaataaattccaaatttgattaacaatttttctaacattgcacaataattaacgggtcaacaaatttaattcatctcgcaataacatcaataaaattcccattctattttgccctttccattcttttttcgacatttgagggtcgtccattgcctttccgcatccccaaaacaaatcgtgtggggagctctcagccaaaacctttgaaccggtttttataagcatttctttgagcggctcgttctgttggaatttttttcgaaggcctcgcatcatcagattttcacagacacctcgccaaatgacaatattgaagcatttaatccggttatttttcccgagttttttaatttctgccggagtttttgccttcataattggacaagctgcttcaaagtcgcggaaaaacaaagctttttgatgctgataaaattgttcagtcgacgcataaatgatcccatccaattcaaaggcacgttaaggtttaaccatttccaatcgcaggcctcctcgtggccacgtgctggaaactctactatctttttttttacttagatagagaggctaatcctagtcgaaaagcgactaggaagcgaacaaatggttgttgattaaatttaggcacttgagctgggaagcgaatttgttaaatttatttttatttgttcttgaataattttgaaatttgaaaaaaatttaaaaaaatttggtggcgagatttcggcggcgatattttgtctcggcgagatttcggcggcgatattttgtctcggcgagatttcgaagggcgagatttcggcggcgagattc

SEQ ID NO: 37940 - DNA, 933 bp, Heterodera glycines
gatagccatttttctggaatatatattaaatttaaaaattatatgaaaaatataatggccgcggcgcaccgcacttcgtttcatgttcgagagcgtttgttgcatagagaatttctcaaaaaaagagatagccatttttctggaatatgtattaaatttaaaaattatttgaaaaataaaatggccacggcgcaccgcacttcgtttcatgttcgagagcgtttgttgcatagaaaatttctcaaaaaaagagatagccatttttctggaatatgtattaaatttaaaaattatttgaaaaataaaatggccacggcgcaccgcacttcgtttcatgttcgagagcgtttgttgcatagaaaatttctcaaaaaaagagatagccatttttctggaatatgtattaaatttaaaaattatttgaaaaataaaatggccacggcgcaccgcacttcgtttcatgttcgagagcgtttgttgcatagaaaatttctcaaaaaaatagatagccatttttctggaatatctattaaatttaaaaattatttgaaaaataaaatggccacggcgcaccgcacttcgtttcatgttcgagagcgtttgttgcatagaaaatttctcaaaaaaagagatagccatttttctggaatatgtattaaatttaaaaattatttgaaaaataaaatggccacggcgcaccgcacttcgtttcatgttcgagagcgtttgttgcatagaaaatttctcaaaaaaagagatagccatttttctggaatatgtattaaatttaaaaattatttgaaaaataaaatggccacggcgcaccgcacttcgtttcatgttcgagagcgtttgttgcatagaaaatttctcaaaaaaatagatagccatttttctaaagtatctattaaatttaaaaattattgaaaaata

SEQ ID NO: 37941 - DNA, 933 bp, Heterodera glycines
agaattaaagtacagactatagggaagctattccggaaggattcggtctccccataaatctgggcgcatcggttcggggggactgccccgaaaacaaaaaaatcgattttttcaagtgtccgtttggggtactcaaacaattatggggagcaaaaatccaacgcagaattaaagtacaagctatagggaagctattcccgaaggattcggtctccccataaatctgggcgcatcggttcggggggactgccccgaaaacaaaaaaaatcgattttttcaagtgtccgtttggggtactcaaacaattatggggagcaaaaatccaacgcagaattaaagtacaggctatagggaagctattccggaaggattcggtctccccataaatctgggcgcatcggttcggggggactgccccgaaaacaaaaaaatcgattttttcaagtgtccgtttggggtactcaaacaattatggggagcaaaaatccaaggcagaaataaagtacaggtatagggaagctattcccgaaggattcggtctccttataaatctgggcgcatcggttcggggggactgccccgaaaacaaaaaaatcgattttttcaagtgtccgtttggggtactcaaacatttatggggagcaaaaatccaacgcagaattaaagtacagactatagggaagctattcccgaaggattcggtctccccataaatctgggcgcatcggttcggggggactgccccgaaaacaaaaaaatcgattttttcaagtgtccgtttggggtactcaaacatttatggggagcaaaaatccaacgcagaattaaagtacaggctatagggaagctattcccgaaggattcggtctccccataaatgctgggcgcatcggttcggggggactgccccgaaaacccaaaaataaatttttt

SEQ ID NO: 37942 - DNA, 1000 bp, Heterodera glycines
ttttttccttcactcgtcaacggcctagtgcgcgaaaacaccctttttcgtacgaagtactttcctcggagggcaagtactttcgtccactcacacaacacctttccaaccctccgttcggacgaagtgcttcctcagagggtaaacactaagtccgctacgtccctcgtgaagttatgcctcggaggacaataactacacgaaactatgaacactagacaagcctcagagggtccttgtctaggctctctaatttgcttttcccttccccctttgtcaccgggatccgtcgatttcagtccgtggttcacagcgaatccacccaggagcgccaatttgtcccgacttgctctggggtcgggccaaatgaattccacggtgcggggttcagggggcaggcagggacgagacacggaattaataaaaaatttattccgggaaatgacctcaaacttgggtaattaaacaaaaaatttgaaatggtgaacaaattatcacaaattgatcacaaaaatgccatcaccggggaattatcacaaatggaattgggcaccgggatgggacaggaaaatcacagaaaacaaatgaatgggaccgggagaaacagaaatggaaggcaccggggccacagaacaaagatcaataaccgggggtcaggaaatgatcacagttggggaggcatcacagttaaaggctggagggacggggagagaaacggcaaaaatgcccaatgaattttgggttgtaaattttgggggcatttggccgtttaaataataataaatttaaataaaaagtggcaaaattgggcagaacgaaatggggccgaaaattgtgaacgaaatgaaaaacgggggacaaaattgaacagatgaacaaattggtggaaaaacgggaaatttgggggttcatcgttctttggagtcgcattcgccaaattgggggacgggggcgaacggcggtggggggatgagttgttgttaattcgtgcgcggggcgg

SEQ ID NO: 37943 - DNA, 1100 bp, Heterodera glycines
caatctttttttctctccttttctttacccccaaattacccacacattcctactctctttttaatgcgcttccatgccgctctctcattcttcgcgctcttttcgcctttctttagtgtctctcgcgctctctcacacagtcttttaccactctcattctcattacccacaagttatctacactaatgtgctttcctgctgccgctctctcattcttcgcactctttttcaccctgctctgctccccatacaaaattaattgttttactctctctctctctctgctaaattgattgattttgcttggcgctgctctttttgctgctctgacgatgtcatttcgccacatggcccctaaagcaaattattgtgggcgctgtggcgcggggcgggggtggagaaagaaagaaaggatattttcccaaattcccacttcaccagacaaatatcaaacaaccagaagcgacggcggagtgttctctccctcatttgccaaccaaaattttgtaccccaaacaccgccattcatttactatcattttgcttagtttttgtttgaaaaatttaaaattttgtgagttatattgttgtttgtccaaaaatcttgaaatatttgttactttttcaaattttttgagaaattttcaaggggtcgccgtccttatgggtgcatttttttttattgcattttggtaagaaatttttcaaaatgccgaaataggagcgaaatgccaaaaagtgcaaaaatagggaggaacgcctctatttttggggcgaaaagcaaaacctgattcctaaggagcgatcgggacgttaaaatgaagaattttcgtactaaaaagtgctttttcgttcttttctcattaattaaaaggcgcagaaaaaaagaagtaaaccctaaaaatccgttccctatttagaataaaaaataaaaaacgcgaaatataaaatggggtaatgtttctcatttggctggcaagaaaaagcctaatttattaagatgtgaaaggaattggtgattcaacggggatttgttttttttgttaactataataaaattagagctacatatagattttgtttaattaaaataccattat

SEQ ID NO: 37944 - DNA, 1580 bp, Heterodera glycines
  unsure (1)..(1580): unsure at all n locations
aatatttctgatcagagcaaagaagaatatcgatgataaagccgacaatcatgcaaatctatcaaaggatatgctgaaagagacactaacagaagcagtaacatcgtcgtaagaataagcgaagaatgaattggaggaagcggagaaggaagaaagaaagcaaacgtcactcggaagtgaatgtgaacagcaaaaagcgatgagtgactcctccgaagagtacgtccgtgaacactttcctctggacgagcatatggactgctccccgctttgccacgacccgaccttcggcaacctgtgttccttcttcaacatgttcactccgatgttcgactttaagcccctttccttttcacaattagagaatatgttatgcactgtggtagaagccgatggttcgcagtaattgcattttcttattagttaaccattccatcagcaactcgcgagcggattcatcttcacataccgctaatccgaaacatctaattgaagtcgtctcgggcggataaatgggaacaatcgcatctaaaattaagttcaaaggaaccgtgaccggacccagaatcacggcatggcacccgatcaatattgacttcaacatattttaaaagtgataaatcgcacgaatcagtgcgctgtatttttaagactgtcaaaagtactacttgcgttcctactattgcttccgtgtgagactttttttagggaatagaatggtcagcaaccaatttcggacgctttttgcaggtttaacgtataaagaatgcttttccaacgattgaatataatcacaagcaatttaaattattgcctatgaagctttgcaagaaaagtgatgtagacttctatgcgagggttaattattcacgaatattgaaatttttattgttggagttcatgagccagtttttcaaaacagcaggaacctgaccaatttagaacccgtggaacccatcaatattgacttcaaacatattttaaaagtgataaatcgcacgaatcagtgcgctgtattttaaagactgtcaaaagtactacttgcgttcctactattgcttccgtgtgagacttttcttagggaatagaatggtcagcaaccaatttcggacgctttttgcaggtttaacgtataaagaatgcttttccagcgtttgaatataatcacaagcaatttaaattattgctcatgaagctttgcaagaaaagtgatgttgacttctatgcgagggttaattattcacgaatattgaaatttttattgttggagttcatgagccagtttttcaaaacagcaacctggccaatttagaacccgcggaacccatcaatattgacttcaaacatattttaaaactgataaatctcacgaatcagtgcgctgtatttttaagactgtcaaaagtactacttgcgttcctactattgcttccgtgtgagacttttcttagggaatagaatggtcagcaaccaatttcggacgctttttgcaggtttaacgtataaaagaatgcttttccagcgattnggatatatcacaagcaaatttaattnattgcctatgaagctttgcaagaaaa

SEQ ID NO: 37945 - DNA, 1066 bp, Heterodera glycines
  unsure (1)..(1066): unsure at all n locations
caataaattttctatagtgcttaatgttttcgaatatttctaagttaattaattaaataaacgcgaaagtgaaccaaaaagtcgcgaagcattctaaaataaatttgcgtataattatgtccttgaataaatcaacaaaatatatttttttaaacctctttttgctacaattttcaaatattgggtaaaaaataaattttcatagatcattgtagacttagtgcatggccctggagcctataaagcttacacatttatcagtgttaaaggcacatttaattcttttgagggaatttacgcgtatgaatgtctataaagtcttgtaaggatattatttagaatatgctggttgagaaatagttgaaaatagaaaacagtacaacaatgggcaataaattttctatagtgcttaatgttttcgaatatttctaagttaattaattaaatgaacgagaaagtgaaccaaaaagtcgcgaagcattctaaaataaatttgcgtataattatgtccaatatattttttaaacctctttttgcaacacttttcaaatattgggtaaaaaataaattttcatagatcattgtaaacttagtgcatggccctggagcctataaagcttacacatttatcagtgttaaaggcacatttaattcttttgagggaatttacgcgtatgaatgtctataaagtattgtaaggatatcatttagaatatgcgctagagaaatagttgaaaatagaaaacagtacaacaatggacaataaattttctatagtgcttaatgttttcgaatatttctaagttaattaattaaataaacgcgaaagtgaaccaaaaagtcgcgaagcattctaaaataaatttgcgtataattatgtccttgaataaatcaacaaaatatattttttttaacctctttttgctacaattttcaaatattgggtaaaaaataaattttcatagatcattgtagacttagtgcatggccctggagcctataaagcttacacatttatcagtngtaaaggcacatttaattcttttgagggaatttacgcgtatga

SEQ ID NO: 37946 - DNA, 1243 bp, Heterodera glycines
  unsure (1)..(1243): unsure at all n locations
aatatatttatatagcatctctgctagatttcattatatttaatatcttataagtaaaatttaaccgattttcggttttgtaaaacaggggaacggttccggggctgaaaaagagcggcgttgtcaaaaacatcatcagtgtgttccggctatgtttaaaaatccaattttttgtcattcacaattaaattttcaaaaaaatttccccaagccgcctaacggcaccaccggacccataccccccccaccccaagtttcaaaagtttgaaaaaaatgtgtcacgatattgctgtcaaagttaaagatcactgaataatttttcaaccaaatacacacaaaatatatttgtttacttcgcatttaactttttaaattgatttaaaattttaaaatttaaccctattaatagagaccggatttttatgtttttacatattttttttgcggcttagttatggcgagagaagcccaaaaatagcattatctccgaacaatttttgatttagagcgacttataaaaacataaaaacacatattttggcgttttggcacataaaatatgttagcacatattttggggtttggcacatattttgcacatattttggcatttttgagaaaaattgcaataaaaatacaagaaaattgaaaaatacacccctaaaaattgacttttttcctaattattaacataattttcaaattaaaaaattttttcttcgattgtagaaactaatgaaatctcgaattcattaattcgtcattggatttcgaagttctctgctggaactttcaatttatagaaatgatttatcaaaaaaagacaattttaccccaaacacttcgaaatgtatttgatttgcgttgtatgggctaaaaatgataaagaatgagatttttgggaatttttatgcaaaaacacacttattttttcaatttttaacacatattttagcacatattttggcatttttgggggtttttagcacatatttcagcattttttagcacatattttattacatatttcaggatttttagcacataaaaatccggtctctacctattaaaaatattaattctattattttttcaaaaaatttctgcttncattagaattttttatganatttttttcatctttanattctccagannaactttctcaggaaaaagtcccgattggtcccggcccgatctcgaccagggatgggcaaacttcgagcttcgtgctttcaaagta

SEQ ID NO: 37947 - DNA, 1134 bp, Heterodera glycines
ataaactatttaataatcatttaaatgaccaaaattaattttttgtataagttttacgtgttttgctcccaaaaaaccttataaatttttttaaaatgccttttttcatgcctttttcgggattttcgtgccttttcatgccttttttgcgatttttggtgcctttttttgcggtctctaattattaccataattagcgaggcgggggcaaggcaatgttaatgtttcatcattctctaacagtctgtcctcctattttcgcacattctctcgccgtctctctattggcttcgcccaatactaatttgttaattttgcatatttccttggcccacttgtgccttggagaaggacgtgcgcagctttttctgtgccgcgggtgccctccgccgttcgtacggatggcccgcgcgtctgccgcttccgttggccgtcgttccgcgcctttcgctgtcctttgaatgcgccgcgtttcctcccaaaaaatgcccgtctctgaacagcgcaatcgcttccgacacaactaaaaaagtttaaaaagacgaaaatggatgaatggcacaactaaatgtctaaaagagtaaaaattatttatttaaatatttcaaattcgactaaaatacgaatcaaaaagagtgaagcatcggttaaaatttgaattcatttttctatttatattttctatttctttcggtgtgatatgtatacattaaataagaaatgggcaaaatgttaggcatcgcgtgggaatcgaacccactcgtccaccccattccgtggacaattctaccattgagctatcgaggcacatccgctctttctttttatggattttatctgctttccgcattttaagtgcccagcagccagcttcttccttacaattactgtgctttaccgtatttatgggtttatcgtgggatttttgcatttatgttactgtattttgcgttttctaacttctaacaccttctcgttctccattattccgctcaaaaaatgcgctgctaaattcagttggaaatgcttttggcggcggttctaagacaaatgttggcactttgtcaaaacagcggccgaggaaatggtgcggaagcaatggccttaatattttggtcaattttcataataatt

SEQ ID NO: 37948 - DNA, 1057 bp, Heterodera glycines
  unsure (1)..(1057): unsure at all n locations
gaatcgcatttcagacagttggttttaattttcgtttttaaacgcgtatttacggtcgtcgataaataaataaatttcacaatatattattgcagcatttttattgaattgatgatttttttttcataaatgctactagtttttattttttatccatatgaattaatcttatttcagtcctcatgtgccagagtttagtcagtctaattccactcttctttttatttattattgtttattcattttatttttatattatatttttaaatagaaaatcttaaagatgtaaaaaatttgaaaactcctattcaaactgttcataattctattattatttatttaactgataattgttattataaatttttattttataattattaactttcaaaatcagtagtttaaataggaattctttgttataatgaaaaaatattttatgtaaatctcaaacgttctgaagtttatttttttattattatttagttggtttattttcgtgtaagatgttgaaatggttggaattaataataattattattgtccactaaataagggccgatcctccgttctttttcatagctttttattataattggatatggtattgtttcaattttattatttatgcattaatgtgagggtaaactttacgtccagacagatgccgtccattcttataaagtcttccatgaaacaacataaattttttgcgtaattaaaatttttaaattttaaactttcatattttttcgccattatgttggcaccataaagtattacgatgccttttcgagtaaaaattttaaaacaaaataatctctaatttaaaaaataagaatttttatttaatttaatttaccaaactcattttgtttttatacttttatatttataaaaatctatatttaagaagaattattaactaatttaatcaattgctttaaactccttgttgcgcgacgcaatcaagatttatttcgtatgttggcagtattgtttcaaatataaaatttaattanagattngtgctgttttattctatataatatatagt

SEQ ID NO: 37949 - DNA, 1106 bp, Heterodera glycines
  unsure (1)..(1106): unsure at all n locations
ttattcaaatgtatcaaattggcaaaatgtttatgttattgaaaagcttcttttcctcaaatatcaattctatcctttagatttttcatccagacccccccccccccacattcttacccgtgcttatttagtcctttcgggaacgggactggcaaaatcgggatcgggatttcaatttttccaaagacgtcggaattccgacttccgaaatttttgataaaaactcggaaattttcggaattttttttcaaaaaattagcaaattttgtacaatttttgttaataattgcattgaaattttcaaaattttcccagcggcgccgaccggcacagccgattttgataaaagtcatgaataatttcccaagcagatacatatagaaatataccaaaatatttttgaaatcacctttcatttggtttagaattttaaaatttaatctaaaaatatttttaaaaattttaccatattttatatttttcaatccgatttccgacgttttggggtcagaattccgatttccgaaaatttttgtgccctcggaatgccatcctttgtttgtaaccaaagcatcagaacccgtcagcagttgggccttcagactataacttttttctttgtcaaccaatccaacaaactagtatttacatgctctattagccttacaaaaaacaaagattttctagcatttaaaaaatttatcaaaaaaaatcaaaaaatttgattttttttgcaattttcatgtataacttttttagtaattgtctaatcgctaagcaatagattagaaagagcatcaaacatgttaagctttcgaaggatatcaacaatgttggatttggttgacaaagaaaacttcttaccttttacaaatgaagttgggtgaaaattatccgtcgaattgattatttgattgatttgggtggaagggggttaaggtaaattgcacggcaaatttcatcattttgcaaatattctcctctttagtgttcgttcctcttctngtgtggcactgccattggctctattccagtttacgcgtccattgattgacacactcaattttttaggtcataacttttttcttatatatttggtcaatcca

SEQ ID NO: 37950 - DNA, 1134 bp, Heterodera glycines
  unsure (1)..(1134): unsure at all n locations
tttctcttttctttgtaattcgcgacatttaacttttttctaaaatgtttttctatttttaaaagccttcgaattcgaatgatttcatgtttgttgaatttcactgtataaatcacaaaaatgtatgaagcatatacaaacgaagaaattgtttctaaattaccaatcgaagcatcatccatcggaagctatggtttgttttatgaacaactttctctttatgagatttagtttcgaaaggaaaattattcattggatccagacaaggccatctcataacatgcaatcagaactcagcaggttgtttgtgccgtcaattataaccaatcgtaatgtttagacacttccaaacttcattatgaatatcaagtatgtcgtacttttgaaagacgtccaataattgagcttcaagtggttgagtcgcacgatctaattatatgtttaacggatgtacatttgtcaattcatgatgctgtagaaccatttaagtttgtgatttacctttttttaatttggtcctctattttcaggctcttggatgtatgttctaagtacaaatcaatttccgcattttctcattttgtgacagaggtgagcaaagacgattatcaatagtttttgttttttcagagccaaactattcatattgcaatttccgcaagaaagcatttacacattttcaaatatttattgggtgaactttgtgaaattaacgactgtgcaccgattactcttcctgagaatgcccaagccgttgtgtggtatgtgttaaatacacttttttttgttagatttgcgtaaattatcctctgtaatatcaattttctaaccttcgtgctccgcataatggatttaatggtcattacttactgttaatacttattggtaatttttaaccaattttaaggtgcggtgtcaacaatttaattctggcatttaaatgcgagttccaattctgggacatggaccatttcctccacagagatgatttgatcggcgaaaaagtaacaaccaatttatttttgtgagttcgtcatttagagcatgagtctncgcaaaagtcccgacaaagtggaaacccattcgactgagtcaancgaaattgctccactgattgtcgctatgtcggacctg

SEQ ID NO: 37951 - DNA, 1060 bp, Heterodera glycines
agggaattttaaaattcattctctatgccagagaaatggctatctcttttttgcgagaaatttgtagccatacacatgttcccagcatgggcagaggggcgcggagagcaatggccattctattctacagggaatttttaaatttattctctatgccagaaaaatggttatctcttttttgcgagaaattttgtaccatacaaatgttcccagcatgggcagaggggcgcggagagcaatggccattctattctacagggaatttttaaatttattctctatgccagaaaaatggttatctcttttttgcgagaaattttgtaccatacaaatgttcccagcatgggcagaggggcgcggagagcaatggccattctattctacagggaatttttaaatttattctctataccagaaaaatggttatctcttttttgcgagaaattttgtaccatacaaatgttcccagcatgggcagaggggcgcggagagcaatggccattctattctacagggaatttttaaatttattctctatgccagaaaaatggttatctcttttttgcgagaaattttgtaccatacaaatgttcccagcatgggcagaggggcgcggagagcaatggccattctattctacagggaatttttaaatttattctctatgccagaaaaatggctatctcttttttgcgagaaattttgtaccatacaaatgttcccagcatgggcagaggggcgcggagagcaatggccattctattctacagggaatttttaaatttattctctatgccagaaaaatggttatctcttttttgcgagaaattttgtaccatacaaatgttcccagcatgggcagaggggcgcggagagcaatggccattctattctacagggaatttttaaatttattctctatgccagaaaaatggttatctcttttttgcgagaaattttgtaccatacaaatgttcccagcatgggcagaggggcgcggagagcaatggccattctattctacagggaattttttaaatttattctctatgccagaaaa

SEQ ID NO: 37952 - DNA, 1070 bp, Heterodera glycines
gtgttcattggtgatgtgtttggcacatttttcgcagagtggaaagaggagtcactcatcaaattttatgggcattacggtcacattgatattcctgtttgggggtaaaagtaaaacttttaaaagtcccttgtatggattgtcggatggagctcgccagttgacagtttgctcatttaatctaaagctgataatttttgggtgaccgaggggatagtctgtagagaaattggtccatggataaaggctggtgaagtccttgtagctgattttttgtcccggcttagctgtgtggagtagcttcattggcccagtccgtcctccatgaaatgcgtctctgatttatattggtgagtggtctttccagttgtcgaaaaactccctcatttgcttgtccttcttcagctgctcattgatttcgtgttcccagatcacctccaagtctacgtaccggctaagaatctcgtgcttccttacctccctctctcttaattgtcctagcgtctttccgttcggcattttcgtttcgtcgtccaagtcctcaaaacattcctcacacccgtgccacagacaaccatttacctcaataattttatccctcttcccattagtcccttttatataaccatccacttgatacacctgaccctcgcgtttaaagacatattcaccatagcgggagtgtgcagtttgaatgttgacattgttgatgtgggagtaccagtcgaggtatttgatggccagtgcactttggttctgttgtggtgtatagcctttctccgagacgatggcgagcgagttgggcttcaaatgattgagtgcaaagttcttgacgcaggcgctggcgatggtcatggcttgccaaagaatgtcgattcccccgtgttttccgttccgttgtgtcagttgtttgaattcctggcgtaattcgacgagggcgtgggtgagtatttgtacctcattacaacaatattcagggagtttttccttaaggttaaaaaggtggtttgaaattattattgaaccttttgccaaatttcggttgatcggggattctcatttgatcagga

SEQ ID NO: 37953 - DNA, 912 bp, Heterodera glycines
  unsure (1)..(912): unsure at all n locations
tttttcgtgcctttcagccctcccacagtccaggaaaaaatatgcatgtgcatataatttgcagccctactaatgaccaattaattttaatactttaacaattttttaggggagggtctcaaaacagaaaagtaccagcctttggccatttcagtcctgggccataacttgatttcgaataacaaagtccatcaaaatcttggtattattcgagtgcacttaatgttctctattagcaggcaaacattatgaaaaggttttaaagttatgagcaaaagctcaagaaattattttcattgtacgagttgggtttttcccaatccaacatggtcaattgaaaaaattagaatcctggtcatgaaaaaactatttcgtaaatcaactgaaaacattttgggggattattttatctgtcaccgcataatttgtcgtttcccatcgctcataaatttatgcaaatcgctacgattttaagaccctctctctcatcgtcccttttctttctctaattcttttatttttcacacgttttcgccggtctctcttttttcaaaacggattctctctctctttctcctctctctctctctctatatctcctctctctctctcgctctctctctctctttctttctttctttctttctttcacaactctcgacctttctcattgtctctttttcatttgcactcagtcccctctacaatttccccctgcgtcctctggtaatgtacagtacaaacggattatgcaaatgattactctgtacaataaaagcaacaataacaacaaataggctcattanagtgcttactcatgaggattaaacctgcaccattataagcaataaatttgacactgaatccantanaaaattatgtgttcaaaattgacaaaaatgtttgccagcg

SEQ ID NO: 37954 - DNA, 616 bp, Heterodera glycines
tttcctccggcgaaatatgttcagcattacccgcgatcttccctgatgttctagacacaaattgaagtccatttgaaatggacagcaaagtgatagccccgggggtccgacttctgaccccagaaaacccaattaggaaataatgatgctaatggctggcttattggagtgccgtaggatcagctaattacccccccccgcgtccatcgttttgctgcgctgtgacctattcggagtgtgaagttgataaatgagtctcagcgtgtcacacacttgtcgagactgaatgtgctggcgaagtttgtccaattccaattgagtgtaaatccgagccttaaaaaggaaatccaaaagcaataaaaacaaattaaattagaccgaaaagcacaaaacagtaattaagctcgagtcttttgagtttcaattgcttaaaatatgtttttccaaactaaaacaaacaccaaaaaaataaaaataattaaaaaattcggtaaattcacaaaaaatattaggaaaaaataaataggctcattagaaagagcataaaatctcaaaaattgtttttggatggtgagtatctcctattaatgcttcctaataatatgtgaacatttta

SEQ ID NO: 37955 - DNA, 1158 bp, Heterodera glycines
gcctggcaggtctataatctaggattggatcgggcatttattgtgtttggaaaggacgcaacggcactcattttgcttgcacgggtaattattatttacttttatttaattggtttgattaattgggcatgcacactaattgacttctttcaacaaaaattcacaatctttcataaaattagcataattttataatcgtggatcattaaaattcataaaatttgaaaatgttaaaaaaattatgccattaaaattttcgtcaaaattaatgctataaaatgacgcaaggaaattcaaatatagttgttgtctaaaatttatttataattcaaaattaaatatgtaattgaatattgtcatattttttaccttaattatttttatgtttaagctttttttaattaaaattaaatactttattgcttttattttcgtattttttttcaatagatccaatcggaaaggagtcaataattgcacttttttaatttttaaaaatattttaaggcattattagaagataaaatggacggaaaacaattggaaaattatttgaacaatgaccaaaatttgttcaacaacatcaacattgatgatgatgattattcatacatcaaaatggcatcaaaattaggcaaaatttcaaaggattactaagcaaaggaaaatttttatcattaggacaaattattgttgattaattaattgtaattgaatcaagtaatataaataccccaaattgttgttgtgggaaatcataaaagttaacaatatctttttttttgcaaaataaaattaatttttgctcaatataaagcgttgtgtggctattagtactaattgatttgactgttggcgctttaattgaaacatgaaacatttcttggctgtttttctggtaattgttgcttgctaaaatgatcgagcttatctctttaatgtatctttgaatgccttgcgatatattgaactaaaataacaaaaaaaaaattttttagtccggtgtggtaaattaatttttgtaaatttggtataaaattggcgcatttgaaatggcactgatctgaagtggaatggctgagatcacaaagccaaaccaaattatgatggacgattttaataagggcaaaataaaaaggcgaaaagccctatgtaaaa

SEQ ID NO: 37956 - DNA, 1507 bp, Heterodera glycines
tttttttgttatatttatgaattttcgatataaaatttacgaatgtggagttaaaatgacaaaattttggttattttagtttccaagctttttcacatcgatacttgtacaacatctcgtacgaaaacggccgtacgaaaacgaccctgaccgtggtaaaaacccataattattgaatctaatttggcatagtgttcattccgtaggcattctctggcactctttcaacagatcggaatttgctggatttaccatttaatgttttgaaataagcagtaaaacacgtgccttttttctttctttgcaagccgtggtcttggcttgcgattgacagttcgtccctccccccccccaaattccctgtcactctttgcttatcgctgtccccccccccccttatcatctgctccaaatcgctcctctaaagtccttctcgcctccctctcccattcactcatttccatccaatttcatctccgtacaaccaattccctcccatgttttccctccatttttcgtttcgccccattatttcacaaaacccttcagccaaaacataaaattttccgcttttgcgctccttttaaataaattcactgattttttttcctttggcaaaatgcgattggcttcgttattttctgttctgctgtttttattgttcatccatcgaacaattccctcaccttcgccaaaatttgatgaagccataaaagacaatggcattttcgcattcgattcgtccgaggacagtgccgaggaagtccctccttcgcctgcttttgccgattctttgcggtcgcctcactcctccgaggccgaggaggacggtccatctgctgaagaggaagaacagtttgtggacaatgtggccggatggcggccacgtccatctttcctgccgccttttgctgttcaaaatcgatgcctaaaagccaaattcttcgattcgaaatcggacgaatgccgcccttgttccatttgtgggcccgacctttagtgagtttgtgtacgatttgtcaaactgtttcaaacaatcgctgtaaatgtaaagtgagcgggaaaagtgccgtacggacagtgacaccgtctgcgagtggtgcctgaccaatttgcgagtgattgtccgcaacagcgactttcgcgtcaaatgtgaacagctcattgccctccgtgaccaattccgcgcggcattggctcaacattccgttgttgagggaaaagcgaagccaacgatttattcgggtttttgtcgcaaaaatatatttaaatgcgaattgctgactttgaaatacagtttcgatgttcgaaaatgcctccaaactgtggaagatcgagttgtttgtggagatggctttttacatcactctgattgccctcgtgttggcggtcattcgctttttggtcaaaagtcggtcgaacacgacgtaccgtactgtgacagtaacaccgccgatgctggaggagtgtgcacagaagagtgagtgggggggaagcatcggatgaa

SEQ ID NO: 37957 - DNA, 1260 bp, Heterodera glycines
  unsure (1)..(1260): unsure at all n locations
aaataaaaagggcacttatgtatatgaaagtaatggcgatatttggattaacggagaattaaagggaagaaatgccgaatattcctacggtgttggcgataccgtaggaattgtcttcatttcgtccaatcggcagatcattttcaccaaaaatggactgcgtttgggttggtaaatgaataaattattaaacaaatcttaaattataattttatttaattgatttttatgtttgaattttcaaaaatcccttaactttttcacagatacctctgattttttcgttgcttcatcttttgctgatggttctctttatccattcgtttttttgttgcgttctgatgaccaaattgaggcgaattttgggcccaatttcaaattcgatttggcaactctctgaggaagaagaaatattcactaattgttgatcaatgcgcttcttttaatatttttttatgcttttcttcttcaattgtattttgttttttaaaatataaagcaatttaaaatcaaagtattattccgcaaaaaatttcttgtaattttacttttactaagttggacagactaggaaattcgctttattgcacatgtccattactacattcaataaaacggctgatttttctgcccaatggccaaaattctggaggttagaaaatctccgttatttaactgaaatgcattttgtacaacggatggacgacttctttttgcagcacaaaaagagatggttgaaatacaataaccatgaaacggatttatatggtttaaaaaacgccaaatatgcacttatataagtgccaaaaacccctaaaatgagtagagaaattgtgcatttaattaaattccaacacgttacaggtgccgaaaggagcagacagaaaaattcttaaatattttggcaattttgtcaaaaattctagtgccaaaaagctacaaaaacagatttttaaaaaatcgcaagaggtgctaaaaatcacaaaaattaaaaaaatattcatcgacaattcaaccgtacttggcctagcgggggaagcgcctatccccccgctgttgttcttttgaaatttgatattgtgggtattggtgagaataagacgaaatcttacgaacaaatttttttttgacaaaaatgtcaatttttgggaagtcatcaaaaatttagtaaaatattttattanagtacaantcagtaaaagtatacaatcattttccggnactctngattcaaaaaaaatcaaaatttatatttttaaa

SEQ ID NO: 37958 - DNA, 1018 bp, Heterodera glycines
aaaaaggggaggagactaaacgggggaatgtactaaatgactttatttgtcgaaaagcgatgccatgaggggattttcgaggagtctaaagggtacgcacaacaaatcagctggcaattaggcaaatgaaccgctagggatcgtaaacgaaaaagaaacattgccatgaaaaacggccattagcccatcagcaagaaaggattacggcacaaatgccgaaagggggaggggaagaaaagcaatgggcaatgccaccagaaaataaacaaattaattgtcttagcttgatttaaacggaactactgctcctcgtcagtttcttttttgccgtcgtttcttttcttttttagctcttcttcgtccgtttctcttctcttcatcttcctctttctcctcctttcttccttttcttcttcctaatgcttctctcgttttgtctttgtcttccttttctctcttcctttgtttttcttctcttcctccgtttcttttctcttccattcatcttcctctttctcttcctttcttctttttcttcttcctattctctagttttgtcttctttttctcttctcttcctctttctcctcttctcttcctccgtctcacttctcttccattccttcttctcttcctcttcctctttctcctcttctcttcctccgtctcacttctcttccattccttcttctcttcctcttcctctttctcctctgctcttttcctcatcccccgtccctttccttgttgtcctcccccaattgggccattattaaacttcttttacccttttggccatatgttttcccgctctcccacagcccattacttttccaaccgcacatttccttggcaatgtcgctaattacatatttattcattgctggagcgaatgatggccggtgggggcgggggtgagagataatcgggcaaagcacaagcggatcccctcacccttcaccctcccccgcgcccgttaatgcagatggatttggatttcattgcacagccccatcag

SEQ ID NO: 37959 - DNA, 818 bp, Heterodera glycines
actagcatagaagctataaaatttatttgttctcttatctccacaagatgcaaatcatacagtctgttttttattcgggcctaactctatggctgaaaatagtcgcatttattacacaaatatgccactagcatagaagctataaaatttatttgttctcttatcgtataaatatgcaaataatacagtagttttttattcggggcccaactctatggctgaaaatagtcgcatttattacacaaatatgccactagcatagaagctataaaatttatttgttctcttatcgtataaatatgcaaataatacagtctgttttttaattcgctcaactctatggctgaaaatagtcgaatttattacacaaatatatcactagcatagaagctataaaatttatctgttctcttatcgtataaataagcaaataatacagtaagttttttaattcggagctcaactctatggatgcaaatagtcgaatttattacacaaatatatcactagcatagaagctataaaatttatttgttctcttatcgtataaatatgcaaatcatacagtctttttaataaggagccaactctatggctgaaaatagtcgaatttattacacaaatatatcactagcatagaagctataaaatttatttgttctcttatcgtataaataagcaaataatacagtaagttttttaattcggagctcaactctatggatgcaaatagtcgaatttattacacatatatatcactagcatagaagctataaaatttatttgttttcttatcgcataaatatgcaaataataca

SEQ ID NO: 37960 - DNA, 910 bp, Heterodera glycines
cattaaatattacagatactccgttgctgggtcagccattaaatttgttgacactggcacttcaagtgaaattcggcgatgtattatgcaatattattggaacacacagtcaaaattcaatgcattaattgcccaatttgacagtaaacatgcatatttggctactgtattgtcaaaattagacagcaattcggcatttttgaattttcgaatgcgcacaaccgatgcggagcaagccgagtttattccatcaaatgaattgttagaaggcataatttataaataccatattttctctaataatcccccatatcattaatcccacagtatccatttgtcccccagcagggggataaatggaattctttagtaagaaattgtatgatacagttttttaatgaattgaatactataaaaaaccatcaaaattataatttttaaacttacaccttttaaatcataaaagaattgcataataattatgttctaatagggaacaataataattcgtaacagaattccaataattaaaataaacatttaaaacacgaattaaattttttttttttgtaagcctcgagtataagccgttaagtcaagtttcggggttgagtgccgagaaattttcggtcactgttttgtttgtatctatttattttttaaataagaaaatatgccaatgtcccctttttacagaaaaagtatgtataaagtgtcaaaaatttattccattaattattaaattgctttatttaatttaattgcactttaattttagttccttattccttttaaacttggctcatgtttacaagcttgtgacattgatcatcgaggcgtaaaagtttatgatattggtgaacaaattggaaattaataattaaaaaaatttaaacttacagaattgcat

SEQ ID NO: 37961 - DNA, 1501 bp, Heterodera glycines
cttcaaaattttgaaaaataaataaaataataggagactcagaattttgaaaattttttataaaaactgatgacaagctaatgtgataaaacaggttaattcttttcctttcagtatccctgcaaagtttggggcgcttctgataagtttctgaaaaaaaagataagcctaaactttttggcctgtttaaaaaggaattaaaaatttttaaaaatttattcatctccctttttgatagaaaaagcatcagagtgcctaaactagcatgtaaataaaatttggtgcgtttcagagcattttctgaaaaaaatatttatgaattaattatgcaaaaaacaaataaaaacgaaagactcagattttcgaaaatttttttaaaggaattaaaaatttttaaaaattttattcatctccctttttgatagaaaaagcatcagagtgcctaaactaacatgtaaataaaatttggtgcgtttcagaaccctttctgaaaaaatatttaagaacaagttgtgcccaataaaaataataacgaaacactccgagtctcaaaaagtattttggtccgactagaaccgcactcatttccgtgtgagcgaagcctttgacgaggaggatcactgcgaagtgtgagacgcttctgctacggttaattcacctataggtcctcggaccatgcacagatggggcaagcacaaactactttgaaataggtcaaaaccacctagaccaacgacaactctaaagagatcaccgcgcaacgagagaactcacccggcatcttggccgactacgcgacagccgccggcaccgtgcttatcgcctacgccgcaaagcccgggtcaaccacaggcagtgccaccagcgactttgtcatacaacactaattatccgggagcccccggctagtccgagtcaggaaaattcaacagtaatccggcttttgattgtaaattttttttaatttcgagatgataagtgtaataacgctcctgtaattctttttaaccgcatcagtgtgaacataggatgatttaattgtcgcggtgcatcaaatttgcctcctaatgatggtgcgatgatgccagaaaattgttatcaaggacgttggaatttttttgtgaatttaaattaatttgatatataattcttcacagggggggacaacaaccctaattgcaggggttaaaggggattttttgaaattgttctttttaaaacgcccggcaattacccccccctatcgtatgtttttaatgaatttaaaattttttggggtttaaaaaaacccaaggaccccccctgccgggtttattaaaatatccctttttcttttttaaattttttttcgtgggaaaaaacaacttttttattattttctctttaaagaaacggggggccccccccgcgcagcccccccccactcccctcaatttttttttttttttttttttttttttttttttttttttgtgtgtccccccccccccccccccccccc

SEQ ID NO: 37962 - DNA, 1167 bp, Heterodera glycines
ggcgtcaaatggacgggaaaagtaaaaaattaaaataaaatttcaaagaaaatttcttgaaatttttaggcccctaaattttgttcctccctcggccaaccttttaaaaaaaattttgatcgatttcccatttccatctctttttcatgtccaaaatccgggaatttttcttaaattttcggcccctaaattttctaagtcctccggaattttcaaaaaaataattaggccccttaatttagcccccccccccgctccttctctacacttctcatattatcctaatgcaacttgttcatttattaggcttaaagaattttgtaaaaaaaatttcgcaaattttgtaaggcatcctaaaaattttcaaaaaattgtttaggcccccctaattttctttcctctcaggttgtctatctgaccgcatcatttccctatttgatgctgttctttttgcttttgcgcggcctttcgttgcctggcgccagcctcggcctcgagtgaggcccaaattttcaaaaaaaaaaaaattctaaaaaatctatcctctaagattttatttgaaacccgacttttccaaactgttggagagcaaagtttgggttgacgcggtcacacaggtcgaaaatttaaaatttgattgattttctaatcacatgatgaaaatcatagatttttgcagttttgacgtcagattcatgatcagctcctaaaactacattagaaaagtactttcctttgtcaggaccatcacatttttatggggggggggtagcaaaacctacaagtacattattattattattattattatacaataggtaaaatagatctaatgaaacacgtagaaaaggcaactcgtacaatggcttaggctaggcttaactttaggcttaaactgatcccacattttataccaaaaagatcaatcactcttttttaattaattttttagaaatgctaaactaattttctatttttattcttaattagaggggcctcggtccctcggacagtccctgggggagggggggggcgagctgctcgttctccatttttgcatgttactcaacttgcggttctgttatagccgaacattatgcatttaatttgtcaactgaaatgtttgttatgtacatatgacacactgacgaaaatgtgtcggggaaa

SEQ ID NO: 37963 - DNA, 953 bp, Heterodera glycines
tcagaaaatatttatacattcatcgttcattttatagacaattttcctctttgtaatttagcccaaatgaccaacgaaaaagactttatttgcttttattttgacaaaattcacaattcttcttatgccaaatgtaagattgagcttaataatcgcaaaaaccaacctttttttgttgaaaatctgttaacaaattgcacccaaatttttaaaatttcccccggcggcgcctatcggcaccgccggaccccttctttcccaaaagttttttgaaaaagcgctccgaaaaaaagtgatgtgaaaatcaaatctgaatttctattaatattcgatgatttagtccaaaaatgattaattgtttgaaataattgaagaaaatttgtttgaaaattttcattaatttaatttattaaataaaaaaccaaataattttgtattattttcacttgatataaattaaaatttgattttttttttaatttttaaaatttttttgaatttttaaaatttcccggttggtcccggttcccggtttttcttgcggtcccggtcccgaaaaaaaatcgaggtcccggtcccggcttctcaggtcccggcaagtcccggttttggcaaaaattcccggtcccgtggcactctacttttttgtatgcaggatttattttgaatgacctccgaaaaagtctctcgcatgaaaatctcgaacggcttatttttcttcatcataatattatcctttacaattttgattattgataatatgggaattttctaattatgcttttacaaatgtgcgatccgcggcgttttttgcgcgatccgcgatccgcgaccgcggcaaattgaatccgcgatgcgcgatccgcgaccgcgggattttttttgcgcgatccgcgatccgcgaccgcggcaaattgaatccgcgatgcgcgatccgcgaccgcgggattttt

SEQ ID NO: 37964 - DNA, 1105 bp, Heterodera glycines
  unsure (1)..(1105): unsure at all n locations
agcatntcggccaatggcgagcaccatgagaattgagctctgtgtccatttggacgaacttcagatgggacaaaagagggagcaaaacgaacaaccaaaaaggggtccaacctaaaaaggggcaaaagaatggaatgaatgggaaaaagaaagggggtaattaggaataattaataaaaagcatacagataaaatggaaaatgacaacgcggagaatggagcggacagcgcgtgcagtgtaagtgacggaacctaaaatgtaaagggcaattagcgaaaggctaattaactagctaattagtaaatataaaaggcagcaagcaaaacagcagcgaatggctggctactcattttttgactgttttttacctcgcggtttgcgacgaaggtgacgaataatgaagaaatagcagacggcgatcagagggagaggcacgatgaagccgaacaaaagcatataggagatgaagaagggcttaagagggagggagagtaagagagagaatgggagagagacagagaggaggagaagaggcgaagagagagagggaatgggaatttggaagagggagagagagagggagagaaagagagggcgcagagagagagagagagaaagagaagagagagaggagagagagagagagagagagagagagagaggagagtagaatatggaagaggaaggaagagagagagaagagagggacagagaggaacggggagaagagagagtttggaaatacaagtgaaggagagaaaggggtgaatatggcaaaccaaaggctaggggtagtgttagagcgagcgatcaggtgtataattcgctaattaacaaatccaattagttgattaaagtgtaacccaccaaaaggcggtcgggcagttgcgagccgcaagtggcgtcttccatctccacgctttcgtccgggaatataagcatgtaatggttctgaattggcaaatgccgcgtcactttgtctttttctctcaccgcttgcgcaaaataaatcatcggcgtgcacagaatggcgacagtgcccagcaaaaggccgagcagtgcgaacgcattgttcagtcgcttttgactaattcgaatgcccag

SEQ ID NO: 37965 - DNA, 1102 bp, Heterodera glycines
  unsure (1)..(1102): unsure at all n locations
aaaaatgctattgttgctgaacgacttgtggttgcggcattgcggttttaggaataccatgctgttggtttttgtcacccatattttgtctgtttggcaaattttggtgtacagactgatgcacgttttgaatgagtaattccggaattattgggccacttataggcgtggatgttcgaggcaacaagttttggttgagattgcgatgaccatcatttctattttcgtctccaaccaaccaattttctcttccgtcgtttgttcccacatttcggaatctcattcgcaaacctccgcgttgttcttcgtttccattgttttccgctccgttctcttgtccttcattttgtctgttcggttgagccaactcaagaagagcatttcgaatttgtgccgagtccatatttccgttcgtccttaaaatttttccatcaacaacagaattttcaagaacattttcggtgttagcggtgttatgcggtctttgtgtgttttggtgttcgttttgttgctgcggctcagtacaaaacgagtacttttaaacaattggcgagcagaagttgtacagtcccacacgaggacaaaatcaaatcaacaaaatgcgccaacacgagggcttttttcaaatttcttcaaccgtcggttttcaagcaattttatgaccgcgtttatccccgtttaatgaaaatgtcactgagccagaccttggtcgtccaggagcgccaagttacaccttttgaacaattaagctttggctttattctccaaattggcaagcaaaggcaacgaaagcaattcgatcaatttaaatttgttgatcagtcaaaggtgcttgccctgtctcaaaataaatcgaaacaataaaattatgctttatgcaaaacaaattaaagacacgaaataaccaaaacatacacaatttcaaacaaacttgaaaatcggcgagaattaggcacagaagaaaaataatcaatcacacaattaacttttatttctcaaacataagcactaattaaaaaaacaaaggcnacttntttaaggtcaatttgaatnnncgcctcttaaggacaaacataataaattaaataattaatgaagtcca

SEQ ID NO: 37966 - DNA, 818 bp, Heterodera glycines
ttctttagtgaaaataagcacttcccagtcaattttaatgggtggagaattaatagaaagttgacaaagttggaaatgggctctttggccaaaatttcgatttttgaggcctcataactttttgggaccttgctatatgctcgtaatattaaaaattcacactagaagtcgacctttctctatccaatggtatgtaacacatatgcattttccgagttacagttcgggtggttcccttgttagttaaacaccacttaagacatcgaagctcaaattcagccggaaacgcgtgaaccaccaaagcgagccagcagaagaccacgatcgagatcaagctcacacagtcgtgagcgattgagtaagccgtttttggtattttgcgccagaaattccatgttttttttttgtaaaaatataataatgatctatttgcccaatgaaaatgtttactttttgatcataccctggaaaagtgatcaaaatgttaacttcattcttcccggcgttcctatctgttcttcgggcaattaattaattttgataaaaaaaatattaatttatcaaaaaaaaaaaatttcagtgatgtacgaaaaaatttttactaaaatttttttaaaattttttttccattttcaggagctaaccttaatcactcatcaagccgaggtgaccctgatcggaattcagtgcaatggcaattagatgtagaccattattcaagaaatgctgcccaagaaacttttgagccaccaagtaaaattaaaataatgataaattttctacttgaacattaggtaaaaagaatgccggaccaggac

SEQ ID NO: 37967 - DNA, 1202 bp, Heterodera glycines
  unsure (1)..(1202): unsure at all n locations
ttcaatgatccacatgaattgatcaaacattggcctactttgaccaatcggcaggcgatccatcgcgtttttgtgctcaaaaactcgtttaaatctgtccctaccaattgcgtttcgccccgaatcagaaaaagggcaattccaatgccaattatggcaatgtccgccgcccttcccgccatttccaatgcctttttattttccttgaaattctcttcaattttactgaatttattagcaattccatcctaaatcggaaaagtgaaaattccttgatttttttttgtttttttaatttatcatttttaatttgcctattttttcgatttaattcgtaaagatatttttgtgaaaatccgcgttgaataaattcaagctcttttccaactgtctgttcagtgttttagacaaatagggaagtcacagtttgggaaaagaatgtttattcggtaagcgccgttcgaaatttattttaaaacttttaatgtttttgacttttcaaaaatcccattgttttttcttagcctgtgcttctccctttttttctgtgctaattgcgccttaattggttaattttaatccctttaaactattcaaattcgcccttttcttctcacatatccctccgtttccaatgcttttcgtttctccgttaattcgcccatttgtgcagctgcaatttgtcctttgattttcgcccacattttgttgctattatcgacaaatttttcaattgtttggtaaattcgtccgacaaatttctccaaatcaattttttctactctttccgatgtttttttgtcttttcctttttcggcacttttttcgatcatttcccgcacaatttcaacttcgtttggatcagtcaaaaattgatcaccttaaataaaattttacttgttactctttagcgcctcttattcaaaaaaactatttaaaaatttttaagcaacaaaatacaacatgcttctaagggtttttggttcgctgatcacgaatctgaaatcattttcataaattcaaacatttgatttaattcagaacaaattttttaatttattttaaaaatcgagttagaaattatgaattggataacaaaatncatattcataatcaacaatcctaaaaggcaaataaaaaggttnccttttttaaaattnnaattgattctatacaannaaagttaaataaaaaaacacccc

SEQ ID NO: 37968 - DNA, 157 bp, Heterodera glycines
agagaaaggagagagagagaggagagagagagagtgtggaagagagtgagtgggagagagagagagggaaagagagagaggagagagagggagagagagagagagtggaagagagtgagtgggagagagagagagggaaagagagagaggagagaga

SEQ ID NO: 37969 - DNA, 589 bp, Heterodera glycines
gtgcgtaaacaaaggttgaacaaaaataagaaatttgaaagaatttgaattttcgactttttgttagaatttgagttcggggttctgaattgggcgaaatagaaggcgtattcgtgatcagctacccagaatacccctgggaacatgttttcataatttttgaaattaaaaaaaaatcgaaaaatgttcgaattcgggtccggtggagaaataggtcgaaatggaggtcggattcgtgctcagcgcctcaaaacacccctagaaacgtattatcagaattttcagaaaaaatgaagaaacaaaattttcgggaccaatgatcgacatgattgccaattattttggtgggcagaaacagaaatgtcacattgagccaaagtttaagtttaaaaataaaaacccgggcaccaaaacagaaatgtaccgaatttatttacttttttatgacagaaaacgcatcaaattgttaagccatcgaaattaaaatacctatgaccacaaaactgtcaatcccgttcgtaccatccactgtgcaaacaaagccttttgctggacaaaaaccgggcaccagcggtctccgaaaacgagt

SEQ ID NO: 37970 - DNA, 819 bp, Heterodera glycines
ggcggaggcgccacacaaacacaacgccaacacgccaacgacaattcatctgcttcttctggtgttggcaccgcttctccttttacccccgggggaggggacggcactcaatcccatcacccaataatgcatttcatattatattgtacatttctttgttttgttgtagctaaattgctctcatattcttgttttgacgtgcgctggccgagagtctcgtgtataaggacacgaaatgttgcaaagttctgttcgagtttgggcccgacataattttcaggaggggtctaacggcgttggcagattttctcttgggtatcattagtcataatgattcgctaattaattggctggaacaaaagcattatcatccaattagggccttcgaatctccactcggcgttcactatttgtgagatttagggtaaaatttattcaaaaaatttaaacaaaattcggccccgattctcttcaagttcgtctcagtattgagtcctgagcctcataattacactatcaagcaggaagttttaagaaattcatatgggcaatcctatatagcttgttgtcccattgttctggccaaccccaagatggcactctcgataagcaacccatttaatcaatttgactcggaaatatttcaaaaaaaaaaattaatgcactttaaaaggatcgaaattgtgcgcaaatttcgcctcaatttcgtccccgaataaattaattatataaacaaaaaaattaaaataaatatgcttaaaaaacagtgtgtacattcgtagtcattaaagcttgtcctaatttgttcttaaatgttta

SEQ ID NO: 37971 - DNA, 1320 bp, Heterodera glycines
  unsure (1)..(1320): unsure at all n locations
cattgaaattcttttgaaaatttgagaatttattacaaataatagccggattttttgatttaaatgcacaaatcagtcccttaatgagtctttaatttttccgttttaattagtcggaaacacttgcatgttatatgagagaatttttatttagcatttttttaacaaaaattttaagcttttttgaattcaaaaaacagatttcctttaattgggtgtgtaaattttactttctaaatgggttgggataagctcaggaaaaacggggtaaattccacataaattattagaaaaaaattttttctatgaatttctacacaaaggcaccgagcgattagaagtaataaaaatgtgccgacattaagtgttagtttgagcatgaaattttcatttgcccaaggcctgttttgaaaataaactcaaaatttattaaaaatatggtagggttttagaacctttccacccaaatcccattcactataaaaggaataaaaaagccctgaaaaaattgccaaattggaaaattgtcccgtgatctttttttagtatatttttttatttttcttttgtgggaatctctgctcatttcagccaccaatcccgatcatttacaaagaacacttaacacactaatgacagggacacttaattgagttaattcaaaattaccggcaatgtatgtaaaaaacagtgtattaatttatatttttgaaactcagatttataaaatttccaattgttgttttgaaactttcaacagaaaggtgcgccgcgatcccggtcaattacagagaataatgaacccattaattaaaatggcaattcatccaattaagtcaatttcggatgcattttgtaattttccaaaacatttctgaatttctccagtttttaccaggctaacctaaacctgtagaatgaaatttgtgtatccagtttagagaatatttttcaaattaatcgaaaggaatcgcaaagaggatttatgatacctaaatattcaaaagtaaattttcagaaatttttgtcaaaaaccgtcataatacggtttttaggctcaacaaattcgtgtccattttattttcttctctaatatcggaatcacttggtttanatgcagcgnaattaaccgggtgaaagactggataaattcattgaaattcttttgaaaatttgagaatttattancaataatagccggattttttgatttaaatgcacaaatcagtcccttaatgagtctctaatttttccttctaattagtcggaaacacttgcatggtatatgagagaattnttatttagatttttttaacaaaa

SEQ ID NO: 37972 - DNA, 360 bp, Heterodera glycines
gccggggaaaatttttgaaaatttgattaaaatttgttgacagattttcaccaaaaaatcatcaaattttgtgatttttgtatcatttttctaatgagaaataagagttttggcgcgccgctgagaacagtttttcatcaaattaccaaattttgcgattttggccattttctaagaaaaaataagagttttgggggcgcggcagtgccgataggcgccgccggggaaaaaattggaaattttgatcatttataaacagtttttcactgaaaattagccaatttataggtaaaattttgaaatgatttatgggaatttaatccaattcttaggggtgtaaatatccccgctctcttccat

SEQ ID NO: 37973 - DNA, 867 bp, Heterodera glycines
attttttttgaatgattttatttttttaaattaattaagtttattaaaaataatttattttaaatattaaaaataataattctttcttcctaatttagcccaaaaatctattgtttgaccttttttgtgcaaaatcatttaaaaaatggagacaaattaataagttacctaaacataaaattataaatattttatgccaaaaaaagaaggaaagtgaaaaggaaatgcggaagagaaagtggaagaggatcagaaagtggaagagaaacataaagtggaagagaaagtggaagaggaacagaaagtggaagagaagaagaggaacagaaagcggaagagaaagtggaagaggaacagaaagtggaagagaaagtgtaagaggaacagaaagtggaagagaaagtggaagaggaacagaaagcggaagaggaacagaaagtggaagagaaagtggaagaggaacagaaaaagaaagcggaagaggaacagaaagtggaagagaaagtggaagaggaacagaaagtggaagagaaagtggaagaggaacagaaagtggaagaggaacagaaagtggaagaggaacagaaaaagaaagcggaaaaggaacagaaagcggaagagaaagtggaagaggaatagaaagtggaagaggaagtggaagaggaacagaaagtggaacgcaattttcatgtataacttctttagaaattgtctaatcataaagcaatagcttagacaaagcttttaaacatgttaagatttcaactaataccaacaatgtaacattgttggctttggattaccacgaattaacagtataaaaattgacaaaaaaatgtttctgatccaatttaacagaataaattt

SEQ ID NO: 37974 - DNA, 1202 bp, Heterodera glycines
  unsure (1)..(1202): unsure at all n locations
tgcttttgctgctagaacaagagcaattacacgtctccattccaacagaattcggaaatggctctcaaaattggtgaattccatacctgctggagcttctgctacggtatctgctacgaccgccgcctgatttgctgcccgcgagtagaaaaaaggcaatgatcacccaaatgatgataatgaacagcagaattaagctgatgcactgcagccatgcttcacaatcaatcttgcgacgtcgccgtcgctttttttgcagttgtttaagcactgtaaatacgtagtatacggtgttcggatggataaaaatacataattatataaaaagtaaaattactatttttatttttagtaaacttaagaatgaaaattagaaattttgtccccgtttccccgtacaagtgtcaaaattcaccggctgtgcgttccctccccgcctttatttttctgtgattacagtaagcccttttctaccgtcttccggaaacaatcgatcgtacacgcttttgacgagttgcgcattgtcattcaaccattgctcaaaaatgcttctcccgtgttcttctccttgcccattattttcgtttttcttcccatttctttgttggtgtttcgcttttttctcctccttttttctgtttgcttcacttttggcattgtgccccccggtgccatttttgaacagttcagacaatgcgccaaaactgcgtattgctaactgccaatttgaaatttgcactatgtcataaattggcacattttgccaatccaaattgtcggcttttttggacaacaattcatcaaattgacttttcacttcaatcacttcatcttcggacgtaatttggcccattttaattttgttcagactttgcattgccttctctaccatcaccttttgttcatttggaaaatcctctgacaaaattggcacaattgactgatcaatttgaccgaaaaatttgtccaaaatcattttgtgtgattgcgtcacaaaatctccccaatttttccatttcttanattttactttatatttttttaataatttttaaaacaaaaacctcagccgatgcgcattccttaactattttatcatgntccgaggtcgtgtgcaaattcattttctgcatcatttcgatttaattgattttattttgatttccaaatttcatttggcatttctgatcacttctctatcg

SEQ ID NO: 37975 - DNA, 827 bp, Heterodera glycines
  unsure (1)..(827): unsure at all n locations
tttttaatatatatttacataatattgctatttttccgttttttaggacataaaaatcccatccctactcataactttgttggttaacaaatttttttagaatttcgtaatataatagaaaactcttgggctatcgaatgatttattttattatttggttgactttgaacgaagtttgaaaaattttccatttgatgattttttgactaacgccctctcaccgtcatcatggtcaattttgtcgaaaaaattaatcataaaacatcattgtaagtattatttttagtgggatttataaaatttcaattgtcaaagagtgtgtccatgaaatttacgctattaattgtttaatatatccaaatttatttaaaaaaatatttcgaatgaaaaattttaaaaaatctttctatttttaactgacgatttgacttttttggctatcaaaaaattccattatttcttttcgagaatcagcatactgtagatcttttccatacattttccatgtaacttgtggtggttttttcattcgcgatttcttataaatccgctcgctatgcgctaaaaattattttttatccgacataaatgataacatttaaattcctcataaattttatttacacgccattaccaattagacaattttagtctaattcaaatacaagtaacaattatttgtgaagtctcataaagacacaattataaatttattgtcaacattcattagcgttttgccttttatttatgttgctttgacattatatttttcaatctatggtggggagattatatttttcaanttactaccatttattttttaaaat

SEQ ID NO: 37976 - DNA, 1183 bp, Heterodera glycines
  unsure (1)..(1183): unsure at all n locations
atggaacggatgctaaaaataatagacaaattaacttcttaaatttaatttttcacttactgttaattggaattttgaaatcttttctttggaacaaaaagaatttaaacaaattggacagtttccaagttttgttttttcattttcaatgtaagtctaaaatttatttttattattgtttttaagaaaaagattttttacttttaatttgtaaatgttaacggttaaaccaaacatttgctttccataaaatttgctcaaatcaaccgggatattgtaagataaattaacgtcctaaatatcaaattaaaaatgtgatttattattaaattaatattctatttaacttggtagctttaatttgtaagcgtctttcttaattagaataaattattttcaaaaactaaaaatacgatcaccaaaaataaaaatagaatatttcaaaaagatgaaaatttcagaaaattttcaatttacatattttcactttttttgtcataaatcactaaggaaaaatagaaaacctatttttatgaattaaaatgtaaatttttatttaaaataaattaatttttttattaacaataaaattataccccattacggtttttattcaattttgaaccattttttatgaaagtttcagagcccaatgagaaccatgaagaaaatttgtcgattttttgcgatgtttcattggcactctcgctcatcaatggcacatcaacaaatgccacaatggcttcattctcccgaattggttgatcgaaactcaactgccctgagaagctaatcttggaatatccggcttggcccaaatttaattgataaattttgccataatctggcttaaaaattttcagtttgactacacgcgaaactgttttcagtttccttccaagttcaatgctggtccataaaatatttaattgaacataaacagcaaactctgcttctgggccaagatccacctanattaataattgtattttaaaatttaaattaataatagtaaattacaaatttaaaaaggatttacaaaaatttttttttgtaaaaactaaaaataatcgaaaaatgtacactcaaagatcgaaaatttaaatttgatgcgtataattaattactttgagatcgtctaaacaanaaatgatcaaaaagctggatttttgagttctacttc

SEQ ID NO: 37977 - DNA, 975 bp, Heterodera glycines
aaaaaattgattttttcagtgtccgttggggtactcaaccattatgggagcaaaatccacggcagaattaagtacaggctataggaagctatccggaaggatcggtctccccataaatctgggcgcatcggtcggggggactgctccgaaaacaaaaaaatcgattttttcaagtgtccgtttggggtactcaaacaattatggggagcaaaaatccaacgcagaattaaagtacaggctatagggaagctattcccgaaggattcggtctccccataaatctgggcgcatcggttcggggggactgccccgaaaacaaaaaaatcgattttttcaagtgtccgtttggggtactcaaacaattatggggagcaaaaatccaacgcagaattaaagtacaggctatagggaagctattccggaaggattcggtctccccataaatctgggcgcatcggttcggggggactgccccgaaaacaaaaaaatcgattttttcaagtgtccgtttggggtactcaaacaattatggggagcaaaaatccaacgcagaattaaagtacaggctatagggaagctattccggaaggattcggtctccccataaatctgggcgcatcggttcggggggactgccccgaaaacaaaaaaatcgattttttcaagtgtccgtttggggtactcaaacaattatggggagcaaaaatccaacgcagaattaaagtacaggctatagggaagctattcccgaaggattcggtctcgccataaatctgggcgcatcggttcggggggactgccccgaaaacaaaaataaatcgattttttcaagtgtccgtttggggtactcaaacaattatggggagcaaaaatccaacgcagaattaaagtacaggctatagtgaagctattccggaaggattcggtctccccataaatctgggcgcatcggttcagggggactgccccgaaaac

SEQ ID NO: 37978 - DNA, 2589 bp, Heterodera glycines
taattttctataatacaaatactctcgatcatgagcgtctgggcggtgcgtaatggcccttttattttttaatgaatttttaaattgcatctgtatcccaaaaaaatggctttctcttttttgggtaattttctataatacaaatactctcgatcatgagagggagggcggtgcgtaatggcccttttattttttaatgaatttttaaattgcatctgtatcccaataaaatggctttctcttttttggataattttctataatacaaatactctcgatcatgagagggaggacggtgcgtaatggcccttttattttttaatgaatttttaaattgcatctgtatcccaaaaaaatggctatctcttttttggataattatctataatacaaatactctcgatcatgagagggaggacggtgcgtaatgggccctttatttttttatgaaattttaaaatgcatctgtatcccaaaaaaaatggctttctctttttttgggtaattttctataatacaaatactctccgatcctgagaagggaagccgggggcggaatgggcccctttcattttttaatggaattttttaaattgcattctggattcccaaaaaaaaagagttttctccttttttggggaaattttctataatacaaaataccctcgaatcctgggaaggggagggcggggggcggaaagggccccttttttttttttaatgaaatttttaaaattggacccgggatcccaaaaaaaaggggttctttttttttttggaattttttttaaaaaaaaaaaaccccccccccctaaagggaggggggggggggggggcgaggggccccttttttttttttaaaaaatttttttaaattgggacccccaaaaaggggattttttttttttgttgtttttttttttttataaacaaaaaaccccccccccccgcgagggggggggggggggggggaggggggcccccttttttttttttttttattttttttttattttttcttttctcccccaaaaaaaaaaatgttcttttctttttgtgtatattttttttttaaaaaaaaacaaacaccccccccacagaagggggggaagggggggggggagggggggcgggcgtttcttttttattttatattgttttttattattattttttttcgttgttccttccaacaaaaaagaagatatatttttttttttttttttttatttttttttttttataaaaaaaaaaaaccacctccccctcaaagaggaggggaggggggggggggggggggggggggtttttttgtttttttttttttttttttttttttttttattttcttttcccgccgcgggcgggatataaaaaaaaaaaaaacccccggggggggggagagaggggggggggaagttttgggggggggggaaaattttttttaaaaataaccccggggggggggggggggggaaattttaataattttttttttttttttttaaaccccccaccgggttgaataaaaaaaaaaaaccccccggggaaaaaggggggtaaaaattttttggggggaaaaaaattttaaaaaaaaacccccgggggaagggggggggaaacatttttttaaatttttaattttttgttctttaaacttcccaacccgtttaaaattcaaaaaaaaaaccttcccggggggaaaaaaggtgtttgaaaaatttttgggggaaaaaagcctttccaaaaaaatccccttgggatagggagggggaaccagattttggaattttaaatttttgtactttagctactcaacccgttcagaatcaataaaaatacatttcacggtgcgaaaatggggtatgaaaagtttatgggggggaaaaagactttcaaaatgccaaaaagtttaggcttaacttttttttcagaaactgagcagaagcgcaccaaactttgcagggatactgaaaggaagagaaataacctattttaaatattatctagtcagttcatttaaataatttttatccaaaaaatttttgtttgggttttcggggcagtccccctgaaccgatgcgcccagatttatggggagaccgaatttttcgggaatagcttccctatagcctgtactttaattctgcgttggatttttgctccccataattgtttgagtaccccaaacggacacttgaaaaaatcgattttttgttttcggggcagtccccccgaacctatgcgcccagatttatggggagaccgaatccttcgggaatagcttccctatagcctgtactttaattctgcgttggatttttgctccccataattgtttgagtaccccaaacggacacttgaaaaaatcgatttttttgttttcggggcagtcccccgaaccgatgcgcccagatttatggggagaccgaatctttcggcaatagcttccctatagcctgtactttaattctgcgttggatttttgctccccataattgtttgagtaccccaaacggacacttgaaaaaatcgatttttttgttttcggggcagtccccccgaaccgagacctcaggcagcaagctg

SEQ ID NO: 37979 - DNA, 955 bp, Heterodera glycines
  unsure (1)..(955): unsure at all n locations
cccatccctacgtgtttgtgacgattttgaggatatcactgaccccgaggtggaactcacattcattttttatacgaatgcttttcctttgttaagcttattcgttcggaccccaaagtgtcgcgttcggtttctctttacggttacgttcgcggggttcacctgaagaacaattcggctgttcagttaatattttacatttttatttcctcattgaaatcattttttagtctcccgggtgtcggtgatttccgtgtccgtcgcattaccattctgtccgacccgtgccctttgccagccaatcggacggcgaaacggactttgaacgaacgtgaacagattgtttacgcaccgatgtccggactcgggggactcgtctacgacaaagacgccgtttacattgacattggcggaagcaaatccttctccagagcggtgggaagcaaattacgaatttttgcattttgatccaatggaattcagcggaacagagacgaattcatcgaagcactcgaaggaatcaaagagccgttggattcgaaaatgggaaaagcgactcttaagcttctgaaggaaaatcccgacttggaattggtgcgtttaatccttacaagggaacctcgcgaactgttagtcggaaaatgcatatgtattatataccattggatggatagaggagggtagacttctcaattttttgcgatttttatccatgcgacgacttttttgtttttaaaaaacgcattttttgcggcgcggtttttaaaaatttttttgagagacagggggtccggcggtgccgataggcgccgccggggggggggnggggaaatttttgaaattttaatgctatttgtaagtagattttgtctaaaaaaatgaccaaatattgagatttttggctaattttttaaggaaaaatagggtggatttttgggggccggcggtgtcgata

SEQ ID NO: 37980 - DNA, 1496 bp, Heterodera glycines
  unsure (1)..(1496): unsure at all n locations
tcagggttcgcaagtttttttttcaaaataaggacagatgaggctaaaactaagactcggaccccaaaaataagattttttctaaaactgatgtagcgcgaatgaaacgtaataaaaacatgaaaaatcgacttaaaacaatattttattagcgcaaaaacaattgaaatagattatcaaaagtatttttcccatccgccgattttctccaacaatttgtgattggaaatgagcatttggtacatttgtgagcaagaaagatcaaaattggctttggtttggatcaacgccttgactgtttcaactttcaacaaattccgcgtgtcagtccattgtgatccgcacaaagagaataccctctcaacaaatgcattcgagacaggaacggaaagaacaatgctgaccagcttgagcagatgcggcaaatttgcttcaaacagcttcttccacttctgttcgggggttaatttttgaaattcatcatttggaaaagaattcagttatttggtttgcttcgctaacatcgtcaaacaaatcatttgttaactcgggcgcaatttgtcgtgccagagacaacgcatcgtcgtggggaattttgcgggatgccaaagcaacccattgcaacttttccggaaatcggtcaatgcgatgccatttgtccaaatatgccaaaactgaggtgtaaagactggaaaatttggaaatttaataagcaaccgattaatttttacttgaaattgttcctccaacgcttcgcgtgtgctctcatcaactttttcaaatcggcaccataaaaccgttcatgttttcgttgttcaatttcgctctaaatttgtncatttccagcaagagttcgggcaaaatggcttttcttttctgaatttatgaacagaattttcattcataattactataacaacctgaaaaagtcaattgtcttgttaaagaggcctagcacgtggtataaaaaatgaatgaccacaaacgattgttcagaaaaaaacgaaaaaaaagtcgtaaagaagtgccggacatttgtcaggttttgaaaagtaggcgattaagacagattccatccgaataattttgcccaacacgctgtgcatcgatgtccaccttgttggcccatgacgattcaagcgttcaaattcaacctaaattaacagcttagaatttttcatttcttagttccgcacctccaattcctcacaaaatcctttcagctcctcaattcgtttggtcgaatttttaaaatgtcctgccattttaaaaatcacagcctcaatgtccattgcttttccttcaattctcaaattatccgttgcctttttgccgcattgtgcaaaacatggcacacacatcccacaccaatcaatcattcattttgttgttttagacggaaaaataaattgttctctcctgcacgctcttctccaccgaaattgctttttgtgttgtacgcgagaatgtgccgtcaaattgacacattcaaatcg

SEQ ID NO: 37981 - DNA, 660 bp, Heterodera glycines
gaagaggaagagggggaagaggatgatggcggcgcggcggagggaagtggggaaggagaagaagaaggggaagaggaggaagaagaggaggaagaagaggaagaagaggaagaagagccggaaaatggccagaaatttgattatgttttttaaaaaaaaacattttgatttgtgtttcgtttttttgttggaaaaaaaatttgttgttgttgttaccacaatcggaattatatttggttttgtggttaatggaagaatttgcaagaaaaaagaagttaatctccccccgtccatcaaattccacatataaaatctgctcaaaatttgctttaaattaacccatttttagcgcgtctttgggtgttgtaaatttttttagttcgccctataaaattgttttatttgcctacccatttttccacaatgcgcgcccattagtccgcccatcactcggccaacaactgctgctggtcatcacacgctcggacaccgcgttgaactgttggaaaaataaatatgtaaatttaggaaattaaaataaaaatggtcatggtgacaaatggtccagtgggataaaagtgggtgtgttggcttgtcaaagttcaaacccacgccaagttttttcatttttttattaatttttgaatccgtgcggatttt

SEQ ID NO: 37982 - DNA, 725 bp, Heterodera glycines
aaaagttaatttttaaatactaaatttttaaggaattcttttattaaacgcctcaaaaaatatccaaaattacacaattttttcaaaaatttaaggaatttatagaaatttctcgtgaaaatctaatattttttcatgaaaatgtatcctaaaaaatcgttttttttccaaaaaactgataccaaaagttaatttttaaaatactaaatttttaaggaattcttttattaaatgcctcaaaaaatatccaaaattacacaattttttcaaaaatttaaggaatttatagaaatttctcgtgaaaatctaatattttttcatgaaaatgtatcctaaaaaatcgtttttttttccaaaaaactgataccaaaagttaatttttaaaatactaaatttttaaggaattcttttattaaatgcctcaaaaaatatccaaaattacacaattttttcaaaaattttaggaatttatagaaatttcttgtgaaatctaatattttttcatgaaaatgtatcataaaaaatcgtttttttccaaaaaactgataccaaaggttaatttttaaaatactaaatttttaaggaattcttttattaaatgcctcaaaaaatatccaaaattacacaattttttcaaaaattttaggaatttatagaaatttcttgtgaaaatctaatattttttcatgaaaatgtatcctaaaaaatcgtttttttccaaaaaa

SEQ ID NO: 37983 - DNA, 496 bp, Heterodera glycines
catcacagcactaccaccaccatcagcagcagcagcctcccccagagcattcgtcctcctcctctgcgcccagcggttcctcaaagcgtcggaagagtcgcgcgaacgcttcggcggcgctaccaccgcaacagcagcagcaacaggtggcgacggtcggcaagcagtgtcaagacaagacggcagcagcggtaaatcaattgctttgcccgcccgctgagaagcaacgccgcacggcggaaaatggttacccagcagaaggcggtggcagcggcagtccggcggacgtttcgtgtgcggcggtcgttatgcgtgacccgtcccggtggaacttggcatctacaaagcaacggtccagctcagagtccgcgttcaacatgccgtcctcatcggcgactcctgatttgccgctaccgcagcactgcagctgctgttccatgtgcaagtcaatgtccacggatggtgcgcaccggtgcgtgcatctgccgtatgtgca

SEQ ID NO: 37984 - DNA, 1018 bp, Heterodera glycines
aatcatgtttcccactcccttctcccaggggtcatgttttccactcccttctcccaggggtattattttgtaaagtctttttttccccaataaacttttcataccccattttcgcaccgtgaatgttatttttattgaattctgaaccggtttgagtagattagactacaaaaaatttaaaatttcgaaatcatgtttcccactcccttctcccaggggtattattttgtaaagtcttttttcccccaataaacttttcataccccatttttcgcaccgtgaatgttatttttattgaattctgaaccggtttgagtagcttagagtacaaaaaattgaaaattttaaaatcatgtttcccactcccttctcccaggggtattattttgtaaaaagtctttttttccccaataaacttttcataccccatttttcgcaccgtgaatgttatttttattgaattctgaaccggtttgagtagattagactacaaaaaattgaaaatttcgaaatcatgtttcccactcccttctcccaggggtattattttgtaaagtcttttttcccccaataaacttttcataccccatttttcgcaccatgaatgttatttttattgaattctgaaccggtttgagtagattagactacaaaaaattgaaaatttcgaaatcatgtttcccactcccttctcccaggggtcatgtttcccactcccttctcccaggggtcatgtttcccactcccttctcccaggggtattattttgtaaagtctttttttccccaataaacttttcataccccattttcgcaccgtgaatgttatttttattgaattctgaaccggtttgagtagattagactacaaaaaatttaaaatttcgaaatcatgtttcccactcccttctcccaggggtattattttgtaaaaagtctttttttcccaataaacttttcataccccatttccttagaaagtgaatgttatttttattgaattctgaacccggtttgag

SEQ ID NO: 37985 - DNA, 975 bp, Heterodera glycines
ttgagtaccccaaacggacactgaaaaaaatcgattttttgttttcggggcagtccccccgacccgatgcgcccagatttatggggagaccgaatccttccggaatagcttccctatagcctgtactttaattctgcgttggatttttgctccccataattgtttgagtaccccaaacggacacttgaaaaaatcgatttttttgttttcggggcagtccccccgaaccgatgcgcccagatttatggggagaccgaatccttccggaatagcttccctatagcctgtactttaattctgcgttggatttttgctccccataattgtttgagtaccccaaacggacacttgaaaaaatcgatttttttgttttcggggcagtccccccgaaccgatgcgcccagatttatggggagaccgaatccttccggaatagcttccctatagcctgtactttaattctgcgttggatttttgctccccataattgtttgagtaccccaaacggacacttgaaaaaatcgatttttttgttttcggggcagtccccccgaaccgatgcgcccagatttatggggagaccgaatccttcgggaatagcttccctatagcctgtactttaattctgcgttggatttttgctccccataaatgtttgagtaccccaaacggacacttgaaaaaatcgatttttttgtttcataaatatttttttcagaaagtgctctaaagcgcaccaaattttatttacaacttaattttagcactctgatgctttagtatcaaaaaggaagatggagaaaaaattttttaaaaaatttttccttatattttggttatatcgttttgcttttggtggggtgcttggaacagtggaatcatgcgcacccgtccgatctggcaagttaagcaacgattgctgactagccaaagggttcggtgccgtgatgaaacgaaccagcactgcttaccccg

SEQ ID NO: 37986 - DNA, 764 bp, Heterodera glycines
gaccggatgtcgtgtgagatgccctgcgggtgaaacccaatttttactgaatggcacactccggtatattccaccccagcgccgatttggtcatcggcaacgaaattccgaactgctagtgaccgatcccgagtcgtatggcctttggttcggcttcggcctcgacatgctgtcccccctccgttttttgggccctggtcccatcatcctgctcggcataaccgttgtgacaatcggcctttttctcctatttttattcgtcaaatattcgccaatcttcgccacgtatcgcctaattttacgaattttcgtcgggtgtgtgttgattcgccccgcaatttcttcatcaattgaatttgttttccccaccccctccccaacctattcttcacatactttcgccgaatcgcaaactttgggttatcactttctccaagtgtctgcgttgtcctttgtgtcgccatgcccgctgtacagcaagtcagccccccctttccttgctccccccttttttgtcatcgccaagctcctccaaattctccgtggccttcggcagatgccttttggtggccatcacatcaacagggggagggggaggaaccaatctttggagtgacaaacaaaaggagacggataagttgggcgggtgctgtacgatcctttattttgggaagggccgagcccatccgtttataaatacattccccccccccctcgggcgacatccacttcattcatcaacattttttttggatttcatcact

SEQ ID NO: 37987 - DNA, 981 bp, Heterodera glycines
gataatttagcgctcattatgggatgtataaaggccatgtagaaaggaattggaagcgctaaaattgtttgagaagctttttgagcgtaattacgatttttacttagaccatttttttctaggcttagatcacatgcgattttcggcactctgataattttagcgctcataatgggatgtataaaggcgattgtagaaggaattggaagcgttaaaattgtttgagaagctttttgagcgtaattacgatttttacttacaccattttttgctaggcttagatcacatgcgattttcggcactctgataattttagcgttcataatgggatgtataaaggcgattgtagaaggaattggaagcgctaaaattgtttgagaagctttttgagcgtaattacgatttttacttacaccattttttgctaggcttagatcacatgcgattttcggcactctgataattttagcgctcataatgggatgtataaaggcaattgtagaaggaattggaagcgctaaaattgtttgagaagcttttttagcgtaattacgatttttacttagaccattttttctaggcttagatcacatgcgattttcggcactctgataattttagcgctcataatgggatgtataaaggcaattgtagaaggaattggaagcgctaaaattgtttgagaagcttttttagcgtaattacgatttttacttacaccattttttgctaggcttagatcacatgcgattttcggcactctgataattttagcgctcataatgggatgtataaaggcgattgtagaaggaattggaagcgttaaaattgtttgagaagctttttgagcgtaattacgatttttacttacaccattttttctaggcttagatcacatgcgattttcggcactctgataattttagcgctcataatgggatgtataaaggcgattgtagaaggaatggaagcgctaaaatg

SEQ ID NO: 37988 - DNA, 1037 bp, Heterodera glycines
  unsure (1)..(1037): unsure at all n locations
atcagtcccatcatcttgaaattaatcccatggacacaagtcctggcgctgtacatgcatttcaagacgaacatggaaattggctcacttattggtttggatcaaaaagtgagttggcctatttctgaattaaatacatttaatatgttctttcaaaggttctagtactgcccaaccatttgtgcatctgccgtcttcgttggataagtcaaaacacgaaaaaaggcatgaaattaaatgctcaacaaaaataataatcagggacaaagagggtgtggttacagccttataacgtatccatttaagaaaagtctcgagtgacaacagcaacaacggacagtcgtacaaagagcagccgacggtggtcaatgtgatcgacacatcctcggccagggatgttgagaagggccaaacgcggcaccgattgtcgatttcttcatcctctgacaatgagtccttttcgagcgaggaacatccgacagaatcagacaaaaaactgccagcagaaaacagctcctcatctgatgaggccagccgatacataaagccaatgaatttattacggaccaatgttgggacaacggacgaaacgggcggaccaacggaatcaaaagcggagccaatggcacaagaaagtcaaatgtcatcagactcaaggcatttcaataccattctatcttttcttaaaaaaaccagtactgtaattatattctatagtagtcacctcacattgatgcaacggctttgtcaccttactactggggaattggaacccactccgagagtggtctcgcattcccgaacacgttcgttacgcttgccaatggtcaccgcttccaatgtcttagaacggatggaaggtgactgatcacttcatggcctttttctcacaaagtgttccttcaggttctccttttcggctattaaatgacctcccaatgngacgtcctctcccctccngncttcttttttaccattcggttcgcgatgcgcttcacagtcggccccgccagaaatattngtaccgactaatttta

SEQ ID NO: 37989 - DNA, 897 bp, Heterodera glycines
agagagaaagagagagagagagaagaaagagagagagcttttactgaaagagaaggagagatcgtatggaatggaggtggtgagagagagagagagagcagaggagaatggagtgaaagagaaggagagatcgtatgagatgaagagagagagaagagagagagaagagagagagaagagagagagaagagagagagagagagagaaagagagagagagaagagagtgagaagagagagagaatggactgaaagagaaggagagatcgtatggaatggaggtggagagagagagagagagagcagaggagaatggagtgaaagagaaggagagatcgtatgggatggagatagaagagagagagagagagaaaagagggagagagagaaatagagagggcaagtgcgttgttccatacattcaaaaagaattaatttgcaaagatctgctgcatatcgagataatttggaaagcgatcgcaagtgaaaaatgataattaaaaaaaatgccgaaaagggaagacacaatgaaccaaattgaatttaccgatcagtgatcaaatcgaccgaaataaatttacttgaaaataacagtctcgattaaatgaataaaaaacgggagacgaatgtgaacagaaaagagtgcaaaaatttggaatcataaaaaatatatatgtaggtatgtgcgtccgcgcgagcacaaccaacacaacacacgtggctcctttttctctctctctcttttctctctctctctctctcgctatcccggtctctcactcacttcctatctctaaccttctccctctttatccgctcctttctttctcgtgccccctccccctccccctctctctcttcctctctctccctccctatccctccgctcctttctctc

SEQ ID NO: 37990 - DNA, 1139 bp, Heterodera glycines
cccccagaacccgatgcgccccagatttttaagggagtcggaatcctttggggaatagcttcgatatacctctactttatttttaccttggattttgctccccataattgtttgagtaccccaaacggacacttgaaaaaatcgatttttttttgttttcggggcagtccccccgaaccgatgcgcccagatttatggggagaccgaatccttccggaatagcttccctatagcctgtactttaattctgcgttggatttttgctccccataattgtttgagtaccccaaacggacacttgaaaaaatcgatttatttttgttttcggggcagtccccccgaaccgatgcgcccagatttatggggagaccgaatccttcgggaatagcttccctatagcctgtactttaattctgcgttggatttttgctccccataattgtttgagtaccccaaacggacacttgaaaaaatcgatttttttgttttcggggcagtccccccgaaccgatgcgcccagatttatggggagaccgaatccttcgggaatagcttccctatagtctgtactttaattctgcgttggatttttgctccccataattgtttgagtaccccaaacggacacttgaaaaaatcgatttttttatttcataaatattttttcagaaaatgctctgaaacgcaccaaattttatttacatgttagtttaggcactctgatgctttttctatcgaaaagggagatgaataaaatttttaaaaatttttaattcctttttaaacaggccaaaaagtttaggcttaacttttttttcagaaactgatcagaagcgcaccaaactttgcagggatactgaaaggaagagaaataacctattttaaatattatctagtcagttcatttaaataatttttatccaaaaaatttttttttgggttttcggggcagtccccctgaaccgatgcgcccagatttataaggagtccgaatccttcgggaatagcttcgatatacctctactttatttttaccttggatttttgctccccataattgtagagtaccccaaacggacacttgaaaaaatcgatttttttatggcggggcagtccccccgaaccgatgcgcccagatt

SEQ ID NO: 37991 - DNA, 1067 bp, Heterodera glycines
ttcagttttccagaaaatgccttcattcaaaacgcttcatagtttgcggttttcacggttataagctgtcaaaaagtactttccggaatgtctgaaataatttttgcaataatttttattcacgaaatattagaaaaaattataacgggataaatgttttttagttcggtaataaattcttttcaaatcactctcatatccgaattttttttcataggatgaattaacaattaaaaaggatagtttgttgggactactccttccactaaaatattcttgactggaaacaagccaacggcggcagttttctagtacaaaattcttaaaaaaagaaacttgccaagcctgttgccgttgtatgcacaattatttttggcaaaattcggggactttaaactctccattgcaagtcgatacgggcacctgaacttaaagaggacttaatttgaaaattgtacttttctattcaaattttaaaaattattattattattaaaagtcttttgaaaaagtgcgttgcgaaaaaaagatgttttgaaaaacaaaaaaggtaatcagaaatttttgattttttttgaataaaattcactatttttatttatataatttattttttggaaggcaatttctcgaaagtaccttttttgccacaaagaaagcttttttgactatgtgcataagaaaaaaaaattaaaaccccaacctcgtcgacccttacattgtctcacaatcaccagaggaattgcataaagaatttatgaaaaaagcagtcaatcatcagaacagttaagcattaaaaggtgaattttttgagtctttcaaattcatataatttttgtaaaaaaaatttcgcttttttgtgacatttcgctttcgccttttcgctttttattttggtttcaattttcgctttttattaataaaaaacgctaaaaggcattttaaatagttttattagggtaatttgtagcgctgaacccgaatatgacctttattttgcaaaatcccgaacctcgaaccccaattcgaacaaaaattcgaaatcataattaaaaggaaaaatattt

SEQ ID NO: 37992 - DNA, 1229 bp, Heterodera glycines
cagttccccatgcgttttgctcgaagggcacgccaatcggtggcaaatcgcgcgacttttcagccccgaggcgattcgcctgcggatactgccgttttgggtcctcaaagcatgtcaaaaagtcagagatagagaaaggagactgtgagagtgcggataggataggatgaggatagacaatctagagcggagtgagacaaaggcattccatccgtttttccttccattttaatacctgtgctgttttgaactcatttgtccattgtttttggcgtactattgcccccccccccctcccccgcccggcactccaaacagagacgcactatcaacaatttgtagcaattgttgcacaccggcaccggtttgctcggggacaccgatggcacagcgcacttttggccaacgcatcgctcgcaaaagccgaaacgacatacggcacaaccgatctgatttggatggcattttttcccattttgatccataatcaagttctcccacttcttttctgcgtcgtgtatattccgccatacaatttgtgcatggcattttgcgtcctcctttctgccgagtgccaaaacaaacgaacaaagccgaaggggacacagagaaaattggaaattttacaaatcaaaaaattagtgcataaattggcaatctggtatttgttaaaaaatgcttttacatttttattggaatccttaaaagtcaaggacaggcggaagggaatggtcggtgttgtgtaagcatataggtacattatattttatggattggaattgcgcaacctcaagagcagaggaagggacaaaaaaattagagaacgaagcactctcgactcgagcccggaaatttcaaatttgcggatcccgctgcgggactggaactcaaaattttttgcgggacgggatcccgcgggattaatcccgcaaatcccgcatttaaaatttgcgggatcccgtgcgggattgcgggattttggaagattcgaaaaaatttcaattaaatttaaaaaatttccaaaaatcaaaaaatgctgaaaataaatttttaggggctgtcgggatgcattaaaaggggctgatgggtcgactaaggtttttcgattggatccgacggtaaaaagttgatcggaaatcaattattaacgttcataatttgactatttttttttcttcaaaccacttttttgcggtgcagaaatcgggaattttcaaaaatatacatat

SEQ ID NO: 37993 - DNA, 1015 bp, Heterodera glycines
  unsure (1)..(1015): unsure at all n locations
ttatttttatttagttagtgataataattggggggatttggaccaaaagtcaactctaaaaagaaaaagggcatccccgaaaattattggcattcattgaaagggattttgggaaaaggagggcaagtttaacgtatttaaatacgatattatttttatttagttagtgataataattgggggtattttggaccaaaagtcaactctaaaaagaaaaagagcatccccggaaaattattggcattcattgaaagggattttgggaaaaggagggcaagtttagcggatataaatacgatattatttttatttagttagtgataataattggggatattttggaccaaaagtcaactctaaaaacaaaaagggcatccccggaaaattattggcattcattaaaagggattttgggaaaaagagggcaagtttagcggatataaatacgatattatttttatttagttagtgataataattggggatattttggaccaaaagtcaactctaaaaacaaaaagggcatccccggaaaattattggcattcattaaaagggattttgggaaaaagagggcaagtttagcggatttaaatacgatattatttttatttagttagtgataataattggggatattttggaccaaaagtcaactctaaaaacaaaaagggcatccccggaaaattattggcattcattgaaagggattttgggaaaaagagggcaagtttagcggatttaaatacgatattatttttatttagttagtgataataattggggatattttggaccaaaagtcaactctaaaaacaaaaagggcatccccggaaaattattggcattcattaaaagggattatgggaaaaagagggcaagtttagcggatttaaatacgatattatttttatttagttagtgataataattgngggatattttgggaccaaaagtcaactctaaaaacaaaaaagggcatccccgggaaaatattnggcattcattaaaaggg

SEQ ID NO: 37994 - DNA, 1358 bp, Heterodera glycines
ccccataaatctgggcgcatcggtcgggggggactgccccgaaaacaaaaaaatcgattttttcaagtgtccgtttggggtactcaaacaattattaaaaatttttagatttttattcatctccctttttgatagtgaaagcatctgagtgcctaaaataacttgtaaataaaatttggtgcgtttcagagcagtttgtgaaaaaatatttatgaattaattttgctaaaaaaataaaatagtgaagctttaaaaattaataaaaaattttaaattcagaattactggagttagcatcatagcagtgcttttccttgtctttttgatgccctcgcaaaatctggtccgcttctgatcagtttataaaaaaaaagttaagcctaaaatctttcgcaaatttaaaaagcaattaaaaatttttagatttatttattcatctccctttttgatagtgaaagcatcagagagccttatttaacttttaattaacatttggtgcgtttcagagcacgttctaaaaaatatttatgaattaattttgcaaaataataaataattaatgaaaaagtcagaatttcgaaaaattttaaaaacaacaagcgttggcattttttcaggttaagttagtcctttacaatggagaaggcctgcaaaatttggagagattatatcgattttagtgcgctaggttcgatgaaactttttaaaatataagcctaaactttttggcctgtttaaaaaggaattaaaaatttttaaaatatttattcatctcccttttgatagaaaaagcatcagagagccttatttaacttttaattaacatttggtgcgtttcagagcacgttctaaaaaatatttatgaattaattttgcaaaataataaataagtaatgaaaaagtcagaatttcgaaaaattttaaaaacaacaagcgttggcattttttcaggttaagttagtcctttacaatggagaaggcctgcaaaatttggagagattatatcgattttagtgcgctaggttcgatgaaactttttaaaatataagcctaaactttttggcctgtttaaaaaggaattaaaaatttttaaaatatttattcatctcccttttgatagaaaaagcatcagagagccttatttaacttttaattaacatttggtgcgtttcagagcactttctgaaaaaatacttatgaattaattttgcaaaaaataaataagtaatgaaaaagtcagaatttcgaaaaattttaaaaacaacaagcgttggcattttttcaggttaagttagtcctttacaatggagaaggcctgcaaaatttggagagattatatcgattttagtgcgctaggt

SEQ ID NO: 37995 - DNA, 1316 bp, Heterodera glycines
acttgcgcatgggcctgggagtttctcgtacacaaactttttattccacccgaatgtctctatgtctcatattttggtggcaattctgcgaatggattggcttcggacgaagaaagccggtagagcattttggaaaaataacaatagataattgattatttcctttaagtaaaaattggttagacattggtattcctgccgagcgtatcctcccatttggaatgaaagacaatttttgggaaatgggcggtacggggccgtgtgggccttgttctgagattcattatgaccgagtcggtggaagaaatgccgctcatttggtgaacactggcgacccaatggtggtagaaatttggaatttagtctttattcagtactacaggtaaaccgattcttctttttttaaatatcattattatcctattatttagggaagaaaatgcgaagttaaggccactgtccagcaaatacgtcgattgtggaatgggactcgaacgattggtgtcagtggtgcagcaaaaaatatccaactatgacactgatttgtttgttccaatatttgatgtcattcaaaaggttctttaaacaaagatacaaattttgttatgaattaacttattgcatttcccttagatttctttaaaataatataggcaattgacaatttctgggcctaaatttaatgtttattcattgccattgcgaaaaggtaatttataaaatttagttttttggttaagtgtactgctcaaaaacacaaataccaagggcgatttggggactctgacaaagaaagtattgacgttgcttatcgaatcgtttccgatcatatgcgagctgtgaccgttgcattggcagatggaattggttttactaatcaacaacagaaaaagagctcgtgaggaaatcattccaatcagtcagtttttaaattttcaggcgtaaaattaaggaattgtttaaacgcgccacgatttatggttctcaaatgctcggaatggaacggatgagcatgcatttgatggtgccggtcattgttgaacaattggtaatttaaaaatgcagaaactcataaaaaatgtttatagggtgaaacatttcctgaaatggcgcagaacaagcacaaaatcgccgatgctgtcagaatagaagaagaacgactttggaagcagagagacgatggaatgcgtcatttggaagaattgtttcgtaaccatccgccgacgagcaaagtttttccgggtgaactaatcgaaagttaattattcatcgttacaaacattgtgttcttaaggcaaatttgcatttatcattgt

SEQ ID NO: 37996 - DNA, 902 bp, Heterodera glycines
gtctcgagattttataaatgcaagaaaagagcaaatattggcattaaaaaagaaattacaatgaaaaattacgaaattcaacttttccgagtataattttttgtctattgcctttatcaaaaataaacttatacaaaagcttccatagaccttaagctttagtttaataccaagaatataggtattgaccaagtaataaaaaagttatggtctaagaaactgggtatggtcattcatgggacgcataatatgacatgggacgcataaaaccgactataaccgcctatttttgcctatttcggggtttttgtgctaaaatttttcaaaaaaattatcccaaaatttaatatttttttcttaataaaaatcttttggtttaaaaatttgttcatattcgaaaaaactctaaaacatttaataatttcatttacaattgaaatatttaaagttttaacgtgttttgttacctaaaaagcgttaataaaaaattttatttgcctatttttgtgcctatttaatgcctatttcgcgattttttgtgcctaaaaatggaagccctaatgatgacacttagtctaatataccatgaaaggattggaagaaacacagaaggtggcagggctgtgcaaattttttctgcttatttttcgaatttggctcagccctggagaaagtttaagaacatcacgattggtttgaggatttacatgaaaggacaaaaactaatgcacagaatctgctggttggttgtggcacacaaacaatctcctctttccatcaaatccctccaccagtttcttcttttgcccaatctgttcacattccgtcgtactttggccctccgccgccctccggggccacccaattgatgttttgcagcgggtctttgatgtcacacgttt

SEQ ID NO: 37997 - DNA, 1123 bp, Heterodera glycines
cccttgtcgccttcccttcttcatcgccttcgtccttccctctgtccgcttcctcaacgccggccaaactgctgatgtttgacaaatatcatcatcagacgccgccgccccaccacttgccaatcttggtgagtgagcactgattggccaaccatgggactcttggtagggcaccagggatgtacggaatcccggctttcgatttccgaaatatttgggacctcggaatgccatccctgataggcattaatcataatttgccaatcttgatgagtgagcactgattggctaaccatgggttgggtcttgattggtaccagacatgcacggaactccgactttcgaaaatttttgtggcctcggaatgccatccctggtaggcactaccaccatttgccaatcttggtcggccggctcattttatttaccagtcttgatgggaactggtcggcattattgagggctaatcgcccccttcctttaccaactaatctttgtaagggctgctgatcggtcccaccctttccagtcttggtaagggctgatcaattctataatattgatccccatcagggctgcacgcgattgcggattacggaaattacggggttttgggagttacggattacgggttacggatttttgggatttttccgtaattttgatccgtaatttgacttttggattatttttcgagacgatttcttgtacgattatttttataaaaaacaaatttttctattttttatttaaagggctacccgtatttcgatttatttaagaattaaaataatttataattttttatttgttgttgttaaggctatttgggtagttcgcctagaaaatagaggcatcacttttttgtcacacctatttttcacgcattttacgaaaattcataaaaccttagccaggtgaggggaggaattccccccctcccccgcccgaaatgaaaaattaaaaatttttacaggaaaaattgggacttttaaatttttttgtcgatttttcttaataaaatcattaaaattttaaaaaaaatttgcccggcggcacctatcggcagcgccggaccacgatttactcgattttaccttattttttaaattttgactacaaa

SEQ ID NO: 37998 - DNA, 458 bp, Heterodera glycines
ctcgtaaatttccggcagctgcggttcggcggcgaaggctttttccagcgtcatgcccggatccggcggcaccagcttggagatgcgatcaacgaagccgtacggatgccccagcacgcggcccacgtcgcggataaccgctttcgccgccatggtaccgaaggtgatgatctgcgataccgcttcgcggccgtacatctccgccacgtgctcaattacctggtcgcgcttctccatgcagaagtcgacgtcgaagtcgggcatcgagacacgttccgggttcaggaagcgttcgaacagcaggtcgaattccaacggatcgaggtcggtgattttcaacgcataggccaccagcgaaccggcaccggagccgcgccccggccccaccggcacgttgttgtccttcgaccactggataaactccatcacgatcaggaagtagccggggaaccccatct

SEQ ID NO: 37999 - DNA, 977 bp, Heterodera glycines
cggaatttctttctgggcgagtttgattgtgaaaattttcggaaaaacgcctatctctttttctgctcaacactctagacaattccaaccccatttacggaataatagcgccaaccctaatttttccggaatttctttctgggcgagtttgattgtgaaaattttggaaaaacgcctatctctttttctgctcaacactctagacaattccaaccccatttacggaataatagcgccaaccctaatttttccggaatttctttctgggcgagtttgattgtgaaaattttggaaaaacgcctatctctttttctgctcaacactctagacaattccaaccccatttacggaatgatagcgccaaccctaatttttccggaatttctttctgggcgagtttgattgtgaaaattttggaaaaacgcctatctctttttctgctcaacactctagacaattccaaccccatttacggaatgatagcgccaaccctaatttttccggaatttctttctgggcgagtttgattgtgaaaattttggaaaaacgcctatctctttttctgctcaacactctagacaattccaaccccatttacggaataatagcgccaaccctaatttttccggaacggaatttctttctgggcgagtttgattttgaaaattttggaaaaacgcctatctctttttctgctcaacactctagacaattccaaccccatttacggaatgatagcgccaaccctaatttttccggaatttctttctgggcgagtttgattgtgaaaattttggaaaaacgcctatctctttttctgctcaacactctagacaattccaaccccatttacggaatgatagcgccaaccctaatttttccggaatttctttctgggcgagtttgattgggaaaattttggaaaaacgcctatctcttttctgctcacactctagacattccatcccatttacgga

SEQ ID NO: 38000 - DNA, 923 bp, Heterodera glycines
ccataattttttgagtaccccaaacggacactgataaaaatcgtttatttcgttttcggcgcagtcgccccgatccgatgcgcccagatttatggggaggccgaatccttccggaatagcttccctatagcctgtactttaattctgcgttggatttttgctccccataattgtttgagtaccccaaacggacacttgaaaaaatcgatttttttgttttcggggcagtccccccgaaccgatgcgcccagatttatggggagaccgaatccttccggaatagcttccctatagtctgtactttaattctgcgttggatttttgctccccataattgtttgagtaccccaaacggacacttgaaaaaatcgatttttttgttttcggggcagtccccccgaaccgatgcgcccagatttatggggagaccgaatccttcgggaatagcttccctatagcctgtactttaattctgcgttggatttttgctccccataattgtttgagtaccccaaacggacacttgaaaaaatcgatttttttgttttcggggcagtccccccgaaccgatgcgcccagatttatggggagaccgaatccttcgggaatagcttccctatagcctgtactttaattctgcgttggatttttgctccccataaatgtttgagtaccccaaatggacacttgaaaaaatcgattttttttgttttcggggcagtccccccgaaccgatgcgcccagatttatggggagaccgaatccttcgggagtagcttccctatagcctgtactttaattctgcgttggatttttgctccccataattgtttgagtaccccaaacggacacttgaaaaaatcgatttttttgttgtcggggcagtccccccgaaccgatgcgcccagatttatggggagacc

SEQ ID NO: 38001 - DNA, 337 bp, Heterodera glycines
  unsure (1)..(337): unsure at all n locations
tttaagttcgggagggaaagagtgaagggggggggggcgaaaggcggcataaattggccgggaagggccccacagggaaattcgaagaaagagcgcaatcggcagctgcattccttttattcattcattggcattaaagttgggccaaaagtacaaaagggtgacgaaaattatgccgaatttccaaattgtgaatttttgacgaatgcctttgacagtttggggccgtccctctccccggcggcggtctgttgttattcaaaatagtcctttccctgccattccaaacaccttttatccccccngggcgtcagctggcaacagtcattcccaattc

SEQ ID NO: 38002 - DNA, 765 bp, Heterodera glycines
aaaattatatcctctgatataaaaacgctgcagtcgtggatttgacaactgagatggaaccaaaagttccataatatctttccataaggctggaaaggcagaatttgaatggccagtctatatttacactgagaaccgttgaagcgggtgatgcgaagccatagcaaactgtatttttaaattctggccgcaattctaccaaaaacgtgtttagaccgcagtaactcggctcagagtgaagattaagggacgcaaaagagacgatttaaaagcgattcgaaaattctatcgactgatataataacgatgcagtcgcggtgttgacaactgagatggaaccaaaagttccataatatctttccataaggctagaaaagcagaatttgaatggccagtcgatatttacactgagcacccgttgaagcgggtgatgcgaagccatagcaaactgtatttttaaattctggccgcaattctaccaaaaacgtgtttagaccgcagtaactcggctcagagtgaagattaagggacgcaaaagagacgatttaaaagcgattcgaaaattctatcgactgatataataacgatgcagtcgcggtgttgacaactgagatggaaccaaaagttccataatatctttccataaggctggaaaggcagaatttgaatggccagtctatatttacactgagaaccgttgaagcgggtgatgcgaagccatagcaaactgtatttttaaattctggccgcaattctaccaaaaac

SEQ ID NO: 38003 - DNA, 837 bp, Heterodera glycines
ggtggcgaaaagaggcataaggtagaggaagctccatccccatatgagacgggaagaaacaaagaagaattgaatgaatggatgagcttggatgggaaggatgaataaaatgattttgatttggaatgaaacatttttatgattggtggtttttcggaagaaaatgcaacttttaagcattccgcagcaggagaaaacatctgtcggataaatttttaaaaaattttctgatcaaaaaaaggctaaagaaagggggaggggggggggaaagatgggtttgttgagatacatataaattagagagagagaaaagatcattttgatcacttcaatcacagaaagtaattggcaaaattttgattttctcactgtttcgtcacaaattttgcgcaattgcaatggtctggttggtgcggaaggggttaagagaaattggcttgagcgtgctcatttgtcgagaatctcgagagaatctatggcctttatgatgatcggccgacacctccaatgtctcaatttcaccaaattttaccaatcatttgcattgatgagcagaaaataattaaggacagaattaatgtgcaaaaaaatgatgggatgaactgctggagaagacagacggaagtgttgtgtaagaggggcatgtagcagatgaaagagggtgatgatgaaagtcatcgaaaaaagtgtcaaattgggaaaaaaaagtttcgaaattaaaaaaaggggaggggtaggggttcaaaaattattaatgagttttgtgggctcccctccatgccctgctttttaataaactggttttttgctgatttttttgattttaatcccctaaaa

SEQ ID NO: 38004 - DNA, 639 bp, Heterodera glycines
cattggcaaattgccaaatgaaagggcaaaagcaaacctttaacgaaggaacaactatttattaattgtatgtacagcgacaaaccatgctcattttttaggtttataaatttcatctttaaaacaccgaaattgtttacaatcagtgacaaaaatttagctaattaatctctgcaaatgggaaaattattgagtatcagtgtaaaatgggaaaatgcaatcatatttattgatgaaacccgagaaataagtcaaaaaatgagaaagattctgaaaataaaaccgtaaattacgatgcgtcaaagggttttcacttgtcggcggatttggcttcggtcacacggaaaggctttcggctttgtcgagcaattcgtctgccaaagttttctgttccgttgcactcgacagaatgtccgccatggatttcaattcgttcgccgcctttttcgcgttttgcgtgctcagagtgaccatttgctgattttcttgcagcacttcgattgctttctgaaattgcctttgccatgacaattcgtttattggtccaacaaatggggcaatcctgcagtttactggtccccgtttttttttttggaaaatcctgggaaaaactttctaggggtattttaaggtactgag

SEQ ID NO: 38005 - DNA, 955 bp, Heterodera glycines
tgtgaaattaaatggcgattgcgcaccgcacttcctcccttctcgagagcatttgtaacgtataaaatttctcaaaacattagatagtcatttttcttggatataagataaatttaaaaattctctgagaaattaaatggcgattgcgcaccgccctccctctcacgctcgagcgcttttgtaacgtataaaatttctcaaaataagagatagtcatttttcttggatataagataaatttaaaaattctctgtgaaattaaatggcgattgcgcaccgccctccctctcacgctcgagcgcttttgtaacgtataaaatttctcaaaataagagatagtcatttttcttggatctaagataaatttaaaaattctctgtgaaattaaatggcgattgcgcaccgcacttcctatcatgctcgagagcatttgtaacgtataaaatttctcaaaataagagatagtcatttttcttggatataagataaatttaaaaattctctgtgaaattaaatggcgattgcgcaccgcacttcctatcatgctcgagagcatttgtaacgtataaaatttctcaaaataagagatagtcatttttcttggatataagataaatttaaaaattctctgagaaattaaatggcgattgcgcaccgccctccctctcacgctcgagcgcttttgtaacgtataaaatttctcaaaataagagatagtcatttttcttggatataagataaatttaaaattctctgtgaaattaatggcgattgcgcaccgcacttcctatcatgctcgagagcatttgtaacgtataaaatttctcaaaataagagatagtcatttttcttggatataagataaatttaaaaattctctgagaaataaaatggcgattgcgcaccgccctccctctcacgctcgagcgcttttgtaacgtataaaatttctcaa

SEQ ID NO: 38006 - DNA, 425 bp, Heterodera glycines
ttaaaaacgggcgcgaagcgcccgtcctgaggccgccctcgtgcgaatgtccctaaaaaaattaaaaaacgggcgcaaattgcccgtcctgaggcagcgaagcgtccgaatgttccccacaaaattaaaaaacgggcgcgaagcgcctgtcctgaggccgcgaagcggccgaatgttccccaaaaaattaaaaaacgggcgcgaagcgcccgtcctgaggccgcgaagcggccgaatgctctcaacaaaattaaaaaacgggcgcgaagcgcctgtcctgaggccgcgaagcggccgaatgttccccaaaaaattaaaaaacgggcgcgaagcgcccgtcctgaggccgcgaagcggccgaatgctctcaacaaaattaaaaacgggcgcgaaacgcccgtcctgaggccgtgaaaagaccgaat

SEQ ID NO: 38007 - DNA, 430 bp, Heterodera glycines
ggaaaagagagactgaaaaagagagagagaaagatcccttcgagggagggagggagagagagagggagggggagagagctagagagagtgagagagagagagagggggaggaagggggagagagactgagagagtgagagagagagagagggagagagaggggggaggaagggagagagagtgggaacggaaagggagagagagaggggggaggaagggagagagaactcgactaacacgataaatcaacgtcatatcatttttaatttgtaaattaccttatgtgattaacactgatcagcaaataaaggacagcagcaaaagagacaaaactcgcaaaaaaatctccaattgccctgttaattagcaaagcactgaattttcggctgacacttcgggaaccaatggcgcgtacggaagcgaaaatata

SEQ ID NO: 38008 - DNA, 794 bp, Heterodera glycines
taccaaggggtaccgcggatggatacggcttcaaaatctcctggatatagacagatgtgaatataaaaagtcagggatatatccggacaaggtataattagtatcaatatgacttataataattttcttcgttttttcatttcaattttgaatgcaaatatcattgttcaaattttctcaaatcgtttttgaaaaattttatttatttaatctcaaaaaatctacaaaaaattaattccaataggtaaaaatgaaaatcattttaaaaagttgtttaacaataatataagataaatattttaaaattaataatttaatttaatcattattttttaattacctattttcttggctttactggtaattttttggagtccatcttcgacccggtccttaagttttgattcttttccattaataatttcatcgaccgtaggaattttgcactttgtacaataatcatcgtcctcattcatttttcttttgatttttcccaatactttacggtatctgttcatcgtattatcaattggtacttaaaatgatccaaataaatcgaaattcataaatttaaaataaaaaatatttctttttttatttgtttaaataaattcagcaaaattatgatggaaaaggtaaattttgataaatttaaaaatggcacaggccgagcttcacttacattttatttattgagttttgtacaatttttattattaaattattttttaaaaaccaattttttgaaaaactccaataatttcaaaaatcaaatattaaaaatttggaaaaaa

SEQ ID NO: 38009 - DNA, 1321 bp, Heterodera glycines
ttttgtaaaacaaattattaaataatcaatcttcgcaataaatttatgaactatttttatctttttatttaacaatttaaaaatgaagaaatcacagtttcaaaatagattttgttatttaagagatacttttagattaatgaaaaattcttactaattttaatgaaaaatcaataaaaaaaagttacaaaatttatcaaaatgaatattgaattttcaaaataccctattaaaatgatgcttgcaaatatacatttctttgaataattttgaataaattataatttattatattctgtacatagcataataaaaaataattaaaagaattaaaaatcgaatatttagtatttatttttaatgaaaaaaaaattaaatattataactctttcatttgtttacgaaaagctgcattctggtatttttatttatatgtataataattgaaaaaaatatattacctatacttattaatatgaaagcattaataattgtgaaaatatatttaacctaaataataattatcttcggtgacccgtcaacagaaaaaatcataatatgattttattttacaaaataattagctagctgaaaaaataattttatttactatatttatttttcatcagttatattcatatataattttttagataatttgaaaaaattttataatagcaaatataatttttaattaaaatccgttcttttaattaatttaataaattgatctttaaaaaaaatcaagaaatgtatagattcaacaaagcaacacttaaccatcctgtcaggaagtagcgcacatgaataaaaatattcttggggtaaattaattcatcgatgtctaatattatttcaaattttaaaataataaaaaatttcaactcaccaaatataaagttttttcacgggctatcaaacgcaacacattaatttatttttttaaatgaaaactatttctaaaaagtttttactaaacttccctgatcaaaatttgatatatatattttataaaattttcattaaataattttgaaatcttaataattatttgtttttaatcaataatttatataaaataatgtaaataaactaatataaaattcatagataaaaagattaacaatttaaaatatatagataatttggtcgaacagaaaaaatacgatgatagcataaaaataacaataattaaaaatataacaataaaatattattaatttatggattaaagtgaaaattatttttaaaatatttatagcaaaaaactcatttaaattttttaataatcatcttctttcataaaaaaaacaatttatac

SEQ ID NO: 38010 - DNA, 724 bp, Heterodera glycines
cgccaccacctaacaagtatttaatttcacatctagtctttcgtgtcagttaacttacatgtccaagctttccaaaacaatggttcgcacgtgacaaagctcattttcttggcgtgggggttcagcagtgaatagtacgcgtgccccacttcgtggagcacttaattgattgttcacactcaagttattaacattaagacaagtctcacccgccagccatctgtccggcaatgacaaaattatttccaaggccacgttcgatccgctcaaatatgtcactgtgattgaacataattacaaatgaacagaaaaaagcaatacttctcgtctcgtcaataatgttcaaatcgacagacacttttcggaaatgggcttcattaagtgacagttgaatgatacgcttaatgtctggacacaaattataaaattatcaagcacgcgatgtaccgtatccggtcagagtttgactgagaagccaaataagtcaatgaaaggctatccaaagtcatgtgaagcgactgtaatggaaagaattttggatatgagcagcaactttttttttaatgtattctcttttattgtgcagtacctgaacatttcgtaacggtcactttcaaacgggtttgagagtccgacggcgatttaaaatggatcagcggcgttgatgtctgtccaatttgacgtcgtgccaatcacaaaaatttcgtgcttcgcgtctcgcact

SEQ ID NO: 38011 - DNA, 1036 bp, Heterodera glycines
atcacagtgaaagggacggcgaaaaagccccaacgaacagtgaaaaggcgagcctttacagcaaaagtcaaaaaaaaatcagtttaaacaaaaatctttttttaatttgtataaccttcttattgccagttttttttgaacactaaaaccaaatattgataagcaataaaaaatacctggatagtttcgggttcgatcttcccatagcctaaaaagggtaaaaattaattattccatttttaattgcctcttttttatttgaatatttattttggaaattcaggcaaattttcattttctgaataatttaaatttgtgatcccttccacaattttcaactcttcattttgctgtttcagatcggtgttggttgtcaaagtttgctggaaggacagcggggaaatgccaaagtcaatcaatcgcgatcgaatttcatcagtttttttttgcctttcattttcctttcccatttcccgaaaacttaaaacatgcttttaacatatttctgatcacttttttgctcggaaatgcttttcctctttccatttccaattgaaacatttatccgctcgctcacttcaaatcgaatggatttgttctgtgtgtgtctcctcccatttcacactgacaattgccattaaagacatcccaacatcagcagaaagaagcctcaaattcgcttcccatgggaagcgaagtgatcagaggcaaacggagtcagtgattcgatcgcacgccttcggggggggcagattgagggtggtcggcaggtgatcggatgagatgatgatgatgatgatgaggatgataagttccacttaccccccccccccgccacccgtccaaaagttgggaaccatcttttcaaacttttcacatccatacatatggccaatttcaattgatggcaaagtgaagggaatggacaggtgcgatttgaagagaaaaaaggcacttccccagggcgggcgcttcttctcattttcttataatggttctattttcctgctgatctcattatgtattctcgttgtct

SEQ ID NO: 38012 - DNA, 1196 bp, Heterodera glycines
  unsure (1)..(1196): unsure at all n locations
tgcaaattcntgttttataaataatgtcggtatgcctacattaattgaatttaaataatttttatttatttttaaaaaaatacaaggaaaggaaaaacaaaaatgcataaaaattctttgttttattttataaaattataaaaaatatttcatccaataattcataaaaatgaaatattttctcaaatttactaaacgaatattttttattgattaaaaaggtaaaaaaagaattaataatttctcattattatattatttttaacgacttttaatttttatatgaataaaagaacaaagataaaaaaaattataaaaaaaaaatgtttgaattggaaatgtatgggagaggaaggatggcaagagactcaaaataatctaaattctactcaaaataatgcccatcgaaattaaatataatttatctaaaaagattaattttcaaacagttttatttacaaatttataaaaaaaataaaatttttagtattaattattttattttattaaattaataaatatgataaattattgaacctgaaatgcaaatgaattattaaaaaatcttttagcactttaacaataaaaaattataaaaataatgtaatcaataaatagtaaatgcatcccaaaatttttcaattcttctccatttatttgttttattttttttgataaaaattttagattttaaaaattatttattaaatactgatttttctaaatttttgtttctttgtgaatgaattttgtctttttataccagaaaataagtaaattttaaaatttatataaaaaaattgtcttaatggtttataaaggaagtatatttttgaagaaaaaatgaagaatcagtcaataaaaatcattaaaatttattaattaattctcaaaattaatcttcaatctataaaagaaaaacattggattttgagaaaagatgtaacaataattaaaataaattaagcgttatttaaatatatttaagagttttaattttttggaaaaaaataacatttggaaaagaaaaataactaatttaaacatttattaatgttataatgaatgaataataaatattatataaaattattattattataattattatttaaataaaaaaaacaattttaaacatattaaaaataatgctaagcaggtcaatagaattaaatacaatgatgttaaaaatagca

SEQ ID NO: 38013 - DNA, 754 bp, Heterodera glycines
  unsure (1)..(754): unsure at all n locations
attgatcgctggcataacatccccgaaagatttgtcgccgatcgacgattttgcatcaaaattgacgttaattctattgcatccatttcaatgccttgtctttatccaaagaaatgagcaaaattgttgtaacagtaagctaacaatcagcattaaatagagaacgagaagaccccaacagattgcttgttgataaaaattatcaccttccgcacggtctttgcaaagctgaatgagaggaggtagaagagaggagactggcgtgttttcgctcaacaatttttgattctttgggagagttgttaaaattgtggttgattttgtagcagaaggcgttgaagtagtaatggaaaaagatttcctttttagaaattctgggaggcgagtagtgatgatagatgattttgtagtcctactcattgtcagtcttcttatgtattcagagtattcagggatttgttcctcggaaacaacaggtaaataaatccgaataaagaataaaattatagaaagctgtttgtaattcatatttattncataagaatttttataaaaatggctccttaaatagtgatatcggtgcttattgatcggttcttgtccaacatcaccagagagtcgcattcacccatcaccactagcattatccctccggcgggcactgcctggntgaatttgatgctcaccgctgntgtcccatttttttatagatcaaacagcgcagcttgatcatcgccgctgttggtcaaattga

SEQ ID NO: 38014 - DNA, 615 bp, Heterodera glycines
tctctccctcccactctctttctctctctccccccctctctccctcccactctctctcccctctctccctcccactctctttctctctctctctcttcatccatctccctttctttttcctctctctccttctctcttttttcattcatctcttcctccctctctctcttcctccccctctctctctccctcccactctctttctctctctctccccctctctccctcccactctctctccccctctctccctcccactctctttctctctctctctctcttcatccatctccctttctttttcctctctctccctctctctgttttcgttcatctcttcctccctctctctcttcctccctctctctctctctctcgtccactctcgctttccgccacacatccccccattgtcgtcgctcatttttgtgatgtactttggtcgtgcaatccgctgaaagtcaagattgtgtttctcgtattttccttccccatcagcgatgcgatgcgtgcagtttggcattgttcaatttaaatgttgtaatgcattaatttgtttgatggtatgcgagtggatgaggagatatttttattgtcgctctttttttatttata

SEQ ID NO: 38015 - DNA, 1082 bp, Heterodera glycines
  unsure (1)..(1082): unsure at all n locations
aaatctaaaattcaaaattttttctccccnttaaattttttcctattcacataaaanatttaaaaatcaactattttaaaaatnactttctttatttttcccnncttataaatatccctttcaatttttcattaaaaaattcatattntntattcnntatcaacaatttatatatttctatcatttttctttttttacaaatttcaaacactttctnttctttttttttcaaatttctnacttttcttntccttttttttttttaatttttnataanaattctcaatttattcttcaacaattaattttttgaggtcaccagtaatgtactacatattatacctaattagaagaatgattcattcattttctgttcattaaggttcatcatccatcttatctcttcttcagcagcatccctttcgcaaatttctgccaaaaatgcaaataatcccccctcccacccctcaattttttccctaatcaattttgccccctccgtctttcattctgccacggcaaatccaccgatcctctctcttttgcataagtattcttacttaactaaccgcaaaaggcgaagttcatatttgttgtgccgtgtttctgttatctttaatgtttggaaaaaaccaacccccccccaggggtgcctcaaaaaaacaaaaataaaaaagcatcaaatcattctatcctttcaatttaatttacatattcactatatttagttaatggatttaaaaccaaatccggatggtaatttcaaccagagcattaggacttttttctaattgatattttaataaatttaaaaaacaatttttttttgtgaggtcgaacgggaagggggggggagggagtgaggcaaaaaaatttttttttgtctcattcaacaatcataagctgcacatttatttgctcaaaagcatacatatactcgttaagctaagcaaataatcacattaaaatttccaatttcaatccatcatatgaaacaagagaaggaatccataaaaacattaaaaaatttccttaaaacatcaaaataaattgaccacatacagtcagtcaaggggataaaa

SEQ ID NO: 38016 - DNA, 1491 bp, Heterodera glycines
tggaattttgaagggagtttttgagaaaaatacccgttttccagaaaaaaatcatacatttataaccctaattatcagggaaaatttttgtgatttttgtctcatccaccagtaattttttatgaaaatttctaaagttgttattgaacatagtattttaatcaaatcatgtttacattcaagaatttacgatcgttgaattaaattttttaaaaaggtagttattatttccattagattataatttcttttctccaaaaaaaataagaataatattagtaaattgtaagttaaatttagcaaacaattcttactgagtaacaattagttatgttaattttatatatatatatatttttattaatctttattgtgatttctcttaaaaaatttgctttattaaatctatttatcatctgttcagattctcatatttgggggcggatcattattcatttttaacaataatttaacctttgtttatttctaataaattgttaattaataattttggtaaatatataaaaagcacataaacatttgttttgctatcttttatgcttttctttatttaaatcaaattcattttttcttcttaattattaataaaaacaaagttatgaatatgattcttttcaagttaatactcccttttttaattcttaaaatccaatttctttcatatccaaaaataatgacaaaattttgtttgtaaagaaataaattcggtacatattttaattcacatgtaaaattacaaagtattatcttaattttcttttttgagaattttttaatttataattttgttttttatttatattttccttataaacatttgacaagtttaatatgaaaatagaacccgaataaataaaataaatttaattatttaatgcattattaaattaattatattatcaaatgaaattatttttgttttgtttattatattcggatgtaacttttaatgagcatttcaaaatatgttatttcttttaataatataattaaatatataaatattgtttataattgttaattaattttaatctgtttttatttaaatctattttcatgtttgtttcttcatggttcctcggaatcataatggctcttggcgctttctctctttaaattttatgaagttaatattatgaataacataaatgattaagactaaagatttctatttttatagtttattctgttttattttttatttattttcatttacttcacaattaataaagggttattttattaacctgatgagaatttttctaaattattatttaattcatttattccaaaaaactatgttaacatattttgtgtgtggtataaaattctgtaaatgttgttattatttgttaaagattttttctttgaaattcacattaataaaaattttattatatttgttttttttttttattttacaaattcataaaacattattatgtcttaatttaagcttttcatttcatt

SEQ ID NO: 38017 - DNA, 781 bp, Heterodera glycines
tctctctccttttcttttcttccctcccccctcctccccttctctgtcgtctcttctcttcatcgctccttttcctcgtctttcttcttatttcctctccatctctcttcctttgattctctcttctccaatgtacatatctaggtttcgtcttttcttctctgagcatctctactcatcttgcgtctcttcttaactcctccccctctctcttccctcccttccctacactcttctatctctcaccccccccccccccctctctcccgtctctccccatttcctgcactctttcccccctctcttttgcagcagtgccaaatttagcttatccgacgcttctcatgcgaattgaacacacaaaatggcagtcggggctaacattacacataagccacagagaacaattatttgaacagcactgatgaaaatgttgccaaaggatacttttttcctttccattttttcatttaaaatttttaaatctcaaatttcaaatttaaatccatctcccaattaaaaaatattcaaattttgcactctcacaaagccaagaaaatgccattttcaaaaatttattcccccgcggggcgttcccttgccaatgcgtcaacagacaaaataatgccacagttcaaaattttgcctaactgctgtcccctacccaattgtgtgaaaatggaaatgacaaaattgcaaatagtggaaatgccgaactttcccatttcccgggcataatgccaaagggtgggaaatttttaaaatgtcaaggggaccattt

SEQ ID NO: 38018 - DNA, 1596 bp, Heterodera glycines
attacaaagtgtgttttcggatcaatcactgatggggctcggctcccctctacccccgggcctttttctcgccatttcttcgtttgttttgctttttgttctgttgctgctctgttccgtcgtccttctcttagcttttcctcccctgatcagttccgggtgcatctttctgaattcgatcagcagcgttctcagcgcattggcccaaaagtctcttttcactgtttctgtttgagtgctgttttggctttggcttttgctattgctctgcttcatcgtccaatcttttccctcctctttttccttcttctttccctccttttctctttccctttcctctttactctttcctcctgtttcgtttttctctttttctttttcctctttttccttttcctcctctttcttcttttcctttttctccgtcgtcctctctccttctccttctgtttctgtgttcgtcatctttgcttcttcgcccccacttttttccacaaaatccgattgcacatttaggccaatgccatcattttttggcatttcctttggctctgattgtttggccatttctgaaataaaagcattttgaaatggtcagttcagaaatttggatcacttatcacagtgatcagtgtgttcgtttccactcactttcttcttttctgatcacatttttcttcgtttgccttccgtccgttgtgccaattcgtcgccgtcgcttcggcaccagcgaaagggcgggcgaaagcattgccaaaggggacgccatcccttcgccgtcgtctctgatttcgtccaccaaattcacaacgttcggtctcatccaaagacccttccgccccttcacaatgtccacgtcgaccattgtcccgcggccgtcgtcccttggcaattcattgatcgtccgctggtcaatcggactgatcggtccgtcctcccaaagggactgaatcggtgccactgatcggcttttcgtttttggcatttcgcccttctcttccccactttgccacatttcttcttcttcctccgtcgaccatcgttgtaattcgttcatttcgcccttttcatacgcttttatttcgttgtcaaatgccaaaaatgtcggacagagaaaaaacattttgaggaggcaaaaaagcataagaagttccatttgcattataaactcagaaaattctgctaaattttgaaaaattatttaaaattcgaattcaaaataaaaaaagaactgaccattcaattcccgaattaattaataataattaattcaaaaaatgaaatcaaattgggaattttgcttttggttcccataaatccgtccgtccctctcggcgtttattccttctgatcggaatggattaataaatgttttccatcggcgatggatcggcggacggagttttgggtttgttcttcgctcgcttttcactgattgatgggcgaattcattcgttcgttcatccgacgaaaattgggtgaagaagaacagaaaagggaataagcagaagaaaaggaagaagcggaggagaaaaagggaaaaggacgagaaaagagaaaagggaggggacgaagaaagaaatgatcgaagatgaa

SEQ ID NO: 38019 - DNA, 902 bp, Heterodera glycines
ccgaaggccccccacgaggccgcgaagcggccgagtgagtaccttgggcgcagaaaaattattaaggaggagggttcattatttatttattttttacaaaattaattcataagtatatttacagaaactgctctgaaacgcaccaaaatttatttacaagttgaataaggcactctgactcttatattatcaaaaagggagatgaataaatattttaaaaatttttaattcctttttaaacatgccaaaaagtttaggcttaactttttttatataacctgatcagaagcgcaccagattttgcaagggcatcaaaaagacaaggaaaagcaccgctatgatgctaacaccagtaactcttaatttaaaaatttttattaatttttaaaacttcactattttaaattttttatagatttttaaatgtttggattttttttggcttaccaaaacttcatcgaacctggttctttctattctctttcaaatcgccccaaatttttttttacagcttaactaggccctattaagcttatttccagaaaatctcgcatgaattctcatttaaaaaattttttaattgctttttaaatgtttgcattttttttggcttaccaaaacttcatcgaacctggttctttctattctctttcaaatcgccccaaattttttttacagcttaactaggccctattaagcttatttccagaaaatctcgcatgaattctcatttttaaattttttatagatttttaaatgtttggattttttttggcttaccaaaacttcatcgaacctggttctttctattctctttcaaatcgcccaaattttttttacagcttaactaggccctattaagcttcagaaaatctcgcatgaattctcatttttaaattttt

SEQ ID NO: 38020 - DNA, 859 bp, Heterodera glycines
aactagagtccggtaaaaaaaaatttccgggagcgggagcgggagttcaaaattttccgggacgggagtcccgaacgggattcccgtaaaaatcccgtccatttttaacgtgagtcccgggctggagcgggagtaattcgaaaatttaattaaaaactcacaaaaatatttttaatgcacaaatttaaaggacaatcaatttattaaattaaaaatatatagaaaaatttataaaggacaaatttgaaataaaaaatcttttttttgagtcaaaaatcagaaaattttttcaaattgcttaaataaattattttttattttaattcgaacaaaacatttattaactttatatttttgaatccctttattaattttacaaaattttttgcggtgtatttcttgaaaaaactttttggtgaccaaggaggaggagggaggccggcggtgccggtaggcgccgccgggaaaaaaattgaaaattttaatacaattcattgttagattctgttcaaaaatgaccaatttttgcaaattgagcaagttttttaagaaaattaaggattttaaagatccggcggtgccgataggcgccgccgggaaatttttttgaaattttggctatatatttaacagattttcaatgaaaaatcattatttttaccaaaaaaatcaattcttaccagtgcatttttactcccgctttttggtaaaatttccgggagcgggagttcaaatttttccgggacgggagtcccgaacgggaatcccgtaaaaatcccgctcccgttaaaaatcccgttcaccgaaaaaagcgggagtcgggagcgggacgcccgtaaaatcccgcggtagatccgat

SEQ ID NO: 38021 - DNA, 1103 bp, Heterodera glycines
  unsure (1)..(1103): unsure at all n locations
caatgatgatggaaattgttgaaaagtttcacttttgtaatgtgaagaaacgaggtcattatcgagatgggtatactgtatgctactagttttgctgtggatagcaattgttatgacaggaattttcttctattttaactctttaattagaaatttatgtaagcttatgcatatatgtagagacgaaaatggacacaacgacgataaatcggattctagcgggaaacacaaagaccagagaactctacttgggatgcttcccttgcgacaaactcccaaacataatcaacaagtacccttcaactttggtggcgaataatgacccatcgaataaggaaggaacgcattggatagcaatgttcatcgttgacgataggaccgtctactatttgatagttttggtaggaaaccgaacagatgtatcagccagtttttacggaattatgaaaaagtgatttcgaataagccagctattcagtcagtctttagtgagaattgcggttattattgcatttattttatttattgtatgtgctcattaggaggaagaaattatgagagtaattttgaaaaagtgacaaaaaagttgataggagaagataatccagatttgtttgtcgtgaattttgttaaaaaaatgataaaaagtatttaaggaatttatcattaactcatttataaaaatggaccgattagacacaataattgcttctcttctgaactgtcccgcacgtaacttgtgcgactgcttaaatcacccggatgagatacaaaaagtagaaaaatacctcaaagggaaaactctacagacaacatacaaaaatcaactagatgaatagaaagattttgagtacggtggaattacaagagaaagtgcccgtaagcaaatggcttacaatggattcaagaatgtgaccgtcgaccagaacttttatgtacgtcaccgcatttgtcgtcgctacgccaataatccttgcgtaattgagaagcacaaaaacggacacgaacgattctaccccacttgagcttttgtaagtnngaacacgtgacaaaaacgatatttatttgnngacaaatttcctannagtcatacctttacttga

SEQ ID NO: 38022 - DNA, 1038 bp, Heterodera glycines
  unsure (1)..(1038): unsure at all n locations
gtatagagccaaactgattaatgtcatttatttctcctcctcgcagattcaaaagcgtatggcgctgaagaagcgttctgctgtccaatttgtgtccaattgccatgtgccgtcgggacgtgatttgctgacggcccgactccaaaaactgctccaagttgatgtgtatgggaaatgtaacaatagaaaatgtgatgacaaatgcgaccaacgagaacggggcgagtctatttggcattcatttgtcaatgtcaggcgtttttaggcattatttttggtgataaatttcaaaccttttttggtgccaggttcaatcctctgcatgcaaatattttttttgcaaattagattgggcgccggacttttcgacagaaatattataaatttcaggaagggacttttcgacagaaaaaactaataagtttcaaatttaggggttgtaaaatcgtaaaatttacccaaaaaataaaaaaattaagtcaaatcaatattgagaccaataatttttaataatcaaaaagaaaataaattaattaattaatttttgagaaaatttttcattcttttatgggagtatttttnaaattttagtgcccgattcttatggaatattttttctgaaaattttcaggaaaaaaacgtataaatcgtataccaagtaataatgatttaacaatgcatattagtatgttaatttaaaagagattagtaaaactgacaaacaatataatttattttaataagattaattgtttttatatttattgtcgaaaatcccattattttttggtttactgtcgaaaagtccttcactgtcgaaatgtcctttgctgtcgaaaagtcgggagccaattagattagcaaaagaatatttttgaacaaaaacactttttctatgaatccataggcgtgctgtcgcgtttataaaaaccgccaactagtcgcgttttataaatccggcaaaatggaaagtcgcgtttataaaaccgccagtcgcgttttataaatccgccaaaatggaaagtcgcgttttataaa

SEQ ID NO: 38023 - DNA, 786 bp, Heterodera glycines
gatggaggatgggaaaataatttgataagacgacggttggtgtccataaagtcgaatttggtgatttcctccggcaggcagtaacgcttgtattcgccgaagcggccggattgagattagtcatcagaagttatactttggcttcattcgccatatttgccgctgcgcaatccaatgcaaattggaagcgctccaaccactcctcaaattcttcggcattttctgttgaaaatgggtgaatgtccggcaaagtgatgttttgtgccggtggagttgcggtggaagtcggcgcgctctgctgcttgatcgcttgcgtcaatttttccaaaatatcggcgagcgttttgtccattgatgatttggaggtagaaatttgacgaataaactgcacacggcagaaccgcacacaagattagtgattggttttttgaagatttctgcgaaatccaaaaatcaacacgagatttttgaatttccacaattcgaacaatttcaacacgagaaatgttcgaagtgaagtcctgaagaacgggcgtcgccaattgagccggttaattgctcaaacaattatttgtggaagtcgaacaccaaataaatttattaacacaaatggaaaataaataacaaataaatatttgtcggagggacggagcaaattggggagcaccaaaaataggaaggaaaataacacaatgaatgaggatggacgaagggaagggcatgaatgaatggggaaaaaatcaataaggggtcaaagagcccaagagagggaattacaaatatttg

SEQ ID NO: 38024 - DNA, 1360 bp, Heterodera glycines
tttaagccgaatttgtcaaatggttctctccccgatggaattaaagaatgaagaaaaggggattggaaacatagaacaaaaacgacgactatttatttgtcaattaagaatggaaaaattaaagcaatatttttattcgataaaaatttctttaatggctaattaaaaaacatttttaatttttaaatttttcaataaattaatcccattttgtcattttagagcccttgaagaagaaaattctccatcaccaccaacaaaatattagacagtattacgaaccttactagtacagtacccgccgaatacagaatgtcaatattgtccatgactggagtgggacacagtcatttggctttcacagttggccgtttgcctccccttttaaaatggcttttttataaagttcgccaaaaagccgagccaaaatggccgcgccaaaagtatggcactttttttgaaatattttaaagtgttcattgaacattaattgacaaattaattactgtttaaagaatcagcgacaatttctacacggcacgaacatttgacattctgtatttaatgctctaataaaattgtctttcgtctatttggtgagaaagcggagagtgattttgattaacacgacagatgaggattatagactcgttcgcccctcctcccccacctcccccaccttcattctggcattttctcattcatttaatttttttgcatcaattattgggcatcaattactcaaaaattaaattaaacgacaaaataattaatttttttgaataatttattttcacgtatctttaagcataccaaaaaaaagttagtacaaaattggggttgtttatcagtgaatttatctctattatatttactactttggatcatttttgaactgaaaaaccctaattacttaaaaccgaaaaatcaaacatgggtgaggcgcaaacaactcctattaatctctttggtttttgaaaaagcattcatttattatacaatatttcttcaatcctgtgttgtcaaatggcttttccatatttagtcaatgtcccattaatagaggtatgttttgtacatatttattctcatctccatttaagctcactttccactttccttttcaattgtcccattttccgacttgtcggcaaaccgccccccccctcccccccaaaattgcttaattgtccccatggatcacctattggtaaagcatcgttctctcccagccgaactcttcgacgaaatgtcccgtttcgttcccggccttttttgccgtaaaactttgagcaaaacaaactcaatattttaccttttgtatcgattcacaaaacgcgcaaaacggtgaaaatcgaag

SEQ ID NO: 38025 - DNA, 417 bp, Heterodera glycines
atcatttattataaaaaataatacacgaaaaaatgaacttttaaatcacggatccataacacagttatttgaaattcccctcagaaattcaataatttttgggcatcaaaattttcaataatattcaaaattcgcttgtccgccttctggaacttctttttcttctttggtggttcttcgccattttcttgtcccacgacatcgctcagcgcagtaattgcagcagtcaaatgctgaattggcacaaatgcgagcgcggcgatcatacgagcagtttctgcgaaagcgatgacacttcgatagcgctaaatgggatggaatttctttcttttaaaaacagaaatttacattttgaagaccttccgaaatgacgcgcttgtgcagatctgcgcactacgtgaaaaagacatcctctaa

SEQ ID NO: 38026 - DNA, 883 bp, Heterodera glycines
tggaacataaaaacatatcgtacacatttcgtgggtttgtcacatattttggcatttttgagaaaaatttgtaataaaaaatacaagaaaattgaaaaatacaccccctaaaaatcaactttcttgcttgccatttcctaaagtttttcaaaatttatctatttatttcgaatgcgaaaatagccaaatcgagttcttaattgtgtcattagatttcaaagttctctactgggaacttttaatttataaaaataatttatcagaaaaaaagaccaatattaccccaaacacttcgaaatgtatttgattctcaattgtgcggacgaaaatgataaaaatgagattttttggaatttttatgtaaaaatacacttgatttttccaatttttaacacatattttagcacatatttcaggatttttagcacataaaaatccgggctctagtgattatccttttatttattatttttcatgacgattgttttgcattattttccccatttgaacattttgttgttgtcatttattattagtagggttataagttgtatgcactaaaaaatgccaaatatgcgcataaaataggcactaaaaatcccccaaatatgccctaaaaacccgaaaaatgcccaaatatgcactaaaatatgccttaaaaaactgcaaaaatggcttttagccctcaaaaaatgccaaaaattgtgtataaattaagaattgacttttaaaacaccaaaacaagggctaagaagcatttttagacaattgcaaaaatattgaaatttccaaatttataaattttattatatgataaaacaaaattacatttttatatacataattttttttccaaaaaattcttacaaaaatttaaaatttt

SEQ ID NO: 38027 - DNA, 898 bp, Heterodera glycines
gggggactgccccgaaaacaaaaaaatcgatttttcaagtgagtgtccgtttggggtactcaaacaattatggggagcaaaaatccaacgcagaattaaagtacagactatagggaagctattccggaaggattcggtctccccataaatctgggcgcatcggttcggggagactgccccgaaaacaaaaaaatcgattttttcaagtgtccgtttggggtactcaaacaattatggggagcaaaaatccaacgcagaattaaagtacaggctatagggaagctattcccgaaggattcggtctccccataaatctgggcgcatcggttcggggggactgccccgaaaacaaaaaaatcgattttttcaagtgtccgtttggggtactcaaacatttatggggagcaaaaatccaacgcagaattaaagtacagactatagggaagctattcccgaaggattcggtctccccataaatctgggcgcatcggttcggggggactgccccgaaaacaaaaaaatcgattttttcaagtgtccgtttggggtactcaaacatttatggggagcaaaaatccaacgcagaattaaagtacagactatagggaagctattcccgaaggattcggtctccccataaatctgggcgcatcggttcggggggactgccccgaaaacccaaaaaaaaattttttggataaaaattatttaaatgaactgactagataatatttaaaataggttatttctcttcctttcagtatccctgcaaagtttggtgcgcttctgatcagtttctgaaaaaaaagttaagcctaaactttttggcctgtttaaaaaggaattaaaaatttttaaagattttattcatctccctttttgatagaaaaagcatcag

SEQ ID NO: 38028 - DNA, 618 bp, Heterodera glycines
aatttcacaactttttacataattttccatctcattccttcaattcggccaccatacaatgcctcttgctcttgccttacttcgcacaataccaaaatgagctcgatgaatcaatttcaaaacttggctttgcattccttgcggaattactatttgcattcccggccttttcctgattaaatttccctccaaaaataagtttgctctttctctgaaatacgaatttaaattttcgttcactggttccgcccaattatccttcaccttactaataacttgggccaaaattgggtccgctaaagtctccttttctaacatttgtttgtcaacttttcgattttcgtcaattgttaataaaaaaggcacatcttccttactcttttcctctacttggtcccattttatcggaactctcgataaagcgtccgcgattttggtggcctttccttccacatagatcactttaaggtccaattcttggaaaaccattaaccaacgaataattttaagaattgtgctaacttttgaaaacagaaaagtgagcggaccaagatccggtaaaattggtaattccgctccataaataattggcctaaaattctgcacagcatgcactat

SEQ ID NO: 38029 - DNA, 704 bp, Heterodera glycines
cctccgcttttatggtttaattccaaaaagaggtcactctcctaggttcgacaaccgttgaccgaccacaaccgtcctacttatattttcaatttgcaacaacttttgaaagcagattttcccattataacaaacatacaaaactcttaagcttcgtttgtctgcgattgttaaatcgcaattcgaaatgtccaatttcgatctgacgaggaattgaaattattttattaatcacttaagtataaataggaaaaatagttggacctctcatctgctgctgctggtgggcacatttcaaattaaatcatcaaattaagcttgcaaacactttttccgacgctcaatttcgttgatgaaggaatacaattgcaagaacgatgaacaatgcaatgccataaaaggtgaattatgaaagaagacaactcttaaaaaggaaatttcattttttaaaataattattttttaattttagatcaaaaatgtaagcgatgccgactgaaacggtgcctttcagtcggaatgaatccgcgcggcgtttgcactaacacaaattgtggcaatgatatactggcatttgtagaaacgattaacagcttgacaatgaaagcgcaagctgcataaactccaatcgacaaacaaatgtccaaattggcatgaattggcactggcaccgaacatggcgcaacagtggcccgtcaaaatgg

SEQ ID NO: 38030 - DNA, 926 bp, Heterodera glycines
  unsure (1)..(926): unsure at all n locations
aaattcgctccccaatcgccccagccaatcccattctttcattcacagagtcattcagatgggatttggatttggatttccgcccatgagttggtgatggtggtgtaggagttaagcgatgaaggctcccccaccnccatccaatcgctaaatcacccaccgattttttcgtccaagaaaatttggcggtcggccccgcagggcaggggcggtccgccgccgcgacgccgttgatgcgatttgcgaccgattaatgctccctctgccgccccatccccgctaaatcgctgggcccgcccgcctggagccgcagccacttcattcgcgccatctcagtccctttattccccccccccgacccgcccgcccaaatactcttttatgcctgccgcccactgtcccgcgcccacaattaccgtatgcattaggccataaagttttgaaactacgaaagactctttcgttttgctaatacccgaactttatggtttctgctttttttaatctgatttttgtcctaaattttacatttaatttataccaatttatgaatggattagtgcacagttgagctccgtttcatatgaatagtatgacacatatcgactttaccaaaaacaatccaacaaattttatttatttttccattttatttaattttaaggtattttaaaatttaaaactgcacttattgcgtcgaattttaaattttttttattttaaaattttcaaaacctcttccaaattttatagtaaagttttctcaatcggcttttcattcataaaaccataaaatcccggatggcttagcttagagctgcttaactaattggaaaaggctttaatcaaaaaaaaaattaaaaattccgagcaaacttgatcttgacaagattatatcttatggttggagaggggagggggggggg

SEQ ID NO: 38031 - DNA, 1070 bp, Heterodera glycines
aattcgttaagttccaaaaaagttataaccaataatctttagagaacccttgttttttaagttctcctggccataacttttgtgaaagtcaacaaaaaattttgaaattttgaagtctaatagagaacacttagggctatcgaaaggtatcaaggattaaaaatttggacattcttgagcaaagttataaataatttttcgtaaaaaattttccatttaaggcttttttaagtaattaccaggcacccaccccacatgtttccacaatgataccctgattgataccgtacccgattttatctgctagcactgcgtgtactgtagtaaaacaattatacctacgctatgaaccataagcagcatcacttacccccctttgctgatgagtgtgtggcaccacgaaaattttcgaaaaaaactttttatatgcttctaaatttttttcccaattttttttttcattttgaatttcgctttttctattttttctctcttttttgtcttcattttataattttacattttctattgttggggagacaaagtcaataaattaatggggcaaatgattaattatttttaattggtcattaggaaaagcatttaaaaaatcaaaattacatttaataatgaaaaaattaagtaaaaattacaaattaattaattattaattaattaattaaaatttaattaataatgcttttatagctccgccaataacgcgtcggccatccacatttgcacatacaacaccagcagcagcacggttttcagttgcgccaaacgacccaacattgtacgcagtaaggcccacaacgccgatgaatgggctgggcttggcaagcagtacaccaacggtatggtattaggggtgcactacgttctccgcccccggcgtttcccccctggatcagaaatgagaaaaaattttcggtatttttttttttggaaaaattttgcataaacttagtaatttatcataaaatttttaaaagatttttcttggaatttcttacaaaaaaaactttcaaagagatttcttgaaaaatttccgaagtttgtaatttaag

SEQ ID NO: 38032 - DNA, 932 bp, Heterodera glycines
tttaaattttttatagatttttaaatggtttggatttttttccggcttaccaaaacttcatcgaacctggttctttctattctctttcaaatcgccccaaattttttttacagcttaactaggccctattaagcttcagaaaatctcgcatgaattctcatttttaaattttttatagatttttaaatgtttggattttttttggcttaccaaaacttcatcgaacctggttctttctattctctttcaaatcgccccaaattttttttacagcttaacaaggccctattaagcttatttccagaaaatctcgcatgaattctcatttttaaattttttatagatttttaaatgtttggattttttttggcttaccaaaacttcatcgaacctggttctttctattctctttcaaatcgccccaaatttttttttacagcttaactaggccctattaagcttatttccagaaaatctcgcatgaattctcatttaaaaaattttttaattgctttttaaatatgccaaaaaatgtaggcttaacttttttagtgaaaattcgatcactcatattttttgctaattgagcagaagcgtaccaaactttgcagggatactccccggtaaaggactaacttacactgaaatgagcgccgagctagctggctcaaaaaaattttcgaaaatctgagtctttcgtttttatttattttttgcaaaattaattcttaaatattttttcagaaagggttctgaaacgcaccaaattttatttacatgttagtttaggcactctgatgctttttctatcaaaaagggagatgaataaaatttttaaaaatttttaattcctttttaaacaggccaaaaagtttaggcttaactttttagtgaaaattcaatcactcatttttcgagtagtgatcagaagc

SEQ ID NO: 38033 - DNA, 860 bp, Heterodera glycines
cctggacccggatttccaaattgacctggatttcctggacaaaaatccaggaaaatccaggttgccgaaaaatagcctggacctggacccaggaaaaatccaggcctgtcctctcgtcgcatttcaataaaatattttgaaaataattttgatttgaattttaagctttgacatttttaataaaaagtggcaacatcattttttctgtgcgtttttttaaagaattttgggcaaaccgagggttcggcgttgcccgggaaaatttttgaaaattataatgtaatttgctaacatattttttcgagttttgaaaaccggttcaaaaatcaggaaaaaattacaaataagaaaaattggttttcattaaataaattttcagtttacaagaatggcgaagagtgggttgtcctagtgcgatttgtctgcaacaattgtcgattatgattagggctgtgaattttagtgaagaaaaacttgcacaaatcgccaagcgtaattttctaactcagctcattgttttcagaagagtttgaaattttgcattaaaatactttggtataaggtctaggcaccttgccaaattttagaattttttatgcactcagagatttttaagaaaatccgctttttccagcctgaacgccaactttgtggtcaagttttgaaaacaggcggttttttgtaaaaaagttttaccaatatggaaaattctgaaattttgcagggtggtaggactcatgttaaagtatttttatgcaaaatttcaagctattttgataattcgaaccaaattaccaaaatcaacttgagcaaaattcaagtttttattcactagaaatcgccagcccctaattatgatt

SEQ ID NO: 38034 - DNA, 932 bp, Heterodera glycines
aacgaaaaaaacttgccgaaaaaatggctttctttttttctcctggggatttgcccgcaaacttgttcccacattttcccttctttagtcgggctcttccaaacactcacacgatatttgaaatgctaacgaaaaaaattctgcccgaaaaattgcctatctcttttttctcctggggatttgcccgcaaacttggtaccaacattttccttctctagtctggctctaccaaacactcacacgatatttgaaatgctaacgaaaaaaattcttgcccaaaaaatggctatctcttttttctcctggggatttgaccgcaaacttggtaccaacattttccttctctagtctggctctaccaaacactcacacgatatttgaaatgctaacgaaaaaaattcttgcccaaaaaatggctatctcttttttctcctggggatttgaccgcaaacttggtaccaacatttgccttctctagtctggctctaccaaacactcacacgatatttgaaatgctaacgaaaaaaattcttgccgaaaaaatggctatctcttttttctcctggggatttgaccgcaaacttggtaccaacattttccttctctagtctggctctaccaaacactcacacgatatttgaaatgctaacgaaaaaaattcttgccgaaaaaatggctatctcttttttctcttggggatttgaccgcaaacttggtaccaacatttgccttctctagtctggctctaccaaacactcacacgatatttgaaatgctaacgaaaaaaattcttgccgaaaaaatggctatctcttttttctcctggggatttgaccgcaaacttggtaccaacatttgccttctctagtctggctctaccaaacactcacacgatatttgaaatgctaacgaaaaaaattcttgccgaaaaa

SEQ ID NO: 38035 - DNA, 866 bp, Heterodera glycines
gattccaatttcaattggttctcttttgcttctcgtccttcttgtgacatctatcattcatttatttatccccaaattcgtcccaagggcacataatcagcaaatcccccggggcgatgaacagctgatggcaaagttcccggattatgggccggaaataagccaaagattcgggtcgatatggccacaaaataagagaatataaaacgaaaatcattaatattttattaaagtaaatttaaacaaaagtatagcatgaaaaaacgaatattttatttagggggagcaggcacagagaaaattaaacattaaaatttaaattaacaatttttaaattattgggtaatgtttttttaaaacaggtttttatgtatttaatgtttttgattatgcattaatttgatattctcaaaattcaaataaaattttatgccaatccgatgtgttaataaatcaaaataaaacattcaaagtgacaaatataattttaagtgttaaattcttgagtgggaagaaattctcgaaacattcaatccataaaataggagggaagagaaacagaatagggcaaagagctaggaagttcattaagtggatactgtgcggtttggttgtgtattacggtagttgcttgcgttgaaatcatacggaattcatttggaaaaactttcacaactcataattttaaaatattttatataatgaaacaaatattttttggtcatataaaattgggacaaattgcctaaattttgaattaaaaaaggcacaaattgctaagtttttgaatttaagtgtataaattcaatgaaatgacaaagtgtcccaaaaatctgcaaatgactgtagttatacttcgataaatt

SEQ ID NO: 38036 - DNA, 910 bp, Heterodera glycines
taaataaacacccagcttgtctacattttagtctaatcacaaaaaaactttattttttaaaaaatcaaaaaaataatttttaagaaataacattaatcaatgagtctataaaaagaatcaataaaatcattggttaatcacatatatatcatctatctatctatcaagtaaaagagaaaaaaaattgaagaatttttatatcgaaatattttaaatgcacataaatatttttgttccatttttatttctatttgttatttttaatggttgtcaggcaaaagaactgaaaatttgtgtcaaatatgagaaaacagtggcaatgcgcgaaacgcaaattaatttaactgcaattagagtgaacagcaaaaatgaataccgaaatattaaagaaaatataaaaattggtgaatgttttggcatttccatccctcagcaggaaaataataaaacgcaaaaaatcacttttgaatttacaatttatgtcaaaccattggaaaatgagtaccaaccgccggcggatgaccacgacgaaaacccatccgatgaggggccgtatgaaaaccgaattttagacatcaaaatggacgacattcggacaatggtccgacgcaacaactttgtgatccatgagcctaatccgtcaatggtgtacacgttcaatttgggcacaatcgatccgccagggtttttgtggaaacgcaaaatttttgttttgccggagaacgatttgggcaattaccatgcttttttgtatgccgttgcctacaaaaatcaacggactcaggacaatttgaatagtaaaagttgcatgaaactgttgagatatgcgccatttgtgaaaattgacaaagaaattgcgcccaccttgaaacggatgacaaaagggtggaaataaattttaaaatctctg

SEQ ID NO: 38037 - DNA, 1157 bp, Heterodera glycines
  unsure (1)..(1157): unsure at all n locations
cggggacctctagagtctcaacagaagttttccaaaaaaaattgtcagctatctttttaaattttatgaggaaanaaanatacggggccacttctttccattaattattcgtatcctgagaaaaattccgaacttttttttttggaaaataatctctgcccaattgtggtcttaatctgggcctaattgtcatgaagatatctttaaaaaaaatttaaaaagcttatgtgaactgattatgatatgattgggatgtccaattgtccatttctaggaatgccgtgccgattgcaacccaaacatttggttcggcaacttgttgctctttcttccaattgtcgctgttcgtgcgcaaattttaaaacataatttatgaaataataaaatatgcttctggcttggtcccgccgtaaattttctgatcaaaatgcctaagagatgatgattcgggagttcaaaaaacttgtttttgttttatgtttcagacctcccagtccaagttaaaaaaagacgcatgtgcgttaattaactgccctaatgagatgatctggtctgatcacaaggattgatcggcttgattttgcaagacccgaactgatcacttttttcttgcttggggactcttgtcaagatttctatgatttaatcatttaatcattttttgccacacaaatttcagtcgttggccaatgcgatgtgtgagaatttgcgctttgcacaaacattcagcttgctgggcggcattccgctgctcacctcactgttcggttgctttccggtcgagccgttcaccgcgtccgaatcggaaatggcggcgctcggcgacgcgtcaaatgccgataaagatgacgccggcgacaacaacaatttaaacaatttatgcgcgtctcatcagcgaaaggcatcgaccgaacgcggcacacaaacagacgccgggcatctggcaattttgcacgatcaattagtgagtagtactgctcaagcgtctcgctttcgagcaccgggcagggacggtcccaggatttcggcttgnggggtgaggngtgccgccccccggacgacgattttttttcggccaatttttttttgcagcgcgttttttttaaattttgaggaacaggagggngtaggcgggaaaatttttggaaattttacca

SEQ ID NO: 38038 - DNA, 1387 bp, Heterodera glycines
  unsure (1)..(1387): unsure at all n locations
atgaataaaaatctaaaaatttttaattgctttttaaatatgcgaaaaattttaggcttaactttttttttataaactggtcagaagcgaaccagattttgcgagagcatcaaaaagacaaggaaaagcactgctatgatgctaactccagtaattctgaatttaaaattttttattaatttttaaagcttcactattttatttttttagcaaaattaattcataaatattttttcacaaactgctctgaaacgcaccaaattttatttacaagttattttaggcactcagatgctttcactatcaaaaagggagatgaataaaaaatctaaaaatttttaattgctttttaaatatgcgaaaaattttaggcttaactttttttttataaactgatcagaagcgaaccagattttgcgagggcatcaaaaagacaaggaaaagcactgctatgatgctaactccagtaattctgaatttaaaattttttattaatttttaaagcttcactattttatttttttagcaaaattaattcataaatattttttcacaaactgctctgaaacgcaccaaattttatttacaagttattttaggcactcagatgctttcactatcaaaaagggagatgaataaaaatctaaaaatttttaataattgtttgagtaccccaaacggacacttgaaaaaatcgatttttttgttttcgggcagtccccccgaaccgatgcgcccagatttatggggagaccgaatccttcgggaatagcttccctatagcctgtactttaattctgcgttggatttttgctccccataattgtttgagtaccccaaacggacacttgaaaaaatcgatttttttgttttcggggcagtccccccgagccgatgcgcccagatttatggggagaccgaatccttccggaatagcttccctatagcctgtactttaattctgcgttggatttttgctccccataattgtttgagtaccccaaacggacacttgaaaaaatcgatttttttgttttcggggcagtccccccgagccgatgcgcccagatttatggggagaccgaatccttccggaatagcttccctatagcctgtactttaattctgcgttggatttttgctcctcataattgtttgagtaccccaaacggacacttgaaaaaatcgatttttttgttttcggggcagtccccccgaaccgatgcgcccagatttatgnggagaccgaatccttccggnatagcttncctatagcctgtactttaattctgcngtggatttttgctccccataattgtttgagtaccccaacggacacttgaaaaatcgattttttgttttcggggcagtccccccgaacgatgcg

SEQ ID NO: 38039 - DNA, 899 bp, Heterodera glycines
attttaaaaattttttaattgctttttaatatgccaaaaaatgtaggcttaacttttttagtgaaaattcgatcactcatattttttgctaattgagcagaagcgtaccaaactttgcagggatactccccggtaaaggactaacttacactgaaatgagcgccgagctagctggctcaaaaaaattttcgaaaatctgagtctttcgtttttatttattttttgcaaaattaattcttaaatattttttcagaaagggttctgaaacgcaccaaattttatttacatgttagtttaggcactctgatgctttttctatcaaaaagggagatgaataaaatttttaaaaatttttaattcctttttaaacaggccaaaaagtttaggcttaactttttagtgaaaattcgatcacttatattttttgctaattgagcagaagcgtaccaaactttgcagggatactccccggtaaaggactaacttacactgaaatgagcgccgagctagctggctcaaaaaaattttcgaaaatctgagtctttcgtttttatttattttttgcaaaattaattcttaaatattttttcagaaagggttctgaaacgcaccaaattttatttacatgttagtttaggcactctgatgctttttctatcaaaaagggagatgaataaaatttttaaaaatttttaattcctttttaaacaggccaaaaagtttaggcttaactttttagtgaaaattcgatcactcatattttttgctaattgagcagaagcgtaccaaactttgcagggatactccccggtataggactaacttacactgaaatgagcgccgagctagctggctcaaaaaattttcgaaatctgagtctttcgttttatttatttttt

SEQ ID NO: 38040 - DNA, 1052 bp, Heterodera glycines
ggacgggcggcggccctttttgccgatctgtccgataaaatgtgcgttttgggccaggaaagcgctcaattctcggaccattcattttccatccttccgggatttttcaaaaatccctccaaaatccgctttagtttccaaaaatgtttcgtcatctacttcttttctcaattccttcccattttttgtttgtacgttctgtgtcaagaagaagacacaaatgtgccaatgcgcatttaaaatccaattttttgaaaatctcaatgtcttaattaattctttaatttgctgcatcccattaattattcaatggacaatctttaagtattaaaattcgccagtttgtccaccctaatttctgctgttctgtccccgggttgaccgcaacaaggagtgcataaaatcctccagtgccgtaaaatgcgatattatgcaccttcttattgcgcttagccggggacgaaaaggacaaaaaaaatggacatcgtcagaaatttcggcatttaaatatctgtatgtacaatacgttttgacagtttattattattttttatttgtaaaaattggcaaaatacaaattaaaaggcacattttaaaatgtgttgtgtacaaagatgggaggattacaaggtgaaaaataataaatttacaaaaaataaataaaatttaaaagtaacaatatgtataggtatttgggaattaaattatttttagaaaattcctggattattttatgcattattattttttattttttgctgtctcggatgatttacagtaagtcacgcgtgttggcgatgtgcacaaatgaaattgtgtgcggaaatggcgctgaaaccggccaacacaatgccagccgagtcggacagcgcaacaaatgccatggcgaactcgcggttcggcttggacacctgggcactttgtgtatagtgaatgaatgacccactttttgatttatattatctcatatgccagccactatttggcattggtggacaattattctttcttttttcttacttttcagttaccgagaattggtcaggcgacga

SEQ ID NO: 38041 - DNA, 597 bp, Heterodera glycines
ttgaagaatttgcattcgctagtcactttatatatttttgatttttgttgtgttgcgtgtactgctccaaaaacagcaaaagttcaacaaaaaagtgggaaaatgttcttcgccatttatataaatgtttaagaaagagtttattacaacggcaccagggttgttccgggttacccgaaacccgatacccgaaacccggcctttttctcgacccgaaacccgacccgatgattttgggacgggtttcgggtcgaaataagcactggtaagaaaggggtcggtgtgaaaattaggtggataaggaaattgtgaattttttttgaaacgattgtgttcaatggaatcgaaaattttgtatttgtttttgttcattattagggatgtcaattttatgtaaatattgtacatatttttttcctggcttctccatgctctaaatagtaggaaaaactttcttttttatgtttgcaaacaaaaatcgggacttttatttacatatcttaacctatctcggggttttatatatatttgagacatgttttggactttatacttcatttttatgatttaatttttaaataatttgctgggtttttt

SEQ ID NO: 38042 - DNA, 496 bp, Heterodera glycines
tttttcttgaaaatttctaagtttgaaaattttttttaatttattcccggctgtgtttcggcggctgtgttttgtcctgttccgctccccggttataggtatgaaagtccccaaaattcgttcaaaaaatcgccgttttccaccccccccccccctcccatttcccctgcctctctttggcgttcgctttccgtccccccgaggacgccgccccgctgctgcgcgttcacaaaatcggtcacactctccgcgtcgatgggctccacgtgggcaattttcagaatggcacccaccgccttcttgacgacgccttcaaaaaatgatcaataaaattaaaataatgacgggaccaaaaaaattatcaacaagaagattgactctaagggggggggggggaagaggtattattttataattttagaaatatttgttttttaaataaaaatatagtcttttttaaaatttatttactaggaaaaagcctcacaattgaaag

SEQ ID NO: 38043 - DNA, 1032 bp, Heterodera glycines
  unsure (1)..(1032): unsure at all n locations
acattttaaatctttgccttgcagatttacagtttctttaaattaatccaggccatccattcttttcttatcaagaaatttgaaaatagagtgctttacaaggaaaagattaggataacttcactcaaaatttgaagatttttagctttttaaaatggcagctatttattctttgccattttcattttcccttttctttaattcaccatttctctctttttccaatttttcgcttgcacaattttcatcatcttctttacgttctttccattaaattacataaaatcaatcgaaacacgcgaagaaaaatgaacggacggaattaattcaaaaaggcatagaattcgttaatggacacaaaatttgtgcatttcttttcatcgatttgatattatttaatttttactgaaaacattaagtcgaaaaatagaaatacctgcattctgcttttattttgattttaatgcccattttcaaactggatcttttatttaccatagcagtcgttgttatagaaatagttgttgcagtgcaaacattttttgaagtagccttgttgggcttcgcagggatagtcgacgcccacctcacggcacccgtgacatagtgaagagcattttgaagagtgttcaaatttgtggctgtaggcagattcacaggagatgcaatagtaacgtttgttgaaaaattttgaaagagttttgatgccgtcaaagtggttgttgttgtggtagagaagaatggggaattggtaatcggtgatatcggatttggtgattgggcgcatctgataatcattaaaaataaatattttgtactcaccgggatatttgacgttccataacccttgcacttgatgtatataaacttccgcgtcgtactccgtctctgnntgtagggatcccgcctcggcgaagcagttgctggcgctttttgcgaaaaccgttggtttgggtttgttgttaatcccacgccagttatcacgcgtgataattcctcgtttatacaaagagtagtagcgcatcagttcca

SEQ ID NO: 38044 - DNA, 866 bp, Heterodera glycines
acggatttatggaaatctaagtgacaataaatgtcccttccattttttcgttaaaatttttcaatggtattaggggtaatatgtttgacaatttgtgtccgatggccacccaccgtctcaactttgcgtagatggccagcccaatcagtgccgccatggaacagtgcggaatggtcggagtaaagcgcacgtcgacgaaagggtcggtcgggtcggcgctgacttggatcagttcctcctggagaacagaggaaaagtaaaggggggggggggcaattggtttcaatggaaatggatataaatttcaaaaaatgcggggactaaacggccgtgttaataccaagccgaaaaaacgggagcagttcgttccccctctccaatatcgtgtcgttcgccccgaataaattttaatatttttttcgaattttataataatttactaattttccaaaaattttcccaaaaatcctaaaattaagtcaaaaaaaaaaaacacggaatttctaactgtgccccttccccacttggacgacgttcagctgttccaacgtgtacggatgctcggggtcgttaatgtcgcggatgtgttcgaagatttcggtggcatcgatgggctccttcgtgccgtcgtccaacgccgtggccgcttccgccgccaacgcacggcgagctttggtcgcgtaaataactgaacaaaaaagggcaaatccattgacggaatgaaatgcgaaagaattaataataattaaagagtaagtgcaaccaattaattaaccattaaaaaaataacccgaagtgataactaatgaaattcattatttatcaggatacccggcgcggcgttatcgagtcccattttgcgtcaa

SEQ ID NO: 38045 - DNA, 615 bp, Heterodera glycines
  unsure (1)..(615): unsure at all n locations
catcaaaattaaaaaacgggcgcgaagcgcccgtcctctttctaagaagcggncgaattccctcaaaaaaaagacgggcccttagcgcccttcctgaggccgcgaagcggccgaatggcccccaaaaaattaaaaaacgggggcgaagcgcccgttctgaggctgcgatgaattgctaaattacatcactttctagcgacgcgatttcatgaaaattatttttgctcctaaattagccaaaatgcatttttatggcataatttgaggtgctgaaacgtatatacgctttattttgcgtttcagactttttggaaggtggttacaaatttttgaaaaatcgtcactatttgggccccgggaaatccagtgaaatttcgaaaattcataactctttcgtttttgatcaaatttagtggaataaggtttgaaaaatagcaaaaaattaggtgaattttatgagatttgtttggaatttctatcttccaaaataaaaaagttattctnaaaattctggaaattttcgatttttcagaaaaaaattcagaactcggttcccgtaaggtggtttttgaattttaaatactgaaaaaatccgcaattttttgctctatttta

SEQ ID NO: 38046 - DNA, 1232 bp, Heterodera glycines
atgcacgaaatactttatcttgccttctgaatcgatttttctgagagattaagcacaacaaattgagatcgatcatttctcaaatacaattaattattcattttcgtacacttaatcagacgacatttttgttgctttgatccgcttcttcttctccttctttttcttccgctggtggcgccaatggcctaaaattaattaaatattttatttttcgataaaatttaaatgctgttgctgctcacccaatggatttatcgaaactccacagatcaaatctgacattgttcaaattggcactcggattttcgcggttttcccacttaactggcgccgtcgccgtctccccaattgggcaccgttgcaacagccaattatacacatttaagtcgaattcgtcgatctcctgtttcagtgtcagcttttctttcgtcacttcgttatccaattcaaatggttcaattgacgtcggttccacccaaaaataaagttgaattttgtaactgacagaagtggtggcatggcgaaatgtctaaacacaaaaattggtaaaataaaaacaatttgacgaaaattctggcgagacgacctctttgaagctgttgacccattcgaaatttggtggactcacataagcacggaaacgtaattgctttggttgtccattttttgtcggagtgtgtaaccatttggccaaagcttggccagcagttgcattgggtccatgtcagcaattccttctgggcacagatgaccggaattgatcgaatgcaattcatcaagatcagtgagaatcgttggcgaagtgcgacgacgcaaattgtccaaatgatcgccatcgtcaaagcccaaacggtgaatgtttgtcgcaaaaataggccaaatttcgcgggtaaaaacatcccaaatgagcttgacgtcggtcatatataaaggcacaaacaaattccggcatcggaaaatccatccaatagaccaatagttttgcttttggtcctttgtccttttcaattctgatacgtctccaaattgtgaattccgtttttccatcaaaatgcgtgtcaccaaaacatcgaaacggtcggaaatttcttaccgtcgattcatttttgtggctcaattttccctttttccaattgattggtgtgtcaaaaaagagctaaggcaaaactctgttgttatgtaacttaaaaagagagagttggaaaaatgagagagcaaaaagaacgcaa

SEQ ID NO: 38047 - DNA, 944 bp, Heterodera glycines
attccgatttcctaatctaaatttgaacaaaaaatcttttacttgaaaattcaaaatttcgatttttattcgagttcgggttagggattagaaattagtcaaaatacatgtcagattcgtgattagcgacctttaaaaccccggataaaaaattatcatggttttttatcttaaaaaattttgcaaaacaaaatggtccccccttttgtttcataagtggtaacttttacagtagcgccacttttttgaaccttaacaaaattttaaaaattttgcaggctaatagaggacacttagggctatggaatgataccaaaattgttggatttggttgtcaaacgaaaaagaccccgacccttgtcttttcctaagcttactgttttgtggcacattttttttgttcgctgttgatcgtgttcgtcttgatatttcagattttatctgtgaataaatttgcggacgaattatcgttgaaaacactgaacatactttgtcttctctccgttgagaatttccagaaagcgacatttaaacgaatttaaattgaattttctattaacagttctagcaaaaattcattttattgtcaagatttttgaatgtttagcgatgtcggtaggctgtgctgacaagtttcttaaatctaccaaaatggagttgggtaaaatactatagatgctatcacatattttctgaatgcacctctctgagctttcttgtatttataaattcccttgataccaagaatgtatgggcatttgtttaaaaatttattttttcaaattttctgttttaagaataaaaaggattttaatggaatttattcaaaaacattggcattacctatatgtatcacacctattttgtaaaataaaatgcgcacatacagtataaaaaataatagagatcgggaaattttcaattgcgggtcccgctgcactatg

SEQ ID NO: 38048 - DNA, 895 bp, Heterodera glycines
tgccaataaaatttggtacgattttattgcttattccattaggagaaccgaagaaaatttttttaatttaagcctactctttttggcatgtttaaaaagcaattaaaaattttattcatctccctttttgatagtaaaagcatcagagagccttatttaacttgtacataaaattttatgcgtttcagagcactttctgaaaaaatatttatgaattaattttgcaaaaaataaataaacagttaaaaactcagaatttctaaaaaaatttaaaatcaattacaattgtcattttttcaggttaagttagtcctgtaccggggagtatgccaataaaatttggtacgattttattgatttttgaaagagctagaaccgaagaaaatttttttaatttaagcctaaactttttggcatgtttaaaaagcaattaaaaattttattcatctccctttttgatagtaaaagcatcagagagccttatttaacttgtacataaaatttgatgcgtttcagagcactttctgaaaaaatatttatgaattaattttgcaaaaaataaataaacagttaaaaactcagaatttctaaaaaaatttaaaatcaattacaattgtcattttttcaggttaagttagtcctgtaccggggagtatgccaataaaatttggtacgattttattgcttattgaaagagctagaaccgaagaaaatttttttaatttaagcctaaactttttggcatgtttaaaaagcaattaaaaattttattcatctccctttttgatagtaaaagcatcatagtgcctaaactaacatgtaaataaaatttggtgcgtttcagaaccctttctgaaaaaatatttaagaattaattttgcaaaaaataaataaa

SEQ ID NO: 38049 - DNA, 1133 bp, Heterodera glycines
tgcttcggggaattcgcccccgacttcttctgcctgcattgcttgaggtccgtccgtgccaaacctgtctcctccttcatatctcgtcgaattcggctgaaacttggtaggagcattggggagacttggggccatcgaactatctcccaaatattttttctcatgtctctgagaatttttgaggagattattcaaattttacaacaaaaaaaattatggatttttttaacaaaatcgtaagtagtatatggccgcaaatctcggtgtaaaattatctgcgataacccctttccttcctctttagaccccgtggcactaaccatttcccttcatttttcccttctagccgtatatttgtgatgtttaaattgattgaaaaggagggaatcataattgttttttactaataaactaattgtaaaatgattgaaatgagtgaaaaacttatgaccacatatgatcaaaaatgataacaggtaaaatttagtggcaagcggaaacggcaaaatagggaaaaatcataagaaaaaaaggtcatacccgggaaaagagccataagaagttcaaaaaaagtcaaaattgtgtgaaaaatattgtcatagcaggtgaaaaaaggggcagaacaggtgaaaaatattgtcatagcaggtgaaaaaaggggcagaacaggtgaaaaacattgtcatagcaggtgaaaaaaaaggcatcagaacaggtgaaaaatgtcataacaggtgttaaacaggcgatagcagatgaaaaaaagacatctgaacaagtgaaaataggtgaaaaagggtgaaaaacaagtgaaaagaagtgataaacagatgcaaaataagttaaaaatatgtggttgtaaaattatgatagcattgaaaaacaggaaaataaatgaacaatttgttattgttttaaacaatgttgcatttaaatgaagtattcgccagatagatatattatttgcaaatatttgtttttaaattcaccggaaaaataaaacgcaggaaataactaattcgccggaaatgttatttatttattttggaactgctgtttttcatatgatttgaaattttaggagtatataagaacggtaaaaagacccttattaaatattaaattactcttaa

SEQ ID NO: 38050 - DNA, 67 bp, Heterodera glycines
tccaatttttaccatataaaaaatattttttaaaaacttaaaagggctggaggggttacaaaacaga

SEQ ID NO: 38051 - DNA, 785 bp, Heterodera glycines
ctttgatatagatgaatgaatatatatatatatatatatttataatgtttattgttatcacgatgtatgcatatattttatatttaatctgtaataatgtttattgttatcacgatgtatgcatatattttatatttaatctgtaataatgtttattgttatcacgatgtatgcatatattttatatttaatctgtttaggtcttttttcgcttctttaactttcactcattaattcagcttcagaagggggtgggggtaaacattcaaacattcacatcggttagacacacacacacttaaaataaaattatatgaatttataatatatataatctacaccgtatacggtacttcagagttttgtcacgcccccccccccccttgaaattttttgtaggctgatttaatatactgatctcaaatctgaaatttttttagctacaacgtgtttccagtgagttcgtaaaaattcacatgacatgaagacgaaaaagtattagttaggtggttcccccctattttggaagaaaaaaattttgttttaaaaagtcgtgaaaaaagggtttttggtgttgctgatcacgaatattacatccattttggcctattttgaatcccgaaccccaattaaaacaaaaagtcaaaaattcggatttttcagaaattcatatttatgtttgcatctttctgctgtgcataatgaatattttttggtggtgtaatggtcgtgattattttttgattggtttaatctatcttaaaaaaaaaaacgaatttttaaaa

SEQ ID NO: 38052 - DNA, 718 bp, Heterodera glycines
ggtggcaacgacgtccctgaccaaaacagtggaggcggcggtgggcccaacggcggcttctgctcttccgattgtagcaatttcggctgttgcatgggcccagcgccgcaggggtgttgcccgcaaggccaatgtatgccgacaatgggaggcgggggatacgcccaggggggcggcggggcgcagatgggaggcggcggagcgtaccaaatgatggcggagagacggcgccggcggaagcgacgacggaatgccgtgccggcgacgacggcaccgcacagagcggcggcaccttcggctgatgttttcccattgtgagactcgaaaaaacaaattgtttaattaatttattttaaaacccatgctatgtataaatattgtaaatgtgctttattcgctttgttgaaaatacatcaaaaagaaatttatgccaaaatgtggccgctatattggagaaagaaagcgttgtgagtgttctccaaaatataaaattatacaatttaggaaaaaaaacaaagaaaaaagcaaaaatactgccaaattatgagagagaagaaaccaatgaatgaaaagcattaattaaatgaaaatagaatagcacaaaaatgggataaaaagcggcggactgagagattaaaggaggcgaagacggacgacggaagcggcgactaattgacgatggaaatgccgaacgcctcgagttcgtcgatttggtatt

SEQ ID NO: 38053 - DNA, 588 bp, Heterodera glycines
ttaaaataatggaaatttttgccttatttgttaagcgtttttgtttatgaaatgttctgttttttaaatttttgagcataaatttaataaaattctaacgaactttttggcccccggtgccaatattctgcggaggttttggatgagatttttaaataaacaggtgaatcgctttcactactatacaaaaaaatgagcaaaaatattacatggaagggaaccgaactttggttgctaaattggtcggggagtaggcccaaaggttcggggaaaagttcggggaccggggcggtgaggaaccctagccgataaataaacataaatttcatcctttattttctgtttttcaccattccaattatgtattctttttattttttcattcaaaacacgaactcccccatcacggcaaaggtatagattattggtcccgaaaattttttttaaataaaatttaagaaaattatttttaggggtaatctgaggcgccgagcacgaatccggtcttattttggctcagtctcgaacaaaagttcgagaattcaatttttcgtacttcgcagttttagttcaaactcggctatatac

SEQ ID NO: 38054 - DNA, 838 bp, Heterodera glycines
  unsure (1)..(838): unsure at all n locations
cccgttaaccgtgaccgtgaattgaccccgtgaaccgtgaccgtgaatcggtcccgtgaatcgtgaccgtgatcgaaaaacccgtgaaattcacggttttcgtgaccgtgaccgtgaatttatgagtttttcaaatattatataccaatttttaccaatttttcaactgaatttttttcaaaaatgagttagttttgcgacaaattaaaaaattctagataatataagcctttttgatctaaaattcaatgtatgagtatatcatacccgaaatcaaacatttctggtgaacagataaagctctgattcaaatgtttcgtagcgccgaggaaaattttttgataatttgttggattttgttaacatattttgcccaaaataactttcttttagcacattttttaacgaaactacataatgagttttaattatttaagttttaatactgaatttaaaaataaaaataaggaatctttgggagcttcagcataaatgtaaaaagagggagagggaccggcggtgccgacaggcgccgccgtagaaaaattttgaaattgaatgaaatttattaacagatcttcagcaaaaaatgactacattttgcagttttgaaccaaattttagaaatattttgcattctgtcctttaaaatttcaaattaaaaaatggagtgaaaaatccttattcaaaaataaaaacattaaattttttctgaaaacaatatttaaaaacccgtaaattaacatcgtgaatcangaccgtgaccgtgacggaaaatatgtatcgaccaaaaaattacctttgcattcacttcgctcaatttgaatcactcttgcgt

SEQ ID NO: 38055 - DNA, 894 bp, Heterodera glycines
taaaactaaggttttgtttttagttgggattcatttgaattttaagccgatgaatttaattgtatttgaaaaaatagaagaagaagaattgccaaagatggaagaaaaaaagcagaaaacgaaaaatcaaagctaatgaaaatgtttcacagaaaaaacaaagccgagaaaaaagccaagaggaaaaagagagggccaagacaattaaatgggaagaaaaagttatcaaattgacccattttgatggtaattccaataaatacatacacataatggtgaattttatggatggctttcatgctcaatttgggttcatgtcgaatgcgttcagcacgattgaactctgaaaaaataaaaattttcaaatattgtaaattttatgtaataaatattttaaaaattaattttttgatttttttaatcaccgtgcccggcacggacaatgtcagaagagaggcgttggaatgttttgctattgtgccgccattcatttgctgaatctcttcgatgggaatgcttctgccaaaaaaatgttggaacaaaacacttattttagaataacaaaaaaaattttgtggtaaaaatttctttggaagtaattttttgattttttgcaataagaaaaaggaatttgtcaaaataactttttaaatttacataggttccttttaataagaatgttatttaattttgtccaacaaatttaaattccctttgaaattctcgaggtaattagcccaactcaacaaaacccgaaaatatggcaaaaattcctagattttactttaattttttctttttagaaaaatccgcattatgtttctgttttcgaccccctggcattttcatatttctttggatgttcgacttgaccccttccattaatttttcatc

SEQ ID NO: 38056 - DNA, 963 bp, Heterodera glycines
  unsure (1)..(963): unsure at all n locations
cataanttctgactaaatcactaatctggtgggttcagcttcctcacgtaaaaatattttttggcttaatgtttttaacaatttttctaagtttaagggagggggaagaattactcaaaaaatgggcaggacaagattcaattcgggaattggttctgtttcaagaaaagcagtaaattatatttttaatgtcaattttttcgcgtcccgacatttaaggcccccgacatttgcgcctttgtacaaaatcgagtacaaaattaagtttttcaatccctgatcacccaaacagctttaatgagtgatagaaagtgattgtgtccgatcatttgatcgttagtttcaaacagcaaaattaatgtttttaataaactagaagacttttaattttaatgctgtttaaattatcatggattgaaaaacttaattttgaaaccgattttggacataggagcaaaagtcaggaccgcaaaagtcgggactccatctttgagtttcataaaaacagtttttttttaaattttttatcaaatgtacgtaaatgagccaagaaaaaaaaactcagtaaaaaattgccaaagaaaaatatttttttttctcaatcaaacacaaacatcggaaggaaggcgggacctattcattcactgtgctaccgaattgtgagcatcaaatccctgcgcaaactttgcgggaaagagagcgcgacaatctttccctcccctcccccctcataaattttttttcaaaaatttttttttcgaggggtaggcttgggaggtgggtatccaaatccaaatcctgcttctcctccgctggctgatgaatggacgaacaatgaatggaacaaaatgtgtttttttctgttcaatgtgagcgcagccgcaaatgcgcagcattttttttttgatcgaaaagcagcagaacattttgaagcgcaaatgcttttatgtttgcgtataaata

SEQ ID NO: 38057 - DNA, 696 bp, Heterodera glycines
ttctgctccccataaatggtttgagtaccccaaacggacccttaagggtcgatttttttgttttcggggcagtccccccgaaccgatgcgcccagatttatggggagaccgaatccttccggaatagcttccctatagcctgtactttaattctgcgttggatttttgctccccataattgtttgagtaccccaaacggacacttgaaaaaaccgatttttttgttttcggggcagtccccccgaaccgatgcgcccagatttatggggagaccgaatccttcgggagtagcttccctatagcctgtactttaattctgcgttggatttttgctccccataaatgtttgagtaccccaaacggacacttgaaaattcgatttttttgttttaggggcagtccccccgaaccgatgcgcccagatttatggggagaccgaatccttcgggaatagcttccctatagcctgtactttaattctgcgttggatttttgctccccataattgtttgagtaccccaaacggacacttgaaaaaatcgattttttgttttcggggcagtccccccgaaccgatgcgcccagatttatggggagaccgaatccttccggaatagcttccctatagcctgtactttaattctgcgttggatttttgctccacataattgtttgagtaccccaaacggacacttg

SEQ ID NO: 38058 - DNA, 1482 bp, Heterodera glycines
  unsure (1)..(1482): unsure at all n locations
cgctgccagtccacctcgctcggctcccttgcctgcgccgatcgctcccatcgccggccgctgccagtccaattcgcccggctccctgncctgagccgtccgctgccagcactcagccaaagggagccatcgctcccttcgccggccgctgccagtccacctcgcccggctcccttgcctgagccggccgctgccagtccacctcgatggactcccttgcgatttaaaatatttttgattataatttattcaaagagagaaattacacaaaatccctgtcagaacaatgagaaatttgcaaaacaaaaaaaaagagggcgggagaatcggtaatttttttaactttgcggttaactaatggatgtgtgcactttcgttggtcggagcaaatgtcgcgtaaaatgtttgattttaatcgtttttttttgttttcttttcagatcattttggaaaataaaataaagctgaacaaaattttattttactttttttttattttgtcaaatctaaaaagaggttaaactaaaagtaaaagtaaaattagtaaaagtccaccaaaaaaaacaatgggaaaggtcgggggaattcaaaaaataaaaattccatgaaatctgtcgcgagaaatgcaaacagaaggggcgggggcggaggagaagagctgcttcttcttcatgtaagccttcaacacattcccacaaaaagcatgcttttcattcattgtcccccgggggcgaattcttcgctgatcgatcggacccctctcccctcctccctctcccccactttggtgttgtggtgggcgggtgcatctcccatacagcagcagtaggcattgttcaacaaccatatgaaaatttgattgatttggcaagccaaaggaacatgcttaagtgaacgcttgggaatggatgcaatttgcatgggatgagtttggacagaatgaaaagtcaccgcgaaagggaaggggagttaattagagaatggtggttaatggaaaaatgaaaaaaatatgtacacataagcaagaacattgctttttcccattcgaagaaaaaggagaaaaaatttattgaaattttaattgatgattattaagcaattttattagacttttttataaaataatatttggtttttattaaaaaataaagcaaaattctgttgcgtttgtcctttgctctcgcaagcttaatttttatgtgtacaaaaatcaatacacacatcatcacatatttatgaagctgtgtaaataaaaaaacaattcatttttgaggatgattggcacaattctggggtgcattataaattattaatttcaaatataagtcggttttttgtttcttccattccagaaattttttttcttaaaacacgggacactactggtaagaatgaaggtcagaagtgaaaagatcgagtcgaacgggtttttatcaatttttcacgcctaatattaatttttaagaaatttgagtccagcgg

SEQ ID NO: 38059 - DNA, 1083 bp, Heterodera glycines
  unsure (1)..(1083): unsure at all n locations
tggcacttaatgtttaccgctgatcagcagacgtttctgtgcctgccgtnnggacaagtccatcgatgcactgaaaatgattggatggggcatttgctgctgatgctgaaccatcgtttgtgcgttgccaaatgcgttttggagttgcgcgttcgcttggcgtactaagtcttgcgtgttctctgtgataacgaaagtgtgcctttcctaattccgttttcttctcaccgcgttttcttcgccgttcgtttgtcccattttctaccgtacctttgcccttttctgttgccactgtttgttttcgtccatttctctcccatttaccgtaattttcctcactttctaccgtaccgtttcccttttccgttgtcaattttgtgcccttcggcgtttcttcgctcccattttttacttcttcaaatgagtttcaaagatagatttgctttcttttaacttttactttttacgattgcatccgccacttctccttcctttggcgccatcatcaaaaggagttcccctaattttaaattttccattttaaattccaatttcatttccaagtccgtcccctcccctctcaccgtttccgcagttggtgctgttttcccctttttcttcctcctcattgtcttcttcctcctcctcgtcccctccttctctttgtcctcctccctccgtttcttccctttcttttcccttcccttcgccgttcgcttccgatgagttcttcttcgcttcttttttttcttctgcgccggacgatgtctctgaagagagccgtccgctttcgtccttttcttttccattttcagttgaaaaatgttcgacggataccgtcgaatcggctaaatttctttttttatttgttgtcgaatttcgagaaatttattctcgaatattattgccatttctttcccctttttcccccttcaccttctctcttccttcgtttttctcttttctgtttgtctttttttgtcgaatttttctctccaaaatgtgccgttgtcgttgtgcaattgttcccgcgatttgccttagaattaattaaactactaattggccaattagcaagctaat

SEQ ID NO: 38060 - DNA, 1799 bp, Heterodera glycines
  unsure (1)..(1799): unsure at all n locations
gggtaagcagtgctggtcgtttcatcacggcaccgacccttttggctagtcagcaatcgttgcttactttgccagatcggacgggtgcgcatgattccactgttccaagcaccccaccaaaagcaaaacgatataaccaaatattaaggaaaaattttttaaaaaattttttctccatcttcctttttgatactaaagcatcagagtgctaaaattaagttgtaaataaaatttggtgcgctntagagctctttctgaaaaaaatatttatgaaacaaaaaaatcgactttttcaagtgtccgtttagggtactcaaacaattatggggagcaaaaatccaacgcagaattaaagtacaggctatagggaagctattcccgaaggattcggtctccccataaatctgggcgcatcggctcggggggactgccccgaaaacaaaaaaatcgattttttcaagtgtccgtttggggtactcaaacaattatggggagcaaaaatccaacgcagaattaaagtacaggctatagggaagctattcccgaaggattcggtctccccataaatctgggcgcatcggttcagggggactgccccgaaaactcaaaaaaaaatttttttggataaaaattatttaaatgaactgactagataatatttaaaataggttattactcttcctttcagtatccctgcaaagtttggtgcgcttctgatcagtttctgaaaaaaaagttaagcctaaactttttggcctgtttaaaaaggaattaaaaattttattcatctccctttttgatagaaaaagcatcagagtgcctaaactaacctgtaaataaagttttgtgtgtttcagagcacgttctgaaaaaatacttatgaattaattttgcaaaataataaataattaatgaaaaagtcagaatttcgaaaaattttaaaaacaacaagcgttggcattttttcaggttaagttagtcctttacaatggagaaggcctgcaaaatttggagagattatatcgattttagtgcgctaggttcgatgaaactttttaaaatataagcctaaactttttggcctgtttaaaaaggaattaaaaatttttaaaaattttattcatctcccttttgatagaaaaagcatcagagagccttatttaacttttaattaacatttggtgcgtttcagagcagtttctgaaaaaatatttatgaattaattttgctaaaaaaataaaatagtgaagctttaaaaattaataaaaaattttaaattcagaattactggagttagcatcatagcagtgcttttccttgtctttttgatgctctcgcaaaatctggttcgcttctgatcagtttataaaaaaaaagttaagcctaaaatttttcgcatatttaaaaagcaattaaaaatttttagatttttattcatctccctttttgatagtgaaagcatctgagtgcctaaaataacttgtaaataaaatttggtgcgtttcagagcagtttgtgaaaaaatatttatgaattaattttgctaaaaaaataaaatagtgaagctttaaaaattaataaaaaattttaaattcagaattactggagttagcatcatagcagtgcttttccttgtctttttgatgccctcgcaaaatctggttcgcttctgatcagtttataaaaaaaaagttaagcctaaagtttttcgctcgtttaaaaagcaattaaaaatttttagaatttgtattcatcgccctttttgatagtaaaagcatcagagtgcctaaactaacatg

SEQ ID NO: 38061 - DNA, 817 bp, Heterodera glycines
  unsure (1)..(817): unsure at all n locations
tttacgcaaaaatttctcgaaccctctatgaattttttcattttcttctgaaaacattcccatttaaagccacccaataggactgttagatcagaatggtgcaattgacttttttgattaaaaaatatagtaacagaaactaattttttcaacttttttcgtcaattctttgactgtttattttgcgcattttataaaacattgtttcaggacgtcggcttaatgacgactgtactttgaaggattgcaacctcgtaaatggctccaccatccactgtttcccacgtcaatgtggctgttagagcagaacaattggcagaattttgattaatttccaggcccggaaatttgatcttttcaactgtttattcaatgttttccctcctatttttcttcgtttcattccttttaaaattccttacctttgatgaaatctatttttgctgcattattttttacaacaattttgagttaagctgtccggcggtgccgataggcgccaccggggaaaaaattggattttttggctgtttaaaaaatgaaataaatatttttatttatgtggttggaaaattttcgtaataaatttgaaggtttagccactagactanatattccttattattttggatttaaagaagagaaaattattttttcttctctaattgtttctttatttgttacaataataaatagtatgttttttaatttcgaataatttatttatttttcaaaattcaatgtcagtttattttaagtctttaactttttataattttattttttttaattgaataatatacaaatttttttctta

SEQ ID NO: 38062 - DNA, 559 bp, Heterodera glycines
atttccgcagctcttacggtaatggaaaaaattttgcctttatgtccggaacggattagcatcggggttacgagatagaaaattgtcctaaaaagagatagccatttttctgagaattaattcacaatttccgcagctcttacggtaatggaaaaaattttgaagaggctctccggaacggattagcatcggggttacgagatagaaaattgtcctaaaaagagatagccatttttctgagaattaattcacaatttccgcagctcttagggtaatggaaaaaattttgaagaggctctccggaacggattagcatcggggttacgagatagaaaattgtcctaaaaagagatagccatttttctgagaattaattcacaatttccgcagctcttacggtaatggaaaaaattttgaagaggctctccggaacggattagcatcggggttacgagataaaaaattgccctaaaaagagatagccatttttctgaaaattaattcacaattcccgcatctcttagggaagggaaaaaaattttgaagaggctctccggaa

SEQ ID NO: 38063 - DNA, 873 bp, Heterodera glycines
aatttcaatttgcggattccgctgcgggattcgatctcaaaattctttgcgggacgggatcccgcgggattaatcccgcatttaaaaaaaaatgtgggattgcggactgggatcccgcaaaatcccgcgcgggatcccgtcccgcgccggtctctagtgctcagcgcctcaaaatacccaaagaaacttgttaaagaattcccaaaaaaaaaaaattcgggaccaatgaccgacatgattgctctttaaatttgtggaaaatatagaggaatatatcgttctgcaatttttccttcctgcgttaactttcaatttgaagcatattaaattggagagaaactttgctgaaatatagcacattgaatacaattaactgttaaagaatttttgcttttaatgcattttttaacgaaatctggcggcgagatagccaaaaaacaaggcgcggcgagttggcccgcggcgagaaggcgcgcggcgagttggccggcggcgagttcgcggcggttccctttatatattcatgtgaagtcaaagtcagtgttatgaactcaaaaatcaaaacagaacaaattgcatcatcccattttatgctctatcagatgctaatatgagttattggcatcaaagtcaaacatgtccaaaaacgagtacaagaaaagccttgcctcaaacatgaaaaaccaccttaatagaaaaaacaaaatttataagtacaaaaactggaattgaaaaataggggaaaaattatcgtatttactgaatagagcccccgagggctttgtcaaacagccacattcacgaataaatggcataatttgttaggtttcgctggacgattgcaaataaaattgacgccgaaactgtaaaatt

SEQ ID NO: 38064 - DNA, 1078 bp, Heterodera glycines
ttgcttactgttagctaaagcgaagaatcaaaatggcatttcagctggagaaatgcctcttcggttaatttgaactttaattgagcaaattgttgaaattttcgcccattaatataaaaaatgataagcccactccgtagcctctcaaagttcaaatggacgctcaagaagagaaattttctcaagagtcgagaccacgactgtcgcatcattaatcagtacaaacggagtttgtgtgccatatttttctatttttcaactttttccaaatttgtatctcacttcctgtccacattcgtaaaattgggtggtgttccagcagtttaaattcttgagccttttttcaaaaatccctcatctgagagaggaaacattttgaataaaacaactagagaatcttttgaactgcttcctaaaaaaattatgaaaaaaattgaaagaatacagtaaaaaatgggatagaaacgtcatttgcccactaatcatccatcaccgccaacaggcggccctaatccaggggcttgcccccctcacgaaatgaaaaataaaaaattttcaagcataaatgggcaaattttttgaaaattttacacaagtttcttatattattgcttaaatttccacaaaaaaatttattggctgagcttatctgcaccaccggaccccattgtagcattatttattgaatgacccaaaaacggcaaaaatgcgtcatttttaacacaaaacgctataaattcctgtttttcgcccggcgctcaaaattttgaagaataacattcgagaaagtatttttttaaatttttggtccgaagagcaaaaaaataatataataaagcttttcgggtgccgtccacaaaattttctgggcacggatctgcccctccatcgtatataaatttacatttgctggatgatgatgccgttgcggaattgaggccatttcctccgccattgtcagccgccgccagctcaatgccgtggtgcaaagcgtgcagcagacaaagtgccaacttctcattgagtgcgcagtcggtgaggaacagcgtgggcagtgtgggcaactggggtaacattg

SEQ ID NO: 38065 - DNA, 545 bp, Heterodera glycines
ccgtccccgagaaaaaagggagaatggaaaaaagggaaagaaaaaagagagagaaaaggaaaaggaaagggggaaaaaacgagaaaagggagcggcaagttcaaggaaagggtcgcgcattgcgctcgactaaccctgagggcgatttgtcgaactcaaaagtggggacttgaaattgactatttccctaagaaatttcgccaaaattttccaatttttctgcgttcgacatcctttcctcgtgcgttcgaacgcaagaggaggggctgaataattcctaaaatcttgcctatatttttttaaatcttattaaaaattcctaaattctcttaaaaaatgacacaaaatcgcaaaaattttgtcattttttggtgaaaatctgttaacaaatcacaatcaaaatttcaaaaattttcccggcggcgcctatcggcaacgcctgacccaaccccccgtgccccaaaagttttttgaaaaaagtgcaacgcaaaaaaactggcatgaaaaatgcaaaagatgggcgcgcaaaaaattggccggccgct

SEQ ID NO: 38066 - DNA, 664 bp, Heterodera glycines
catttatgcctgggttattcaattctagcaacgaaatgtgcaatggtgtataaaaattagaccattaagatttaattcaacaatttgtgatacaaattcgaaagacaatgcgcttcataaatttcgagcttccttttaatcgctttcctaaaaaggaagacaagtgctttcaggatgtgcacagataaggtaaaaaactccatattttcctgcacacattataaaaagcgtctgtctcttggcttctaaggcccaaatcaacccttttatgcctttattattcaatgcaatcgatgcaatttgcaataatatatataatttagccattaatatagaattcaatcatttttcatacaaaaacgactgacaatacgcttcataaatccaaatcaacacatttatgcctgggttattcaattctagcaacgaaatgtgcaatggtgtataaaaattagaccattaagatttaattcaacaatttgtgatacaaattcgaaagacaatgcgcttcataaatttcgagcttccttttaatcgctttcctaaaaaggaagacaagtgctttcaggatgtgcacagataaggtaaaaaactccatattttcctgcacacattataaaaagcgtctgtctcttggcttctaaggcccaaatcaaccctttta

SEQ ID NO: 38067 - DNA, 1483 bp, Heterodera glycines
catcccccccctttctcttggccaggtccatcaccgcctctaccatctcggctgtgtgctgtgcatcagctgttgctgcatgtgccaacctcccttgacgccacaaccggggccatttgcgccacctgaacagcctccgctggtgccgcagccgacgcagcaaaattatgcccaattcagtcccaccaatgggggcggaaatgcacaaatggtgagcactgatcgtttaaatatcgttaaagcctgagacttaagcagcccttccatcacccggattttccatctctagcccaacaaaatcagcagaattgtatgtaaaaattaagttaattatgcaacaattagcactaattaattaattgtcttaaatttgacgctcagttggccctttcgcgggcagtccaaccgcgggctatttgagtccatcgtcagggcctgtccaaattggttcaactcagcaccagcagcagaacatgcaccaaatatcgttgagcgaattcggcacacgaacggaaacgggtggcggtgatcctggcattttgcgcaactttcaaggcgaccaattcaccgatggacaacgcattacggtgggtgagatattaaaaaaatttgcatttttatatacatatttttatttatttgaaatgtttaattttaattagtatttatggacgtgaaaaatgctttgccggttttaattttcacttttatttggcggagaaaaagccataaaataagtcgcggcgatttggccacgtcaaagtgacccgacctgttgattttctgttgtttttcattttaaggaaacgcgccaaatgaatggaccattttttgaacgaattggcggcgaaccgaactatgggggccaaggggaaggagaagcggagaacgaacggaggaaggaattcaaaattgcagagaagaaaaattagcaacggacaaatggcacggcataatttaaggggaggggactgatcagagaagctgatcaatggttgattaatcgattattaattgatcgatgatcaaggaaatgagcaatgccaattcaaactggatcaatgtgatcaatgattaattatggcggctttaactgattaattgttttcattttttatttaaaattataaaaaattcactttaaattttaaatacacgtgaaaaaattcattcaatcaaaggagcagaacattttgtcgtagaaggccaacagacagaagaagaaagcggttaccagtgaaaagaaaaacagcaaaagacgatccaacgaattggcgaggaattcccactcgagggcacacctggggagggggagggaggactgatcatacagggaacggactgatcagatagggaacagactgatcagacagagaacggactgattagacagggagcggactgatcagacaaagagcggagagggggaggcgagaactgatcagacaggcagcggagaggggaggcgagaactgatctgaca

SEQ ID NO: 38068 - DNA, 624 bp, Heterodera glycines
  unsure (1)..(624): unsure at all n locations
ccgtcgccgtcgaggtgtgaaatttcacacctcgacggtggccgggttttcacacctcgacggtccccggttttttgccttttttaccgcaaaaacccaaggatattggctgttttttcgcgcattttcggggaaggggagggaggcgacggtccctggttttcacacttttttttcgcgcaaaaaacagccaagggtattggctgttttttcgcgcattttctgggggaggggagggggggggtcgacggtnccctggttttcacactttttttcgcgcaaaaaaaaaacccaagggtactggttttttcggtaataaaatttaaatatttttgggtttgatttaagatttataaattttttcaactttaattttggtaatacaaaaaaaagtctaattttgaattacgcttaattaataaaatatttatgtgcgtctgcagcagaatgccccccccctccccccaattgaccacaggcaaaatcaatatggataaatggaagggagggagtaatgtgtggagaatggattgggacgagggatggaaaaagggaattaaatgaacaaaaagtaaataaaaaccaaacgatttttatcgacttatttttttctaaactaaaaaa

SEQ ID NO: 38069 - DNA, 916 bp, Heterodera glycines
tagagttgctcggtaccggtaccggtaccggtactggccggtaattaccggtttttttggtaccggtaccggtaccggtaccggttttttcaaaaatgaaagtaccgttaccggtttgtctagtaccggtaccgccggtaaaaatttgcactggtaagaatgggggtctggtcgagaaaaaaatagggaattggtgaagaaggagaaatttttgagaaaaaaataaattttatttcgtttagcaaccatgcatatgtagtgtaatggttaaaccttttgcctttcattatttttcgcttgggttcaattccccactgggatagtatattcttcatattttctttaccattattttaattgaaatttaattaaaaaaaatattccaactttttttctttcattttaagcatcctaaaaacccaaaacttaatcaattggtcattttttttacaaattctgttaacaaatcgcattaaaaattacaaaatttttcccggcggcgcctatcggcaccgccggccctccttgttccccaaaagtcttgagaaaaacgtgccgcgaaaaaagcggtgttgaaagcaaaaaaggtcattgatctacattaatttacatggccggagacacttcgcaaaattagaaaattggctgctgaccccttgttttgcaataatctgaattttaggtctatatctgaattttagtgttctttatcctgaatttgaaaaaaaaacttggtcaccctcaatatacatatacttctgaacaattctaatgctaaaaaacaggcactcgcgcgaaaactgaataaaaattttgtatttgaaaaattttgttcaaaaatttttacgttggaaaattaccggtaccggtaccggtggaaaaagttggtaccggtaccggtttttttacaattacc

SEQ ID NO: 38070 - DNA, 1594 bp, Heterodera glycines
  unsure (1)..(1594): unsure at all n locations
tttttcaaattattatagaccaaagtccttttttcttcttacactgtattgtttttatcaaattttattacatatactttcctagttttttttaatttaattccttgattattatcgcgtgcgccgcttcatgtaatgcggttacttttttattttgaagttttgttttgatttttgtaaatttgaatatagctaaatcaacattttatttataaattctaatttaatgatttgatttttaattttcttatatttaattcatagaatattaaatattatgtgaaattggtttttatattaaatattatgaatattagttaattatgtataaatgcatttccgcagttttttgctctattatataaattttatttggcatttttatcacttttttaagaatttttataaaaataaaagtgattttgagattcgggaccaaaggggggtgaccaggatttttgagtgaaaaaattttttcgtcaaaaatcttccaaaaacatgtcattagggctattttatgacgctgatcacgaatacgtgatcagatttaacttttgacatagtcaagacctcagaatccctgtgtgattggggattctgaggcatcatttttgggggggggcaaagttcgaatccggacggtgtaacattatttttctgtgcatttttgggttattttgactgtttttaattaatttgaagatttcttttaaattatttaaatttattttttttaacttaaagaatttcattattttttttgaatttgtaaaaaaaataatttaatttcaaattaaataaatattcaattaataatttccaacgttgtttttaattaataactaccatttttttcgtgttttcattgttttattcatttaaaatattttttattttattaataataaattacatttttttatttgaattaaatttttataaaattcgagaaattagttcctttcaatttcaataaatattctatattataaatttctaactttatttttaataagtaaaaggattttttaatttgataaatttataatacatccaataatacaattttcttatttatttcattttaatccatgattgtacctcttctaatcacttttgttcaaattttaatcactgttgtacctattttactaacttttgtacctcttctaatcactgttgtacctcttctgatcactgttgaacctcttctaatcgcttttgtacctcttctaatcactggtgtacctcttctaatcacttgtacctcttctaatcactggtgtacctcttctaatcactgctgtacctcttctaatcattgttgtacctcttctaatcactgctgtacctcttctaatcattgttgtacctcttctaatcactttgtacctcttctgatcactgttgtaactcttctaatcactgttgcacctcttncaatcactgttgcacctcttctaatcattgttgtacctcttctaatcacttttgtacctcttttatcacttttgtacctcttttaatcactgttgtaccacctttaaatcacttttgtacctcttctaatcactgttgaatctcttttaatcac

SEQ ID NO: 38071 - DNA, 1050 bp, Heterodera glycines
atttcctccccgacgaaggtgttgctcccgacattcctttcatttctcaagccatccccgacaaattctttcggggactttcctccccggtccccgacattttgctccccgaggctcggggagcaaccctaaattaaagtaggtaatcttctcaaaatattataattaataaaataaatatatatttttaatatcttactattattgtttaaatttatctaaaagactcaaattaaaattgcaatatttttcttcttttttaccttttcattaaaaatttaaaaaaaaaaaccccaaaataaaataccaacaaaaaaaaatattaaatgctaaacatttccaaccgcctaattatcattaatttgcacaatttgactaatttggcacaccgttttacgattggggcggtttcagtggccggtgggctccctttgagcagatacttgctgcccgccccggtcacaaaacccttcacgttcagattgttctttgttgtgaatggcacgccgtagagcggcttggagaatgccaactgaaaagaaaaatatgccaattaaattttatgctgggttaattagtgcctaattatgagccatgtaattatcattaaaggcgtatcaaatgtgacgtttaatgacaatttattaataatttaattatgctacaattacaggaaaaactgctatgctttatccatgaattagcgtctatttatgctgaacaatgtctgattatgctcatttagaggaaaaacactgatccattaattagcgtctaattaggatcaattagtagaaaaactgctacactcggctaattattgatttaattgcactcagaataacaatttaattaatgcctgatcatgatcatttagaggaaaaactgctaaggtgatccattaatgagcgtctaattatgcttaattaaggaaaaactgctaaggtgatccattaattagcgtctaatatgctcaattaaaggaaaaacggctagactgagacattaattagcgactaattactttcctaattagatggcctcagcctg

SEQ ID NO: 38072 - DNA, 1557 bp, Heterodera glycines
ggaacggattagcatcggggttacgagatagaaaattgtcctaaaaagagatagccatttttctgagaattaattcacaatttccgcaactcttgcggtaatggaaaaaattttgaagagtctctgtggaacggattagcatcggggttacgagatagaaaattgtcctaaaaagagatagccatttttctgagaattaattcccaatttccgcagctcttgcggtaatggaaaaattttgaagagtctctgtggaacggattagcatcggggttacgagatagaaaattgtcctaaaaagagatagccatttttctgagaattaattcacaatttccgcaactcttgcggtaatggaaaaaattttgaagaggctctgcggaacggattagcatcggggttacgagatagaaaattgtcctaaaaagagatagccatttttctgagaattaattcacaatttccgcagctcttgcggtaatggaaaaaattttgaagaggctctgcggaacggattagcatcggggttacgagatagaaaattgtcctaaaaagagatagccatttttctgagaattaattcacaatttccgcaactcttgcggtaatggaaaaaattttgaagaggctctgcggaacggattagcatcggggttacgagatagaaaattgtcctaaaaagagatagccatttttctgagaattaattcacaatttccgcagctcttgcggtaatggaaaaaattttgaagaggctctgcggaacggattagcatcggggttacgagatagaaaattgtcctaaaaagagatagccatttttctgagaattaattcacaatttccgcagctcttgcggtaatggaaaaatttggaagagtctctgtggaacggattagcatcgccccctcccccgcccttcaaaattttgaaaaaaaaataaaataataggagactcagaattttgaaaattttttataaaaactgatgacaagctaatgtgataaaacaggttaattcttttcctttcagtatccctgcaaagtttggggcgcttctgatcagtttctgaaaaaaaagttaagcctaaactttttggcctgtttaaaaaggaattaaaaatttttaaaaattttattcatctcccttttcgatagaaaaagcatcagagtgcctaaactaacatgtaaataaaatttggtgcgtttcagagcattttctgaaaaaatatttatgaaataaaaaaatcgattttttcaagtgtccgtttggggtactcaaacaattatggggagcaaaaatccaacgcagaattaaagtacagactatagggaagctattcccgaaggattcggtctccccataaatctgggcgcatcggttcggggggactgccccgaaaacaaaaaaatcgattttttcaagtgtccgtttggggtactcaaacaattatggggagcaaaaatccaacgcagaattaaagtacaggctatagggaagctattcccgaaggattaaggtctcccccccccccctgggaccgtccctgatatgcgg

SEQ ID NO: 38073 - DNA, 993 bp, Heterodera glycines
cgagttgacaaatgaaattcataaaaaatattttaaacatttcaacttttggcgcggccaattttggcctccgttataatagatgactttttgcctttttgtacgaagctcgaagtttcacccgtcctgctgaacgaaagttcagtagcaacaaaagagtgagtgccgaatgattcaattccaatcgggcacataaccccctgaacttcatgtacttgaaaaagcatatgttgcattggtaagtttgtattcaattttaaagtattttttaatatataaatttttgtcgttttacacgtttatttgaatttttaaatcctaatatttttgaaaaaataattggccactgtccgttttgcattggtctgctaacgtaccctaacgacctgtactccctcccccctctcccttttgcttttaacattaatttttatttgcactttttaagaatattaatgtgcctttggttagcttaaaaattaattttcaattttgcttttgctttcgtttcatttcacccatcgctcgcatttcgttaatctgatcagtgagtgatcactgatcagctccgctcatttgtcagtccgcttctcctcgcctcctcaatttgtggaagaaatgttgcctttcttcgtttttcttttcgcgaaaaatgggaatagcaaacgcaatcacagtttgatatgatggattatcagtgaaggaaagtcgaaattggaagagtgtgaagaatgggcgggggaagggattggcgatcggagtttggcgatggcattgcatcggacgaacgtaagcgaccccccccccctcccccaatttcgactcccccgtgtgccgatgcttttatcttcgctcatcttcgtcctaattccaaatgatctttcgttcgtcgctttttggtcatcccccccccctcccccgcatttgttttaatcattttattacttccattatgatcggttccattgcacacaaagaagaacggatgcacag

SEQ ID NO: 38074 - DNA, 1356 bp, Heterodera glycines
  unsure (1)..(1356): unsure at all n locations
atttattaattaaaattcggcaatagttaaaaatacagacgaaatgtanctaaaaattaaaatgttcgagaaaggtgagtttgctttttttgagcaatatgcaagataaatttataatcatttttcaatntatagcacaaatactttcttcaaataattaaaacaaattattaataattcgaaagtgaaacacgaaaagactaaaaataattacaaaataaataattaaacaaatactaatgctacggtactacctctaccgtaactctacacttcacatcaaatccgacaagaatgataaaaaaattatctggtaaaataaaaggcaaagaatacaaacaaaatataattaatattaacttatttatttcattgtagtcaattaatcaaaattaagtttgaaagaatcatgcaaatgttcagaaaaaggaattaaacgatattaaaaacaatatcattataacaaaaaaatatataataagtagggctggaaattttatgtaaatacatattttttcctctggcttctccatgctctaaatagcaggaaaaccactttcttttttgtgtttgcgaacaaaagttgggacttttattttcatatttttacatatttaggggtttttatacatatttgatacatattttggaattgtttcttatatattttcatttttttttacatattttgagatttttttacggaagtttttgggaattctcaaaaaaacacaaaatttcggcaaattttttgttaaattctccaaataataataatgttaaaattttcggaatgcctttgcgccacaactctgtcctaatattttctattatttacatgtctaataaacaaatcatatttttataattttatttaaatgaaaataaatttataaataaaattattaattttagtattaattctttttctaatttactttttttattttggtttaaatggcttaagtttgtattatttatactaaaaagttttcctaaaattaatatttaaattaaaatatttattaaattaatataattaacatatacgaaatattaaataatcaaaaaatttgagaaaattaattttttaaaattaggggccttaaaattttttaaaagggaattataaatgacaaaatataaaagaaatatgaaagacaaaatctttaaatgacctataaactgattatttatatattacatttcttttcatatttctgttgtctgtctcccccatcttatgtgaatatatattaaataatcctttactttgctgctatgcaaaattatttcacaaataatttaaatttaaatacaaataaataaaataaaaaaatgaatttatatttgagc

SEQ ID NO: 38075 - DNA, 737 bp, Heterodera glycines
accgggttttatgctacttattttgaaaagagcctctcttagccagaattcatggaaaccgtgaccggaagaattccgtttttcctttgagattggaatttttctgaaaatcggcagaagaggcctgaattctgttccggaaaaccttgccgggagattccgattgggaaaatcgtgactgaatttttcactacttattctgaaaacggccagaaatctccattattctgaaacggccagaaacctctagaattatatgaaaccgtgcccagaagaattctttttttcctttgagatggaatttttctgagaatggtcaggagtgtccagaattcttttccggaaaccttgaccggagttccaattttggaaaatcgtgacagggttttatgatactcattctgaaaaagggccttaaatctccagaattcttggaaaccgtgcccggaagaattcttttttatttattctgaaaaccgccagaaatctccaaaatccttggagaccgtgaccggaatctccagaattatatgaaaccgtgaccggaagaattctgtttttcctttacgatcggaatttttctgagaatggtcaggagtgtccagaattcttttccggaaaccttgaccggagttccaattttggaaaatcgtgacagggttttatgatactcattctgaaaaagggccttaaatctccagaattcttggaaaccgtgcccggaagaattctttttt

SEQ ID NO: 38076 - DNA, 1005 bp, Heterodera glycines
  unsure (1)..(1005): unsure at all n locations
acaaattttaatgaatttacataattttcatattttggcggttacgaaaatttgttaaaatcttaaaaaatattttctaatttttcagcctttggtacaaaaaaatttcgcgggcttcatttttatgaaacatttgctggaggttgagcagaaagtgcagagaattcgcaattcgataacgataattcccaagcaattttatgaccgttgtgtttcttttgagtcgattttagaatcaagttcgaaattaaattcttcattgattgcttgtgccgacagattctcggtaattaaatcaatcacaaaaaatgatgacgaattccgaatttaagactcaaatgccgagcccaccttcggaaatgttttacgaaattatccgtcagacggggcccttttctatgatgccaccgtatttggccttggatttgttgtttgtgttcgaaattggcaaaacgtttcccttctttcagcggcttagcatcagcgataaggtaaaaaataaattattttaaatatttttaaaaacattcccaataggtcggtgattgattgccaagttgaacaaaatggcttcacttaaaagcttttaacatgctctattagcattctgataacaatagagctgttgaatttatgactttaaatagccttaaaatgatttaaaaaagtacaccgaaaaattggacaacaatagaaataaaagaaataacataaatatttacatagaattgtcattatttcatgtatatactcgataccgattttgacttcgatactcgataccacacggaaaccccaaaaaattagaattttcttctctttcagcacaaaaaatcaccgattaagcactgtaaaaagcaccanattttcccaaaataagcatgaaaaagcacaaaaaaagcaaaatcatgggaaaaagcataaaaattaggggattacaggcacaaaaaattgaaaaaagacagcaaaaaaacgtttgtttgctccctgaatataaaaaccccc

SEQ ID NO: 38077 - DNA, 779 bp, Heterodera glycines
tctttagtcaaataaattcatagcattctgcattgacatataaaaaaatcgcttttcctttgtttttgagttcaaaaattatgtcaatttatcggagccgaagatttgcacagacttatgccaaccatgttgtgtgccttgatcattaaatcttgactataaaatgcgctgggtttttctgtgtagatttttttgcccctaaaatttctattttctttaatttgaaaataaaaagaaatggctattaaaaaagaatatataaaggcgattagtcagtgaacggcttttttatttaacagcacttaagtcagaaaaaactgacaactgcacggacgaataatgaaacggagataaaggagaaggtgcagacaacggaaaaaaggcaaaattaaaaaatataaaggcgaaatagcacagattgccagacagttagacaaattaatggcaaaacaaaaattaacatacaatcagagaagcaaacaaaaaggtgcagagaaagcacacaaagtcactttgcttgagggcacaaagaacgctttctctctccttattttctgctttgtacaatatttattaactagctgggttatcgccttaggcgcatataaatgtccaacattaaagatgaaaaagaatgccaagaagcgtagaaccaagtggagaatacagagcagggttgttccgggacgagaaaaatatccggattcgggtcgggtcggccgaaaaatcatcgggtcgagattcgggtttcgggacgagaaaaatgtcgggtttcgggt

SEQ ID NO: 38078 - DNA, 420 bp, Heterodera glycines
tttttgtcctcgtactgaaggcaaaaaaagggcttgagaatatcccccgcccataatgagggatagtacgaaaatattttacaagaatctgggaattgagtcccataccctaaacacccgaaaaatgtctccagtcggcacactcgctcaccgcccatcccccccccccccccgtcaccaacggcgagcagtctctgcagcagatccgcccgttcgtgcgttattcggctcgccaggcaaaccaatgccctgggcgagtgccgccgcaaatggcgcgggtggcaattgaaggcgggcaaagcgcaaagccgcgggtgcaattgtggcgtgggggtgccgagttttctgacggagaagggatttttgagattcgcggcgacggcatcggtcacctgtaaatcaggtcgagctgatcctcga

SEQ ID NO: 38079 - DNA, 1051 bp, Heterodera glycines
  unsure (1)..(1051): unsure at all n locations
taagaatataaatacatatgcagcagatgttttttgtcaatgaaaagaggagacacaaaatgagtcagtcaacattttgttgtttactttaaggtgaaaaagagggagttaattgcgaaggaagggaaaagggagaacaaaagtcaaaggcaaaagacaaagcaacaaatattctgtgcacaaatggccaattagtggggctgaggaagaaaagagaaggcgaagagcgatgctaatgttagctaaacgatggggggagagcattgggaatataaatgaatattgggaatataaatgaatatgtgtaatgagaggggggggggggcaatgagaaacggacgactaattacggcttttaaatgcttattcagcaggcggggggacagcaaacgacgacgaatgattgactgttggccgtagaataaataaatgagtgaaaaggtggagccatttaattaaccattcattttggttatgtaattaatgatgtttatgtatgtactaattaactctgaagctctgtgtgtttaacataaagaaatatgccaccgttgattttgaaattaagttttgaaatgtaccattaagcacaaaaatgcctaatttacaaaagaaaaaggaactcatcgctctgtgtaaggagtgagtgaattttggaatttggtggaataaatgacttttgcttttacacataatggagaatgtgtggtgcacttaattattgcataataaatggtttaatcgattggcatttgtcctctccgctaaattaatgaattaaaatgcgacggaatggatgagccgaaaatgaggtcattaatttccatctgccgctaatttcactcaaaaagattaagctcattcaataacccgctcttttgaattacgctttatgtaaattgttgataaaaaaaaattgaatttattcataaaaatggcggagaaatgcaaaggcaaaggcactaactgctgaagcgagggggaaaatgtgcgtgggatttggcgaggggggggggggacgattatttgtgagtggggngggggggggggg

SEQ ID NO: 38080 - DNA, 737 bp, Heterodera glycines
attgggagttgcaaatgttcagcgacttttcgagttgtctctcaaaagtgtggtgtgtcggatttcagaagagaatttgatgatattttagaatatcatgagaccagctggggatataccaatttcattgcatttgatgtgagtgccaattaaattttcctagaccaattaaggatataattaaggaattgatggatacaaacaagggcttttacgatcaaaatgaggacaaagtgactttggccatcgatttcacggtgaaagaagtaataatcgagacaaattacaaatccccaaaatgatctggcaaaatctcaattgaattatcatactatatggacctattttctatcatatttcttatttttgaattttttaaacttttggatgaagctgctttttgttaagcctcttcttcttgagtattgttatgtcccagagtttaatgctttaagccattttcaaataacgggaataaatttggacaacaacaaccttagagcattttgggtgggtcagtgcaattggttatttgggaaaggattgatgccaaagcaaagaacagcacgactgacccaccgcagacatctcgcaccgccgaaggggaaaatgggatggacttatatattggcacaatggggatggactttggataggatgatgggtaatgacggcaaaaacgcaaagggaacgagagagaaatggatggcatatgaaaccgatgaaaagtgtttcca

SEQ ID NO: 38081 - DNA, 1034 bp, Heterodera glycines
  unsure (1)..(1034): unsure at all n locations
tgacaactcattaaaaatcacatgaaaacgtagcttccctcccgtggtgaatgtataaaatagtaatgtagtaaaaattgcttatttcattagcgaaagtcgtaaaaaataatagatggtcaagagtaatattctggggatctgacatgcttaatttaccgttttcagaaagttggacaaacctatttgacttttagctttcttttggttgagtaagcagatagcgtttcagttgtaaatttgacgtgatttacgtgggaatgttagaatttatgttacttaattatgcattttcttttgtgaccgcgttccggcgacgctttctataaaaagcttttagaatgctaacattcgcagctacttaccaatgggttaactgaatccaaattcagtgacaactcattaaaaatcacatgaaaacgtagctttgaaaacgtgaatgtataaaatagtaatgtagtaaaaattgattatttcattagcgaaagtcgtaaaaaataatagatggtcaagagtaatattctggggatctgacatgcttaatttaccgttttcagaaagttggacaaacctatttgacttttagctttcttttggttgagtaagcagatagcgtttcagttgtaaatttggcgtgatttacgtgggaatgttagaatttatgttacttaattatgcattttcttttgtgaccgcgttccggcgacgctttctataaaaatcttttagaatgctaacattcgcagctacttaccaatgggttaactgaatccaaattcagtgacaactcattaaaaatcacatgaaaacgtagctttgaaaagtcgtgaatgtataaaatagtaatgtagtaaaaattgattatttcattagcgaaagtcgtaaaaaatatagatggtncagagtaatattctggggatctgacatgcttaatttaccgttttcagaaaagtggacaaccctatttgacttttagctttcttttggttgagtaagcagatagcgttttcagtgtaaatttgacgtgatttacg

SEQ ID NO: 38082 - DNA, 884 bp, Heterodera glycines
  unsure (1)..(884): unsure at all n locations
aatgaaaaatgcccaagctcctcgcttttctgaacaatgcctgcgcatgtggaagtgcagcccggagcgctcgcatgatggaagacatgccgcatgccttcagcatcctgtctcgagtcgccatccctaactaataatataangtcatatgtagttttcttgccttaattgncnggatgggataatggcacgcttcagttgttgaaggacttcgcgtaaatactttgacgctttaccaggcattaaggcttgcgctgcgacgaccatcgattgtttcacgtaacagccgatgacgaacacttgcgtccaaggcttgagatgggtgttgctttggattctccttgaccaatcgctcatctgattccgttttgactcgacatcaaaaatttttaaaaccttggtgccaaagacaaagcgctcctcggattgttttgccacgttagaaatgaacaggctcacaattttcttcatcatcgctctcaccgacgttcaaatcattgctggtcgatacaccttccatttgttgttctgcggccgtcctctcagcattcagtacgctgtcttcatttgttggatttatgggccgtttaattggcttttgcaaacactcaagaatttcgcgaacagttggcatttcttaatataatctgaatagaaaaaaaaacaaattctaaaaatttagcataaaaaatagaaagaataatgtatttgatatcagaacagattcgttttcctcttatttactattccttaatcattcttttttgatcagttagcgaaatgtcagttggcgaaatgaatgtttttggctgagttggcgaaatcaatgtttttggctgagttggcgaaatgaatgtttttggctgagttggcgaaatgaatgt

SEQ ID NO: 38083 - DNA, 822 bp, Heterodera glycines
attaaatttattaattatttcatcaatttccccataaaaacttacgcgagatatactcaggatttgtcctgagcttttcggcaatttcttccggcacttcctcgccacgaattgccttgaagacccagctgatcacagagttaacagtgaactctgtgacaagctcctgcgtgtccatccactcgctcaagacccaactatagtctttttgactatagcctgaatacattttattaagaattgtataaaattgttaaaaattaatttacctaaccactgaacatagaagatccgtcgtaattgcccatcctttttgtacgttgtcgtggccaaaatggcctgcacctcgtattttccctgcttagggttcttgcgaaccctaggcccaaatttttctgccggcgcgtccacgaacatttggccctaagaatttgcttttttttgtgcacgaattctataaattttaaatataacccacattttgtttccgttgttttttgttgaagttctgcctttgccttgcggtgtaggtcgatgtcgtgctcatcgcttcgtccgccgtcccgtttccgacactccccacatctgccgttgcattccccgcagtgtcagtgcccatcgcttcccgcacttttaatggatttgccgttgggttgtccaatacgatttgctgttggtcagaggattgcgctgagatgggctgaacaggttcagtattatttatggcattattttcatttgaattttcaattcgcttaccctttcgattgccattccgttggattcgtcgcaatccgacaaaaaggcgcggcgtggcttttt

SEQ ID NO: 38084 - DNA, 1578 bp, Heterodera glycines
  unsure (1)..(1578): unsure at all n locations
gtaaaaatcaccnatttgacacacaaaaaagaagactcttctgataggcgccagcagggaaatgaaaattgagaggcacttattatcccaaaaatgatcaaactcacgatttttaagcaaatttattaaaatgaaggaaaaaattaaaagaaaaaatgtgaaaaccatggaacacagggaattgaactaataacgaacggcatacacaaaaaattacagaaaattttagcagttgaaattgtacaaatttccaaaaatgctttgagttaaaaacatgcataataaatagtaaattttcaaatttatggcatttttgatgctgaactgcggggtcttgccggtctagtacgaaatcggcgcaagagtatcatctgtcggaggtttggtcctattgtgcgccaccggaaataattttgaaatttagtgtatttaattaatggcagtatttgttccaaagtggtgtttgataaattgtttgatcaacaattcactcattgaccccatctgttgccctgatcatgaatggttttcgccaaattgtgtgcaattaaccgaaggcggttgttatttttagaatcaaatgtggctgattttttcataactctttttaaacgactgttgtttgtttcattggtgtttaatgaacagagtgggagaaagattcaatttgatcgagtacaattaattaattaaccaattagtaattgagtaaaaaaataaataatttccatttgtatcgctcactcatcaactgctgattgaatcctttcagtttttagcgaacatttacctaataagtttttttcgtacgtcaatcatcgtcatgaactgctgctctttatgaacaataaattggccacttttttcactattattttacgctatttaagcactaaatttgcagagggagcgatcacttttcatttttccaattaaatttaatcagtgacaaaaatgctccacaaaagtgtgcttctgatcactttacttcttctgatcggtgctttcatgcaaataccaaccaccgatgcatggggtaattattttcattttaaataaatttaaatcgaaaaatcacacacaaaaaattcaggtggttggggcggtggcccgggatggggcggtggacgcggctggggaggcggacgaggctggggcggtggcccgggatggggcggtggacgcggttggggtggcggccctggatggggaggcggacgcggctggggatggggcaaaaaataaaagaaaaccaaaattaattccatcaaaataacctcatataataaactcatgtatttgcttttataattttttgaactcgaatattcgaagcaagtttgaaattttattagcattaaaaaacaaagtcagtagatatttatttataaaataaataaataattaattgaaaaaatcgattttacaatttcattgggacgtgaaaaaatgaaaataggcaacccatttcttttggtgctgggacgttagtcgaaaagccatcacatggaaaatttttgacagaacattattcataatttcgctagaagagatgcatacaaaaacgaaaatacgcga

SEQ ID NO: 38085 - DNA, 878 bp, Heterodera glycines
gtgcttttcgtgtgaatgttgattttccaactgagtcccctttgaaaccgccatccgtgacattcgcaaccaaaatttactcatcctaacatcgacgataagggccaagtctgtctcggcatcattctcgcggagaattggaagccggcaacgcgtgcagagcaagtgatgaacgcgctgctgtcgctgattgccgagccggaaattgctcatccgttgcgctccgatcttgccgaggaattccaacgggacaagaagaagttcttcaaaaatgcaggtggagtgtcttgctattttaatttttcttacaattaattttagaagactacacgaaaaagtatgccgaacgtcgcgactgagtttgtttggacagatggagttatttgtgcatgaaagtcccgctggtatctacgaataatctctcgccactcaaattgttcaatttataaattattgtgttttgtctgtcgttgattattttaactttgtatcgatttaaacttgaagaaaatatattaataaggattctttgttaggatgtggaattccagaccattttgttttttgttcgtttgtcagtcgagtttttttttttagtttttcaaaattttcttagggcttacaactgatcgatgtcaagtgttactttgctttttctttggtttattttgttgctaattgatgcggaaattgacgtggacctaaggtgaggttaaattcatttttaattagttttgttcggtttagcgttgacaaaactaattggatcgatcccagtgacccgttttcaagctccgccctctttagaagtcatctggtcgagccgaacaaatgcgaccctgaccaaaatttgcagaaatgcattcaagtaattacta

SEQ ID NO: 38086 - DNA, 1079 bp, Heterodera glycines
  unsure (1)..(1079): unsure at all n locations
aaatgctcttcgagcatgatagggaagggcggtgcgcaaattagaccctttttatttttgagggnaatttttaaatttatactctatcccagaaaaaatgtctatctctttttttgataaattttatacacatacaaatgctctcgagcatgatagggagggcggtgcgcaatagaccttttatttttgagggaatttttaaatttatactctatcccagaaaaatggctatctctttttttgataaattttatacacacacaaaagcgctcgagcatgagacggagggctgtgcacaatcgccattttatttcacagaggatttttatatttagaggttatcccagaaaaatggatatctctttttttgataaattttatacacatacaaaagctctcgagcatgatagggagggcggtgcgcaatagaccttttatttttgagggaatttttaaatttagactctatcccagaaaaatgtctatctctttttttgagaaattttatacctcacaaaagcgcttgagcatgagacggagggcggtgcacaatcgccattttatttcacagaggatttttatatttagaggttatcccagaaaaatggctatctctttttttgataaattttatacacatacaaatgctctcgagcatgatagggagggcggtgcgcaatagaccttttatttttgagggaatttttaaatttatactctatcccagaaaaatggctatctctttttttgagaaattttatacctcacaaaagcgcttgcgtatgagacggagggctgtgcacaatcgccattttatttcacagaggatttttatatttagaggttatcccagaaaaatggatatctctttttttgataaattttatacacatacaaatgctctcgagcatgatagggagggcggtgcgcaatagaccttttatttttgagggaatttttaaatttatactctatcccagaaaaatggctatctctattttttgataaattttatacacatacaaatgctctcgagcaaaagagggagggcggtgcgcaatagaccttttatttttgag

SEQ ID NO: 38087 - DNA, 1532 bp, Heterodera glycines
atttggtgcaactaatgttaaaatgaaaaaaacaattattttgcttattgcgctaaaaaccagcgcactctcgactacggcggccaataggtggggcgagactacgggctccggaagaaatccgcgcgtgatccgcagcaggttcgacttcatccccaattattagacttaacttgtcaagagctttcgaatcatgccaaaattgctgaaaatttttatttaaaatgtttttctggttgattttggttcaatttttcgtgatttaaaccgattaaaaaaccgttttttattttccgcgcctagggactattattatgatgcttagaggtcattagagattgattgcaactagttttaggcggtttttagcggaccaattctatttgtttagaaattatttgcggcaaaaagaagtgtaaataaaaaagtgaagaatttattacattaaaaaaataacagaaaaaaggattcacaaaatatgaattacaaacagtataaaacaaaaaaaggcaggtactgtaattgtgctactatcgactgtattcccaaagtcaaagggcattatttgaacgcgtttgctgcctttctgctgatctattctacggtgtctcagtgctttacgttagtgtatacggtaataaatggtcgtttggcatactgtaactctctctctctctcattctctttctctctctctctcatttggcgtttcgtcctccccacatttcttcactatgcttcgactttgcttttggaaatggacttcttgtcctcctcctcgtccttcaccagcggaatgccatatcgaatcaattcgcagcccaactcaaacaaatattcgtaacactccaacctgtgcagaatgccaatgtttccaaatttaaataaaaatccaattttaaaaaggcattcccacatcattttggtgcgttgccaagtgttgctgccgaacgcaaaaaagccatggccgcggacaagaacaccactcgcctcggggaacttttgcagaactttcatcagctgaggctgaaaaagcttaaccaacggctaattaagctaacattaaaaaaacaatgaaataatgctaacaataaaattaaatttgaatttccaattgaattgaaattggcacggcttacacaaagaacgaattcgctgatttcagtctcgatgatcggcaccacaacagtgtcaatgttttccattctgcgctttgtctgacgattctcaatgccctgaaacctttcaattatgctaatttgactcccttttcatcacttggatcatttcttggcccgaaatcataaacacgtcgccggtgatcagttgcgtgatcaaattggcccattttgtgtgcgtgtgaatgatgcagaccaaatctgaatgaaaagtacgaatttacttttggataggtggacggtgaacttaaacgttggcattttgaataagaatttgtgccgttctgtttccaacccaccggggttatcgcgcagcaaataaaacggtgccgtcggcgttctgtccgggtctga

SEQ ID NO: 38088 - DNA, 895 bp, Heterodera glycines
ctcccctattctcttccccccctctctctcccttcccattaagggccctattttatgcatgggctaggtgggaacacctttgacactttctcacataatatttcgaaaagaaattatttgccggaggcggggggggggggaccggaaagaaaaaagagagaaattcaccgacacaaaaaggattacaggatgagaagaaaaaggataaaggaatgaatgcccgggagggtcaaagggaaaaatgccaaaaatagccaaagggcggcacaacgccaacgcattgagcacataaataatatgcctcaaagaacagctgctgccacttgtgctgcttttgtctgtttgtttttgctattcccgagaaaaaagaagtgatggcggacataaaaataagacaaaaaagggaaacgaaatttgattaatgggcaaattatgagaaaaaaaaacatgcacaaaaagcgaaaaaaataacaaactctcggccaaatgtattcacacgcaatgccaaaaaaggaaacattccccgcgggcattagaaaataaaaaataataattaattgcatccatttttggcacataataaatgtggcggaaatttactgctaattttgcagaaaaagggacaaacagaaagacaaaaagaatttataattgttggatctattaacacccaaatgttccgttcaggtcaaaaaagtgaagggaaagtgcgtccgtttgcacggcggccaaagcgcgtgtcaaagtgcggattatttggacccggtgaacgaggactgcatgttcagctgaggaggcacagcacacagcacaacagcagcagaaagcatcaatccctaaataagcatgcgtaaaggggtcaattaataattgaacaatttgagtaattacataa

SEQ ID NO: 38089 - DNA, 1132 bp, Heterodera glycines
ctaaagtacaaatgccataaataaataaatattttcggccctttaaagtacaaatgccataaataaataaatattttggcaccctaaagtacaaatgccataaataaataaatattttggcaccctaaagtacaaatgccataaataaataaatattttggcaccctaaagtacaaatgccataaataaataaatattttggcaccctaaagtacaaatgccataaataaataaatattttggcaccctaaagtacaaatgccataaataaataaatattttggcaccctaaagtacaaatgccataaataaataaatattttggcaccctaaagtacaaatgccataaataaataaatattttggcaccctaaagtacaaatgccataaataaataaatattttggcaccctaaagtacaaatgccataaataaataaatattttggcaccctaaagtacaaatgccataaataaataaatattttggcaccctaaagtacaaatgccataaataaataaatattttggcaccctaaagtacaaatgccataaataaataaatattttggcaccctaaagtacaaatgccaatgtgattagtagggctgccaattatatggaaatccatattttttcctggactgcggtgagcctgaaacgcacgaaaaacatgtttttagcttagtttgaagcttctaagatggatttctatatccatattttccatatttttttcatatttcgcgatttatgtccatatttgtccatattgaataaattttaatttcttaaaaatcataaatttaggtcaaaaataagcaaaaaaagtagtttctagttgattttttgctgaaaatgagtaaattttagatttatcatttttttcttctaaaatgatttttaataccatatttagccatttttaaaagttttactttaatttagcgaatttgaaggaattttgaaaatttaaatgcaatttcaaccaataaatttgaagaaatttttaaactcaattttgaaaaatttatatccatattttgagatttttgccattttatgtccatatttcgtgatttttggtccatattttatggccatatttcgcgattttatatcaatatttttgg

SEQ ID NO: 38090 - DNA, 545 bp, Heterodera glycines
atttctaaggctgcttgagagagaagatgctaggcatgagcgctacaaattaaggaatattaattagtttattggtacataattaatgctcattggtttgaaaaatctaaaatagcttaaattaagttattaaaggcaaaagaattagttaattaacattcattaacaaattagtttttaaatcgaattcagtttcagaaatgtgcaaaaagaaagtgacgaggagcaacactgaaaagaaaagaaagaaaactatgaaaggggaaaatgaaatgagaaaattcactgaaaaaattttaatttttatttattttagagtgccacgggaccgggaccgggccgggaattcccggtcatccgaggtcccggttcccggtcccggattttgaaacgctcaggtcccggtcccggtcccggtagggcaaccgggaaccgggaaaaacaatcactggtaagaatgggggtctgagtgaaaaattagtgaagaaaattagagttaaaaggaaaaatttttttaaatatattaatatattgtttaaaagtaa

SEQ ID NO: 38091 - DNA, 1690 bp, Heterodera glycines
agagatgcgccgtgattcacggtcacggtcacggttaccgtgaatttcacgggtttttttcactcacggtcacgattcacggtaccaattcaaggttattccgtgaaaaatttacactggataaaattgaaaatttacgaattacatattgttttcatagagaaatttggtcattttttgggcaaagtttgctaagaaacagagcaaaattatcttttttgaacaaaaccaactaccaatattgtacgaaaaacaaataaaaagcaaagtttcaaggatgaccccagttaaataaaaaactcattaaaatttttttaaattcgctcaaataaagttaatttgggcaaaatcagtttaaacaaatcccattttgcaaatttacccttgaaatattttcagaatattttgggcggacccccgcgctgcaccaatccggacgacccactcggcttcagcaatattctgacacgcgttgagcaaatcttccaaaatcggcaaaggagtgccggctttagtgagggatgagaaggcaatcagcggcagaggacatttgcgagccgacatttgggcaccgagaaattttaaatgccattaatttgaaggtgcctgacggagcaattaaattttaattgtcttattaatcagtgtatttaatattctcagaatttattttgtattatgaattaaaacaataatgctaattaaagttttttggcatctaaatgttgacaaaaacgcgttaaggacgaccatgataaaaaaaaattacgtgaaatgtaaaattaattttgagaaattaattcaaatcattgtttaatctgacaaacatatatcttatgtagtcctttttattaatcagagactttgtttattcacataaaaaatgttttctgttcattaagcctttctccgggaaaatggccgtccgggaggagcgtgccatttgcaaaaaggaatttcggcacttttgtatatatctccggactctctgaagataataaaaaatattatgtagcaatattcggtaattgtgcaccttttgattaaatttttgtcatttttggttgtatttgaaaaaagttacaacaaaaaatttgttttgtcaccctgtaataccaaaataataggtttattagaaatctaccaaatagctcaaatttcaaatatcctcattcttaaaatatttgtgtttttaatctaattaaaaatatgaaataaaagtttgtaaatatatatatatatatatatatcgtatattttccagtttatacatatgctaatatttttaagattttttttagctaaagcataagatggggaaatcattcataatcaattcctctttctacatattgtcaaatattgattccattattattatattttatttatattttaataaaaaaattaacactaacgaattttcattcttattgcatatatttcttttttaatataaaatctttctgaatggttgcatttgttggactacaaccgcgacatgtttatgtcgcttttttaattgtttttgtgcagttgttcttgccaatggtgtgccaccgtcggcttgtcgtcgacgctggcaaagcaaattgtggcgacgatggcacggggccaaaagctacggatgctaacgataataggttatcaacagcaaaacaagaaacctttggccgaactgaggacctgc

SEQ ID NO: 38092 - DNA, 492 bp, Heterodera glycines
ctacacaatacagtacgtgcgtcttttcatgtcccacttttgtaccttctctccttttctttttgtctgtatttgttgttttttaaataattaattaactcttccgtcgttgactttcattttaatacgtttgtaagaataattaaaataggaaaaaatcattaattaggacaattaattgtgtgaaaagtgcatagaattgaacagtcatcttcttccgatcattcattcgttttctgtttttttcgttttcccgttgattttaattcccccccccctcaatttgtgctgttttttgagtgattaattggttaaaggatggaaaagtgatttggaaattcaatattagtacaattgagcagttgcaaatgttcaaatacaattggaaattggcggtgccattggcagccgaaaacggagggaaatggcacaatcgaaagggaaaattggcggaattttgattatggaaagcaaacattactttgaaataag

SEQ ID NO: 38093 - DNA, 994 bp, Heterodera glycines
ttaacttgaatatttaaattaagtattataaataatttctcctaagtactttcatctttttgtctgaccagtttctggcttttgtaggcgccaatatagttttttttggcatttaggctaatttaacaccaattcaattaagtcgaaccttaaaaaattaaaatcataaataatttggatgataatttattgtatttatttatgcattctttcttatataatttgcttcaattaaaaatttgttttttacaaaaaatttgacatttaataaagaagagcttttgtattcaattattaatttttattttattatataaaataatcttatatattaatttttttattttttggaaaaatgtttaggaaaattttcttaaattagtttatattgaaaatttcgaaatcttctttattagatgaaatacacttctaaatcagattttaaattaatttacaaaagtttttaaataataaacaataaataggttgaaaataaaaatttaattctaaggattcgattattattattttttaatattttgaaaaaaaattacatttttttatttttacatttttttatttataaatcataaaaaatatggtcctttcttgtcgaataaaaagatctacttcagaatttagtgttaatactcaaaataataatttttttattactgaattagtgatattcagaaaaatataataagatttatttttttttaaataatcaaaaaatatatattaaaattttaaattatttaattattgaattttttcattttcattcatttatttattccttaattaatttattaaataaatagttaatttcattttatttattttttatataattcttgacatagtgctaattttttttgtttcgtagcttaacgatgttttactttgtataaatttttaatttgtactttttattttcctttattccgttttatatatttaatggtactttataattgaaaaatatattact

SEQ ID NO: 38094 - DNA, 1485 bp, Heterodera glycines
tgcttgatcgattttttctgccttttttccaaccacgttaaattggaaattggcttactaatttttctcggattttttatggtcgaaaatgaaagctgacacaacaaagacaaactttttctgtaaattagaccagcagaatccgaatatgtcttaaatctgacctatctttgctacttgagcttgtagtgcttcaattccatgcatgaagttggagctgtacaggttcagtgagaattcagagatcaaatctaaggctatgttcgaactcagcgtggtcggtttaactagttcaattaaattcggaatttccaagacccctattaaagaattttgttatttgatggttttgaaaaatgccgtttctggaaaccactttcagactcggcccccccccctcaataattcaatttttatgaaataaaactttatattttagtattcttatagtactaactttgctctatttaatcactatttctcagcttctgtatctctcttcgttttctcaaaatcagccaccaaaaatacctacctcgaaaatgaccatttttgcttacctaattagctctaacttcttaaatacgtttccattgggattgatcttttacctgaaaaatggcaacacatcattgatatgatttgaatttataacattatttccaaaaattttacaaaataattattgttttaaatcaaagtgactcagaaccggcaaatgtatgtgaaaaaaaattacaaataaaaaacactttaatttttacatatttaatttaaggattctgagtttttgcgaatagcttagactcagaaaaagacaataaaattttaataataaatatttatcataataatatggaatatgtcctgcaaaaaaatactaaattaagatatttaaataaataaaattaatttaatagatccttgttaaattaaaatatgaaaaattacaatattttttcgataaaaattttcatgaaatataaatataaaacagctattaagggcccgatggacaaagcaaaacactaagtccgacaagcatggattggctacacgattttatatgtaattcagaatgataaaaaaactaaaactaattgagtgtctctgattatgtttaaattgccagttgggccttcggcaagccattaataaatttatattattaatttagcgaagaaaataaatatatttgttttacattttttgtttgtttgtgttgttatgcgccttttaagttaggtgtttctacagttgggccgaaagggaccgtacagacgagttctgtccgtaaattctggacgcaaaaaaattttcctcgaataaaatgctattaaattttcataaaattggattaattcgaaatattccacttcatcaacaatatcaaaaaaaatctctacaaagcatatttagagtattgtgccgcaaaatatgaaatggaattattttcaaataattttagaacccaatttatctgca

SEQ ID NO: 38095 - DNA, 1278 bp, Heterodera glycines
  unsure (1)..(1278): unsure at all n locations
attcgaaaaatgccattttttgatggcatttctccttttaaaaaacgcattagccatccatcaatcaggcggntcgctttttttttcgttcgttctccgaatttttctctctttttctcctcaaaaagcaatctctgctcctcctctactccaattcaaatgtttgtttgtttgttttttcaccattttcagccaaattattcagcacagagttttattttatttctttttgtttggaattttcgtttcttttatttaattaaatttatttttatatatacacttatttgtttgttttttgtgttttgttttgttttgtcctccttttgcccaatttcctttctctcctcccaattttatgatgagtgttcgttcattattaaatcataagccattccattagaattctattttaaaattcgcattacaaacaaaatttttaaaaaatcgaatttttttttttggaaaatctccaatgggttgattatacgaaaactcgaaaaaaatttttttaatgtacataaccctctagaaaattgtttgtgtaatgtcaaaccttctcccctccccccacacttcctccttattttgtggaaatctcgactcttccaaagcccaaaaaatttaaaaattacaaattttcttcccccccctaaggggcattcaattctctttcttctctttctctgttgttttctctccaagcgtgtctgacaaattgttcaaaaatcgacaaattacattatacaatattaattattattttattaatttattctcttcttcccaggctttgtctcccggccagaaaagtccccactcatccgaatcccatccgaaaatcctctcaatgccgaattacgatgtatttcatgtttcattattttttcttaattttaacagatttaactttaaacaaattattattttcaaataataataacacatttatttcaaagaccgaatacacacacacacacaaaatcattgattgatcagagaaacacagcattttgatttaaaaaatatttctatatttaaatatttcattttttgtttcaatccctctcactctccattttaaacgagctattttttcttgtgtttactttatttttcgttcgcctctttcctctctaactttttatgataattattaacttttttattntattttttaaatttgaactttaattattttatttttggtcactanatctaaataaatttattttttatttcgacaaacatagataaaaaaaataaattaaaaaaaaa

SEQ ID NO: 38096 - DNA, 1048 bp, Heterodera glycines
gtcgccaattttccatccgtcgatttcgactcgtacgctggcaatggcattcagctgctcgtcggtcatttcaatggcaatttgcccgatgaaaagcgctcgttggtggccaatctcagtttgggttgggcttttcttttggaaatgtgttcattgatgctattcgttggaagaggaaatcaatgccaatggattggcaccgcgcgaaggcgccggagaaggcggaaaagcggtgccattgacggaggaggaggagaggagggcacaacgcacgtttggcatcaatcaggcgagaacaaagagcatgggcaggcagtgatcataaggcattcagttcaatctgatggcgagtgatcggatgtcgttgcgccgatcactgcccgacgttcggcgaaggcaatgccgccaaaagaaataccctccggcggacaaattgccgaatacaagcggtagggagggggagagggaggctgagttgggcattgggttgctgaaaatgctgatttttacttgcccagtgatcattgtcttccacaacgaagttggtctctgtttgccattttccattcaattatcatcctcccctcgaggccttttccacccttgcgcgaacaattaccaggtcagttgcaacacttgtccattaatgactaatgatgatgatcaagcactatttgctaattaccctcccttcccttcccctgaagtgtggtctcccactcgcctccttcgcttgtccatgaactgattctcgtcgacgatttctcagccagaagtttgtttcttattctcttctctctctctctccctctcgcactctctctatttctcttccttccccctctctccttctctccccctctctctcagtctatctccccttcattttccctttatcttgtctcagaatttctccgtactgaattggaacagtttctgaagcgtctttcgattcggactaaattgatcagagccaagaagcgtgttgggctgatccgtgctcgtctggtaacccttaaaattctctctgtcccctttactgcccccc

SEQ ID NO: 38097 - DNA, 550 bp, Heterodera glycines
gtcacattgacaattttgaaaaaataaaattcatttattaccccaacccctggtttattttatgaatattaaaaaagagaatataatttgcgttatattatagacataaaagaagaaaaaacattaaaataatattaaagcaaatgacgatgattagaaaaaaacacttatataattgcgataatagagtagagcggtaccagtacaggtaaaggtacttaattattggtaccgttttttgatgaaaagctgttctgaaaatcgccctatttcaaagtcaaaatataatgtaattaaacatatatgaaaaactcatttctaacgtgaaagataataatctaggcaccatgaaatgaaaaataatgcaaatttaaacagcaatttaaagcaaatcattaagaaataaatacaaatattaattaatttattgttaagcattttagttgtttttcatttgaaaaagttaaaacaaaacaattcaaaaaaaacaatttcttggatatcagatcagtgtaaacaaaaatattaattcaaagtgaatttaaaaaag

SEQ ID NO: 38098 - DNA, 913 bp, Heterodera glycines
tggcgcctatttttgcaacaattcttcgagccctttgctttttttttaaaaattaaaatccgtgcccaaaattgaaaatacaaaattttcttcgagtgcataaacttttactgtcaccatttcattttgttaatttctaatgctgtcttattatttcactgaattcttatgtcgattggttatcattttttgggtgtttatttattggttttttaatttttttttatttttgcataaaaaatcctatgacaaaacaccaacaaaaattacgaaagatcatacaagagttcggggaaaaattgcgtgaacgtgttaacaaaaaaagtgatagggattcctgaacggcattctagccttttttctgataccgctaaatcccgtccattttaacgggaatcttgtctggaaacatgaataattttcgaataaaaaaaagttttttttttgcaaaaattgaattaatttctcatgcaaaaattaaaattaaaaattttttttatgaaaatatgtagcaaaaaaaaaattacaaaaaaagcagactcactcaacatttcaaccgatcaaaaaattgttttttatgtaatttttgcaaaaacgtcgggttatcccttgcaaaatttgttctgagagatttacaatgaattttcagcgaaaacgatatttgttaaaaaaaggaagctatttataataaaaagtttatatggccaacgcaaacagaaacaatttgtgaaggaattgggcatttctgaagtgacatttttcaaatggaaaaaagaattaatggcaaattaccataagaatcacagtaagaaattttgtaatttatttatttaaattattattatttttttagtgaaaataaatattccaatgaggacaaaccaaaaaagatgaagcaatattttgaaatcaa

SEQ ID NO: 38099 - DNA, 770 bp, Heterodera glycines
tggcaagaatttcttattttcgacggcagcaatattggcaaggtcggttcctgtaacaaatattctatcaggcgaatttcaattatgaagagatgtattctcgttacttaatcgggacgtattcacagtttttttttaatgacagttttatcgatcaataaacaattgaataaaaaaacaaaaagaatgttagggaatgtttcataatttgtgagttgattttgaagttaaacaaatttttgaaaaaattaccgattcccgcgtgtagaaataggaaaaatatcatccttgaatgatggagataatgaagtcatattgtaatttaaaaataaatttagtttaaattaattaatcttgttattctcttttcttctttaaagcgtatttgttagagccgaagccgttcccgcccccccccccgcccttcaaaattttgaaaaaaaaataaaataataggagactcagaattttgaaaattttttataaaaactgatgacaagctaatgtgataaaacaggttaattcttttcctttcagtatccctgcaaagtttggggcgcttctgataagtttctgaaaaaaaagttaagcctaaactttttggcctgtttaaaaaggaattaaaaatttttaaaaatttattcatctccctttttgatagaaaaagcatcagagtgcctaaactagcatgtaaataaaatttggtgcgtttcacaagctttttctgaaaaaaatatttatgaattaattatgcaaaaaacaaataaaaa

SEQ ID NO: 38100 - DNA, 1036 bp, Heterodera glycines
ttttgagaaattttatccgttccaaaatcccttggagcctgataggaaggggcggggcccaatccccatttaatttttcggagaattttttaaatttttttttatcccagaaaaaatgctatttttttttttgaggaaattttattcgttacaaaagcgctcgagcgtgagagggagggcggtgcgcaatcgccatttaatttctcagagaatttttaaatttatcttatatccaagaaaaatgactatctcttattttgagaaattttatacgttacaaatgctctcgagcatgataggaagtgcggtgcgcaatcgcaatttaatttctcagagaatttttaaatttattttatatccaagaaaaatgactatctcttattttgagaaattttatacgttacaaatgctctcgagcatgataggaggggcggtgcgcaatcgccatttaatttctcagagaatttttaaatttatcttatatccaagaaaaatgactatctcttattttgagaaattttatacgttacaaaagcgctcgagcgtgagagggagggcggtgcgcaatcgccatttaatttctcagagaatttttaaatttatcttatatccaagaaaaatgactatctcttattttgagaaattttatacgttacaaatgctctcgagcatgataggaagtgcggtgcgcaatcgcaatttaatttcacagagaatttttaaatttatcttatatccaagaaaaatgactatctcttattttgagaaattttatacgttacaaatgctctcgagcatgataggaagtgcggtgcgcaatcgccatttaatttctcagagaatttttaaatttatcttatatccaagaaaaatgactatctcttattttgagaaattttatacgttacaaatgctctcgagcatgataggaggggcggtgcgcaatcgccatttaatttctcagagaatttttaaatttatcttatatccatagaaaaatgactatctcttattttgagaaattttatacgttaca

SEQ ID NO: 38101 - DNA, 1067 bp, Heterodera glycines
cccccccccccaactaaatgtaactttttcatcaaatgaattctgtggtcgtaaaaacggacaaaaagcaaaattgtaacgacaaatgaatgaattacgcaaagcgatttattttgaaaaacaaaaaatcttttgggcctttttgaaaaaaaaaattgtgaaaattttgcgctttcaccggttgaataaggcgtgtcaaagcaataaaggcattcgtccttgtacacaagctcagcgcggtctggacccctcaaattggtcgcctcttcactcaaatatgtttgcagtaatttatgtgccgctgctgcttcatccatttttagtaataaacaaaagaatatagggcgtttctcttaaaatttgaaatatgtagtaggggtcggggtccttttggcgccagcgcgagttttttgattataactttttttctttttattaaattttcaaattaagaacatcaaggccaaaaaataagagaggcgagcagacgttgtgtgagagaaaaatagtgctataaattaagaactgctgcattggaagagtcagagaagggaccacaaagtgctcgcacagcatcaaatattttcttcattttaggcgtcattttcccccactgcacctctttcttcggtttaattgcccaagtttgaggtacttggcgtatcctgcccataatatctgtggcatggaataaattttgggactgcgctgcctgcctaacggcggtgcttaaaatcaggaaaaatgcatctgttattttggtctttttaattttgtttttaaaatcaaatttgtcagaaaacagaatttattcaaaatttttgaggtgatacattaaatgaaaaaattcataaaaaaaatttaaaaagagattatttgttggatttcctttatttttttaaatcgaacatttctttttatcagaatttaatttttataacatttaaattttgattttgacataatttataacatcaatgatgaacaatttagaaactttttttttctaaaataaaccttaaaatcaaccaaattttcgcagaaattgttttttttaatccactaat

SEQ ID NO: 38102 - DNA, 892 bp, Heterodera glycines
ttttaatgttgtgggacaattagagcgatctgaggggggggggggggggtggtgatttaaaatccagggagggtcctaggagagaggaggtacgcgagaccggtccagcgccgttttcgtacggccacaagtttttggctataagtttttttctttgccaatcaaatccaacaattttggtatatcgatagccctgtgttgtgggtgctttgtctgtgggccctttgtctgggagccttttgtctttgttggtcctttatctgtcgatcctttgttactgtagcccgaaatcctaattgggcgaagaaatatggtggccgctttttagaatttcatcattttttagagtcccattttttctacgctgctttcgaaaattccgtctgcacagattatgtgacggagaaattttggatggcattgcgcaatttgattgtgccaattgtgttaagccgaaaagtgatggaagaggcgggcattccgaatggcacttttattgcggctgatgattttgacaatgtgcaagcattggccgaccatttgaaggcattacaaatggacacagacaaatacatggggtaattagtgacaaaaaagattgacacattggggataattattggaaatgattaataatttgggataattaataggaaatgattggcaaatacatggggtaattagtaataaaatgattgacaaatggggatgggaaatgattgacaaatacatggggtaattaatgaaaagattgacacattggcgataattaatcggaaataattataatttgagataattaatgggtaatgattataattagggttaattaatgtgtaattattgacaaatgaggataataatggaaatgaatggtgttttcttaattgca

SEQ ID NO: 38103 - DNA, 1243 bp, Heterodera glycines
  unsure (1)..(1243): unsure at all n locations
acgccctgccgacatcgaactcaatcagctcgacttttttttgttttggttttgaacaaaacaattttgattgttcaacctttcagttgttgttcatcaattgttaatcgtcgtgagcagtgagcatcaaaaaaaaaatggccgaagcagcaattcaccaactgtccgacgtgttccagcagttcttgactgctcagcaagcaaacgcggcagcaccagcacaaccgactccaatgccaaatttggcaaatttcgactgttttggtcttggtgaccatggcgaaagcgacatcgagggttggctggaacgcttcgcccttgcgcttgactgctcaacaccgaaccttcaggacgaattgaaggttaagctcttgctgacaaagctaagcgaatcggcctacagcgagtacaccaaacattgtttaccgaaaaagccaacagagtttgactttggcaaaacttccgaaatgctgaaaagcttattcgcgaagcacaaatcagtttggatcaaccgatatgagtgcttaaaggctgaaaagcaagacgaggaggaatttcgcggcttcatcaaccgccacaaaaggctgttaagcgattttgagtttaagaaactcaacgaagagcagttcaactgcttgatgctcctcgtggcgcttaaatcgccgaaggatgctgaattgcgaaagcgcatactgtcaaagttggctgccgacggtgacagagcaacatatgaaagtgttgttaacgacttacaaatgtttctgtcgaccatatcggaggcaaaagtaatggagagaccatcgaactccaatattttggctgtaaagcgcagccagcaaccgatgatgccatcatcgtcgccctgaggagtaggcagcgggggggagaagagaggaccacattaaaggcggaagaattgggcggtggtggcacagagcaaagcaaaaacaaagcggcagctataaaacaaaaagtgcgttgggatggaaaaacattgcctcaggggacactgggggatgaccaccaattgcaccacgctggctgctgaaatgggtatttgtggaaattttatagtgagcaaagtgtggtgcctggggaaatttgggcggagggacggcttttaaaaaaaaagtggcaataaaaacaaaaaaattaattaatgaaagaaatgataaaaaacgcaaaacaacaacaaacgtaattattattgttattgaagcctgctttttattccgnagaacct

SEQ ID NO: 38104 - DNA, 1190 bp, Heterodera glycines
gtgattgaatgtccaattcttatgccaaactattcgtttttaaaaattagaatcaataaatttctgatcagactccgattaaaattttggaatttaatttcatcgatatatacaaaaattctcatttattcagaaaatctaattataataaatcttgatcagaaccgaaattcattgttacttacttgaattaaggatggcctcattttgtacagtgttcgaatttcattggtactctcatgtccaatgcatcttcaggtaaaaataaaaatttatattattaataaatttatttttaaataaagtactacccaatggatgtgcaaacttgcctgatcgatttggcatcttatgcatacactgactcggacattggtaatctttcttaataggatctaataattcatttttatcctgtcttcattatttaattagctacatcaatcagggattcctagaaattccgatttacgatagttttggggttgaattccgattcataaattggctttggcatctctattgaaatccttccttccgtgcttttgtagacctcttattcatgagatttatccagttctcaaatgagacccgctttcgtctacttttcgtatttatacatagaagtgatccaaaaaataataaaatttaaaagtaattcggacaattttctccatattttcgaaaatcttttccggaatagaattgctgtcacaataccaaattatgctttttagaatatcgctggaagcaacaagaccccgttcagcttaaggacggacttgagtgagtttggaataaataagtgtttatttttaaatatttttttcaccaattttcaggtcatctttgccgagctttcagctgacgaacgtgtccacaacctcgtgcacttcaaagacaaatacgggcacatactcgtaaacatattaaactattatttaattaaaacccgaccatttgtgaaatgataaaattatagccgcaatacattcccccaatcccaccccacctcttgaattacttagcccagctatttgaaaataaatttatatttttattggaaaaaactaacaaataaaatttagaaataaaaaaaaattcagcttttcaatgtttttggtggaatgccatgatcacatgaacttattagtaaacctcaaaaatagttaatttgagtttttaaatat

SEQ ID NO: 38105 - DNA, 755 bp, Heterodera glycines
acggaaaaggtaatccatcgggtttttgtcccttaattccttcacttccctctacttaaaaattaccaataaaataacaaataattattatgctaacaaaacttaaaaaaatataaattaaataagccagaggcactgaatttaaatacagtatcgaattccccgcagtgattgtgacaccagagcgctaatttcctgaagtggtagaggattcaaattgattggacatgataaacacagattcgtttatgcaaatccaaatatctttagtttaatatgaagcatatttaaaaatgctaaattattgctacacatgtcagtccctaataagtttgaaaaggtatgaaaaaaaattaaataaaaatgaaataacaaaattataatataaacgctgtttaaattgatgtacatataacatataagacgttcagtacataaatttatgtaaattttaacatttatttaaaaaatatatttaaattatctaaccccgctagtttacgatgaaaaatgagctaactttaattaaatttattatttaatttatttaaaaatatttggcattctgtcttagaaaaattttcaaaaaaataataaaatcccgcataatcccgcacaaaaaatcaaatttgcggatcccgctgcgggattggaactcaaaattctttgcgggacgggatcccgcttggattaatcctgcaagactgggatcccgcaaaatcccgcgcgggatcccgtcccgcgtcggtctctag

SEQ ID NO: 38106 - DNA, 848 bp, Heterodera glycines
agaagggagtgggaaacatgatttcaaaattttcaattttttctagtctaatttactcaaaacggttcagaattcgataaaaataacattcccggtgcgaaaaatggggtttgaaaagtttattggggaaaaaaagacttacaaaataatacccctgggagaagggagtgggaaacatgatttcaaaattttcaattttttctagtctaatctactcaaaccggttcagaattcaataaaaataacattcacggtgcgaaaaatggggtatgaaaagtttattggggaaaaaaagactttacaaaataatacccctgggagaagggagtgggaaacatgatttcaaaattttcaattttttctagtctaatctactcaaaacggctcagaattcaataaaaataacattcacggtgcgaaaaatggggtttgacaagtttattggggaaaaaagactttacaaaataatacccctgggagaagggagtgggaaacatgatttcaaaattttcaattttttctagtctaatctactcaaaacggttcagaattcaataaaaataacattcacggtgcgaaaaatggggtttgacaagtttattggggaaaaaaagactttacaaaataatacccctgggagaagggagtgggaaacatgatttcaaaattttcaattttttatagtctaatctactcaaaacggttcagaattcaataaaaataacattcacggtgcgaaaaatggggtttgacaagtttattggggaaaaaagactttacaaaataatacccctgggagaagggagtagagaacatgatttcaaaattttcaattttttctagtctaa

SEQ ID NO: 38107 - DNA, 505 bp, Heterodera glycines
aatggttgcttaacttgtcagatcggtcgggtgcgcatgattccgctgttccaagcaccccaccaaaagcaaatcgatataaccaaaatataaggaaaaattttttaaaaatttttttctccatcttcctttttgatactaaagcatcagagtgctaaaattaagttgtaaataaaatttggtgcgatttagagcactttctgaaaaaaatatttatgaatcaaaaaaatcgataaatctgggctcatcggttcggggggactgccccgaaaacaaaaaaatcgattttttcaagtgtccgtttggggtactcaatcaattatggggagcaaaaatccaacgcagaattaaagtacaggctatagggaagctattcccggacccccccccccaaaaaaaaagttttttttaaaaaagcgcatcgcaaaaaaaagcgttttttaaagaagaaaaaagtcgtcgcctggctaaaaatcgcaaaaatctgccaattttcgaggaaaat

SEQ ID NO: 38108 - DNA, 1140 bp, Heterodera glycines
  unsure (1)..(1140): unsure at all n locations
atgagacttctgtgtgtttcatcaatggtcggcaacaagaaatgttccgacagcttttttaagcttaaaactattttcctccagacctacnccattcatgagtaatttgctcggtatttgtgagtaaatatgtgtgttttttttgttgcatttactcagattcgtttattagtggtaggaccatattcagtgaaagtgtgcattaatgattttgattaatctaaattcttggctgataggactcattacacacagaaaaatcattcagtgaaccgttttggtttggttatagctaatcgatttctcagcgaatatcttctgtcaccattaatgtctgcaattccttgattgatcacattctgtctgtttgtaatggtcgattcactgttttcttgattcaaattaccagcttctgatggttcattgctcagcgcttctacatcagcatgaactgataatttttccggcactatttgctcatcattaggagtttttggcgatgtgcagggggggcctattagctcaaagcacttttttatctggttgatatgtactttttttggtggctggttcggtgaaatgcagcttattatggtggcatggacaccattcagctcaactaccctaaaaattcccttccagggaaggtgaaattttttggaagtgccaatttttccggtatagtttctaagtaaaaccctatcgccgacgctgattttgggctgtcgcattgttttgtcatattgtattttcatctttttctgtgcttcttcaattgcctccgctgcacatttccaagcttttctcaaagttgtgactaatttttgagtaaattcgccatcagttttaaaatcaacttgattgtgaacgcgaacgtccaaaatttgatcaatacagaaaatggggtcccgaccaaacattaaaaagaatggggtctctttggtggatgaatggcacgacgtattataacagaatgaggcaaattcaatgtattcatcaaagtctgggttttccttggtgatgtatttagacaaaatgttgtgatatgtacgaaaagttctttcagtaatggcatttccttgngaccaatacggggtggcatatgttttattaatgtantacattgtacaaattctctaa

SEQ ID NO: 38109 - DNA, 819 bp, Heterodera glycines
gggactcaacccaccagcatttcaatcactggcactcaacccaccagcatttcaatcactgggactcaattcatttccaatcactgggactcaacccaccagcatttcaatcactggcactcaacccaccagcatttcaatcactggcactcaacccaccagcatttcaatcactgggactcaacccaccagcatttcaatcactgggactcaattctgcatttcaatcactggcactcaacccaccagcatttcaatcactgggactcaacccaccagcatttcaatcactgggactcaacccaccagcatttcaatcactgggactcaattcatttcaatcactggcactcaacccaccagcatttcaatcactgggactcaatccaccaacatttcaatcactgggactcaacccaacagcatttcaatcactgggactcaacccaccagcatttcaatcactgggactcaatccaccaacatttcaatcactgggactcaacccaccagcattccaatcactgggactcaatccaccagcatttcaatcactgggactcaatccaccagcatttcaatcactgggactcaacccaccagcatttcaatcactgggactcaatccaccagcatatcaatcactgtgactcaacccaacagcatttcaatcactgggactcaacccaccagcatttcaatcactgggactcaatccaccaccatttcaatcactgtgactctacccaacagcatttcaatcactgtgactcaaccccacagcatttcaatcactgggactcaacccaccagcatttc

SEQ ID NO: 38110 - DNA, 956 bp, Heterodera glycines
aattgtgaaaaatatacgaaaattatttagcttttaattattcagtacaatgcttttaagccccgccgtgaggcgggacagttccaaaattttgtaccacattttactgtggaaagtccaagtaccttattggacaacgacgtgtcaatgagcacagtcgcctttggccagttgtggaacggaaaaatgggaatatcagatggggtgcgctcttttctaaaaattcctcttttcgtctaaccatccctcccttttgtgcactatttcgtttcaaaattgaatcatttttttttgtcttttgaaataaattgtgaaaaatatacgaaaattattttcggttttaattatgctgtacaatgcttttaagccccgccgtgcggcggctccccttttgtgcactattttagtttttaaaattggttccggactttttggctttttgaaataaattgtgaaaaatatacgaaaattattttagcttttaattatgcagtacaatgcttttaagccccgccgtgaggcgggacagttccaaaattttgtaccacattttactgtggaaagtccaagtaccttattggacaacgacgtgtcaatgagcacagtcgcctttggccagttgtggaacggaaaaatggaaatatcagatggggtgcgctcttttctaaaaattcctcttttcgtctaaccatccctcccttttgtgcactatttcgtttcaaaattgaatcatttttttttgtcttttgaaataaattgtgaaaaatatacgaaaattattttagcttttaattatgctgtacaatgcttttaagccccgccgtgaggcgggacagttccaaaattttgtaccacattttactgtggaaagtccaagtaccttattggacaactacgtgtcaatgagcacagtcgcatgtggccagttgtggaacggaaaaatgggaatatcagat

SEQ ID NO: 38111 - DNA, 1594 bp, Heterodera glycines
ttgatttcgtaaattattagaagtaatgtttttaaatttaaaatggtgcattattgtttttccataaagaataaacaaaaatgaaataaatttttataattttattttaaaatattttctttttttctcaggttgagcctgactggcgtgcctttatcaccagtaacatggccggcgcacttcgctatactattatgcatccgggcgccggtgtgaagagtgccgaggcacggctgaagggcgtcgccacatttcgccagggcgcgatcggcatgcaactcaaaagtggtgcgtgaaatggcagagcaaactgatcggagcttagtggaagagcaaagtgatccgagctcagaacaaatgatcaaaaagagttggctgggttctatcggctcaagtcccgttttcccagattttcctgatcctgacccaatttttgggtcgatgaccccgccaagaccgggaatttacgacgaatgattagacaaggaatggatttacagttccagttacaaaataagcaaatttcttggggatttgaatgcattttcaaatagtagctttcaaagaaaacaaagattttggaaaagaattcaaaaaataattcaaaaattttatccaacgaatgtttagacagggaatggatttacagttccagttacaaactaaacaaatctttgggcgatttgaatgcattttttcgaatagtaaaatctctgtgcaacagttggctaaccctcaaaataattttcggtgaaaaatcattaaactttgattttaggcgacaaatcggacacaattccattggccaacaaaccctttttggcggagcaacagggcgatcgcatttggggcctaaatcgggagccaattgcggaaaaattgcgggtggaaaatgtgggcgaagctgacaaaacaacgttggtgatcttcttcaatgacaaaactgagaatgagcagttggaccacgatcttgacgacgcacaagtatgagagcaatcaataattagttgaaacagtatttcatgccctcaataccgtatctggggacaaaagggggtgactaattaacacaaatatcagggattaagcctatcctaaatttaaaaaaataacattttaacctcagcagccgaaaatttatgtggatttgtgaaccacgaagcgaaaaaaatcctatccgttaaatattttctcataaattttagattatttaaaatcataattagttagctgattatttttaaaaaatttttcaatatttttcacaggtatttcgtacaccgttggataagcctgaccccgaaagtctcgtcatccacattgaattcgttgtaaaaaaaataatttttaaattaaaaaaaaaataaaattttcaggagcctctacaaatgcctgagccggaaaacttggaggcaaatgggaaacccggcccagaaattgaacagacagcggacgaccttggcaaattgttgaccgaagaacaacaacaacaagaccaagaaattgtggagagaatactgacaaaaattagtcgcatgacaattgttgaggtgggaaaaaatattacattttttgtgccagaaaatattttact

SEQ ID NO: 38112 - DNA, 649 bp, Heterodera glycines
tccatcttcctttttgatactaaagcatcagagtgctcttcctaagttgtaaataaaatttggtgcgctttagagcactttctgaaaaaaatatttatgaaacaaaaaaatcgattttttcaagtgtccgtttggggtactcaaacatttatggggagcaaaaatccaacgcagaattaaagtacaggctatagggaagctactcccgaaggattcggtctccccataaatctgggcgcatcggttcggggggactgccccgaaaacaaaaaaatcgattttttcaagtgtccgtttggggtactcaaacaattatggggagcaaaaatccaacgcagaattaaagtacaggctatagggaagctattcccgaaggattcggtctccccataaatctgggcgcatcggttcggggggactgccccgaaaacaaaaaaatcgattttttcaagtgtccgtttggggtactcaaacaattatggggagcaaaaatccaacgcagaattaaagtacaggctatagggaagctattccggaaggattcggtctccccataaatctgggcgcatcgggtcggggggactggcccgaaaaccaaaaaacccatttttttcagggtccgtttggggtactccaaccattatgggga

SEQ ID NO: 38113 - DNA, 1497 bp, Heterodera glycines
  unsure (1)..(1497): unsure at all n locations
aattctttacctgcaactcgcgcatgtcttccacgttcccacgtaccttcgctttcggccaaaaacttgccgtcgcccttccgtggcacgaccaccacagtggcggatgtttcggcactgccaatttcgttttcggcttgacaaacgtagtagccggcatcctgttcagtgacttcggcgattgaaagcaatgcaaatccgttttggtataagacttgcacacggtcacctgaaaaagatctttcttggttgatctgtgctaaatcactgatcagtcgacacccactcgattggacgggtgttccgttcagaaagaaagcgactttcattgacgggtcgctactgatcggcgtcagttttgtctccagacgaagcggctgccccacaaacagctcttgggagcgcaattcaatgtgaaagttggggcgatctttgcccggtgccaaaacagcccggggacgatccggcaccgtttgatcggacgagggctgggacggcacatgactaagcacttcgatganagccgattggcgtgccttgngggaggagggaaaggataattanaattatatggcaaaaaaaaataattaaattatacaatattttttgataaaaaaaaaatgggagaaaattttattttcataaaagatttctgtagatattgcaaagaaaacgcaaaaattatgctggtaatttgcataaaagaaaaaataaataaatttatttatttacatattcggaaataactaaatattaatattaattaaataaaatatcaataaaaaatattttattgttttattccacccatttgatttttctttttttatcgttaattttatttattttatgtctttttaatataataaataattcattatttttctcagctaacaaataagttgcatattagaaggaaatcgttcccttttctgctttcttcgtccactttaaccataaaatccagtttttctttagaggagctttttaaagaaagaaggaggaaaatgagaatctccaattcaacggagtcgtagctcagtggcagagcaattgactgcagatcaataggtcaccggttcaactccggtcggctcctatccttttttcctaattttctattcacagtaaagccattaaaataaataattttaaatttgttttagatgaaaaatttttgcagaattttcacaaagttttattacttaaaattattcaatgtaatgatattttttgttttaataaaaatgtggcttttttacactatcatttaaataggtaaatattcaaaaaattaatattaatttttattttagtgatttaaatgttcaaaaaattaatattaatttttattttagtgatttaaatgttcaaaaaattaatattaatttttattttagtgatttaaatgttcaaaaaattaatattaatttttattttagtgatttaaatgttcaaagaaattaatattaatttttattttagtgatttaaatgt

SEQ ID NO: 38114 - DNA, 1447 bp, Heterodera glycines
tcccgaaggattcggtctccccataaatctgggcgcatcggttcggggggactgccccgaaaacaaaaaaatctattttttcaagtgtccgtttggggtactcaaacatttatggggagcaaaaatccaacgcagaattaaagtacagactatagggaagctattcccgaaggattcggtctccccataaatctgggcgcatcggttcggggggactgccccgaaaacaaaaataaatcgattttttcaagtgtccgtttggggtactcaaacaattatggggagcaaaaatccaacgcagaattaaagtacaggctatagggaagctactcccgaaggattcggtctccccataaatctgggcgcatcggttcggggggactgccccgaaaacaaaaataaatcgattttttcaagtgtccgtttggggtactcaaacaattatggggagcaaaaatccaacgcagaattaaagtacaggctatagggaagctattccggaaggattcggtctccccattaatctgggcgcatcggttcggggggactgccccgaaaacaaaaaaatcgattttttcaagtgtccgtttggggtactcaaacaattatggggagcaaaaatccaacgcagaattaaagtacaggctatagggaagctattccggaaggattcggtctccccataaatctgggcgcatcggttcggggggactgccccgaaaacaaaaaaatcgattttttcaagtgtccgtttggggtactcaaacaattatggggagcaaaaatccaacgcagaattaaagtacaggctatagggaagctattcccgaaggattcggtctccccataaatctgggcgcatcggttcagggggactgccccgaaaacccaaaaaaaaattttttggataaaaattatttaaatgaactgactagataatatttaaaataggttatttctcttcctttcagtatccctgcaaagtttggtgcgcttctgatcagtttctgaaaaaaaagttaagcctaaactttttggcctgtttaaaaaggaattaaaaatttttaaaaattttattcatctccctttttgatagaaaaagcatcagagtgcctaaactaacatgtaaataaaatttggtgcgtttcagaaccctttctgaaaaaatatttaagaattaattttgcaaaaaataaataaaaacgaaagactcagattttcgaaaatttttttgagccagctagctcggcgctcatttcagtgtaagttagtcctttaccggggagtatccctgcaaagtttggtacgcttctgctcaattagcaaaaaatatgagtgatcgaattttcactaaaaaagttaagcctacattttttggcatatttaaaaagcaattaaaaaatttaaaagatgagaattcatgcgagattttctggaaataagctta

SEQ ID NO: 38115 - DNA, 557 bp, Heterodera glycines
atttaggcacgtattggcgctctgttcgctcctatggtaagttcagataaatttgtgatcaaaccctttgatcgcacttcatcaaccattgaacgcgtcgcgtcgttagagttcactaaggctttctccccctccatgaaatttttaataatttttccaaaacatttttcatgttttcaacaatttccatctcccatccgaatcccaatttgctaattaatttattaacatctcccatccgagtcacacctttcagttggtcttcctcaactccttttgggctgtgagtgtttatttggcggttgtgctgctcggcacgctcaacttgatggtgtcctgtctgtggttagtcgagaccaaaggcatcagcttggactccgtccgattggcacaaatgtcagcggaagatgaagcggatgctggcggaatggaagggatgaagcggaatgatgagaggacaccaacgggcaaggatatagagggggcggatcaagcattggtgaagccgtaataggcggggagtggacgacggaggcctccgttttcggggatctcct

SEQ ID NO: 38116 - DNA, 852 bp, Heterodera glycines
  unsure (1)..(852): unsure at all n locations
ataatattttaacncaatttcggagcagacggaactgtctcccttcaataattataaacagaagcaaaggtataatgaaagtagacattcaatgaatattttataaaatttcacctgtatatttttaaattaggtaattaaaatttatttttgcgaaaatgggataaatttcaatttttttttaattttctttctaatattacatataaaatcctaatatataatagacaaattataatatgaaatataatattaaaatatgcttttattattgataaatgtctttatgaattggcaaaaaaacagaaattcgaatagggccatataatataaatacgtggatatgattgatttttttaaatgggtaaatatgtaggtgtgtaatgaaaatatctttttaaatcaaaaaaaatttaagaatttacaaaaaataagtagggcattgcgagaaatattttttttccgagaatcgagacaagaaaataaggtacaaacacaaagatagaggagcacagataattgacaacatcaaaaaaaaaaaaactaatatgaccatccaaacggtgtaaaatttatcagtttcctaaggattgctttacacaagggaacctcgcgaactgttagttaaaaagtaggtataaatttggtatcattggatagagcagggtcgacttctgctgttgagaatttttaatattagcggtgtgagatcaaaaataaaaaagttatgaggcctcaaaaatcgaaatttggctgagtttcactaaaattggttttcagttggataaattcccattttttggagcacggaatcaaaatccaacataaaaataaataaatttttttttattt

SEQ ID NO: 38117 - DNA, 275 bp, Heterodera glycines
tctttttaaaaatatagaaataaactaaaaacagtttctcccttaccttttacatggttaaaaatttaaaaatttagcctcttaaatatttttaaaaaaatttattatattttttttttgaaaccgacttccgagtttcgacttccgacatttttggggtcggaattccgacttccgaaaatttttggggcctcggaattccgacttctgaaaatttttagtgcctcggaactccatccctggtgtagtgggggggggggggggggtaatgttta

SEQ ID NO: 38118 - DNA, 988 bp, Heterodera glycines
tgatacggtagcccaacatccattgccccaatgtaccctttaattgtcaacgggagctaacaattgatgagtttgtttggtttcttttttaagcaattttccgtcattgctcaccaactgttaggcgtacagcaacggcggcacttgcatccgatgcagctgttcacgggctctctaaccctatttttatttttttctatctcttctctgaaaggagttataacaatttttcacaacagttttgcatttaacagacacattctaaaatttctaattagtatagtagtccaagcctattattattttttttgactagtctctgaatggggttatcccagttttagtatcctttttgaaaaacaaaaattttaataactgatacggtagcccaacatccattgccccaatgtacccttcggtttgtcaacgggagctaacaattgatgagtttgtttggtttcttttttaagcaattttccgtcattgctcaccaactgttaggcgtacagcaacggcggcacttgcatccgatgcagctgttcacgggctctctaaccctatttttattttttttctatctcttctctgaaaggagttataacaatttttcacaacagttttgcatttaacagacacattctaaaatttctaattagtatggtagtccaagcctattattattttttttgactagtctctgaatggggttatcccagttttagtatcctttttgaaaaacaaaaattttaataactgatacggtagcccaacatccattgccccaatgtacccttcggtttgtcaacgggagctaacaattgatgagtttgtttggtttcttttttaagcaattttccgtcattgctcaccaactgttaggcgtacagcaacggcggcacttgcatccgatgcagctgttcacgggctctctaacccctatttttatttttttctatctcttctctgaaaggagttataacaaattttt

SEQ ID NO: 38119 - DNA, 824 bp, Heterodera glycines
tattactacatttagttacaatgattaaaaaagaaaaattcctaattattataattctaatcatttccctgtgtttggccataactctgatcaaatcggcatgctcaacaattgtacacccagcggcggcggaaggtcgatttaattcaattttttccactttataactgcaaaatatgatcggtaagcatatggttaaaccccaaaccgatgcggggaattgcggttggattccaaattggtgtcatgacaactcgtacaaaaggcaactcgtacaataaaccaactcatgcaatggcgtaagctagggcttaggtttatgcctaagccggctaggcttagaggcctaagccggctaggcttaggctgggcctaggcgcttagttttaagctttggctttattttctaaaaattttttgtacgaattgccttttgtacgagttgccactgacccctgcaaaaattcgcaccttgactagagtgttgctccccgtgattttttttttaaatttctccattcatccccgacaaatttgtagcaaatttcatcgctgatctccgaattttctctcaccgagggtcagcagggcttaatcctagttaagacagatcatttcaagtgatctcaattggattttccgaaaaaaaatttctgatcatcttttacaaccggagcgggccaactgcgttccaggcaagtttaaagaagtcataacttttatcacagttgaccaaattttataaatttggacattgttcaaaagctcttaataagttctacctgcattccaaaaatcactaagattcgacatcataaaaaaaa

SEQ ID NO: 38120 - DNA, 721 bp, Heterodera glycines
aattaaaacaattataaaataaaatgtatgatattatttcagtgttcaacaatgaaagtcggctttattcactttaccttgagtttttgaccatcgccgactcaatgaattggctgaatgtaaaactaaaggtattaaatgcaattttaaaattaaaaattggctactttttaagttggatttgttcatttttgtccaatggaccgatgccaaaattgccaattccgccgcgtccatcgcccggcaaaagtgtgccaatgtttggaatcggcacaaatttttgttttacaaactgtacgaccgttggcatgacgaaccgctggacgaaatgccaaactttcaaatttatcaatcgatttttttgaatgaaatgaatttactttttgaaaaatttttgatgaaaagtgaaaaagcaatggacgaggaaattcggaaaataattgaaaaagcacagaaaaaatacgacgaaaaaaaagggacgagaaaagtgaaaggaaaagcgaaagaaagtgacaaaaacggggaaaattatgcgaaatttgaagtcaaattgggcgaaaagaatgttgaaacactgagcaaattggtggaggaaaacgccattttcaaaaaaatattaaaaaacagtaagaaaaagaaaagtggcaagagattactgtagattagagtttagcgttaccagcagtaccagtaattaattacctttggtacggtaccggtt

SEQ ID NO: 38121 - DNA, 181 bp, Heterodera glycines
tttcagctggatttgcagtgacgtatggatggacattttcccatcttttgaccatgcccaacttggcctcaaattggcactgatttcgccacgtttcaacgttttagtggacacgtatttcaatggcaaaagcgaattgacaatttggagaccaatcgcaattcgtaaggacagtgtcaca

SEQ ID NO: 38122 - DNA, 1014 bp, Heterodera glycines
ttggaaatttcttaaagccaccaagagctaagaaaatagataaaaaataaacaaaatcctataggcataaaattttctcagttaaaaaatgtttatgtgggtgatcaatgccggcgggggttctaatccgtgtgttagcacatctttttgactgtaaaagattcgaaaatggcatgaatattttttgacgtagaatttttttttttgcaaaaaagtgagtcgactcaaacagaagtattaccggcggaattcttcaaaaaaaaatttttaaaaattaagacaaaattttaaagaaacatgccaaaagggacgctttcatcatagaggggcccgctttaataagattttttgaaaaaatgcccaaatatgcacataaaaaacgcatataaatcgcgaaaatatgcacaaattacaataccaagattattatttttggttgttttaagaaaaagttatgactgttttctcgaaaaatctgtaattggcagttttacccatgttggcagttttacgaaacgacctagcaccggaggccgaaacgtcgcagactcggcattgcatttgccctcgttggacattttaactgagaaaggatttatgcgcaacttggattttgggaatctttaaattatgtatatctgattgataaacaattgaaggcagtaacagtggtggtggttctgctaaacatcgctttgacaacggacaaaaatatgtggcgctaaaaggctcctccgattattggcacatttgtgtgccggtgtgtgccccgtttgggcgacaaacatgccgatttgtacgtgtaacaaccaagcgggaaaatgcccaatcgcagctttgtctttgccaatgggacggggaaacggtgtgtgccgtacgaagggaataattgacgaagaaacgaatgattggttaaaatcacattatccatgtttttttttgtagggttcatatttttgtgattttgtattagtttaaaatggggaagccccccttttcgaaaaattttttttt

SEQ ID NO: 38123 - DNA, 978 bp, Heterodera glycines
  unsure (1)..(978): unsure at all n locations
ttgagtagattagatacaaaaattgaaaatttcgatttttgtttcccactcccttctcccaggggtattattttgtaaatagtctttttttccccaataaacttttcataccccatttttcgcaccgtgaatgttatttttattgaattctgaaccggtttgagtagattagactacaaaaaatttaaaatttcgaaatcatgtttcccactcccttctcccaggggtattattttgtaaaaagtctttttttccccaataaacttttcataccccatttttcgcaccgtgaatgttatttttattgaattctgaaccggtttgagtagattagactacaaaaaattgaaaatttcgaaatcatgtttcccactcccttctcccaggggtattattttgtaaaaagtctttttttccccaataaacttttcataccccatttttcgcaccgtgaatgttatttttattgaattctgaaccggtttgagtagattagactacaaaaaatttaaaatttcgaaatcatgtttcccactcccttctcccaggggtattattttgtaaaaagtctttttttccccaataaacttttcataccccatttttcgcaccgtgaatgttatttttattgaattctgaaccggtttgagtatattagactacaaaaaatttaaaatttcgaaatcatgtttcccactcccttctcccaggggtattattttgtaaaaagtctttttttccccaataaacttttcataccccatttttcgcaccgtgaatgttatttttattgaattctgaaccggtttgagtagattagactacaaaaaattgaaaatttcgaaatcatgtttcccactcccttctcccaggggtattattttgtnaaaagtctttttttcccaataaacttttcatacccccatttttcgcacccgtgaatggtattttttattgaatttctgaaaccggttttga

SEQ ID NO: 38124 - DNA, 857 bp, Heterodera glycines
cattggcgagggattagtccaatcattgccattttcttcatacaaagataacagccctgatcagtgggccttaattatcgtcattattctccaaattcccccctaaaagtcacgagggtctccgaagaattaacacccaatccgattcattcttccgccgtggtttggacaccttaacaacggataagcaagccttctcaaacgcaaaataaatgcctgaaaacgcgggtccaaggtaaaagtgctggtgccgaccgcgagcaaagcatcgtcacgaagccgagtccatgcaaccttaaaacggcatactgtaactgtaacagttagagagagaaaaagagagagagagtgacagaggagaggaagagaaagagagtgacaggggagagagagagggagggagggggggggggcgggagggaaaatgggagagaaagagaaagtcccttccgattacagtacactccttcatttttgaatccaaggtcattgagacatatccgtcgattgtcggtgtcgaaacggacactctactatattaatgtcgaaaaaatgctggaaatgaggttacaaaactagcagcaatcaaacccaattaattaactgtaagcataataaatgtcaatgctcagttaattagtccgttcgttctttcccttttcgtccctctctttcaccttcaattctttccgtcgttgtccttttggctttggctgtgcacagtgcaaatacgcgggctgtccttcgcgtaccgaaatgactttggcagcagacggcgccccgtcgtggccatcggttggccatctctccaaacgaaagcattcggaaaaggacagcggaagacggtcgcctggggg

SEQ ID NO: 38125 - DNA, 1076 bp, Heterodera glycines
cttcggcttgagcgaaagaagtgatgccgaactctgatcttctgacaaaacaaatattggtttgtcattcaacttaaaaaattaataattgaatgatttttggcttcgctattcagaaggaaatggacgtcaaactgatagtgaatgttatggagggaatggacaggacaaaaatgttgcaaatttgctaccagtaccaacagcagaaaatgaaggaggaggtttgttcgtccgcgattgtggtggtccccccgcttggagttccacagaaatcagtttcgccccaaatatgggcacataaaccaaaatgttaaccgaagaaggaaaaacgtcacaaaaaaaaaatttaaattcatttttttaactagccaagtttttgtctttcttctttaaggaaacataatttgttttcaacacaaaaagactttactgctgaatgcatgaatgtttataaacagagttcccaagtgtgcttatttctaagatttgtgcttatttcagcattacgtgcttattttttgatttggaagtaaaaaatgcaaaatttgaatgactgttttgacttataattttttttgaagcgaatatttgaattaattcaatattgaaaattaaaagtttattttcagtgaaaatctgttaaaaaagtagagtgccacgggaccgggcgaaacgggtcagttgcgtctggccagttgcgtctgggcggttgcgtcttagtacttatggggccggttgcgtctcaaacattttgttcggaaaaatatttttttttgatttatccgaaggcgcaaatattaataatttttttcttaaaactcatacgtatgaaaaagttacaagcatttttctaattcggagtgaaattgtgcggggtggaaacatagtgcacccatatcagaaaattgtttttgcatttttatacatttcatttgttttaaatcttttaatatagcccgaaaatggaaaacaatcaaataataacgaaacgaaacaacaaaaaactcgaacatgaaggatgcctctatgtcttccatatgttcaatgctgaccgtgacgtaaaattttggcgctgt

SEQ ID NO: 38126 - DNA, 1209 bp, Heterodera glycines
  unsure (1)..(1209): unsure at all n locations
tgcactcnttcaaatctcaatctgaagaagaaaaaaagccttcctagtgactaattttggaagagacaccaaccaaaacagcgtcaagggcgcgtaaaatttgtgcgaactgacggaggaggacatcagcgcaattgggtccgtgccgaggccgagctggtcgctccactcggcacagcggtggtgaatttgcatcagacaatgggcgtccaaagcggcgtaacggacctaaaaggaagcgaaaaattcgcagatggacgaaaaaatagggggctttagcccctcaccatcagcccccgcactcgctacgcccttggtcacagatgcgcatgtccctgccaccccccgtcctctcaacactcgcctgtctgcgtcgcaatggtcgccggtcccacactgagcactgctcctgcttgtccaacggtttgcccaacacgcgacggcacagataggcgagcccttggtcggccagcgatttaacagaaacactcgccggcgtctgggactttttcttcgatgctcgacgaatcttgccctgggcatcatgtccaccaaacaattccacttaaatgcgagcgggtttttagtatcttagaaaatttataaaattttattttttcttcttggaaaatagattgtttcggtttaaaaaaattatggaaaaacacgtgtcaggccgtataagtcgaggtgcaaagtcgtcaaccgtgccccgtccccccttcccaagtcaaaatgctgtcgcatgccaaccttccgcgtcgtatggatcgtagcaagtactgctagtgcccggtccctgctgtttctgctccgtgtccatcaccggcagtttgttgttactgctgtttgtcactgcatcgtaacgttgcggtttgatctgccgcgtgtgctccttgagctcctcctcctgctgttcggtgagcggcaacagaaatttgtgcaacggaaagtcgggcaggcgcggcaaagaaagacgattgagctttaaagaataacaaaaagcttctagaaactaaaatccgaggttaaatcattcgaatgaattgaaatatggagggaaacggcacgggaaaaggaggacaatgcattcccacacgagagcagctcgccccccccgtcgatgggtgcactacgtttcctccccgccccccgaaattaaaaaaatctcaaacttagaaattctcccaagaaaatactgnngtgttt

SEQ ID NO: 38127 - DNA, 495 bp, Heterodera glycines
tctagagtctaaattttccgttttcgtccttcaaaaattttcgtttcgtgtttccttttcgtattgaatgctttttttcgtttcgatttcgtgtacgaaaatctttttttttaattttcgtgcagccctggttgcagcatttaaaatatgtgaaaatccttgataaacattttcaattattataaatttactttttcctgccaacattccaacgctggcggaggacaatggcgggaactgctcgaagttgtcgcccgtaattgccgctgctgcagatgaaggccattgaaacaacggttgctgctgctgctgctgtgggttttgttcggtttggacttggaacggcaagttgaacttgaaattttggcactttgagtcccaaaatgcgctttttcaaattattttaatgagtgagactaaattctttggcgctagtttaaaggtggcaactttttgatttactaaaaaccaaagggggagggacccttttgtttt

SEQ ID NO: 38128 - DNA, 744 bp, Heterodera glycines
caaaatttggagagattatatcgattttagcgcgctaggttcgatgaaactttttaaaatataagcctaaactttttggcctgtttaaaaaggaattaaaaatttttaaaaattttattcatctcccttttgatagaaaaagcatcagagagccttatttaacttttaattaacatttggtgcgtttcagagcacgttctaaaaaatatttatgaattaattttgcaaaataataaataattaatgaaaaagtcagaatttcgaaaaattttaaaaacaacaagcgttggcattttttcaggttaacttagtcctttacaatggagaaggcctgcaaaatttggagagattatatcgattttagcgcgctaggttcgatgaaactttttaaaatataagcctaaactttttggcctgtttaaaaaggaattaaaaatttttaaaaattttattcatctcccttttgatagaaaaagcatcagagagccttatttaacttttaattaacatttggtgcgtttcagagcacgttctaaaaaatatttatgaattaattttgcaaaataataaataaataatgaaaactcagaatttcgaaaaattttccaacaacgaagcgttggcactctgccttcaggttaagttagtcctttacaatggagaaggcctgcaaaatttggagagattatatcgattttagcgggtagaggttcgatgaaactttttaaaatatgagcctaaact

SEQ ID NO: 38129 - DNA, 824 bp, Heterodera glycines
ctaaagtgaagtaattcacttgtgttcgcttgtccactcacatagctgcggaggtgttgccagaaattgccgagttgacttgccgtgggatgtgggcaacactctctctgaaaatttgtcaatttcgcactctaaattccttttcagagttaatttagtcatttttgtaattccaggccccctaaaacggactcggtgacttttctatgtccgtcgtggatcaatttgtgcagcaattggcagaatttccatgtgaggacgggatttttctccagctgaatgcgcgagacggcatgccaaaaaatgcgggaagagcgaagtttgtgctgaaaagggcgacgaaaataaaagtgacagcatttcacaaagggttccctcaaatgcaactgaccgtgccaacgacgagtgcccggacatgcttttgcttgaggggactttcgactttggacaacgccttgcaaaatgcgattaactgaaatttgcggcaataaatcaaagaattgagacctccctggggggaaagtccacctgcgacttgacaaatgcctcttcttgcattttgaccctccgctgtcctttcacaactgttgggaggtggcgatgtcccgttatggttgtggctgggaagcagcaatcggaaggagcaaaacggcacgacttttgccgatttgaaaatgccaaaatatttaataaaacgagaggcaaaaactatcaaaatatctcttcaccgcttcatacagtgtcacacaaaaataaaattagcaactagaataaatgcacaataattcaagaaaatattaacattttgctaatcacattttaaa

SEQ ID NO: 38130 - DNA, 781 bp, Heterodera glycines
atattctaaatattcatcattttattttattccgattcttaatcaaaaacattgacccattcttttttagtcaaaatattttaggttaaaaacataaattttttctaatttttcaataaacttccattttacgcgttttgtaaccaaaatatctacatatagtacaaaaattaatatatttttaagcaatttaatctaaaatattagatatgtgaattatttacagaaatagtacaaaaattgtgtctttttaatcatttcaatctaaataaataatttacttgatttttacccatgagtttattaaatgaaagtacgcaaaaatctttgaaataagtatttttaaatttctaagattcgatcttgagaatattttttaagtaactagatataaaagataaaaattacagatgaatagtaataaaatatattattatttatttcgtaaatttcataaattactcaggaaaaacagaaatatatatacatcaaaataaatgaagattacagcaaacgggcgcaaaaaataaagaatggtaacgcaatttgcttgagggcaatggcaatgatgagaaggaacaaatctgccgcggcgccgttttgtattgattttagcaaatgggtcaaagatcgaaaaaaaggaacacattaaggctgccagaagaaaaatatcaaaatcatcatttttcgacgcaaaatatgcatttggagcaaaaattgaagaaatatatccaaataaaaaaaaataataaattgttttttgcgggcgcacttttttttt

SEQ ID NO: 38131 - DNA, 572 bp, Heterodera glycines
  unsure (1)..(572): unsure at all n locations
aaagagattatgctgacatgacgagagtgaggtctacttgggcgttgaaagttgggttttccgagggggagagattgtttttgagaaagatggatgggatggacgacgttacgccggcacggcgaaaatgaatgggtggggggagggggcgggaatctcgaatctgtccccacctcagctcatccagacggaccagcagcagaggccattaatgattgatgaggtgggccaaacgccgagccgccgtcgttgaaaggcacgcttattaaaagttaacgtagccaccacaaaatgtacaaaaataaatatgaaaaatgaaaaagtgtttaaaaaacatttgaattaattgcttagtaattaattaaaaactccttgtcacctgacaggcgaaaatttaaatttacaaatcggaacaactaattagttgtacaaaatatggaaaccagcttagagctgaaattgataaaaaacaaaaacaaatgttgtgattanaaaagagatggaatattattaattatttattctcattttaatccgttagttttttaaatacaattcaaattgaggatgaa

SEQ ID NO: 38132 - DNA, 904 bp, Heterodera glycines
  unsure (1)..(904): unsure at all n locations
atatattttctttcagatntaaagctatccattgcctgccggtctcggcacagcaaagcactaatagggtgtttgactcacttcaaaaaataattcattacccaaaagttttttacaaccacttattgccaatctaatttcttgcagatttaaagctatcaattgcctgccggttctcggcacagcaaagcactaatacggtgtttgactcacttcaaaaaataattccttaccaaaagttttttacaaccacttattgccaatttaatttcttgcagattgaaagccatccattgcctgccggttctcggcacagcaaagcactaatagggtgtttgactcacttcaaaaaataattcattacccaaaagttttttacaaccacttattgccaatctaatttcttgcagatttaaagctatccattgcctgccggttctcggcacagcaaagcactaatacggtgtttgattcacttcaaaaaataattccttacctaaaagttttttacaaccacttattgtcaatttaatttcttgcagatttaaagccatccattgcctgccggttctcggcacagcaaagcactaatacggtgtttgactaacttcaaaaaataattcattacccaaaagttttttacaaccacttattgccaatataatttcttgcagatttaaagctatccattgcctgccggttctcggcacagcaaagcactaatagggtgtttgactcacttcaaaaaataattccttacacaagttttttacaaccacttattgccaatttaatttcttgcagatttaaagccattgcctgccggttctcggcacagcaaagcactaatacggtgtttgactcatttcaaaaaataattccataccctaaaagttttttacaa

SEQ ID NO: 38133 - DNA, 441 bp, Heterodera glycines
ctgcgctatcggcatcacagggcccaaaaagtcataaaccttattaaaaaaattggctcaaaatcgcaaaaatttagcatattttggacaaaatctgttaacagatctaaccaaattttccgccgtaccctttctccttaagtctttagaaaagagcgacgtgaaaaaagatgttttggaaaacaaaaaagtaataaaaaattttaaaatttcaagaaaaaaaattaattctatacaaaatttctgataaaaagaaataaaaaaatataaaaacaatacaaatattattatggaaattaataaatattatttccgaaaaaatattaaaaaaattttgactatttggcataaggcaaaaattgaaaaaccccgaccccgaccccgaaccccgaacgatttggcaaccccgaccccgaaccccgacagttggaaccccgacaa

SEQ ID NO: 38134 - DNA, 694 bp, Heterodera glycines
ttccatgccgcctctgaagagtcatggattaagaagccttttttgaagaaaaaatgaaggagacaagttaaaactgtccctttgtccgatcaaatttaattattgtcccaatttcgatcaattaattaatgtgtcatcatttaatttaattaattttgcgggtttcaattcatttgctataatattttttttgatttatttggagcgatggaaatttaacaaaatgaagatgcaaagcaaagctttaaaataatctaataaatttttaaattttgtcataagaatttgctaagtcatcagttataaacaatgagcagaaggctgatcaatgtgatggtttttttttgaaaaattttaaagaaaaaacttaaaaaataggagttttactaaaaattgttctaatgcactttgtgcatccaaacaatggccatccttagtttcttgggccacaagttttttcctccttggtctgcgcctaaattcttggtatcaatcgaaaacttaaagatctcggcaatttataataagcaagacatagagcaaatgctcacaacaagaaaaaatacactaagaaaatataaaattgagcattttacaaagacttattaaatcattgatttgataccaagaatacggggctcaattgtactactaattactctcagtcatggcacgcaaaatcggacatttgatg

SEQ ID NO: 38135 - DNA, 152 bp, Heterodera glycines
tattttaaataaaaaaacattaaaatactttctgaaaaaaaagattctgcttaaccaatgaaataaaaatcaattattggcataatatatgcttttagtttgacaattaaaactttattacaaatgcctgctgaatatgaattttttagcaa

SEQ ID NO: 38136 - DNA, 1076 bp, Heterodera glycines
tggggtatgaaaagtttattggggaaaaaaagactttacaaaataatacccctggagaaggggagtgggaaacatgatttcaaaattttcaattttttctagtctaatctactcaaaacggctcagaattcaataaaaataacattcacggtgcgaaaaatggggtttgacaagtttattggggaaaaaagactttacaaaataatacccctgggagaagggagtgggaaacatgatttcaaaattttcaattttttctagtctaatctactcaaaacggttcagaattcaataaaaataacattcacggtgcgaaaaatggggtatgaaaagtttattggggaaaaaaagactttacaaaataatacccctgggagaagggagtgggaaacatgatttcaaaattttcaattttttctagtctaatctactcaaaacggctcagaattcaataaaaataacattcacggtgcgaaaaatggggtttgacaagtttattggggaaaaaagactttacaaaataatacccctgggagaagggagtgggaaacatgatttcaaaattttcaattttttctagtctaatctactcaaaccggttcagaattcaataaaaataacattcacggtgcgaaaaatggggtttgaaaagtttattttgaaaaaaagactttacaaaataatacccctgggagaagggagtgggaaacatgatttcaaaattttcaattttttttagtctaatctactcaaaacggttcagaattcgataaaaattacattcacggtgcgaaaaatggggtttgaaaagtttactggggaaaaaaagtctctacaaaatacgccgggggaaattttaaaaatttgggtgcaatttgttaacagattttcaacaaaaaaggttggtttttgcgattattaagctcaattggtaggattttcatttaaaaaatgataaaaatgtatcaatttaaaaaaaaactatgagtaatcatattttctctataggaaacccacgagtatcaaaaagaaaattcaaaataatttaatttctgtagagggatgaaccaggggaa

SEQ ID NO: 38137 - DNA, 1034 bp, Heterodera glycines
  unsure (1)..(1034): unsure at all n locations
atgaaggggctctgttagcaaaaataattatcaattcaataggtgngtggntgttnnnnnnnangaggggnnggcctttaaattgcaatgaaaaaactaaattttttaaataaaaaatatttaatttaaaaattatttttctcgcgcaatttttaaaagtatcaaaaaagcaaaaaatgtattcagatgtgagcaccgtcaaaggtgtgtgttgccagtgaatttggacacatttccgcccagttttggcggtgaccaatgctttggcaccccaaaataccttgacgcggtttatggatgcgtccgaggtgaaaaaaaacattgttgaagtgtccgcgctttcatggcttttcaaattttttttgttaatttggcgtggtgttttggcattatgttttttttcagcattttcactcagtttcttctacaaatttttcttcttctctatcttttgtttttcacaatgctttgattttttttgttgcactattaaaatgaagtttaaaattcaagcacatgctttttctacagttttttttttcaaagttttggtatactgtgtttgaatttgtatttaaaaaattacggtatatatttggcgcttctttctttttttttttttgctttggctttttgaccacattcattttcgcacagttgtcaacgtaaacaggcgtgcttggtgaaggcaagtgttgaagtgtttggtgacaagtgtccaggggacagcaaatatttggagacaacataccaatgtgtgccggcaaaaggttgtcgcttcaataactatttgtgtttgaaaaaatttgaattttatttctgtattcggtacatctgttggagtaatacatcattgcttagttttggcatttttgctgcgcgctttttcgtaaaaaaaaaattgcggagcagtggggtccccgccggaaaatgtttttgtttgtagattttcccttgagttttaacagatttcacaaaaaaaactgtatttttgtggatttcggaaaatttcgcaaaattttgggaaatctggt

SEQ ID NO: 38138 - DNA, 926 bp, Heterodera glycines
  unsure (1)..(926): unsure at all n locations
cccaataaatcgggccgcatcggttcgggggggactgccccgaaaacaaaaaaaatcgattttttccaagtgtccgtttggggtactcaaccaattatggggagcaaaaatccaacgcagaattaaagtacaggctatagggaagctactcccgaaggattcggtctccccataaatctgggcgcatcggttcggggggactgccccgaaaacaaaaaaatcgattttttcaagtgtccgtttggggtactcaaacaattatggggagcaaaaatccaacgcagaattaaagtacaggctatagggaagctattcccgaaggattcggtctccccataaatctgggcgcatcggttcggggggactgccccgaaaacaaaaaaatcgattttttcaagtgtccgtttggggtactcaaacaattatggggagcaaaaatccaacgcagaattaaagtacaggctatagggaagctattcccgaaggattcggtctccccataaatctgggcgcatcggttcggggggactgccccgaaaacaaaaaaatcgattttttcaagtgtccgtttggggtactcaaacaattatggggagcaaaaatccaacgcagaattaaagtacaggctatagggaagctattcccgaaggattcggtctccccataaatctgggcgcatcggttcggggggactgccccgaaaacaaaaaaatcgattttttcaagtgtccgtttggggtactcaaacaattatggggagcaaaaatccaacgcagaattaaagtacaggctatagggaagctattcccgaaggattcggtctccccataaatctgggcgcatcggttcggggggactgccccgaaaacaaaaaaatccagggaggcaagtgtccgtttggggtactcaaaccaanttatggggag

SEQ ID NO: 38139 - DNA, 1271 bp, Heterodera glycines
aggattcttccttcttgggcgcttctttgtcgtcttcacccttcggtttctccatgtacgtcttcgtgaagcactgaaaatttgaaaaaaaatttgttttatatgtaaaatttggagcgaaaaacaacaaaaaaacacttaccattcccgccccgaaggctgcagcgccgacgagaaagtgagaagtcattgtgttgttgttgggcgcactgaagtcgttcgttcgttgattgggtgttgtgtcagcagcaaatgtgcaaatggacaaaaattcgccccttttatatgcattttctgttgcactttttttcagtgggaaatttgaatataaaaaggcgtgaaattgagagaaatttcattctcgtcacattcttaattctattctctgcactattacatctaattgctgctgctcaccgactccatcgacaacgacacgcgatggaagaactcgtggcgctctcccctggaatccgcgtcggccgctggacgatcacaaagaagctgggcgccggagcattcggagccgtctacctgtgcgtgaacgaccaaggagagcaggccgcgctgaagacggagccggtcaacacgccacatccgctgctcgtcatggaggtaggcgggggaggaggggcgaaaaattggcaattcaaagtaaaaattttttttcaccacccaggctcacgtgatgaccaagctggacacccttcgagacggagacgggaagcacttctgccgctgcttggacctcgggcgcgatgagcaacaggaccaacaatcgggacaaatgaagaagttcaactacatcgtcatgtcactcgtcggtcgtggcctggacggagtcgtcaaggatgccggtggccgcctcagccttggaagcgcagtcggcgtctcgatccagatgctcgccgctctcagaggactccacaccgtcggctacctccaccgtgacatcaagccgggcaactcgaccatcggacgtccggaatcaaacgagatccgcctgctctatctgatcgacttcggaatggcgcgcaaatacaccagggacgacgtgagtttgagtgaagcgctttgaaaaaaacaaaaataatttgttccctttccccccttttcaggggagccaacaccgcccgcgcgttgccaccaacttccgcggaagcccccgttacgctgcgatcagcgctcatctcggacgcgaatacagccgcaaggacgacatcgaatcttaggctactgcatgatcgagctcttcaaaggcgcacttccgt

SEQ ID NO: 38140 - DNA, 469 bp, Heterodera glycines
aagtgaactaactaccagataagcttggtaattttctcatctaacttaaagttttagggaaggcaggtatttttcaacccatgacgtagaactcgaaaatttaatttaatcacaggaaatttccgaaattgcggctcaaaaattgaactccgatcggtctgccgggggcatccctttgcttgatattgtcaaaattatcaatgccacaagacaaagcgttgcaggcacagcttatcgtgtacaaatactgttcaaattgagaaaaaaggtgaaaaatatttggaaaaattaaaaagtttttattcaaatttaaaaataaaaagattaacacaaaaatttaaaaaattattcaaaaaaataaatgaactaaataatttacattatttattttaaaataaattattaaagataatttttaattttttattaaaaaaatggagagagcataatttttactttaatttccttc

SEQ ID NO: 38141 - DNA, 988 bp, Heterodera glycines
  unsure (1)..(988): unsure at all n locations
tttggtacgattatgcttatcaacagtaaaaaaaccttctaagattatttagaatttggttaattggggttntaaccttggatggaggncggtgggggggggtggattttngagggggagggggttggagggggtaagagtggngggggcggtggagggggtaagataattnngnntttgngggggagggggagggggtttggtttgaattaggtttaaaaatgtaagaaaaaaaatattttttatgaataatttgtttgggtgganatgnaaaatatntaataaaatatgtaaataaaagtagaaagttttgtttggaaagataaaaaagaaagtgttttttttagtgattaggatatggagaagtgaggaaaaaatatgtatttagataaaattagnagnngtaatgatgatttantnaaggaaaattggaagttagattttttaaatttttcttaagcaaatttgttcgattttgtggaaaaattttaggaatgtagataggaggggagagggacggcggtgcctataggcgcctccaggggaaaattttaagaaattatatgaattttgttagaatttaggcaaaatttttcagaagttttcctctttttagatgaaaataaggatttactcccaaatcagaacacttagaaacaagaacataaagaaaccctgtattaatcagaaaaaaaaattaattaaaggaaaaaaaaatttatttaaggaaaacgtcaaccggtgttgaactaataacaaagatttctattagcgctgaagcactaaccactaaaccacaaatatttttaaaaatataagcaaaatttactttatttcataaaaatttgtaaaagatgattaaaaaattcaaaattgtataaatttttgcctttaattcaacgaatatgccattcttaggggtgtattttcacccccgcgcccccgcgggggtgaaggtcgcggggtcggtggctgcgggggtctgagt

SEQ ID NO: 38142 - DNA, 921 bp, Heterodera glycines
aagaagaaattggaagaatttgacggcattggcacaatcctcctagggggcggggtggacggagaagaagccgatgataaaactgacaatgaatttgtaaggcaataaaaacttttgaaattaaaaaaatttgtcatgaaaaaagacaataaataccggagcaggttgcaaccgaaaaaattagcaaaaaatttctaacttggaagcaaaaaaaaaaactttcatatgaaaatgttaagaagaaaaatttaaaaaatttttgagcgattttttcaaagtttttcaagaattatttcagaaatttttcaaatttttttcttgaaattttcttgtgaaaaagattttttttgttttttatctaagtttttgaagtgcaccaaatatacatacaaagaaaaacaataaataaacaaacataaatttcaatttcaaaaaaaagagaaaagaaatttgagaatgcagctgaaagcaaccggctggcagcagcagcagcagatgtgtgagaaaatgatggaatttggtggaggggggggggggaaattgaaattttgtggaaaatgaaaattcaaaaatttgcaaagcgcaaattacaatgggaagaaagaagaaggatgagaggaggagcagatgagcacaaaatgaatccaaaattgattaagtgtggggacaaatgatgcgatttccgccggtaacggtaaatgggcactgatttttagttttaagcccctttttaaaaaccaaaagggggcgggggactagagaccggacggaatcgggatcccgcgagataaattcgggatcccaatctcggaatccgtcccgatcgtttttccaaaatcttcgggattgatcgggatcgggatcgggattcggtcgggattctgattcgtgatccctccaaccccatttgtccggtctcta

SEQ ID NO: 38143 - DNA, 700 bp, Heterodera glycines
aagtgggcactcatttaatggcattttaattttataagaattaataattaattttttttatttaattttttatgcatttaaattaagttgaattttagagcttattttggtattttttgttacatagaaatgagtgtgcttagaagggaaattattaaaggaatgggcaagattcaagcgttattacagctcaacagatacaagtagtataaactaacttttattaatattcttgtaacgaaccaagtggataaagtaacaaaatacagtttcgttaattattcacttaaaaacgaaaaaacacaaaacaacacctacaaatttatggaggggaattgctatcttttctaattttcgaagcttaacgtaaataactattccttacgaatataatgtttataattccctctcactacttaaattaaaaaaaattgttaatcagttacagagatttaaggcaaataataaaaactaactgatatttatatagttattcaaaaccaaacactcttacatagaaatgagtgtgcttagaagggaaattattaaaggaatgggcaagattcaagcgttattacagctcaacagatacaagtagtataaactaacttttattaatattcttgtaacgaaccaagtggataaagtaacaaaatacagtttcgttaattattcacttaaaaacgaaaaaacacaaaac

SEQ ID NO: 38144 - DNA, 888 bp, Heterodera glycines
  unsure (1)..(888): unsure at all n locations
gttgcggaatgaccgagctgatatcgccaataatcttcgattacattttcttggtcacttttttggaatccanccattcaacttccttatcctctaaatataaactgaatcagtgtttgcggaggaccgagctgataagtcccaataatctccaatttacaattttcatgatcacttttgtgatattctcaatatttcaatttcttatatccaaatgtaatctgtataagtttacagtaggaaattgtaatttgggggttattggcgatttcaaatcgatccttccggaacactgatgctgtttatatttagagcgtaatgagctgaaaatgtcagaattcaaaaagtgggggcgcgaaaatagtaaatctgaggttattggcgcttatcaacctgatccgtctgcaacacttaaacagtttatatttaaagcctaattagcagaatgtgaaattctctcatttgttactttatgatcatttttgtctaattcgcaaaattacagctcattcttcgcgaaatataaactgaatcagtgtttgcggaatgaccgagctgataatcgccaataatcttcgattacaattttcttggtcacctttttggaattccaccatttcaactccttatcctctaaatataaactgaatcagtgtttgcggaggaccgagctgataagtcccaataatctccaatttacaattttcatgatcacttttgtgatattctcaatatttcaatttcttatatccaaatgtaatctgtataagtttacagtaggaaattgtaatttgggggttattggcgatttcaaatcgatccttccggaacactgatgctgtttatatttagagcgtaatgagctgaaaatgtcagaattcaaaaagt

SEQ ID NO: 38145 - DNA, 493 bp, Heterodera glycines
acagaacattgtggaaacatacaatggcgaaccggtccatgaatacagttttactcgaccccgaggcgacggcgacgtaagcgtcgttttttggcttgaaattttcaaaattttcgagatttttttggcctagctgaggaatttgatttttcaattttctgacgctagatttaagcgtttggctctacgaaagaattctcactgaaacgtgcccattcagtgagagcttttttgacaggcggtaggcaattttgaaaaacgaaaattaaaaaaaaatttaaattttgaaagttttggcggcggcactgacatggattctgaaggacggagttgcatgttggcacgcattgcattcgcatgggctaaaggtactcggctcgactcgagtggggccaaaaatttagaaaatgcattttttataattaataaactaattaattgattatccatttaactcattaaatttttcaatgaaaccggtcactttggcatg

SEQ ID NO: 38146 - DNA, 1018 bp, Heterodera glycines
  unsure (1)..(1018): unsure at all n locations
agaaagaagtgtaaaatcagtacttttcacgcntataaaattcgggctgaaaaatattggtgtttgtgactagaaaaatagcagatgcatatcaaatgactacagaaaattacagcctccaagaaaataattgctttgcagaagcaatatnttgtagagcncctcaaacacattgtgcttataggaaaggcagaattaaacaataggggcctttttattatgattacaacaaatcagcatggcgtctcgctgatatggtatgtttcagttaaggtttagccgatctacaaatttcggcactgtctattttgtaaaagcgaatcaaattcctttggattccaaagtggaattacagaattgcaacggcaaatacaaaatagacaacgacgctttcattataaagctttaagggaggcaaagtaatacgaatatttcaatttcttacttatcagaatagacaaagataggttacacacgaacatttttatagaaattccggctgaaactaaaatccctcttttggtcttaacttatgaatttttggcccattatggacgaattaagtatagaaggcgtcgcagaaatacattcatattttctcaattcgggtttcaaaaaattaagatttaaaagaagctaaattacagacgtttttcaaattttgggtgtctccgaatagaaagaagttggaaatcagtacttttcacgcctataaaattcgggccgaaaaatattggtgtttgtgactagaaaaatagcagatgcatatcaaatgactacagaaaattacagcctccaagaaaataattgctttgcacaagcaatattttgtagagcccatcaaacacattgtgcttataggaaaggccgaattaaacaataagggcctttttattatgattacaacaaatcagcatggcgtctcgctgatatggtatgtttcagttaaggtttagccgatctacaaatttcggcactgtctattttgtaaaagcgaatcaaattcctttggattcca

SEQ ID NO: 38147 - DNA, 881 bp, Heterodera glycines
  unsure (1)..(881): unsure at all n locations
tttgaacaaattttagtgcttcaacaggcgtttctccttctaggtcgtgcanggaagaagagaagaggagggcgggccctttcgacgggcgaagccgaccgagagaagggccaacagagacaaacggggccacacgcagcgcgacgagagaggggaaaggcccggaccgaagcaagacggacgacagcgaaagcaaccggcaagaagggcaccacaaaccaagaacgaaagacagagggacgaaggcgaccagacaccgcccaagcgcagaccgcaaacgacgccaaccagcgacccgccggcggacccaggcgcccaggcggggagcaacccggaaacgaaagcccaccggcgccgggggaagcatgcacgcaaagcagaaacccaaaggaacagacggaagggcaccaccaggagaggagccggcggcacaaaccgacacaacacggggaaacccacccggcccggacaccgcaaggaaagacagaaagagagcacacgcaggacgcggcggaaggaggagcacggccgcccccagagcgcggagcgaaaagacaggcgaataccgagaacgagcgagacacgagcccaccaaaaaggcggcacaacgccccggagggcacaacaacagagagggaacaccggcgcgcagccgcacgaaaccgagcaacaacaggccagcgaagcccaaagacgaccggggctgcacgcgcgctacactggcaaaatcagcgtgcttgtccttccccgaaaggggttggtaaaccggtgaaaatttgccgtgattgggatcggacattgcaattattgtccgtgaacgaggaattccttgtaggggcgagccatcaactcgctctgaatacgtcccttgccctttgtac

SEQ ID NO: 38148 - DNA, 941 bp, Heterodera glycines
tgtatgaagaaaggagctcacaaattgcatttctgcgttaattttttcttgaatcacattccaattttagagggttttcgggaacaaatccattttcgcgtttttagtccatgtttcggggttatttattagttctttttaatgcaaaatgtattattaataattaattacatttgctcctatttcaggtggcaagaaaagtggaagtgaggcgtaaacattcaaaaaattgaaaaaaaattaataattaaattttttaaattttttccagacacaattccccccggtgaaaacggtgcgcagagaatgcacaaagatcgcagcttcatgcccatgcgggtatggcagctgtgtgtttgtcaccaggaagcaaatcgttgacgtttgttgtgccggcccttacgagtttaagtgctgccacaatgtgaggaatgccaattttggcgtttttatcacatttgaaatgtgccgggtcaccccaccaagggattatgatggatagaactggattttaatttctcaaacataacccattattattcggagcaatttaaaaatcagccacccatcacatgacgggggatcagtaacgcaaatgttttcctaattacttccggcctctctctggtcccatgcaccgactcaaagtgcatacaaaaaattgtaaaaatattcgctggcatgggaaataattttatggctaaataaattaatttaaatatttttgggttaattttatttttagccattattaatttcgaaatattattactttttaggcgacagcaacgagtggcaccaccgtaacacaattcatttaaatatttaattaagatttattcaaatttaatgaacaaaaaagcaacataagcaagacaaaaattattttcatgtcatttaaaatggttaggatttttaaaaatttttgttaaaaataataa

SEQ ID NO: 38149 - DNA, 949 bp, Heterodera glycines
aaataagtttgcagcggccgcatgtggcgcagaaaccctcattgcaactcggaattggacatctcttttcccagaagtcatacacccaataggggcgataaaaatcacataaatgattatcattatcaatattgttctgggaaatatgtgctaaggcggggataaacaggaaaccggcctgacgccggtttccgctgggctgcaggtcagagctctaacgcctcgtcctcatagcgatgcttggcgtcgagcgcttcctgctcggtttcatgttcactgagcagcgtattcggctcaatgtcgtcggtgcgcacttcaaaacggcgcagatgcaggctcgggtcgccccgaaacacctctacgacgcgggcgctccgtggataagcaggttgatcattttcgcgcatgccgttctcccgtgtgtttcacacagtagcaagtatagcagccgccctcattccgacacgcgcgagccaagatcgcgatcgccgggggagcccgccaacagctcggtcagttcgtcacaggcgcaaatgcggccctcacgcacggtgaagtgcgccagcacccgcacgcggctgcaggaaccatcgcacttttccagctcgaccagatggtgggtcagcaccgcctcgccctgctccgccgccgcgatcacgctcagcgtcatgcggcgggtttgccgcttcagcagcgccatgtgttgctcaaactgctcgaagttcagcgccttgccatccacctgctggcggtagtctgcgctgaaacgggcggcgagctgcgtcggccggtgctccgggctggcgacgacctgctgcagcgtatcgagtaccagatccagtggggtaagttgagtcatcacgtttctcagaaatagggtgaacgacgatcctatcccggtcaggcgaaaggataataaccacatcaagactttcaataacgttaaacg

SEQ ID NO: 38150 - DNA, 1147 bp, Heterodera glycines
  unsure (1)..(1147): unsure at all n locations
ttttgctttccgagaatttgtaaccttttattttctaaagcgcattttcatttcacgtcgtaaaccttcttacacatgacaagtaagtcctgctcgctgggatcttgttttatctttaaggcacttaataattatgtaacttttcttttatgcaaaattaaaatccctattaaattttcagataaatattttattttcttcttttaatatttgccaaagtattaaatttctacaaatttgttagtaattatcagcgtgtaacctntaaaacatgatgttatatttttattaaattattttattaaatttctcatttttattttttttttgaaaaattattattttaaatatttttttgtcaatttattgtataaatagaaatattattttaaattaactcgcagcaactggactagatcatgtttaatgaatttagaattattttttattaatatttattaatatatgaaaaccgattgtttggtaaaacaaaataaattgaattttttccttgccttcccaatcaataaaatagactcgtgtatccgtctggagtatttattataatatcaaatatatcttcacattttgtaattttattttaattatcttttaattcgtttatacgtctgctgtttatagatacaatttttcaaatattctcagtattttttttcataattaatatcattcaaataatatattatttttgctttccgagaatttgtaaaccttttattttctaaagcgcattttcatttcacgtcgtaaaccttcttacacatgacaagtaagtcctgctcgctgggatcttgttttatctttaaggcacttaataattatgtaacttttcttttatgcaaaattaaaatccctattaaattttcatataaatattttattttcttcttttaatatttgccaaagtattaaatttctacaaatttgttagtaattatcagcgtgtaacctttaaaacatgatgttatatttttattaaattattttattaaatttctcatttttattttttttttgaaaaattattattttaaatatttttttgtcaatttattgtataaatagaaatattattttaaattaactcgcagctactggactagatcatgtttaatgaatttagaat

SEQ ID NO: 38151 - DNA, 756 bp, Heterodera glycines
gttgaaaattttgggtttttccatgttcgtaccaactcctccaagaccctttacaactcctagctgaaaacgtgggacagtcaggtctcttcatttgccataaaaatattagaaaaccaaaaatccttaattttttggggtaaaacttggtaataaattacattttttcttggtccctacgtatttccaaagatttttttaaaatcgcagcgaaaattttcatcgatgtacaacaaaatagtcgatgcagaaaaaataattttattttttttaaaaagttggattaatttcaaacattaaaaggaaattaattccgagcttaaaaactttcaattatccaatttcaaacatttttaccaacgtattttgaaaaatccgcttcatggatgtttggcaaatgtattttgaacaatgccgggccgaggacggcacgaagattttccggtgagcattcaacaccattttgtcggcatttttcgtcggcccaacgaagtgcctaaagcaaaaatgaaaaacaaaataaaatgcaaaatttaattaaaattacagctttccaaagttcacattcattgctgatcaacaactgatcgcgttcaaaaaaatagcacaacatttcctgatcaatttgcaaaaaatcagttgatttgaacaatttggctgcattttgacaaatgtaccgcaaacattcgctgacaaaatccttaaatggattaattacagaaaaatatacaaaaaaaatatttggatcttcagaaa

SEQ ID NO: 38152 - DNA, 764 bp, Heterodera glycines
  unsure (1)..(764): unsure at all n locations
cgaatttttaacaaaatttaaaattttatttatttagcttctgaataaattggcacacaaatagagggacgatgattggaaaagaaaggcgcaccgaacaataaaatgaacaataattgaccaattatcaacgcattaaatatataattcgagaaatatgctgaggattaatacataatatttgctctgtttaaaatttaaaaaactaaaaaaataaacaaaaaaaactttaattcacttttcaactgcttctcgatggcatttgttattgatcgattttaaaatggattttttaccattttaattaatcttccgtctttatttgttgtgctgctttaacaaaatgaatgaactttacccgaacatgtgttacctttttcttttcttttcttaagtgcatttttattagttgaaaatgaactcaacagaaaaatgtgaagcaaatattttcaacaattctatgtcatttgtctgaacaatcaattagtcattaaacgtctaatgcgctaaattttatcaataatttttagaatttgttttcaataaaaacctttttataaataaaccatctttttcgtttatggagtttagggcgggggaggggggagaaataatatatcgggaaagcattcatttaaattttctcttaaaaatatttaagctttttanaccattttgtacaatanaatgtttatcctcctgttggccctgctgactttttttgcgcattttctanattgaatgaatgaaaaaattcactatac

SEQ ID NO: 38153 - DNA, 725 bp, Heterodera glycines
tcaaaaatcctggtcacccccctttggtccccaatgacaaaatcacttttattttaatattttattatataaatgtgataaaaaggtaaaatcaaatatatattatagaggaaaaattttcggattttagtagtatcttacttttacagtaggaagtatcagaagcgagttatgaatttttctccaaaaaatcaaaaatttccagaaattatccaatacccttttcaagccccctccctccggcgagttgccatcaccaccaccgccaccaacgaagtgaattgccctattggtagagtgcttttctcacagtcactcactcaaaaagtctgggaaggttgagagcatttgggtaaatggctcaattcaagaaaaaaatttggggacttatctcccaatcggtcgccaattttcaattctcagcaaattttcaaggaatttccgtccatatacgcaataaaagtgcgtgaaattttggttcaaatcccacagctgactttttcaaatgcaaaattcggtggcaccatcaaacggcaacaggagcagccgaattgtgcgactacgactttcgaccgggcatcggattgaagtgttcgcgcacgtcttgtgccgtgagccgaactcactgtttgccgaacttgccgaccgacagcccatcatcgaatgtgcccaccgagacggcagactagtccgactgctgatcaactgcttgcggcactgtttgg

SEQ ID NO: 38154 - DNA, 1035 bp, Heterodera glycines
aaaaaaggccacgactcaattttcttcttaaaaaatgtgatttttttgaaaaatggattttgacttttttgctcgaatccgggttcgggattagattgggcgaaaagtaagggttaaaattggtgtagatagaattgactagtcaatatcttttaatgatacaaattttgccaagaattgaatgtgttatgggcttgttttggtcaaattttgatgttttctaaaaatccaatttcttgctaaaatcgcttttttatgacttggtagatgggttttcatgctttttcatcattactacgcaatatttaactgtttcacaactgaatttcatgaaatcttttgtggcactaaaccgaactcttacccggcgtccttctccatcgtttgaaatgtcgcggtaatcactttcaagcgccacgttcgactccttcacgcattgtttcaccctctcattgtaccgctgggttttgcttattgtttgttagccaattcaaacacggcgaaacattccatggctttggcaacgttcggacacacttaaacattgccaactgtgagttgtttgtaagttctggggtaaacgatgaacagagacaactgcatggtcgagatgaacgtcccgattccgttgggaaccgtaaaaaggaagaagggataaacattttactttttaaaattcaacgaactttcatgtagaaatcgtcgaccaaaactccgtacaacaaccattggacacagacctggaaaagaactggagtactaaggcacttaaaaacggaggggaaatcgacaaccgccaaatttgccaagcaaagcaaaaagggcaaagattcggtgcttttggtccgcaaaacttggccaacatccaaaagaggggaggcaatagttgctggaaaaggtcatgaaaaattaaattatattacgattatacaatataattgggccgggtctggcgctcgacagactttcatggaccacccgagcccgcgccagctaaattttgaaactaccgggttcaggtcgtccggttaaacg

SEQ ID NO: 38155 - DNA, 681 bp, Heterodera glycines
taggctttttaggcgctaaaaatgaaagcctagaaaataggcactaagaactcgaaaagtagcttaacaacagcccaaaaaaaaacatgtttttcgtgcgtttccggccacggggagctcaggaaaaaaataggttttttgcctaaaaatccgagccctacttattagggttgtaaaaaaaaatggagagcaaattgctacaagtctgcagaaaacaggatttttcaaatttaattgggaagaccaaaaaaaaacggcgtagcctaaagaaatttaacaaaaaaaaaactgaaatttaaaattcgaaatttgttcgacatataattttcacctagcagcttatgatactatctttctatctgtattcataaaaaagcatatagatgtataacattcaccaaaagctaatccggaatttctgaaatggcatattcatatgcattactcaggtgaaacattgacatactatacaattgagagggcatacataacataaaaatatacatagccatatacaaatcagacacaaaactcgcgtgtaataactggctttacatttcggagatgccatatgcgtaaaaatgtgtcttcttcatggcttatacacgtgaaatacatatgcatagtatctgtattgctagcaaattggtattaagcatatgtatacattggaagggatat

SEQ ID NO: 38156 - DNA, 449 bp, Heterodera glycines
ataaagtcaaaataaattcaatttttgtttgattaggcctaatttcatatcagctcgagaatctttgataaaaatgtggctatctcttctcgatcagttttggttttttgttaccgatttggatttcgttctcattttcgagttttccttccctaaagcttttgcgaatggagacaaattttagcggaatatttgcataaaaaggcagagactctctgaacactgtgttactaatgtcactaattaacaattaatcttcttcatttgcatgcttaatagtggtgggctccacctgcaaaatcaattctcacgatccgtaattaatttttctaatgattaatggaaatcaaattaaattggagtgaaggaccaaagaacggaaaattcggctatcctaaagaatgggggtccctaatttaactttttttattttgcgctcaaatcagttc

SEQ ID NO: 38157 - DNA, 773 bp, Heterodera glycines
attaaaatccttttaggccgatgacggagcaagtagtgggacgctcgagcgcctggttcagggtcgcggcccttaggcgcgaggagccgcccggaacgagcgcgcggcgcccacctctggccgccgtagtagaatatacggtgtattggtcaaaatgctaattaattttcacctcaatttacatatctcagcgtttaaggctttcttagttatttttgttcattgaactattgagtcccggcggcatttggacacttcagtcccgggtctgtaactcttcagggagcggttgccgcgaaaaaaattctctcggattatttaagttttatgagtatttttgttagaatatttaaccagcttaaacacagtttaataaatggatgctaattacttttgcattcccaagcaattaacatgtaaaaaagttcaacaaaatttttgtaccccaaattctgagccgaaaatggacgaggcgctaattgaataggaaaattgctattaaaatacaaaataagctgggtccattcacaaaagttctggaatgtacctgacaatgagcttgagctggcaactctcattctgtccaccttgccggccaacgagtccacgtctttggcttcttttgacgatgccgtcaacgccgccgactgagtgcgtttttcttcgcccaaattgttgataattttggtggatgatgagccttcctcgccagcagcagcagcagaagtttaaagaaacatttcagaaattggaatctggtggatgttgcggtg

SEQ ID NO: 38158 - DNA, 1065 bp, Heterodera glycines
attttatttattattacgcgcgttttacccatttaacatattaaattttctgcgccaaaatttcaatcgaattaaatttcatattaacttaattgatcattcgttttctcaatttcaaagcttttgcttcttgcggtctcctttgagttgccatctcttaattaggctccattttctgccaaaatggtcattcgtccgtcctctgttcaaatgcatccgccgctgcacaacaatcgcttccattccaaccaattttcgtttgccgttgccgctgagcagtgccaacaaccgccgatgaacggcggcggcggcacacagccgcccccggcgggaggcgcccttttccaacagccgttccctccggcgccgccccgcgggacggaagccgcggcacagattgaacagcaccaaatgatgctcatccgacaacaccagcaacaacagcagcagcaaatgctgctccatcagctgatgctgaggggcgaagttagccttcccccgcaggggcgtccttctgcccaaccgccgcattctttcccgccaaatccccacaacaattaccaacacattgtgggaggtgaataaaaaagggcctgttggagagagtttcgccgtgcccatttttaatcgagagtaattagcgtaattagcacagactactgagagggggttacgggcaagagtatctgctgcagtattctcgctttttctttcctcttctttttgtgttgtgtctttggcttaattaccgcattgttttagaactgacgccgcccccctctcagccgtccctcggcggactttcgtccccccaggccaacggcaacacgtcgtccgcggcactgttgttgaacgggttcaacccctcgtccaccaccgcttccgtatcctccggctacaattttcattctgtcggcgatctccaccatcccaccaccactgccactactgctgtctctgcctctgaactgctccaacggcagtgccaacaaatgcttttggccagacaggcagcggctgtcctgcagcaacaacagcagcacaagtcgatgtttttgtctgcca

SEQ ID NO: 38159 - DNA, 1046 bp, Heterodera glycines
gataatgagtagggatggtaattatatgcacataaaatcgcaaaatatgcgcataaaatatgcaccaaaaattgcaaaatatgcacataaaaattgaaaaatatgcacataaatttttccaatcgagggtgtaatttctcaaaatttcttcaaatttgttaaacataaagtaaaatcttcaaaaatggctaaatgtggtattaaaaatcattttaggagaaaaaaacacgatacagcttaaaatttactcgttttagcgaaaaatcaacctgaaaagcaaaattttgcttatttttgacataaattaaccattttttgagaaaatttatttattcaatatttttcgtgaaaattttgctaaaaaattatttttttggaaaattttccagtttttgaggtcaaaaaggccaatttgtctgttgggggccgatctattagaggttttttggaaaaacgccaaaatatgcacataaaatatgcacgaaatgccaaaatatgcacaaatatgcacataaatcgcgaaatatgcacaaatatgcaaaatatgcatatggaaatacgtcctagaagcttcaaaccaagctaaaaacatgtttttcgtgcgtttcatgcctcccacagtctaggaaaaaaatatgcatgtgcatataattaccaaccctaataatgaggggcccaaataaatttttaaaattaaatggcacgaaaaaatcaattcaactggtacaaaatatgcgttcaaattcggccaaatggacgattcccacccctccaaaaaatgagtggaaaaatgcaaattaggtgttgtgtctgcggcgatcgaaaatgccctctccttttcttcccttggccattcttctcccggttccccaattctttccaaatggacgccctaatacccgatttaaatgagaccctgaaccgccatacaaacaacgccgacaatgaaacagccacaatttttacgtggcattgaagacctaattagggaacccccgtttgacgcccccggaggaattccttgattttgattctgcggcacaaag

SEQ ID NO: 38160 - DNA, 1155 bp, Heterodera glycines
tgtacagcatattaaaaccgaaaataatttcgtatattttcacaattatttcaaaagacaaaaaaaatgatcaattttgaaacgaaattgtgcacaaaagggagggatggttagacgaaaagaggaatttttagaaaagagcgcaccccatctgatattctcatttttccgttccacaactggccaaaggcgactgtgctcattgacacgtagttgtccaataaggtacttggactttccacagtaaaatgtggtacaaaattttggaactgtcccgcctcacggcggggcttaaaagcattgtacagcataattaaaagctaaaataattttcgtatatttttcacaatttatttcaaaagacaaaaaaaaatgattcaattttgaaacgaaatagtgcacaaaagggagggatggttagacgaaaagaggaatttttagaaaagagcgcaccccatctgatatttccattttccgttccacaactggccaaaggcgactgtgctcattgacacgtagttgtccaataaggtacttggactttccacagtaaaatgtggtacaaaattttggaactgtcccgcctcacggcggggcttaaaagcattgtacagcataattaaaagctaaaataattttcgtatatttttcacaatttatttcaaaagacaaaaaaaaatgattcaattttgaaacgaaatagtgcacaaaagggagggatggttagacgaaaagaggaatttttagaaaagagcgcaccccatctgatatttccattttccgttccacaacaggccaaaggcgactgtgctcattgacacgtagttgtccaataaggtacttggactttccacagtaaaatgtagtacaaaattttggaactgtcccgcctcacggcggggcttaaaagcattgtacagcgtaattaaaagctaaaataattttcgtatatttttcacaatttatttcaaaaagccaaaaagtccggaaccaattttaaaaactaaaatagtgcacaaaaggggagccgccgcacggcggggcttaaaagcattgtacagcataattaaaaccgaaaataattttgtatatttttcacaatttatttcaaaagacaaaaaaaaatgattcaatttgaaacgaaatagtgcacaa

SEQ ID NO: 38161 - DNA, 1380 bp, Heterodera glycines
  unsure (1)..(1380): unsure at all n locations
aatagccaaaaagttacaaaaaacgtcagaaaagtagtctttctaatgcaaaaaggtcctgaaaaattaggcaaaactaattataatcaaaatcccttttttaaacatttattgatttgcaaacaatttaaaacgattaattttaacgaaaaagagacacgtttcagaagtgttaccccgccaggttttttttcagtcctgctatttgaatcctaatggtataagaagtttcagtaccgtctcgaagatatacttactttcgcaattttcttcgcgaaaattcaaattttgccttaaaaagtgaaaaaagtcataaaaacgttcaaaaaaatcataaaaatcgcaaaaggaataaaaaagtttaaaaaaaagtcacaaaaaatgaatgttagaagcttcaaacaaagtgtagaaccttttttaagtcagcaaaaacaaagttatttgactataattcccatccctaattggtgatattgaatctcattaaagtcccattaaattctttttcaccacaatatataagtgattgattgattgcgtaatgcttttttttaattctccatggcataaattaaaaaaggcattttcttttcaaagaaattttagctcaaattgtagtatttatgcctcagaaataatttaattttcgcactaagcgtgctgtttcttgttttttgaaaaattcacggcccaaaaacagaaaagtaaacgaattttttaattttttttatataattaaatttaattttttagcttggaatatcgcacggcatttcaaaaagaatttgcacttttgttgaaattattttgcgagagttcttcttattctgcggttgcccacaacagcagtaaagaaataaaaagaaattcaactttaactaatttaaagagatctttttaatgtataggcacatatttttaaatttttctataatgcccaattcatattttttgataatttcatttttcctaataaatcatcatttgattggcataattccaattgaattttaaaaaagtgatacaactaggactaacattctgcaaaatttccaaatttttcgtgccattttttcaaaaaatccgcatttttttgtaaaacttgaaaatttcacgtaaaaattgggtaaattttttcaaaaaaaaaatattcgaatgtttgtaaagtgctttgaatatatgaaatcttttaaggttttgaagaatgttttgcatcccttatgataataataataattttaatattgaattttattgaagctttaagatttatttaattttaacactttaaaaaaaagttcttaaaattanagacttgntaaaangtaagaatactgccgnggatgaaaatgtatataattattttaatctactcct

SEQ ID NO: 38162 - DNA, 790 bp, Heterodera glycines
ctgagtagcgaaaaagagggaggaagaagcgcagaaccgtacacgaaaagtgcgagggaaaagcgaggacaacactaattggggacagcaacaaatgagaggcatttgggaataaatccatttaaaaccaacccgagaccatttctcgccgaacgcatcttccaaagtggcgagaatggaaagtgcgagaagatactgtaagggggggggggtgaaacggtaatacagtaagacaaaagcgggaaaaagagaaaaagacgaacaaaaacattgagaagaacgaaggcgcagagaaacaaaaagaggccggagagaatcttggcatgaggcagaaagccaaggaagacgagcaactggtaaaactgattctcacctgaacgaaaaataattgccaattttaaaatggcaaacaccgtaaccgaaagagaggaaaaggggtactggaacagaaaaaatcacagaccctggtcaatcagttggtcgggactgagtccgcttttggcactgacatggccgacgagcgcaacaacagtggccacttggaggacactgatcagcgcgtgggtaaacaccaaaacgaaagagtctctgcacattttaaagggtattctcgagatttagatgcatttttaagtgagggcactcacttcaccaaattgttggaccgtttgttgtacgatccgacggtgatcaaagcgccgaagccgacaccactggccaaaatggcctgctcaacggccgttttccaaaccttagcacagcgaaagtaatgcatttgcctcgacaatta

SEQ ID NO: 38163 - DNA, 715 bp, Heterodera glycines
tttatgctaaaattttgtttttttttgtcccaaaattctcccttatggcaaatttcattaaaacttcttatattttcactaattactcgcactttttgtgaaaatctaactaaattttcaaaattttcctacggcggcctttgtggcaccgccggatccctttgatcctccgtccccgccacggccggtcgtaccacgtacagtagggggtctggttagcctgcctcttgttttttaactgtattattacataaggcaaaattggaaaaaccgaatcccgactgatttggtctaccccaaccccgctccgacccagttgaccccgactaatccggacttttgtcaccccgagtgtcggggcatgccctacccttttctaaaggaaatgcatttaattatttatttgtaatttatattataattttaaaaagaactgactgtttatcagtgcatttttctatagtcatctgatgaaaaaatggcagaaactcaatttcagcaggtaaatattcggcttcatatactttcattaacaaatccatcgcaaaatgtgaccaaatgcaaaaattgccttttacagaaatttgaataatttcggtaatttctccttttgtctttttcaaatttacatgcatttctatgcttttggtaaattcatcttttgttccatttacattttctgacatttcaatgctttcggaattttttaaatttt

SEQ ID NO: 38164 - DNA, 1147 bp, Heterodera glycines
  unsure (1)..(1147): unsure at all n locations
gatgctttttcttcaaaaagggagatgaataaatttttaaaatttttatttcctttttaacagcccaaaaagtttaggcttatatttaaanagttcatcgacnnctagcgcactaaaatcgatataatctctccaaattttgcaggccttctccattgtaaaggactaacttaacttgaaaaaatgccaacgcttgttgtttttaaaatttttcgaaattctgactttttcattaattatttattttttgcaaaattaattcataagtattttttcagaaagtgctctgaaacgcaccaaatgttaattaaaagttaaataaggctctctgatgctttttctatcaaaagggagatgaataaaaattttaaaaatttttaattcctttttaaacaggccaaaaagtttaggcttatattttaaaaagtttcatcgaacctagcgcactaaaatcgatataatctctccaaattttgcaggccttctccattgtaaaggactaacttaacctgaaaaaatgccaacgcttgttgtttttaaaatttttcgaaattctgactttttcattaattatttattattttgcaaaattaattcataaatattttttcagaaagtgctctgaaacgcaccaaatgttaattaaaagttaaataaggctctctgatgctttttctatcaaaagggagatgaataaatattttaaaaatttttaattcctttttaaacaggccaaaaagtttaggcttatattttaaaaagtttcatcgaacctagcgcactaaaatcgatataatctctccaaattttgcaggccttctccattgtaaaggactaacttaacctgaaaaaatgccaacgcttgttgtttttaaaatttttcgaaattctgactttttcattaattatttattttttgcaaaattaattcataagtattttttcagaaagtgctctgaaacgcaccaaatgttaattaaaagttaaataaggctctctgatgctttttctatcaaaagggagatgaatannatttttaaaaatttttaattcctttttaacaggccaaaaagtttaggcttatattttaaaaagtttcatcgaacctagcgcactanaatcgatataatctctcccaaattttgca

SEQ ID NO: 38165 - DNA, 823 bp, Heterodera glycines
tgccattgacatttgccctttcccggcattggatttctttgtgcccacttttgcttcagcttcgtcttgtcaatgtctttgggctgttccacggaattctcttcgcagaattccctcactttgtccacccatttcgcgtggtccgcgggcgacagcggcggcggtgcctttgtcttccgtctcctctcaactcgcgcccgtgccaaaatccgcgtgtcctccggcagcaccgtccgcagaatgtgtttgactcgggcactttggtcacactcaccgtgcgcacttcggaaggactttttgagctgttccctagccaaacgatattgttaattagttggtaattagtcgaaagaaatcactaattaatgttgtaattaaaacaatcattttattttttgtgccgttttggctaccatttctctctccgttccgccacacttcgcccggacaatcgcatcgatgggtcggcccaattcacttcgctgtccatgttttggtaacgggggaccaatgcgacgaggacgggcattcggggaaggtggtcacaaaggtactctgaggaaggggaggcaaatcagtaggaatgtaaaaacccatttaaggaaaaaagaaatttgactcgtttcccaaaactattacaaaataaaatttttatttgaaattgtaaatttaaagaaacgattcattttaaaacaacaaaaaaatcaaaagtcaaaattatgattaatttatttaattttcaatttgaataaaatgattagattggctgattggactcataaattgcgcattgtaccgaattactttaaggaaaatgacaaaa

SEQ ID NO: 38166 - DNA, 187 bp, Heterodera glycines
ttccaatgcttttcctcccccctccctcattttccctcattgcaatgcttttcctcccccctccctcattttcccttagtgcaatgcttttcctcccccctccctcatttcccttattccaatgcattttcctcccccctccctcatttcccatattccaatgcttttcatccccctttcctcattt

SEQ ID NO: 38167 - DNA, 349 bp, Heterodera glycines
aattttgttgatcactacccgaccggggtccccgaccccgacaattgagctcaccccgacccgacccccgacatgtggcccccgaggtccgcggtgtgttaccctcccccctcagggattgaattctttgtccaagtagtattttgtgatgcctcgatatgaggagatgttaaagcgtttggttgaattacaaatataatatattttcaaagctggtcggacataaacaattttatgcgccatgaacatatcaaacagatttctcctttgctcacgtagttcagtagttgcaagtattctaatcgagtacgctatggaattagcgggacgctacatttaaaaaatactc

SEQ ID NO: 38168 - DNA, 1103 bp, Heterodera glycines
atttctcagagatttttaaatttatcttatatccaagaaaaatgactatctcttattttgagaaattttatacgttacaaatgctctcgagcatgataggaagggcggtgcgcaatcgccattttatttctcagagaatttttaaatttatcttatatccaagaaaaatgactatctcttattttgagaaattttatacgttacaaatgctctcgagcatgataggaggggcggtgcgcaatcgccatttaatttctcagagaatttttaaatttatcttatatccaagaaaaatgactatctcttattttgagaaattttatacgttacaaaagcgctcgagcgtgagagggagggcggtgcgcaatcgccatttaatttctcagagaatttttaaatttatcttatatccaagaaaaatgactatctcttattttgagaaattttatacgttacaaatgctctcgagcatgataggaggggcggtgcgcaatcggcatttaatttctcggagaatttttaaatttatcttatatccaagaaaaatgactatctcttattttgagaaattttatacgttacaaaagcgctcgagcgtgagagggagggcggtgcgcaatcgccatttaatttctcagagaatttttaaatttatcttatatccaagaaaaatgactatctcttattttgagaaattttatacgttacaaatgctctcagcatgataggaggggcggtgcgcaatcgccatttaatttctcagagaatttttaaatttatcttatatccaagaaaatgactatctcttattttgagaaattttatacgttacaaaagcgctcgagcgtgagagggagggcggtgcgcaatcgccatttaatttctcagagaatttttaaatttatcttatatccaagaaattgactatctcttattttgagaaattttatacgttacaaatgctctcgagcttgataggaaggcggtgcgcaatcgccatttaatttctcagagaatttttaaatttatcttatatccaagaaaaatgactatctcttatttagagaaattttatacgttacaaatgctctcgagcatgatag

SEQ ID NO: 38169 - DNA, 1032 bp, Heterodera glycines
attcagaaaacggctgccaatttgaaaggtcacttcctaaatcccccttttgggtccgaactaatcttaacgcccttaaatgccttcgcatgagtttcagaatattaaagttaaaaacagaccaaactttgtcgaacagttcaacaaatgcaatgtgttctgtcagcagagtgaagctgaagaaaaggcgtcgcgaccgattgagcgcgtcacggaaaatgcgttcggttggtgccgtgacattgccgttgttgttgcattgttgcaggaacagtgccgaagaggacggcgcatttagcacatcgtattgggcagagggggtacaaaggacgtcgtaatgggccgaaaaagtggaggcaattaacaaaagcaatggcaaagacacttttaggggtaaacaacaaccattggcgtggtttgttcatccgatgtgacttcgcaaatggggccaacgacctcggaacagtgcgaatgtctgttgccggcggagaggcggtcgtattggggccgtgaaggaggagaggaaggcgtagtgagcacttcgtagtgggactaataattaattggaattgcaaaatcagtggggcagtgagacgcaaccaaattgtgtgatggcgacaaaggaagcggcgatttgggaagtggtggcaccgttcgtgggaaggcatcactttctgttgaacattgtgccgcattttgcctcggcgttcgaggcggaagcggcggaggcgcaagcgaatgggacgggtcgaaagcgtcgccattttgcggcgaagacggagaagggcaatgctgaaaatgaaaaaaggcttttacaagatatattttgattagcctacctcttcgctttcccctccgcttgtcattccgtcggttttcctcgtccctttcctttcgccattcgtttgttgcgcggagtgttggcgcatcggtggcaatgaatcgtccaagcctttcccgagttgcgtttggctccctgcaaaaagtctctctgtttcctctctcatacgcttagtcttaagcacagacttt

SEQ ID NO: 38170 - DNA, 907 bp, Heterodera glycines
atcgtaagattgtttgatagggccagacaagagaagccttttgattggtaccaagtttgcagtaaaaaaatgacaaaaaacatatagccattttttggtcaagaattttttttgtttgcgtttcaaatatcgtaagattgtttgatagggccagacaagagaaggcaactgttggtaccaagtttgcggtaaaaaaatgagaaaaaagagatagctattttttggtcaagaattttttttgtttgcgtttcaaatatcgtaagattgtttgatagggccagacaagagaaggcaactgttggtaccaagtttgcggtaaaaaaatgagaaaaaagagatagctattttttggtcaagaattttttttgtttgcgtttcaaatatcgtaagattgtttgatagggccagacaagagaaggcaactgttggtaccaagtttgcggtaaaaaaatgagaaaaaagagatagctattttttggtcaagaattttttttgtttgcgtttcaaatatcgtaagattgtttgatagggccagacaagagaaggcaactgttggtaccaagtttgcggtaaaaaaatgagaaaaaagagatagctattttttggtcaagaattttttttgtttgcgtttcaaatatcgtaagattgtttgatagggccagacaagagaaggcaactgttggtaccaagtttgcggtaaaaaaatgagaaaaaagagatagccattttttggtcaagaattttttttgtttgcgtttcaaatatcgtaagattgtttgatagggccagacaagagaatgcaactgttggtaccaagtttgcggtaaaaaaatgagaagaaagagatagctattttttggtcaagaattgtttttgtttgcgtttcaaatatcgtaagattgtatga

SEQ ID NO: 38171 - DNA, 490 bp, Heterodera glycines
agtagggttgtgaattatatgcatataaaatcttaaaatatgcgcatgaaatatgcactaaaaattgtaaaatatgcacataaaaagtgaaaaatatgcacataaatttttccaaattgaaggtataatttcttaaaatttcttcaaattcgctaaatgtaaagtaaacctttcaaaagtggccaattatggtattaaaaatcattttagataaaaaaaacattataaagctaagattgacgaatttttagcgaaaaatcaaaccaaaaagcgaaattttcgcttttttttatttttgacataaattttcaaatttttaagaaaaatttaatttttgcaatattttttagaaaatttggctaaaaaatgatttttcggataattttccaggctttagaggtaaaaaaggctaatttagctgatgggggacgttctaatagaggttttttgaaaaaatgctcaaaaatgccaaaatatgcacaaatatgca

SEQ ID NO: 38172 - DNA, 878 bp, Heterodera glycines
agataaagaattgataaaaaattatattaaagcatatccttctagatgtttttattaattttttagaattgtttaaattcattacagttaaatttttggtaaatttcatataaataaattttttatttttaaacagatcttaattacttattgtagttgatttttcctggcaattacttgtttttctgctctgcgtttttatttaaattatttttttagtaatattaatttttagaaagtaattctgaattacaaaaataacgatatgatacatggtgtgatcgacccaggagagccatataatttggttttgcggtaatatggcctcctaaatgcttttttagtatttgtgattttataatttggttgtattttataggcaaatataatttttgtatttccgacctatattggtttctctttagtgcgtaaccatttatataaacaatttgtttatgccataatataaaaaattattcaactaatgtaactaaggttttatcattatttttatattatttaatttgttttttatcttctttgcaatattttttgtaaagctcaacattctgcagattatttactattttataattaattttagataataggtttaagtagagttggtcggtaatcggtaattgtaaaaaaaccggtaccggtactgaccggtactgcaagaaccggtaccggtactaaccttttccaccggtaccgctaaaaaccggtaattttgtaaagttaaaaatttttgaacaaaatttttaattttcgcgcgagtgactgtttttaaccaagtttttttttcaaattcagggaaagaaaactaaaaccagatttaaactctaaaattaaagattttttggaaaacaaggggg

SEQ ID NO: 38173 - DNA, 1024 bp, Heterodera glycines
  unsure (1)..(1024): unsure at all n locations
tggcttgctgtttacagttggctaagtcttctttgcaagaagcagcacacttnttgtttgggccaacgacccaaaccattcgaatagcaatcgattgggctgactagactcaatatttgcaggaatagcaatggcaggtctatcttaaaggcctgacgagttatgtttcgacaaacatcctgtacaccataaatcgattttcaaatttagtcgaactatataaatttttcaaaaaatgattcatcttttttatggttagcgcatatgtctctagctttatagaaacggtccccgaatctgcgaggaactacttttttgagaatttctatagattattattctgcatgaatccttcgcttaaattcccatttatctcataaagtcagattaaattaattaccccgatttgttttagaattggtccaaacacgcttgctaatagcttttcttttcgaaaagagaggcgaggaaaaataaaggttgcatccaaatgtaatttttttttacattgaagcatttggatggcttgctgtttacagttggctaattcttctttgcaagaagcagcacaacttttgtttgggccaacgaccccaaaccattcgaatagcaatcgattgggctgactagactccatatttgcaggaatagcaatggcaggtctatcttaaaggcctgacgagttatgtttcgacaaacatcctgtacaccataaatcgatttgcaaatttagtcgaactatataaatttttcaaaaaatgattcatcttttttatggttagcgcatatgtctctagctttatagaaacggtgcccgaatctgcgaggaactacttttttgagaatttctatagattattattttgcatgaatccttcgcttaaattcccatttatcttataaagtcagattaaattaattaccccgatttgttttagaattggtcaaacacgcttgctaatagcttttcttttcaaaagagaggcgaggaaaaataaaaggtgcatccaaatgtaattttttt

SEQ ID NO: 38174 - DNA, 1103 bp, Heterodera glycines
  unsure (1)..(1103): unsure at all n locations
aaaatgccagcagacaaaccgaccgttatttgccccctttcgaaacgtaagcagttgatgacacaagcaaaacgcggctcatttcgctgttcggcaaaagcggtcaactcactgctcagcaaagtgcgactaaataacagcaaatgttggattgtaaaacaatgagactttttcatttttttcttttggtagatttccaaaattcccttgcaaaaaatggcgaaaacccacccggaaatgccgtaattgctgttgtcctcggcagtgttgttgtcattgtcaacgaatggaattgcgaacagcagcggcagcgtcagcttcatcagctggctgtagcagtagttgaactggcggaatcgttcatcgctgacactgctcgccatgaacagtgtttcgacgagtttgaagcacagacgagagccggggtggaacagaaaacgaatgccgggctgacaaaatgagggaaaattaagtgacggaaagattgggtaggctatggcctggctattttttctttggttttaattaactaggccctattttttcaaattttgtcatgctctttttggaacttaaaacaaacagacgaacggtcattcatttacacatacaaatgcgcacctgacagttcaaacagttccttgtcgcccggatcgtctccagcaaacagctgacacaatgctcctcctcctgcgcgttctgttggctgttgtgttgcgtgtcctcctccgagtcggctgctgctgctgcggcggcgctattagaacgaatggtgtccaaccggcgaagcaatttgcccatcagcgacgtcaacagttggaagccgccctcgttgccaaactgtgccaattgtaagaaatggaattgattgtttttaaattttcggaaaaattaaaaaaggtactgagtgaataggggtttcattgaattgcaaatgttgtagattacctcattaatccacgggacattgttgttggtcatggtgactcgcaatgattccagcaactttttgcggtcctccttgcgttccagcgacttctttatccggtgacggtattgggcagctagactgaaaaanttgtttacgcttgaattcataatga

SEQ ID NO: 38175 - DNA, 1253 bp, Heterodera glycines
  unsure (1)..(1253): unsure at all n locations
aaaaagtttggaaattttggttttgtgaatttttctgaccatatctttcttgaatcttaacaaaattttttcgcaattttttcagattaatagaggacacttaggtctatcgaacgatattaaaaatgttggattttgttggcaaagaaaaaagttatagccaaaaacttgcgctcgtactaaaacggcccgtactaaaccgaccccgaccctttttaattttatccttttttgccattcggcgtaaaattgtttgcattagttcaataaatgttattttttatgtatttcttattaatcggggtggggggaggaggaatattgacaatcctattttaaaaagttcggttttaatttcaaaaatatttttttattgcgctaaaaggttaattagatttcccttttctaaagacttttttgaaaatattttgacaaaatttggcatttccttttttagtgtttggcctttttaagaaaattaaaaaattgttttttaaaggtcagacagactccaaaaacatcgatcacacattcatataattaacgcgtgtttgggctaaagcggattggggataataaattaatgccaaagaaaatattgtatcaaaacaatttttagaggacaggaaagacaatatttttaaggtgttctggccataactgctgatttttaagaccttattttggtggagagaaataaaataataaatattttcgggatagcggaaatgttcgacaaataattcggcacgagttttagtgtgctaaaaggggccaaacaattaattagttaaaggtgtaagagccaatggcgctgaaaaaagccccgaataaatttaaagtatgcaaattagtcgaaaatgttttaattgttatttatttggtcgacccaaataaatttttttgtatttttaaaaatggaaatttctgtcaattttttggttgagaatttcagttcatgaaaaaaacgatttttagggtgaatttttcattgattgaatttttttaagaaaacacgaggaagctaagaacaaaaaaattaaaaacccttatttgatttttcgagaaatgacaaaagactaaatgaaatttgatttatttttttagaaatttgtggaaggaattaaagtgatataattaggctaaatttagtgccaattcaatgatgtgatggcattatttaaaccctcgtattattttaatggggcctccttccttctttttgagttgaggccanaagaataaaaatggca

SEQ ID NO: 38176 - DNA, 1062 bp, Heterodera glycines
  unsure (1)..(1062): unsure at all n locations
acattctcgatcatttcgggcgatccatacctttgcttaactacgtatccaatttagaatttttaatnaaagtattccttaaaggatttaaatatncnntaatatgattttgtgtaagatnaaanatttttnaantntaataaagnantttttttgtttgaaattgcccaaaaaagccgttttaccaaaataatgtcctgttgacaaatattatcaatcaaaaatcaccattacctctctcctcctccgttcctaaaagttatttttcatacaaatttcaggaaaactatcgccttctggtcgacgaacataagaattgtccggccgaaattcaaagtgagtttagttgcatttttgaattttcttatggttggagagcaaaaattgcaaatttaaatttagctggtctaattaatggtaaaaaaataaataaaattcacttaaattgtaacatttgtctctaagtttctgtttttttccccaaatcctttctttgtttattattttgatacgttttctcttatgtcgaatttccaccagaaaaaagctgcttcacagaagggggcattggacagaaaaatgaattgaaaagttagccgaaaattatgaaaatcggatgcaatgtttccaatcggaatttgaatggtttccttcaagttccaacttttttctcatttttttgattggttacttccattgggtgccaatgccgtgacaaaaaattgttcgaatttcgaattgatttcccgccccctcctaacataagaagggtctgtctctgtgaagcatcttgtttttgtcatttgaggctgtaagtgcgcacacgatggtcccaccggtggtaacaccccaaaatggtcattggacagcgcaggagcgaaagttctgagggaaattgtgcaccaacttgagctggaccgtccccagcttgggcttgggttggaggaaaaaattggcgtaattcggatggtgtttgaacgggttggctatgactttccggagagtcgggccgccgaaatcatcggccgagcaaaccgcgaaggtggagtcggggccgccatt

SEQ ID NO: 38177 - DNA, 1246 bp, Heterodera glycines
aacaacgggttcagggggttaccggtttcctctaaaaaaaaataaaaaggaataaaaaataataggaattttgcattctcattatgagttatatcaggcttcaaatgagtctgacttgtgtagaagagtttacaggactcgtaagtgaagaaagaaaggccagcataaggcatcacaccgagcagagtggggaaaatgccacggtaaaaagtgaggaagccatgggcacggcactccttgaggaaaacggcacgtaaattttggtactcttctttggtggacacggagagacgcgcctttaaagtgcaaaaaaaaaaattaaattgaaaaaggaaagacaactttggcagtgtccaatgggtaagtaaatacaacggcagtgacaccggccaaagtcccagccaaaaagcgccggtagggagttgggctgaactaacaaagaaaaatggaaatggcaaaacattggtggacacaaaaagggggtttcctgttctgggaaaccaaaatttaaaaaataaaaaaaccaacaaaagaccgcgcagaaacaataataatttggaggcaaaaatgccaaaaatgaaccaagattaaaattgtcttttttaatttgtcgaaaattttttatttttgcacgggccttttgttggcttttttatattttaaattgtgacccaaaacagtaaagtatccaaaaaagtacaattatcagccaaatttctgctaaaaaaaattggatttaaaaaagcacacccacctatttttatccacattcagcatgtgtttgaattcctcatgtgccgcgaattgaacggcggcgtacggcacaacacgcgcgagagaagcggaattgccgcgaaaaagggctacaaatccttgttcccggtaggtcaaaatcacaaatcgaagtgccgctttgaaagaataacgacgagaaggcgacactgaaacacagacgaaacattattgaaagaaatgtggaattttggaaaaatttgttgttggacccaccttggaaattaatttttgtcctatccaaaggggcgatcgccgttttagcaaatgctcctaaacacacaccattattagcatattaatgaaaaaagtgagaaagagaggacctgcaattgcgccggatgcaagtgaatggaaaactgaactgaatgaacgggttggacttgagccgtcggaaacggaagcggacgaccgggcggtgggtcacttcaaattcaaatggaactcacaacga

SEQ ID NO: 38178 - DNA, 1107 bp, Heterodera glycines
tttttatagatttttaaatgtttggatttttttttgtcttctctagacttcatcgaacctggctctttttaaacatgccctaaagtttaggcttaactttttttaattaaactgatcagaagcgcaccagattttgcaagggcatcaaaaagacaaggaaaagcaccgctatgatgctaacgccagtaactcttaatttaaaaatttttattaatttttaaaacttcactattttatttttttaatagatttttaaatgtttggattttttttggcttaccaaaacttcatcgaacctggttctttctattctctttcaaatcgccccaaattttttttacagcttaactaggccctattaagcttatttccagaaaatctcgcatgaattctcatttttaaattttttatagatttttaaatgtttggattttttttggcttaccaaaacttcatcgaacctggttctttctattctctttcaaatcgccccaaattttttttacagcttaactaggccctattaagcttatttccagaaaatctcgcatgaattctcatttttaaattttttatagatttttaaatgtttgcattttttttggcttaccaaaacttcatcgaacctggttctttctattctctttcaaatcgccccaaattttttttacagcttaactaggccctattaagcttatttccagaaaatctcgcatgaattctcatttttaaattttttatagatttttaaatgtttggatttttttgggttaccaaaacttcatcgaacctggttctttctattctctttcaaatcgccccaaattttttttacagcttaactaggccctattaggcttatttccagaaaatctcgcatgaattcctcttttttaaattttttttagatttttaaatgtttggattttttttgggttacccaaaacttcatccgaacctggtttttttctattctcttttcaaaacgcccccaaatttttttttaaccagtttaaataagggcctaattaagcttattttccaaaaaaatccccccaaggaaattcccctttttttaaatttttttaaaaaattttttaaagggtt

SEQ ID NO: 38179 - DNA, 1031 bp, Heterodera glycines
ttattaaattttaaaaattttttaattgctttttaaacattccaaaaaatgtaggcttaacttttttagtgtaaattcgatcactcatattttttgctaattgagcagaagcgtaccaaactttgcagggatactccccggtaaaggactaacttacactgaaatgagcgccgagctagctggctcaaaaaaattttcgaaaatctgagtctttcgtttttatttattttttgcaaaattaattcttaaatattttttcagaaagggttctgaaacgcaccaaattttatttacatgttagtttaggcactctgatgctttttctatcaaaaagggagatgaataaaatttttaaaaatttttaattcctttttaaacaggccaaaaagtttaggcttaacttttttttcagaaactgatcagaagcgcaccaaactttgcagggatactgaaaggaagagaaataacctattttaaatattatctagtcagttcatttaaataatttttatccaaaaaatttttttttgggttttcggggcagtccccctgaaccgatgcgcccagatttataaggagtccgaatccttcgggaatagcttcgatatacctctactttatttttaccttggatttttgctccccataattgtttgagtaccccaaacggacacttgaaaaaatcgatttttttatttcataaatattttttcagaaaatgctctgaaacgcaccaaattttatttacatgttagtttaggcactctgatgctttttctatcgaaaagggagatgaataaaatttttaaaaatttttaattcctttttaaacaggccaaaaagtttaggcttaacttttttttcagaaactgatcagaagcgccccaaactttgcagggatactgaaaggaaaagaattacctgttttatcacattagcttgtcatcagtttttataaaaattttcaaaattctgagtctcctattattttttttttttttccaaattttgaaggcggggggggggggggg

SEQ ID NO: 38180 - DNA, 1005 bp, Heterodera glycines
  unsure (1)..(1005): unsure at all n locations
aatttggcattgtaaataaaacgccaaatctcacacctttcactgtttttcaacttgatgcattgagaggagggggccaaagccccaattcgcccctttctcctgccaaatcgcccttctattcaattagcactgtgtcagctttcaaagtcatctccaactgctcacattcggtggaataattgcatttaaacgcggtattctttcacagttttctttttgaacttttgcatttctaacggataaaacataaagccttaacttttttttgttgttggaatttattagcacggatttcgtgttttttaactaaattctgcagttttttcagaactttcatcccctgtctttaaactatgaattttcgatgaattatttatcagttttgttggttttaatcattcccttttctcagatgccttcggctaacctttcggaccattcgcggctgttaaagggcggccgcgggttggcccaccacaaattgggccccggcgtggtggccttgcactcgtccgccttccaggagatggacgagtacgcgccctatcgcatcgtcttccttttgctgtttattgtttcttccgtggcgctgtgggcgtcctacaaaatcatttggtacgctccattaattacgaatcatcgtcatttacataaatccgtttaatgagacgccatttcaaagatccaaaatatgggcaaaaaaagatacatgtaaattcttttgccttgaaattgctcagaagacacaatattaagtgtagttagtctttttcgaaaaatgggaaagtgagcagggagcggcgctgccggggaaaaatgggaaattgtggccctattttacaaaacagtttaccaaaacatatataatattttcagtcaaatcttgaaaaactaatggtataaatttttgggagnttcggtggtgccgacaagcgacgcctgaaaaaaattngnggttttaaatgaaaatggtaaaaaacagtcaaaaatttttggtttttt

SEQ ID NO: 38181 - DNA, 710 bp, Heterodera glycines
  unsure (1)..(710): unsure at all n locations
ggacgcgcatggctcncacgcggtcgtcaaagtattcttccagcagcgcgtggcgacagctgatgaaagacaaaaaggatgtaagaatgacgaaaagtaaaacaattttgaaggtttccattattttactgttttcccattcgtccggaaattttttacaaaaaaaaatccagcaaatttttataaagctaataatcctgcctaaattttcaatttttcaaaaaaaaattaaattaaaaaattcgaatatttttttggagtttccgtttcctcactaaaaattttacatagaattttttttttttgaaatccagcaaatttttataataattcttcttattttctgcttttcacaaaagacaataaaaaaagtttcgaacaattttttttaaattttctatttcatcaaaaaaattttctacattttcttgaacttgcaattcggaggaatggtaagtggggggggggggggggtacgaagcgggagacaaattgcaccaatttgctcgctgttttttgtcacctgctgccctccaaatattcgatcattttgttgaatccgcgctcaatttcctttttgcgctgctccaccaattcttttgggcacattttttgtctgcaaataaaaagaaattaaataagtaaatacgtgtgatctgttggtgttgacgaaaaggtaattttttgaaatacaattttaaaaattcaat

SEQ ID NO: 38182 - DNA, 1116 bp, Heterodera glycines
tttttaatttctcacatggtacaaattcaattttgggtcaatgttcgcaatttcttttgatgtcccactcattttgaaatgtccattattgtcggttttggattgtgccatcaaatcatcaattgtaaaatctatcaaaaaaaaaatttgaaaattattaatttcttaaattattttaaatatttacggtcattgtcgtacagctttacttttgtcccgacacttggctttccttggcatttgaggtgtccagaaactgttacagattgttttgtgccaaagggatttgccagtgccatttgcaaaagcatggttaaaacaagaaattttgaacacattttcactgaaatttaattacattaaaaaaagttataattatttctttatatttaaaataaaataaataaatagaaataaaataattaatatttccaagattaaatgcgttcttttttgtaaaatttctttatcttttgaaaattttatttcaatctttgaaaatatctaattttatttctcattaaattgccataaaaatataaattttattaaaatttaaaaatggttacttgaaacctttttataaaaatattttataaataaatttaatattttaaatcaacaaatgtaaaactaacgtcattttttatgcttttaataccatgcacaaattgttttgttttcttcaaaagaatgaataagcggtataagaaatgctttcatataattgaaaaactttttatttaatcataaatgtatgattcattaaaacctagcattccaattcctttacaaaaaaaaaaaaattttttttgtttcgaaacatatcattctatgtaaataaaatatgtataaaaaatgctaaaatatgtatgaaatatgtacaaaaacccccaagtatgtactaaaatatgtaaataaaattttttaaacggttattttttggatgaaaatttttcataaaaagtgaaacagaggcataaaatgccataaaaatgaccaaaataggcttagaatcacattgtagtatttcaaaaattaatttttgatatatcattttttgaaaaaaattccattttttagggatacattttcaaaattttttttttaattttt

SEQ ID NO: 38183 - DNA, 1053 bp, Heterodera glycines
tatcaaaaaaaaattaaatataattttttatttattatctccctaaaatattttaaattaattaaaatcattgaaaataacgtaaaaatgcacagaaaaataatgttacaccgtccggatccgaacctgccccctcccccctcaaaatgatgcctcagaatccccaatcacacagggattctgaggtcttgacgatgtcaaaagtaaaatctgatcacgtattcgtgatcagcgtcataaaatagccctaatgacatgtttttggaagatttttggtgaaaaaaatttttcaatcaaaaatcctgtcacccccctttggtcccgaatcccaaaatcacttttatttttgtaacatctctcaaaaaagtgataaaaatgccaaataaaatttatataatagagcaaaaaattgcggatttttttagtattttacttttacagtatgacttttcagaaccgagttatgaatttttttctgaaaaatcgaaaatttccagaaattctggaataactttttttcttttgaacattataaaaccaaataaatctcataaaattctccttatttttctctatttttaaggctttattcctgtaaaattgatcaacccttcgatttgttatgaattttcaaatatttggccaaaatcccgagggccaaaaaattgccaaaaaataaagaatttttaaaaaattccaaaaatcatgaaacgaaaaacaaaggtcaaattcgagctcagcaccttaatttaccccagaaaaatatttttcacaccctttttcgaccccaaaaaaatttttgaaaatttctagggggcctagctcgaaaatttttgaaattttccgggcatatagcacacctttcgatagagcttaaaaagctctacaattttgctctaaggcattttttggctaaaaccaactactgacgagttatgggcccaggactcaaatgtcccgctcaggccaaaaattttttctatttccgggaaaaaatcgaaaattttccgaaaaaaataccagtcgatagagctcgaaaaactatgtttttgg

SEQ ID NO: 38184 - DNA, 1487 bp, Heterodera glycines
cagatcaccgacgaggaactcaaacaactctgcaacctcctcacggacgtcttccggatgcagcagacgctcgtcaggatccgcccgccggtcgtcgtcgtcggagacatccacgggactgacaacagttgacccccaaaaacaaatttcagatcaagtacccatcgaacttcatgctgctgcgcgggaaccacgaatgctccaacatcaacaaagcgtaagtattgtttttttttcattttaatcttcaatcttttttcccctttcagttatggcttctacgaggagatcgaccgccgttacccgcgaccgggcgctcgtcgactcttcgacctcttcaatcaagtcttcgcctggatgccattcatcggactgatcggcgagaagatcctctgtaagtttttttcccaccatttttcgataaatcactgatccacttttttcaggcatgcacggcggcatctccgacaagatgcgcagcctggatcaactcagcaccctgcgtcgaccacacacaaggccaccactccgttcgctcgaaattgatctactttgggccgatccagcgcaaggcatacgaggcgtcgtcccgagtaccagaggagcgggcatcctgttcggcgaggacctggtcgcccaaatacgcactcggcttggcatcgactacatcattcgggcgcatcaagtaagtttgtgttttcaatttccttttccataatttcttcactttcagcttgtccttgacggagtggaatatttcgccagtcgccgcctgatcaccgtgttttcggcacagcgctattctgggcggacaacacgggagcaacgctgacaatcgcgccggatttgacccacacaattacacgcttcccgccggcctgaagacgagaaggactgaactcacaaactgaaccgaaggatggtggaactgcctgaacgatgcacgttgagaaatcggatcatctgatttttttgtatgtaaatcccatttcacttgatgaactccctcaaactgttgtcatttcaattggttaatctcattttataaatggtttatttttctagataaaattagaaaaaatgaaggtcagcttcaatcagtcttttcaaaattcacattttcttaaaatttagctctcacaacttttttctgaggtgtcaaattgcttagaattcgcttagaaaaaattctccttttcaaaatcttttttagatatcaaatttgttcggtttagttgggaatcaagcgaattatggttggtcaaaagaaactgcaaaatggcaataatcagtgtaatttttgaattagcgtgcaaaaaactacgccaattacttatttggcgtatttaaattgcattcgcatagtgcccgataaataaatttttgttttttaataaaacaatccttatttcccaaaaagtttatttgttaattagaaatgtcgtctgatcagccgtcatcatcagcatcttcatcaacccatcaga

SEQ ID NO: 38185 - DNA, 788 bp, Heterodera glycines
aatagcgaaaaataacacttatgttaatgaacgtaaaaacttcacttggagcacgtaaatgatggtgaacggaagccaacaacagatgaaacagccgacaacaactaaaaagtaaatttgtaagcagcgttatttggcaaattggtccacagcgaatggcctaaattgaccgccccccccccctcccggcttttgttgtggtgcccacctgcgattgtgcgtgccacgcgcatttccgtgcgtaacgaattcttggcgaactgaatggtcgggtatagcaaaagccgctcgctttggcgtcggttaattgtggtggtggtcgaatgttttgtacagccaccgcctccgccggcaaaaagagaagtgatcaccgccggaaaccaaaccgcgcggtccaccgtccgctcgatggccgaacgctgctgctggagcgcggcgatgcaacgcaacttttgctcgtgctcaagcagcaggtgcatattgtgggccaacgcggcgcagccgcgggcgttctcatccgtcggcgccgaactggcggaagaccacaaaagcattgacggacagaagtgggtgctgccatgcttctgctgcagctgggccatttctgtgattggcgaatttttcaataattgtaattagcttcttcttttcttcgtttatccttgagaaatgtcgactttcctcgaggactgtgtctaattttgccttagttttctcctccatacactaatcgctttaattttgctaataaatggatttctttttcggaattctgcacaattcggtgc

SEQ ID NO: 38186 - DNA, 1167 bp, Heterodera glycines
gcagctggggtgaatattttttgttttattttaaactccctttcatattttagcaagtggctgattatttaaatagcctaactgtcgactgtgaatcacacaatttttgggcaaatcaaattcaaacagccaaatatccattacttattccattagtcaaaaaatatcattcggctccatgtacatcagccgagagtgaacggatgttttctgcggctaaacttattgtgacagatttgagaaaaaatttagcaggagaaacgttgaaagaactcctttttcttcaacagaatttgcctctttatggatttaaattcgaaatttaattgaattttactatctggataaattttttggattaaaaaattgaaaaacttcgtgcttcgagcttcgaaacttcgcggtttttgggcttcgaacttcgaacttcgtgcttcgaaaaaaattgggcttcgccttcggcttcgagtgccgagccgagcttcgcccgtccctgatggggacacgggaaatgggctaaggacccgtgaaaacgaatgccctggtagacgcgaattgcaatggcattttttgaaatttcaggggaggagggaaaagggagaaacgatattcttctatttcacaacaaacccaattgatgaaggcacgcagagcctgcaaaatgggagaaggcataattttatggaataatttaaagcgatttgatcagtgattggaattaattcgctttttagtcctatttaaaaattttatttttcatattctcaagtccaagtttcagccttttcctcaaaataaaaaaatttaggccttcaaattagagcaccagtgctcgatatccttaagaaagattttgaattttctaacttacatcttttctcatctgtttgggcttaattttttttacacttaaagatttgtgaaacgatttttccaaggaatgactgcccctaaaaaattgggtaattattctcgcttaaaagctcgattatcgagtggattttttcggcttttcacatcaataatattgtccacgggaatgacgaacaaaactgaccatccgttgggcgggcaaaatcagttccatgacaaatgtgcagacaactaccaaagtaccaccaatggacaagccgaccatgaagcgggtggccaacaaaaattgccatg

SEQ ID NO: 38187 - DNA, 954 bp, Heterodera glycines
agtacaggctatagggaagctattcccgaaggattcccccaccccccataaatctgggcgcatcggttcggggggactgcctcgaaaacaaaaaaatcgattttttcaagtgtccgtttggggtactcaaacaattattaaaaatttttagatttttattcatctccctttttgatagtgaaagcatctgagtgcctaaaataacttgtaaataaaatttggtgcgtttcagagcagtttgtgaaaaaatatttatgaattaattttgctaaaaaaataaaatagtgaagctttaaaaattaataaaaaattttaaattcagaattactggagttagcatcatagcagtgcttttccttgtctttttgatgccctcgcaaaatctggttcgcttctgatcagtttataaaaaaaaagttaagcctaaaatttttcgcaaatttaaaaagcaattaaaaatttttagattttttattcatctccctttttgatagtgaaagcatcagagagccttatttaacttttaattaacatttggtgcgtttcagagcacgttctaaaaaatatttatgaattaattttgcaaaataataaataattaatgaaaaagtcagaatttcgaaaaattttaaaaacaacaagcgttggcattttttcaggttaagttagtcctttacaatggagaaggacctgcaaatttggagagattatatcgattttagtgcgctaggttcgatgaaactttttaaaatataagcctaaactttttggcctgtttaaaaaggaattaaaaatttttaaaatatttattcatctccctttttgatagtgaaagcatcagagagccttatttaacttttaattaacatttggtgcgtttcagagcacgttctaaaaatatttatgaattaattttgcaaaataataaataattaatgaaaaagtcagaatttc

SEQ ID NO: 38188 - DNA, 957 bp, Heterodera glycines
  unsure (1)..(957): unsure at all n locations
tctagagtatnnttcttgaccaaaaaactcaaagcaggttggttcttggctagaaacacattgaacgtggcgaaaaaacgtatgaatgtgcagttttggagggaaggccgtttcagtcggaaaaattattcgaataattaaatttaattattttaatatatttttttattaattagtcaaaataaacaattattaatgtgtaataaaaccaaaactacattcaattgcacatgcaagaataattattaattaattaataatttgtaacccaccaaattgttgtcccccaattgtcactgttccgatccaatcaccgccacgttgagcagttgccattttcttcaattcgtcatggcccactttgttgagcccatcaagcgtctgagctgcatttggcgatcccatcatttcgagaaaaaacgaaactttgtacttaaaatggtttcaataacaaatttaaagggtgccctgcttatgtgcttaaaataaaattgccttcggtttaagcagctctttcttgagctcatcgtttgcgttttttaagcgctgaaatttcgctgtcatctcagcaatattagagccgtttttgtcaggatggtatttccgtgcaagtttcttgtacgccttgcggagtgtcttgcggttaaagacgggaccaatctcggccatgagctctctggtttcctcggcaaaagttgcttcgctgttttggttagtcatttcctaaataacttacaattagcaaatgcttaaaggcacgaaaaataaaaaagttaataaaagtaaaatttgaagtgattttaatatgaaatttaaaaaaaaataagtttcttanaatttgtaagaagccaacttattactgtatttgtgttaagaattttctgaaatcctgaaatatacttataaaggaaaaaaacgtttggngtattaggaaaaaattttcatcaaaatattatg

SEQ ID NO: 38189 - DNA, 1388 bp, Heterodera glycines
aaagggatccaatttatttaataaatattggcaatttctttattaaaacaaaaaactacaacattctcacaacctttttttcagaaaatagatgactcgaggccgggcctcagtttttataattgagtttatatttattaataatcgttttataaggcagatgattcaaacggtagttgtgatggattgtttggagaattaggtggctcaatatcaattttattttgttttccttttgcatttaaaatcatttattgctaattgttttggttaattgacaattcatcttctggcaattgtgatgcatgaccatcggcatctttttaaaatttctttttcggagacaaaaaaaaagagtttgtgttccctcgtgcgcattttttttttctagctatgtgatcgactcccatcactttatctcttgctctcgggctgggtgggggttagagggctgggaaaagccaaattgaaacattttcgcctccggcacgacgcggggagcgcaatatgccggaggcgctcaatttacgcctcgtcgtgctttcgctaaaaggtcaacaatttggtttggcattacttcctctccctcctcctccttttgttcttccttcatttttgctgctccaatttccggcatggcacacactatgattttctctttttcccacaaagggtttctttcgtagaggcgaaatttagtgaattcaaaggcgccgacaaaaatgacaaaaatggcacatttcaccaaactttttttttgcgtcattgaagaagaacgattcaaaaaatgtatccaaatatgaaaattacatttattaattttcccgcccctatcataattaaatttacaattaaaattacattttcccacttctgaagagtgtgagtttcattgcttgcccattggaaaatccctaaaaaatgcttcaaattgatcaattttggcttaattaacggcctttcgtttgttgtgactcgttctttgctgggcactcattttattaaattaaattttggattacatgcttttgtaagtttaagacgagacgatatgtaatccaacaagatttttgtaccgatttttgatttgctttttacttaattaattgaaaagcgcgtgcgcacacaatgaaatctgtgccggcttaaataaataatgacaaagcattaaattaaatgccaagtgatcgatgctatagtcatcgtaagaggggctgctgctgtacaaaaaagtggaaaggtcatggaaatgttataggaaatgaaattccctgcgcttcggcatggcgagcagttcgttccccccccctcgaaattttaaaattttaaacagatatttttaagataaatttttgtaaatttttattagaaattcaagaaaaaattga

SEQ ID NO: 38190 - DNA, 773 bp, Heterodera glycines
tcagtgccattcctccattttttctgttcctgacccactagcaattcttctaattagtcgcatcgtttccccattccttctgatcagctatctctccctcattttcctttaagcaaattgggacttttgatcagtaccatttttctttcatcaaattgcgcgcaattcttctgaatcacacctcccatgttcctttgatcaaattgtcccaatttattctgatcggattttgtttcggccatttcttttgttcgacttccccattttcagtgatcaacacacattcttttttgatcagtgccattccctcatttctttttgatcatttggcacacattctcttttgatcatgccattttcccatttctttttgatcatttggcgcacattctcttttgatcagtgccattccctcatttctttttgttcatttggcacacattctcttttgatcagtggcattccccatttctttttggtcatttggcacacattctctttcgatcagtggcattcccccatttctttttgatcatttggcacacattctctttttgatcagtgccattccctcaattctttttgatcatttggcgcacattctcttttgatcagtgccattccccatttctttttgttcatttggcacacattctctttcgatcagtgccattcccccatttctttttgatcatttggcacacattctctttttgatcagtgccattccctcatttctttttgatcatttggggcacattctcttttgatca

SEQ ID NO: 38191 - DNA, 901 bp, Heterodera glycines
tttcaaaaaaacaacattttaaaaatttcaactaatgcttcctgtttgttgtttttcgctctgtgatttttcgaattgctaagcccgcttttcctcctcctccccctctgtgatgaatagaggagaattactggcggatttttgaatgcatcgcgcgaattggcgttttgtttaattgtcgcgcggcggcggcggtggggaaaagcattgactgagaataatataatagataattcacgcactattcatccattgaatttggagtgaaagcaaaagcaatgcgcattaatttatttgccattgtgatcaatgggcatcagaaaacaatttatggggggggggtcaatttttgaggggaaaatgaggggaaaatgaggaaaaaatgaagaggttggagagcttaataaaaaaactgaggaatagaaagaccggtggatggaagggaaacgcccagttcggcgcagttggtaatgacttttttcattataaaccaaattaaatttttgatatgatgcgatagttattaaggttcacaattagtaagctaaatttcaaaaaatttcatcaatttacaaaaaaaatatggtgaaaaaattgactttttcatagctttttcagcgctacatgccataactttttttttacaaatagcacaaattgtgctatcaaatggtgcccagatttgctacgtgaactggcaaagaaaaatgttgtggcatttcaaagttggcggcgccgaaacagtcggcaccgaactgataccgtaggcaaaaatgttggtgatttggggaccagggggccggtttgcattttgcattccctaacttttagtcaacccaaaattttataaaaagtgataaattagaaaaaaaaattcataagtaaaaagtttaatctcata

SEQ ID NO: 38192 - DNA, 1056 bp, Heterodera glycines
  unsure (1)..(1056): unsure at all n locations
attatttctatgaaaatttttatcgcattttcacagccttacagacttttcgtccccagacatatcattttcccggatgctcataataatgccgtggctttgatggggcttatacatttgataaccgcggcattgaattttctagggttatacttaaattcgcattcggtgatcgtcagagagtttagtttaattccggtaccgagattagcgagagcaattatatttacgattatcggtctttgcatttttgatacaatgtaccaatcaaatggtcctttcactccctttatataccccttctataaatagcaacccaaaataaaattaaattgaaaaatgaactgcccacataaaattaagtgttgtcattactgtccctgtcattacgagatttgtagcaggtgtaaaaagcacagtcgcatttcggtacatcattttttgataatttctggatatgccccaaatgcgcgaaatatgttccctatgaaaatataaatagatcaaataaataagaggcattaaaaatgtttcgcggtccgttcactctaattctctcgggggctaccgggagtggtaagacccgttggctattacggtttttaaaacatcataagattctaattgaaccaccgcctaagaaaattctttattgttatggtgagatgaatgatagtattttagggttaatcggggagggtgttgagacttttaacgggattccggacatgaataagattaaagaacaggaaaaaccccttttgttaatacttgacgatttaatgcttaatatccagaatactttcctcgatctactctttatcaggggctcccataattggaacgtaagcgtaatttttgtaacccagagtctctatggtcgggacattaaaaccggcagaaccaacgcacattatctgggtttaatgcgcaacccttccggacaattacatgtgagaacattgnggtcacaactgttcccaaaagactgaaatatttcatggatgcatatcatgatgcgaccataacccaattagttatctcatgattaacatg

SEQ ID NO: 38193 - DNA, 595 bp, Heterodera glycines
atatggactaaaaagattgaaaagggccaaatatggaccttccactgccaaaatatatgatttaaaccttcaaaaaattcaaagaacatgtttatattcgaaatttgcttaaatagacttaaaaaatacacaaaaaaaactgccaaaaaatggattaaacattaaaaatgccaatttttgtttattaaattgtagcttcacaattgcaaaccaaatgtgcagaaaatatgaatatccatttaatttatagccctaattattagtttaataatttacaataatttatttgtttacttggcatttcatttttctctgcaaatgtttttgtggttagttgttggttttcaacttcagctgctggtggattatatgctcccacaaatggcaccgttggaggtccatttttcaaaaagtgagttgctgacaattttgaaaaagcaaaatttataaatacaaaacatatgattttaaattaaaatatattatttataaataagattgtattatttataaaagaaaatatattaaaagtcgtttttgagacggtttttcgaaacatcattttcaatagatattaaaatttgacatcatgaaa

SEQ ID NO: 38194 - DNA, 1013 bp, Heterodera glycines
  unsure (1)..(1013): unsure at all n locations
atataacgaaaataatttacaccgtccggatccgaatttcccccctcccccctcaaaatgatgcctcagaatccccaatctcacagggattctgaggtctaaacgatgtcaaaagtaaaatctgatcatgtattcgtgatcagcgtcataaaatagccctaatgacatgtttttgaaagatttttggtgaaaaatttttccactcaaaaatcctggtcacccccctttggactggaatcccaaaatcacttttatttttataacatttttcaaaaaagtgataaaaatgtgaaataaaatttataaaatagagctaaaaattgcggatttttgtagcattttacttttcctgaatatcttttcagaagcgagttatgaatttttttctgaaaaatcgaaaatttccagaaattctggaataactttttttcttttgaacattataaaaccaaataaacctcataaaattctcccgattttttgctatttttaaagctttaattcacttaaattgaccagtcctccattgagttatgaattttcaaatattaggccaaaatcccgagggccaaaaaattgccaaaaaataaagaatttttaaaatatttcaaaaaatctgaaacttaaaataaacatcatattcgtactcagcaccttattttaccccagaaaaatatttttcaccctctttttcaacccaaaaaaaaattttgaaaatttctagggggcctagctcgaaaatttttgaaaatttcccttcatatagtataccattagatagagcttaaaaagttctacaattttgctctaaggcattttttggctaaaaccgacccctgacgagttatgggcccgggactcaaatgtcccgcttaggccaaaaattttttctatttccggaaaaaatcgaaattttttcaaaaaaataccattcgatagagctcgaaaactatngttttggagtggtcttcgttttcccggggaaattccgtaaaaaatcataaaattcaaaa

SEQ ID NO: 38195 - DNA, 676 bp, Heterodera glycines
aaaatcgtcctaataattatttaatttgccccatctctcttaattcgtcgccgtttcttccagtaagttcttaccgtccatctcctccggcttaggcagtcccataaggtaaagcacagtcggggccacgtcgcacaatgcccgcgcccggggcacaccctccgcagtggtgggcggcgcacttttgaaggagtgtgcagcggaagagcaggtgaacggaactgaaaaatgcaaaaaaaaatgaacgagtgttcaaaattaatgcttttcgagaactgacctttgttgcgcgtgtgtgccgtgtgtgggccgccatcatccgctttcatttgctccgcatttccatggtccgcggtcaccaacagcacataaccgtgatttctgcatgcctccaaaatgcgtccaattgccacatctttaataattaggggaaattaaatctaaaaatgagaaacaaaagtgtggatttgtaccagtcgcttcacacgccttcaccgtcggctcatatttaccggtgtgaccaaccatgtcgggtgatgcaaaattgcacatgatgaacgggtgcttgcctaattcaatttgtttgaccacctaaaagtagaggaaaattgaaatgccaaaaacatttttggaaacaatttcgttttttactctctaaaaattgtggtgccccccc

SEQ ID NO: 38196 - DNA, 671 bp, Heterodera glycines
ctgaacgaggcacgcatcaaacagaatggactgaaccctctacaccaaatgatcgacatgggacagagcaaactgaacctgtctttccaacacactaagcaaaccatcgacgaggcaattccattggaagcaattttagaattaaaattgacattgtcttttttcgttttttaaggcgtgcagttttctgatccaaacagtgcacgaggcgcagaagggactgtacactcagttggagagcatttacggatacaaacaggtgaaagggacgagagggagaaggagggggaaagtgccaacagcgaataacccacccattcagttgcaactgacaatgatcgagaaggaagtgcagaaagtgaccaaaaagatgtcgcaaaccatcgaattcacgcaacgtctgctgaaatattcgtcacctacggaggtcaaaagggcgcgctttcccccgtccgcgtcttaccacccaatttgcaggtcatcgtgttcaagccgttgttggactcgcgcctccagggcttcctcaccttcaatgctgactccaataatttgcgcgatgcatgcgaaatccgttcatcttcgcttgacttacaactcgcgcgtcaaaccatccaacaggtccataaccgggcttctccctctttgttcatccctctatgtcccttctcttc

SEQ ID NO: 38197 - DNA, 905 bp, Heterodera glycines
  unsure (1)..(905): unsure at all n locations
gctaattgagcagaagcgtaccaaactttgccccccactccccggtaaaggactaacttacactgaaatgagcgccgagctagctggctcaaaaaaattttcgaaaatctgagtctttcgtttttatttattttttgcaaaattaattcttaaatattttttcagaaagggttctgaaacgcaccaaattttatttacatgttagtttaggcactctgatgctttttctatcaaaaagggagatgaataaaatttttaaaaatttttaattcctttttaaacaggccaaaaagtttaggcttaacttttttttcagaaactgatcagaagcgcaccaaactttgcagggatactgaaaggaagagaaataacctattttaaatattatctagtcagttcatttaaataatttttatccaaaaaatttttttttgggttttcggggcagtccccctgaaccgatgcgcccagatttatggggagaccgaatccttcgggaatagcttccctatagtctgtactttaattctgcgttggagttttgctccccataaatgtttgagtaccccaaacggacacttgaaaaaatcgatttttttgttttcggggcagtccccccgaaccgatgcgcccagatttatgtggagaccgaatccttcgggaatagcttccctatagcctgtactttgattctgcgttggatttttgctccccataattgtttgagtaccccaaacggacacttgaaaaaatcgatttttttgttttcggggcagtccccccgaaccgatgcgcccagatttatgnngagaccgaatccttcgggattagcttccctatagtctgtactttaattctgcgttggatttttgctccccataattgtttgagtacccaaacggaca

SEQ ID NO: 38198 - DNA, 502 bp, Heterodera glycines
gcattaaccaaatatataaaaggaaatgagaaatggctcacaccgggtgcgcgaggggggggggtccttttcgaaaatccttagaattctcctttatggccatttcgaactcacaaatgatctgaagccgtgtttgaaccgcgtcagtaagatatgtgcttttccagcgatcaacattatcagaagcagtcaaacgaacagaaggaattgcgcggtaaacaagaaagcagaagggggaatgttgccgtaaggaaagtgattaagtgggaagggagtgattgagggagtggggggggggcaatcgcaggacacccacagcccatcgattgattggaccgtgcttagggaaaggacaactgtccttttaagtatacaaatcatcgcaagaacataagagatcagacaagaagtaggcgggtgattgatgggctagaaaaaggggagaacgcaattggcccattggatgaatggcaccgaagtgttgggattttattgctaaagg

SEQ ID NO: 38199 - DNA, 871 bp, Heterodera glycines
tttactacaggatagcttacacagaaaactctctacctgagaagtttcatgcaatataaactcattccagcggccttaaatcactgccttctgccgatcttaatatcgcacgaatttctttcataaccattttttgaaagctactttcctctcacaaaaaacacattttttcatgcgaaaaagcattatttttcggaaagacattctccaataatataatacactaccgcaggtgcgactcaacccaccagcatttcaatcactgggactcaacccaacagcatttcaatcactgggactcaaaccaccagcatttcaatcactgggactcaaaccaccagcatttcaatcactgggactcaacccaccagcattccaatcactgggactcaacccaccagcatttcaatcactgggactcaacccaacagcatttcaatcactgggactcaacccaccagcatttcaatcactgggactcaacccaccagcatttcaatcactgggactcaacccaccagcatttcaatcactgggactcaacccaccagcatttcaatcactgggactcaacccaccagcatttcaatcactgggactcaacccaccagcatttcaatcactgggactcaacccaccagcatttcaatcactgggactcaacccaccagcatttcaatcactgggactcaacccaccagcatttcaatcactgggactcaacccaccagcatttcaatcactgggactcaacccaccagcatttcaatcactgggactcaacccaccagcatttcaatcactgggactcaacccaccagcatttcaatcactgggactcaacccaccagcatttcaatcactgggactc

SEQ ID NO: 38200 - DNA, 564 bp, Heterodera glycines
agtaaaggtgtacgattggcaaatggcatttacgtgctctccctggacattgtgttgaccaagcgttgctatgtgctccctttgaacggcactcagttgggcaaaccgatttgtccgttggaaaaaaatttgccattggaggagatcagtgggataaaggtgaaacggatggacgagagtcggagttatcgtggtcaaataggtcgggaccaggaatcgggtttgatcaactcttaatttataaaccagaagaaatttattggttaaaaatatttaacgaataagtaacaattgtttctctatttttttcgtcagctttttctatgtggaatatttatatgatggttcggcggtgccagaggcgccgccgggaaaattttgaaaatttccttttcgtctataaacaaatttttacaaaaatttttggtcaagttttgaaaacattacgacatacatttgctaactttcctctttaggtgcatggacaaatgttgcttgttggagacccgctagtgaagcaatatgatgacgagataaaattcattaaagaagaggtagatctaa

SEQ ID NO: 38201 - DNA, 204 bp, Heterodera glycines
tttcaatcagtggggactcaacccaccaacattccaatccttctgactcaacccaccagcatttcaatcagtgggactcaacccaccaacattccaatcaaagggactcaacccaccagcatttcaatcagtgggactcaactctccagcattcaatcactgggactcaacccaccagcatttcaatcagtgggactcaaccca

SEQ ID NO: 38202 - DNA, 939 bp, Heterodera glycines
  unsure (1)..(939): unsure at all n locations
tcccatatgctgtgatttattatatgcatatttgctcccccaagataaatttttttagtgagattatgaatttttacatttaattttatttaaacaattaaatgacattttgccaatcatttcgtcaaataacattgagaaattctcgctaactagactaaagtctaaaattgggttttagcattataaattgttgttaaaaataaaaagacatatataatgatgattttgtccgacgattttggttgaattggcgaaaagtccaattttgcctttctcagctgacaaatgtcaatttggcaaaatgtatgtacacgatataaattgaatattttgccgaaaagagcggcgttctcagtatctaatgctgaccggttcaggaattattagcccaagaccaaaagttcgaaaaaaaacaattttaaaaatttaaacaaaaaaaaattcatcgaattccataaaaattgagcccgtttttctgccgcggattaattcatttttcgttcttttcattaaaaaaattagcaaaatttcctagccatctaaggcaattattgctggaatgacgctaattggagtaaatttaatttcgggaaaaaccattcaggcgcgagttggggagcgattattaatttgaatttttttggttccctatgagccgctgctcttggttgtttgtttttttttttgattcgatttggtatcatatttatcaatccaaaaacgcaccaaacaaaaactcgttagtntttttcgcggtttttgagtcaatttaaaggaataaagggaattttgagctcgggcggtgccgataggtgacgctgggaaaaatttgaagatttgagtgcactttgttaacagatttagttttgaatgagaagatgttgtgaaaaatttaaaaaattttatccctccatcactgtgaaatttttgggtgaa

SEQ ID NO: 38203 - DNA, 988 bp, Heterodera glycines
gaatttaagtcacgaaaaatctcaaaaaagtcgacatcccccaacatgaaaaatcgccaaaaagtcacgaaaaagtcatacttatgccaaaagtcacaaaaatgcaaaaaagtcatgaaaaaataaccaaaaagtcacctaaaaatgccaaacaagcacgaaataaatcctttaaggccatttaaggtcagcaaaaaaaaaagtcatttgacttaaattcccatccctattaatggaattaattcaaaatagtgaatttaacactcattccgtttaagcatcatttaatttagcttttgcatgtgcattaaatattgatttaaggccatggccttcccctgattcatagccttacagatcaactgtatggctaattagaaattttaaaacaaactttttctattaataatttatttttcaaaacacggaggcaaaaatatacaaataaaaaaaccactaaataaataattaggacgacaacacgcaccgttaattagcctgataaattagctaacgcttgcccaattttgttggtgttaattgatctaatcaaaattctctgctatcacaaatctctcgtgtgtttgtctgtgcgattcgcattgagttccgctccatcttcacacttttctcgaccacggttcttcccccggcgctctgtgctgtgatcgttcagctcacattcggctgactgatcactttttccattaattaatcattttcatttcattcactaatcaattttcttttttcaattcaaaccgaataccaaaaaaaaacaattttaaaaatatttttatgccctgaaaattctgagaatctaattaagcgataaacggtaattcttttgttaaccaaaaagtaatttgattttttcctgtaattgaataaagataattaaattgcttttttacttttttatgggccccattaacttttttatttgttttttaataatgtcataagatttttcatgataaattcatta

SEQ ID NO: 38204 - DNA, 799 bp, Heterodera glycines
  unsure (1)..(799): unsure at all n locations
ttaaacaaattcaacctgaaaatttttgtattttttgccccttaatagtgcatgtcaaaggctttcgaatgataccaagatttttgggtttagttgaaaataaaaaaaaatatttgggttggtaaaaaaatgtaaaaattatttttaaatgcatgccaaaaggtctcgcgcgggatttacggggtccaagtccgcaaccctgaccatacatgaagtggggagggtggggtccaaaaaaatttggctaattttctttacaacgggtgacttaggtcaaggaccataggacggggatgattgagacaagggcgggaagttccaaatttttctccggctttttttctagtcacactgcttttctttgtcgtgctttttaaaaaagtccggaaagatttttggaaatttacaatttattaacaaatcttgcccaaaacggcggcgcctatcggcaccgctggaccctaaaaacatgtttttttcttaaaaatttcgctcaaaatcgcaaaaattgttatttggtgaaaatcagttaacaaattgcaatctaatttttcaacattttcccggcggcgcctacctgcatcgccggcgccctaatgccaaaagtttattaagatttttccgactttttgcgacttttgttgacgaaagtcccccgaccatattttatctaagatgctgaaaaatttttaaatgttagagatgaaattttttaaaaatcgaaaaaagtgaaaatttaattttaaatgcatttattcttcgacccttagctaattaantatgtaatttcattcccgaa

SEQ ID NO: 38205 - DNA, 1080 bp, Heterodera glycines
aatttgtcctggcgaagttttgaagaagaaaaaatcagacagagataccaccttggacgattgaataattaaatcacacacactcataatcggcattaatggagcgccaaaaatgctattttttaatttgcttttttaaaatttctaatccgggcacaaacgccgaaaattaccaggaattaagcagaatttatcggttttttcgggtcagttgtacaaacaaagcccaaatttgggatttaaacaaatgcttggtcgggtcaaattaaccatttttgttagtgaaatggaaaaaacaaaccttgattttcgctgtccgattggccgcgttcactgccgcccgtgcagcagcgaaccgagaatttcgcgctgaattcgccgatgggtcatctaacaataaccaaaaaaagtaattagaaatttaaattcatttaatgttgcccttaaaaataatttttgcaaaactttcttagaaatcaaaaaatccgacagttttcttcgaccaattctgatttaagattaaacaaacaagagttgtgaaaaatggtttaagaaaaaagcgacaacaaacttttgtccactgaagctgaagtctccacaacattgggcacccggcaaaacggtgttatcctagacaaagaaaaaattaatacaaaattgaaaaaaactgcaacttttacaagaaaatggggcggaaaactcccaaaaaatgaaggcaccatgcctagtaaaaagattggacaacaaacaatttttgagtcgaccaaatgaaaaattcttggaaccaattcgataacactttaatattcactattattcagcagcaattttcataaaatttccttcgctacaaaaattacgacccaaaaccatttaaattttgttattgtcagaataaagcgtttaatttactcaatatttttcgcatcaattatttaatggcatttattttggggaaatcgaattcaatttccgacccatcactgatatttcatttcatggaaataatccgaaaaagtgccgaaccccggcaaatgccaagtgcccatggtaaacttcaaaagcaaaccgtgaacagaa

SEQ ID NO: 38206 - DNA, 797 bp, Heterodera glycines
ataaattaattaattataaatatttcaatttaagtgacctccccccgtgaacattaaaagagttattaataggatgaagatcctcgaacccgaccagcaggacaggaacctgtacaggattttctcggatctgatccgtatgctgtatgttttttgttaaattcaacaagaccagcgacctgtttagataatatttttcatcataattcagataaatccagagaaaaatatgaaaaatcccttaacaaataaggaacgaaactaagcattcttaatgttgaaatcactaagttttcttatttctctacaaaatttccaaatttgttaattttcaataaatttaaagcaataaaagaaacttttgtgagcttttttgctcacaaaattttaaaaattaactaaaaaatctttttggcggatttaagaaacgccttatcactgccctcattgaataagcttttttagaccgaagaagactctctgcaattctttgaggaacaagaacggcaaattgcgctgcaaattgcacaggaaaatggagagaatgagcagcagaaagaagcggaagatgatgctgaggatggacaggcggaagaacagcaattggaagaggacgaagaagaggtgatttgggaaaaggggcagaaagaaaagcgaaccaccgtacatcggcaagggatactgtaacaacagtggcagggaaaagcaccaaaagacagaaaaaagaaaagtgccaatttttaccaaattaatgaaaagaattctcattttgacgtatcgcctgattgggttccccc

SEQ ID NO: 38207 - DNA, 743 bp, Heterodera glycines
  unsure (1)..(743): unsure at all n locations
atttagctgggataaagcgcttcgcgcttcttgagcttcgctacctagataagctattgggttgtgaagtaatttggaatttttaaaaaattttcagggatttttaggccggtttgcggcccaaataaaaaattataaaaaaaagatcaaccaagaaattatgaatattgaaatttatataaagtaattaagagagttcaattatcataaacagaatgctaatagtttaattaaatatttattttatttaaaaagagtgcaattataattagttaaaaaatttctctcataaagaaaaaaatgcatgcttaaaactagggccgcgatttcatgttcacattattcgttttaattgcatttttaattttcaaatttggtcaaagtgaaatagaaaataaaaaattgctacaaaaaacttttgatgaaatatctggagaaaatgggaagaaattggagaagaaaaacaaatgatgaacaaaaagttcgaaattgtttaaaaattcatcgaaatgacaaatgaatacaaagaaaaaagcaaatattcaagaaaagaatggaaccaaaattattacgaaattggcgagaaaattggagttagccgatagaacaattaccaaatgtaagaaacaatttggaattagcaagaaaataatcagggaaaaagaaaaaaaggaaaaaataaattttattggngaaattaaaacgaaaatccaaaaataattcccatcacacaaaaatgacga

SEQ ID NO: 38208 - DNA, 947 bp, Heterodera glycines
  unsure (1)..(947): unsure at all n locations
ttatttttataaaatactttttcagaaggctctcccaggtttttttctgaaaaatcgaatttttccagaaatcctggaataacttttttattttggaagatagaaattccaaataaatctcataaaattctcccaatttttctctatttttaaagcattattccactaaatttgaccaaaaacgaagagatttatgaattttcgaaatttcataggattttccggggctcaaattttgacgatttttcaaaaaattttaaccaccttccaaaaagtctgaaacacaaaataaagcgtatatacgtattcagcacctcaaattatgccataaaaatgcattttggctaatttaggagcaaaaaaatttttcatgaaatgcaaaaccatggggtcccccctatggttttgagtttcaaaatcacaattaattttataactttttttaaactcatggtaaaaacatgagataaagcacattagatagagcttaaaattctctacaaaaatgctcttagacaaatttccgctaagatcaacgcctgacgagttataagccttaaacggaaatggggagctcaattccggaaaatttttctatttccggaaaattttgaaattttttcaaaaatgccaccaatcgatagagctcgaaaaacggttgcttgaaagtggtctccgttttcctggggaaaatctgncaaaaataaataaattcaaaaacgaaaaattttcgagggggcctagctcgaaaaattttgaaaatttttcaaatctgaaaacgccatcggatgcagctttaaaactacacaaatgctncagcggcgccaaccccgctccgcttaaccnncccagtgagtattcacgaaaagccaaaacccggcatttttgagcgcgttcagtcgccaatttctgcaggctcggcatttgatctgatcaaaaagtgatca

SEQ ID NO: 38209 - DNA, 948 bp, Heterodera glycines
  unsure (1)..(948): unsure at all n locations
ttttctgctcaacgctcaaatgactccaccncacatttcggaataatagcgacgaccctaatttttctggatttctttctgggcgagttggctctganaatttgaaaaaacgtctatctcttnttctgctcaacactcaaatgaactccaaccacattttcggaataatagcgacgaccctaatttttctggattttctttctgggcgagtttggctctgaaaattttgaaaaaacgtctatctctttttctgctcaacgctcaaatgaactccaaccacattttcggaataatagcgacgaccctaatttttctggattttctttctgggcgagtttggctctgaaaattttgaaaaaacgtctatctctttttctgctcaacgctcaaatgaactccaaccacattttcggaataatagcgacgaccctaatttttctggattttctttctgggcgagtttggctctgaaaattttgaaaaaacgtctatctctttttctgctcaacactcaaatgaactccaaccacattttcggaataatagcgacgaccctaatttttctggattttctttctgggcgagtttggctctgaaaattttgaaaaaacgtctatctctttttctgctcaacactcaaatgaactccaaccacattttcggaataatagcgacgaccctaatttttctggattttctttctgggcgagtttggctctgaaaattttgaaaaaacgtctatctctttttctgctcaacgctcaaatgaactccaaccacattttcggaataatagcgacgaccctaatttttctggattttctttctgggcgagtttggctctgaaaattttgaaaaaacgtctatctctttttctgctcaacactcaaatgaactccaaccacattttcggaataatagcgacgaccctaatttttctggattttc

SEQ ID NO: 38210 - DNA, 99 bp, Heterodera glycines
ccagcggtccttgaaggcgagattcgtcgccgcaccgctttcgatgtacaggctgcccttcttgtcatcgcgggtgtagcggccaccggcggtcaggtg

SEQ ID NO: 38211 - DNA, 981 bp, Heterodera glycines
tattttggaaaaactattttttaatgattttaattacccctttttaaattaagttccaccaacattggacccgatgaggttggacattggcaacatttatgattggttcacaaatccacttccatatcaggtcatttgaattttaaaaattatcattccgtaatctgatatgtagatcctgaactgagatttcgatattgagacaggatttttaaattttatgaaaatttttggtaatcatcgcaaaaaatttttcaaaaagtttgcaatcttggctttgatttattttgaataaaaacggcaacagtatgccaaaaatgcaagttttgtcaactgatcgactaccgccttttttggcattttcaaaaccgggatttttcgttattggttatatcgaattttattcatatttgacatgctatgaaaataatatggaaatttgagatgagaaatttttcaagtttttcattgagaatttttgatcttgagcgcaaatcccgaatcagtaccgaattcctgttcaggcttgaattatgtaatagttaaaaaatcgagatgcacaccgctgatgggcaataaaatgtttttaaaacctaattcatttcaataatgagaaaaaaatatcattaaataaaaaaaattaagtctatattttttattatgtttcaaatttaatacaaaaattgtttgaaatttttataccttttatgaatattttttatttttaattaatttgttcaccaaaattgcttgatttttttatagtgagacgaacaacttttatttttctaagatattttaaattaatattaggttatgccaatctcgtggtacccacggaatttcacgaaccctgaccttaactacttggatcaatatgttcggatcagtgacgacacattgtacgctgttcaacttggcttatatgtggtcggatacaaagagtttcaagatgaccaggtgagcctaattacttaataa

SEQ ID NO: 38212 - DNA, 908 bp, Heterodera glycines
tgttcagaacaaaacgattcctactgatgtcataattcctacccaagctagacgaatctcacggtaggattgaatccatccttccgttcccatttcctttgtggcttcgaggatcacacgttcctcttctgtcaaatttttgatttcggctttcaattttatcatacccaattcatcaacaatgctcaaatttttctcacttaatttagaaaagtagtcatccaattttttctggtacgaatcgttatcgtcagttggcgttctcaacgcgatattgcttgtttcagcatgcttttcgcgtgccagaaggccttgcgtcacggtgttgagaccaaccaatggtccagtatctgtcattagggcctgtaggagcagctcttcgtcacggacgcccagtttttctttcgtttttcgcctaatgtactcttctctggcccagcggcgagccttatttgttgcaagcatgaaagaattctgtgttgagcgtaccttttttgccaagggatcacttccctcacccaggagcctgtataaatttttgctaagctcgtgggggttggtgacatttgatgatggaagctcaatccgcaccatattccctgtctgccactcaatctgaacaaattgttgctccacagtacctatggagggccaagagtggggatacacaataacggcaagacccacctcccattccgaattgaattgcaacttgcgaggtaaacgcactcggaaagaatttgtcctattcccttctatattggtgttagacggaaggacaacataaaaagaatttgaaggcattttttttttgttaaatttattaaaaactgctttttatatagatttctcgctaattgagtttgcgggaatccaactattgaagcgagtatcgtgacctttccatt

SEQ ID NO: 38213 - DNA, 566 bp, Heterodera glycines
  unsure (1)..(566): unsure at all n locations
ctggaaaaagcggattttcttaaaaatctctgagtgccctcctaattctaaaatttggcaaggtgctagaccttataccacagtattttaatgcaaaatttcaaactcttctgaaatcaatgagctgagttagaaaattacgcttggcgatttgtgcaagtttttcttcactaaaattcacgtccctaattattatattcgaacaattctttatcaacattatattaattagagaaatgttttttctacttttttatttatttttattttcggttccgaaaacaaatgcagaggtaagtaaaatttttacatacattttgagccaataatgttcttaatcctataaaaattaaatttttttcagaacattgagactttggtttgaattgtaggattagaaaatgaaatattataataaatactaattttttaactcctaatttattanattgtggcaaaaaaatttcgaaaaacactaacaatttattttgcgggttttccgtacctagccatttgaatagctaggaactagtaatgaatgaatttttttgagattccttcctagc

SEQ ID NO: 38214 - DNA, 646 bp, Heterodera glycines
gcacacctttttcacccaaaatgtttagcttattacctccttattagtccgtctcctttagcgatagataaataatgacttaaaatggattatgatgatgatgattaatttatatatatatatattgtttgtatggatttatttttttaaatagtttattattaaaaacaaaacaaaaaaaagtaaaattataaaaattaatcaaatttttgagggattaatgggattttgtttttgcctttgtttgtttgcgatagtggattaaaaataggaaacaaaaatactaaatgcttgggattaaatagtattttatagcaaaaaaaacaaggcacaaattttatttttacccttttttatacaaattttgcaaaattttgtatcaaaaagcacgcaatttagacgttaatgatgatgataattaataaggacaaatgattatttctatttttggtcagcagtgaaaatgaatttttggtttaaaattcattgaattattaaatgtataaaatctaagattagaataaattcctttgctccgtttttacagactgaaattggcaaatggcacaatattggcaataatttgcataacaaaatggcacaaaatttcccagtcacaaaataggctggcactttcacaattgag

SEQ ID NO: 38215 - DNA, 877 bp, Heterodera glycines
tcttatagcttaaaatgaattaaatatgatatgattcctcccccatatattttattattgttatatgttttccttttatttttttctaaatattaattttttcctataaaatgaaatgaaaattaaaaatttaatttggtttaccaattacatttaagaattaactccttcagagtgattagttcgcaccataattatttaatttcgaaaatatttaaaattttcaatttataaaaaattttaaattttcgttttggtttatattttttgacttaaaagtttatttttatttatttatttacttctcagtatatatttttttttaatatttattttcatatatatgttttttactaaaacgtatacaattattttaaataatttatttaatattttttgcacttatttcgatttttttcaatttttttcctaatctaaaagtagttatttctttaatattaatttaactttattctaggtaatttatagatcaatttgttaaaaccattaattgtcatatcaattatttatttattttttttcgtgggatttaacaaattcactttaaaacattcttttgttttgcattttgatttattttaaaattttctttttattatcataaatttaacctaaaccttatttttatagattatcaaattttcatattttagatctatttaatttttatgttcctatttaattatcatattttaaatgattaatttgttttattttgattttaaagttgttaattaatgacaggattaagaatttaagaaaagaattaaatttattgcttatttttttgtctctttttgctattttaatcccatgctatttgaaagggctccttttttgaaatcattcatcaaac

SEQ ID NO: 38216 - DNA, 1005 bp, Heterodera glycines
  unsure (1)..(1005): unsure at all n locations
gatgaaaaggaggaaaaccaatcaaaaaaaatgaaaaacagcggaaggcatttggccatttcgccaaataaatgagcnaacaaacnnggattttttgaaaattttttgtcatcctacggtaataaaggtacagagtatatagagaataggtatgtaacggaattttgatactgagttggcaatttaactggaactcaataaagccacatatagcggcgagtaagccataaacaaagtgcggcgagttggccgcggtgagttaagcgccgcggcgataaatttgcgacgaattgtccgcgccaagttgggcggtttctaggaaaaatctgaaaaaagctaaaagcgctgaaacccataaaattttgagcctttttcaaattttggatagtggtaaattttatgcttaacgaattcgtatagttttaaataaattttttgatgccgcaaggtaaatttcaaattaaaacttaaatcaaattttgggatgttaacctgcttaaaaatttggagattaattacctcacagttaaatgttttttaaaaaaattcatcaaattcaagctaaataatttgaataaacccaagataaataaaatatttttagaaaaattccgacggcgccgaaaaaagcgccgcgatgaactgcttggaacgattatttcaattctgattatgttaggccttatgatagccctacgatgggttatcctgtttatcttatctcgtagccagcagctgaatgccgcaaatgcgagatgggcactaagacttccagcccaaattggagaagctcgtgaattttaatttattaaaatttttaaattttaaattgtctttgggaggggaaggataaagaaaggtaaatccaccttcctttaaaaaaattgacgtagatatttatttaatcttaaaatacgcttcgtcttcacaaactttagatgcgattttaaaattttggcaatttttttcggatttaagttattgtggagaggcataagaaaaatg

SEQ ID NO: 38217 - DNA, 845 bp, Heterodera glycines
  unsure (1)..(845): unsure at all n locations
gtttttgtgctataaatttcaaataaatctcattccccaccggcgattttttgctatttttaaagctttaattcgcctaaatagacctgatctgaactgagttatgaattttcaaatattaggccaaaatcccgagggccaaaaaataaagaatttttaaaaaattccaaaaattttgaaacgaaaaataaacatcatattcgtgctcagcacctcaaaatagcccagaaaaatatttttgacccccattttcaacccaaaaaaaatttccgaaaatttctagggggcctagctcgaaaatttttgaaaatttccggccatatggcacaccattcgatagagcttaaaaaactctacaattttgccctaatgcgttttttcgataaaaccaacccctaacgagttatgggcccgggactcaaatgtcccgctcaggccaaaaattttttctatttccggaaaaaatcgaaatttttccaaaaaaattaccagtcgatagagctcaaaaaatgatgttttggaagtggtctccgtttttcctgaaaaattcgttaaaaattcctaaaattcaaaaaccaaaaaaccgttttttaggcctagcttgaaaatttttcaaaaatttcgaaattttaaaacttggttggatagcctttcaaattctacacatttttgctcagaaacaatttttcggtcaaagcaacccctggcgagttattcgcctggtactgaagtgtacacttttgngtaaaaaaaattagccaaggctacagccttgggcgccccacgtagggcttaggttttgctggcaaagttgtcggggatagtctgacttaaaatctaccagc

SEQ ID NO: 38218 - DNA, 793 bp, Heterodera glycines
tttttatacaataactagcgggatcagcgccttcggcgcatcccccgctaggcagtacgattgtgttatagaattatgaatgataaaatcgactggctcggccgcttcgctgcctcgcataattttcttggctttttctcaaatctctgggactcaacccaccagcaatcaatctctggggctcaattctccggcattccaaacactgggactcaacccaccaactttcaatgacatccaatcgctgggactcaacccaccagcatttcaatctctgggactcaaatctccggcattccaaacactgggactcaacccaccaactttcaatgacattccaatcgctgggactcagcccaccagcatttcaatctctgggactcaaatctccggcattccaaacactgggactcaaacctccggcattccaaacactgggactcaattcttaggcattccaaacactgggactcaacccaccagctttcaatgacattccaatctctgggactcaacccattagcatttcaatctctggaactcaaatctccggcattccaaacactgggactcaacccaccaactttcaatgacattccaatcgctgggactcaacccaccagcatttcaatctttgggactcaaatctccggcattccaaacactgggactcaacccaactttcaatgacattccaatcgctgggactcaacccaccagcatttcaatctctgggactcaaatctccggcattccaaacactgggactcaacccaccaactttcaatgacat

SEQ ID NO: 38219 - DNA, 802 bp, Heterodera glycines
tttggaatttttggcaaatgctaccgtattcccccccccgggccttcccccaccgcctgctaaattactgtaagccctaaaaatgagctttcttttgaggggctaaaaaatggaaaagtctttgcctatggctttttgaaaatgtggtatctaagtacagttgttagagggataaatggaaaattcaggctgaagagactgctcgaaaacatggaatgtttttttaaaatttaacaatttttaaaaagtgccaaaaacggaatttttcaattttccaacttaatttttaatcctaaactattaatctgttgattttttgtgctgatgataatgatctcttgtccctattttaataataattataaaattgattttgtaaaagtaattaaaaaaattttgcctattaaaacggcaaaaaatgaactgtcagcttgtacatttcgcccgtcttttgaagcataattaatgagtagcttttcgtttcgccgtcacgccgtgaacgccgccgcggccgacattgttttgcgcaactaataaatttttttgtttgttttctctattggtgtgcaaaatttcaaaaaaaaaaaatggttactatcaaaaattatggccaaaacatttaatatttattttaattattttggccctaaattaattatttttaatttgcatgctaatcgagagaacacttaagattatccaatgaagaggtcttttttgtctccattttccaaaaatatggtaaaataggggtccggcggtgccactaggcgcctttttggatttcggggggggggggggg

SEQ ID NO: 38220 - DNA, 839 bp, Heterodera glycines
tcactaatgaaaataatgttaactttatatgaatcaccaccccctgtacatcaatatgagtcgaagaatgccaaccttctttatgactatatttatgagtttaataaaaaaatatttctaaaaatccgtcatggtcttttaaaagacaaataatttgtttttttaaaccaaaataaaaaggttataagggcaatttgaggtgcttagtacgaatctgacctttttgtacaatttcgaactcctaacccgaattcgaatatttttcgattatgcatttaagggtgtgtttttttttgccttttgcccaaattaatttttaaaattataatattttacatttattcaagttttttaatataatgataaaatcttggagattggcaccgcgtttgaagcttctcgatatgtgtattgttcatagatgagagcttgcaatacttcggttttcaaaatagcaatttcgacactgttatcaaaactttacatttcatggtcataatttatttattttattgcttgtttctgtattccataaaataattatattttttaatttagtttagataaatttattaagagcttataaaataaattatgttgacaaaaatcttttgtcaaaagtatagttttaaatttattcttttttacgaatttaagatttctttttactcgttaaatatatttttaaatttaaaatacttcatctctatgatagtagaaaattaccaatttcataggaaaattattcataagttatttacatttttttagagccgcttgatacataactagatcgagattcaaattagtacattttatttgataaactttctctgttt

SEQ ID NO: 38221 - DNA, 555 bp, Heterodera glycines
tttcgaatcgctaaaagagtaaagcagaaaaaaagaacccaccccttgcctatatagtatgtagccctagagctcgacatccttaaaaaagcccgtacctgtatttcaaaaatggactgtatctgtatttctgtacacggcgattcaattttgtgcttcaagtacaagatttagtgattcaacatgtcgccaaaaatgtcatcgcggcaaaaaaaaaatctttttttttgtattttctgcgccaaaggtactcactcggccgcttcgcggcctcgtaagaaatgcactagtgtcgggcattttgacattataatgccatttcggcatcggtctgacaaagctgcgcatgactttgggaaattcctcaggaattaatttttgttttctaaagaaaagcaccactgtcagcattttgacattaagatgccattaaggcaccgttgtagcaatgatggacgtggtccttggaaattcctcaggaattaatccctgaatttcttctattttcttatcactcacaaatcactgggggaaaattaagatgatactgatgat

SEQ ID NO: 38222 - DNA, 533 bp, Heterodera glycines
attttacatggaattttagagttgagcgggaccgggctctttgggcaaaaccgggacctaatcggattgaaaaaccgggaatttcccggtcaaaaccgggaccttggtactcagttgttcgtattttggtcccggtcacgctcaactatagttcattttctttgtttgtgataatggataactgagtcccgattaaaaatggacacttcagtaccttggattttttggaaatctttcaggaaatcgctaaatttatcctaatgatttacacagacaaaaaaggttgattgatcatttcaacaacaaaaaaggaacaattttcttgagcacgtcaacaattaaatcattcaaattgatcggtctcttctcaacaattcatttcattcacttctgctgatcactcgggtcgggagttgtgtcgagaagcctaaaaatagaaacacattaaatcctaaataatttattcattcactgacccgtcgccgacctttatcgcaaaactttcatgtaaatttcgttccactgatcagaat

SEQ ID NO: 38223 - DNA, 875 bp, Heterodera glycines
  unsure (1)..(875): unsure at all n locations
ggggggggggggggggggggggggggggggaaggggggggggggacgggggggggggggggggagaggggggggggggaggggggggagagggggggggggaagggggagggggggggaggggaggggggggggacgggggggggggggggggggaagaggggggggggacggggggagggggggggggggaggggggggggcgggggggagggacggggggggggagggggggggggggggcgggncccgnggggggggagggggggggagagggggggagggggagggggggggggaggaggggggggagcggggaggagggggggggggggcggggggggggggggggggggggagaggggggggggggggagaaggggggggggggggcgagagggcacagggggcagggggggaaggaggaggggggggagggggagggggggnggaggggggggaggggaggggaggggggggggggagaggggggagagaaagagagaggaggagagggagggnggagaggggggggggggggganggggggggggggggggggaaagggaagaggcaagggaaggggggggggggggggggggggggggggggtgggggggaggggggggggggcgggggggggggggggagggggggcgggggggggggggggggggggggggaggggggggggagggggnggggggggagagaggggggagagggggaagggaggggggggcggggggggggcagggggggaggggcggaggagggcggggggggggggggggggggggggggggggaggggggggcgaggagcaaggggggggggggggggggggggggggggggggggggggggggggggggg

SEQ ID NO: 38224 - DNA, 866 bp, Heterodera glycines
ttgggtctagaattttcctcttccatttttttcttaactccccatgtttttctcccaacagaaaaacggtccccctcctccttctccacggcacttaactccggcgatttgatgtcagacaacaacgaagcggcaatggcactttcctcgctgatcgaattgggtaaaaatcggcaacaaactcagcgagacgaggctgaaaatggcattgacaatgagtaggcaaagattggcttacaattagcgtttaattgtcatttatcttttcttaattaattgcagcgattgccgtttcgatgggtccgtcgccgtttcgtcgccttcggtcatttcgtcgacttttgcggcaacaccagcgaactgttctgccgaaacattccaatcgcacgccaacggcacacacaatgtgacgacaatcaaaacggaggacaacgaatcgggcgacgaattgccaccgcaaggcaatgcgaaaaaacaaacgaacgaaggcattttaaatgccaagcaaaaaattcgaattcgaataccttttattttaaattatgaccattttaatttttaaattgcgctttgttcagatgattccgcgtcggatgcgcccgttcacgaaattcgctgtggtctgttgaacgcgcggctgcacatgcaacgctttacctgcccgggcattcatcggaagtgcgttgagttcgaaggtcgaccttttttaaaatttatgtattttttggaggggaaatgagcaataaaaagagatgggttttactatttattggtcaatttggctgatttatgctttcttttttggtgatgttttgagtgaaattgcaggaaaactgatcagtccgcgacaatcaccatcaaagcgg

SEQ ID NO: 38225 - DNA, 865 bp, Heterodera glycines
gcattactatatgcggttgagccctacaaatggtcggttggaaaatggctccattactaagaatagatagtctcagaaagatggctaactcttttatctacagcctcaaacgagagggttttccccgaaaacgcattactatatgcggttgagccctacaaatggtcggttggaaaatggctccattactaagaatagatattctcagaaaaatggctaactcttttttctacagcctcaaacgagagggttttccccgaaaacgcattactatatgcggttgagccctacaaatggtcggttggaaaatggctttgagccctacaaatggtcggttggaaaatggctccattactaagaatagatagtctcagaaaaatggctaactcttttttctacagcctccaacgagagggttttccccgaaaacgcattactatatgcggttgagccctacaaatggtcggttggaaaatggctccattactaagaatagatattctcagaaaaatggctaactcttttttctacagcctccaacgagagggttttccccgaaaacgcattactatatgcggttgagccctacaaatggtcggttggaaaatggctccattactaagaatagatagtctcagaaaaatggctatctcttttttctacagcctccagcgagagggttttccccgaaaacgcattactatatgcggttgagccctacaaatggtcggttggaaaatggctccattactaagaatagatagtctcagaaaaatggctaactcttttttctacagcctcaaacgagagggttttccccgaaaacgcaagtactatatgcggttgagccctacaaatggtcggt

SEQ ID NO: 38226 - DNA, 996 bp, Heterodera glycines
  unsure (1)..(996): unsure at all n locations
agcctaataaattgcgtagtgaaattttaaactctttctcacatagattatgtttaaataatttaantttttgattgtgccttgaaaagaaagaanaaannnngnggagaaagngangannnanngannnnnnnngnnaannnnngttgntttgtttggtcatcaatgttcttctgcttaaatcaaaaataaataatttaatcacaaatttttggccatttaatttattaaatattgaaaattcggaagactttaataaattattatatatttttaatattttatgcgctttattctgtgtaaagccaaagaataattagtgcttagtttcgtttcttcgataaaattgttattgtttttaatgcttcttccttcccattccaataatttttcaaaacaatccctcacggggaaaagagacatttcccaaattactaatcgtttatctcataaataatacatataaaagaataaatttaaacaaattttcacattttaaggaaggagcaccaaaattcgtcataattccgagtttaatttatttgagtaattattcactaattaatggccaattttctctacggttttaaataacaaaaataaaaaattaattaatgctttattttgacgtcaaatcgattatcgttttgtgttcccgggagaaagaatttatttatttattttcgcccgttttcaaaagtcgtaattcaattttatgcatttcaatgctttcacatggcaaaaatggggctaaaaatagcaaatttaaaaagtaataattatttaattacatcactaaaatattataaaaatagtaattctattttgagaaaaatgatttttgctttcattttttcttttatttcttccaaattcaacaccttcgcttttgccttattttggtgttttctcgttaataaagtaagtacctttttaatttaaaaaattaaaaagaagttttaaatttttatttttatttttattttctccctnttt

SEQ ID NO: 38227 - DNA, 920 bp, Heterodera glycines
  unsure (1)..(920): unsure at all n locations
ttttgtagtctaatctactcaaaacggttcagaattctctccctataaaattcactgtgcgaaaatggggtatgaaaagcttatntgggggaaaaaagactacaaaataatacccctgggagaagggagtgggaaacataatttcaaaattttcaattttttgtactctaagctactcaaaccggttcagaattcaataaaaataacattcacggtgcgaaaaatggggtatgaaaagtttattggggaaaaaaagacttttttacaaaataatacccctgggagaagggagtgggaaacatgatttcgaaattttaaattttttgtactctaagctactcaaaacggttcagaattcaataaaaataacattcacggtgcgaaaaatggggtatgaaaagtttattggggaaaaaaagacttttttacaaaataatacccctgggagaagggagtgggaaacatgatttcgaaatttttattttttgtagtctaatctactcaaaacggttcagaattcaataaaaataacattcacggtgcgaaaaatggggtatgaaaagtttattggggaaaaaaagacttttttacaaaataatacccctgggagaagggagtgggaaacatgatttcaaaatttttaattttttgtagtctaatctactcaaaacggttcagaattcaataaaaataacattcacggtgcgaaaaatggggtatgaaaattttattgggggaaaaaagactacaaaataatacccctgggagaagggagtgtgaaacataatttcaaaattttcaattttttgtactctaagctactcaaaccggntcagaattcaataaaaataacattcacggtgcgaaaaatggngtatgaaaagtttattgggggaaaaaagactttacaaaataatacc

SEQ ID NO: 38228 - DNA, 894 bp, Heterodera glycines
tatttgaaattttttgaaagtttttatgtattgataataaatcattcaaaattgcttttatcaataaattttagaaaaagactcaaaaatcgcaaatttggcattttttcatttgaattggatatttttggtctttcaaaagctcgcctcctttttgtcgtccttcccaaccaaaaactcaacatccgtatactctcttttcttaaacactttctccatttggtccgtcagcgaattgacaatttgtccatggcttatgccttaaatattttaaatcttttattaattgggagacatatatataatgagtagggatgcgatttttaggcaaatgcctaaaatttttgcgcacttaatacgcacagataagcacgaaaaaagccctttccgcatggtttggggtgtctacgatgacttttataatgcctaactttgcctatttcggggtttttgtgcctaaagtgcctattttagggtttttgaaaaaatccttaacaaaaatgcaataaaaacaaaaaatacacccctaagaaatgtaaaatttttcaaaaaaattatccctaaatttaatatttttttcaataaaaattttttggtttaaaaatttgtacatattcgaaaaaaaaactttaaaacatttaataatttcatttacaattgaaatatttaaagttttaacgtgttttgttacctaaaaagcgttaataaaaaattttatttgcctatttttgtgcctatttaatgcctattttcgcgtttttttgtgcctaaaaatcgcatccctaataatgaggtcaggattaaaccgaaaaaaataataaaggaatgcaaatacgcgaaatctaaatgcgaatttttttagccttaggttacggcaatggtactattttgccc

SEQ ID NO: 38229 - DNA, 1109 bp, Heterodera glycines
  unsure (1)..(1109): unsure at all n locations
attatttttcaacctcctcagaaaggggtacatactcctgagaccggcagtttaatggagactggcacataaaaagagcaaatacggtacttccaaaaactttgatatgattaaatcttacaaaaaacttcataaaaaatttcaatgaaaaattatcagaaaaaattagaattttctacagaaacattgttgtatttaaaataaaatttacttaatataaattaaatcattgactaatttactttgacgattattatttaaaaatcaatatttccattttttctataaatcatttttttaaagtgggattgaaacttttcataaatatttacaaaaaatcaaattaaactggccaatgatttgtcaattttttaagatttttgcactttttgtgaatcaacctagccccttcatgccacgaacacataaagcgtctttctgttgactattttaaaaaaaatccaaattgatgtcactggaattttcgcaattttattttcaatttccaaataaataaatagaaatcactgtgtaaaaaataaattttttttttgaataatttttccttttgaaaatggcatttaaacttcaataatcagaagccatcgtccttctcgacttccaaattttcgaattccatcgtttgcttctccgcattgtactcatatttgccggtttgtccactgaactgtcccactctgtgctcccccaaatcgacgtgcacgcggcgaagctcagcgacattgtgctgaacatttaacactcattaagagtgaaagttgaacaattacatttatcaaattgctttttcgtccaattaatggaattatggatgaccctttgtcgtgaatcacacttcgaaattgttcgggattgattctttgtgatgacaatttgacaggcaataattagggatgtgcgagaaatgatttttaccgagaatcgagaaccgagacccgggaatgaccccgggaaacgaccgagaccccaaaaaaccngagaaattctccgactcggatcgggaaccgagaaatctaaatttttttagccgntttttacaaaaaatactattttttgcattttggtcacattttncaaaatatggtaaa

SEQ ID NO: 38230 - DNA, 719 bp, Heterodera glycines
  unsure (1)..(719): unsure at all n locations
caattctttcttcgctttttaagacattaataagccccacacagtttatttatatcttgacacatttttaccgtctttaagggggatgttctttggnaaattgtcttctcagtgccaaatgaaaggcttcttgtgcgttgttcgtacgtgctagatttccaatgattgaatcgtgatggttccatgaagttggcacaaacttttttgttatacagtttttacctttaaatgttccgtccgcggaccaatgccgataggtcctaagtcgtcgcctaccctcttgagagcagaagataaaaaaaacactgccatcaggttcgtcttctctggaatcaaatattaggaactgctggccactgtggtccaaagcaaattgcccagcaatttcaattgcttgcaagtttatagcatcaacatttcttctttctggcagttctcgctgtctttcgatggtacgtcgaaggcctgatgttgaaggaagtgacatgcgtgcttcctcacttagctgttccctttcagctgcaattatgtttctggcgccctcattgngttgcattcgcgcaattaatttaatcgattcttttgcaacccgcacttcttgagctgcctggctgggaagatgattatgttggcttacaacattaagtaattctgatccaatatcagagtgcgctctgccattacagggttttttcgtgcacgcccaaaattgcttttga

SEQ ID NO: 38231 - DNA, 489 bp, Heterodera glycines
gaaacaattaaataaatttaaaaaaaaaattgcttatcgctaatattttaacttttaaataaggttgggccccgacccctttgaagggcaaaaagtcgagggtaggggaacgcggggggcagacgtcgggtcgggggaatatgtctcaaaaacgtctcggatcgggtcggagggcacggggtcggggcccaacactatttcaataatacaatttataattttgtataatttaagcatttaatttcaatttcttttattttaatataaatttaagtttttgtccatatccaattatataaacaataagacgacgggatcgggagtctgtgaccgatccttagatacgactttttttaaataaaggttgccccaacaaaatcggcctttcagtcccgcttttcctatcccggactgattccaaccaccaaactcctttagacttttcaaaatttcgggctcttatccaaaaacctaaaatatttatttatc

SEQ ID NO: 38232 - DNA, 729 bp, Heterodera glycines
  unsure (1)..(729): unsure at all n locations
cagcccaagttttcggactataacttttttatcgtccctcctaggactaatcttggtattattcgaaaggttaacaattttagaagatatttntaaggtattggttngngattaganaattaggaaaaaagttataagatgaaattgcaaaaaagtcgaaaattttgaggttttttccccaataccatttttagaagctaaaatttttgtttgttttttgtaaggctaatagagcttgtgaagggctttcgaatgataccaaaattgttagatttggtcaacaagaaaaaaagttataataaaaaaactgaggctggcgccaaaacggcggcgccaaaacgacccgttccccatattaacacacacgctcatcagtagggcgaggatttttagttttttaaattattttttctgtggctttatttagacgataaatgcacgaaaaacacatttttagctcggaaatcttcgttttaacgccactattcatcactaggaatcactattttggagttttgcctctaaaaaaactttttcggaagttggccactaaaatagttttttgccactattttggcgtttcgtcactatttttgccactattttggcatttttttgaaaatttcacaaaaaatgcaataaaaatgaaaaatataccccaagaatcaacctaaaaaattcaaaaaatacacccataagaatcgaacaaaaattttcaaaattacaccc

SEQ ID NO: 38233 - DNA, 822 bp, Heterodera glycines
ggggactctagagcgatggcaggggggggattgggtcgtttggccgactctcaaggaggcgtacgactcataaaaacaaacgaacaaatttctttctttgatttttcctttttcagggatcatctccctgtccgacattctctctcacctcgtcctcgaaccgccgtcgtctcccggcggaggcggtggcaccgaaagatcgtcacgagtagtttccgcagcggaaacatccaacgagggaccggcaacgcagtcgccggcagcggtggacgaggcggccaaggaaatgatggatttcagcctgggctgatcagcagaggagacggagacacagcaccatcgacagcgagcagtacacccacacaaacaaactcaattttgctcaatttcttttgttgttgcaattcccttacaatcagtcgctgttcctctgactttgatttgagtgtcgtccatccgtcgattgactctttgccccccgcccaatttgacctccgtccgttttgctcttttctcattagtttgttgactttctgctgactcttcgttttcaacgtgtcccccccccccccccctcaaaatcacaatgaatgtaatgtattgatttgttgcgggtcaaaaaatccttccccttttccttccttctccgaatgagctctctcatcatcactattattatattattattattaatgtatcatttgctgctgctgctgactttgcattgattgcatcatcacatctctcccaagttgttagtgtccatccgtttttacatatttttttattttgtttgaatttgtttgtttgtttttgttaatt

SEQ ID NO: 38234 - DNA, 930 bp, Heterodera glycines
aaacgaagaccacttccaaaacatagtttttcgagctccaccgaatggtattttttttgaaaaaatttcgatttttttccggaaatagaaaaaatttttggcctaagcgggacatttgagtcccgggcccataactcgtcaggggtcggttttagccaaaaaatgccttagagcaaaattgtagagctttttaagctctatcgaacggtgtactacatgatgtaaaattttcaaaaattttcgagctaggccccctagatatttttttttttttttttggggtcgaaaaagggtgtgaaaaatatttttctggggtaaaataaggtgctgagtacgaatatgatgtctattttaagtttcagaattttgggaattttttaaaaattctttattttttggcaattttttggccctcgggattttggcctaatattttaatattcataactaacctcagggtaagtctattttgatacaacaaagctttaaaaatagagaaaaatcaggagaattttatgggatttatttaggttttctaacatcaatatgaaaaaagttattccagaaattctggaaattttagatttttcagaaaaaaattcgtaactgccttctgaaaagaaatttgagaaaagtaaaatactacaaaaatccacaatttttttctctataatataaattttattttacatttttatcacatttttaaaaaaagatataaaaaataaaagtgattttgtgattcgggtccaaaggggggagcacatggtgtttgagtggaatgagttttctcacatgaaatcttccaaaaatatgcctttaggtatgatttggcccgctgatcacaaatacgtgatcacattttacttttgacatcgtccgacctcagactccctgtgtgattggagagtctgaggcctcattttgagg

SEQ ID NO: 38235 - DNA, 585 bp, Heterodera glycines
aaaattttttccattaccgcaagagctacggtaattgtgaattaattctcagaaaaatggctatctctttttaggacaatattctatctcgtaaccccgatgctaatctgttccgcagagcctcttcaaaattttttccattaccgcaagagctgcggaaattgtgaattaattctcagaaaaatggctatctctttttaggacaatattctccgtaaccccgatgctaatctgttccgcagagcctcttcaaaattttttccattaccgtaagagctgcggtaattgtgaattaattctcagaaaaatggctatctctttttaggacaatattctatctcgtaaccccgatgctaatctgttccgcagagcctcttcaaaattttttccattaccgcaagagctgcggtaattgtgaattaattctcagaaaaatggctatctctttttaggacaatattctccgtaaccccgatgctaatccgttccgcagagcctcttcaaaaggtttccattaccgcaagagctgcggtaattgcgccgggggggcagaaaaatggctatctctttttaggacaatattct

SEQ ID NO: 38236 - DNA, 657 bp, Heterodera glycines
ttgtacctactaatatcttttgaactctcctactttctcttttaacttttctgatcactgtggtacctcttctgatcactgttgtacctcttctaatcactcttctaatcactgttgaacctcttctaatcactgttgtacctcttttagacgaagcgtcctaatttccctacaaagtttgaaaacgggcgcgaagcgcccgtcctgaggccgcgaagcggccgaatatcccccaaaaaaaattaaaaaacgggcgcgaagcgcccgtcatgaggccgccaagcggccaaatgttctcaaaaaattaaaagacgggcgcgaagcgccagttcttaggccgcgaagcggccgaatgtccccaaaaaaattaaaaaacgggcgcgaagcgcccgtcctgaggccgcgaagcggccgaatattccccataaaatttaaaaacgggcgcgaagcgcccgtcctgaggccgcgaagcggccgaatgtcccccaaaaatttaaaaaaacgggcgcgacgcgcccgtcctgaggtcgcgaagcggccgaatgccccacaaaaaattaaaaaactggcgcaaagcgcccgtcctgaggccgcgaagcggccgaatgtcccccgcaaaattaaaaaacgggcgcaaagcgcccgtcatgaggccgc

SEQ ID NO: 38237 - DNA, 649 bp, Heterodera glycines
ctttttgaaattcatattgctgttattttgttcaactcccccattttttccaagtgaatttgacccaatgaagggagagtggatcagctggggggtcggtgcctattgggtggtgtggtgggaggtttttttctaggcttagatcacatgccattttcggcactctgataattttagcgttcataatgggatgtataaaggcgattgtagaaggaattggatgcgctaaaattgtttgagaagctttttgagcgtaattacgatttttacttagaccattttttctaggcttagatcacatgcgattttcggcactctgataattttagcgctcataatgggatgtataaaggcgattgtagaaggaattggaagcgctaaaattgtttgagaagctttttgagcgtaattacgatttttacttagaccattttttctaggcttagatcacatgcgattttcggcactctgataattttagcgctcataatgggatgtataaaggcgattgtagaaggaattggaagcgctaaaattgtttgagaagctttttgagcgtaattacgatttttacttagaccattttttctaggcttagatcacatgcgattttcggcactctgataattttaagcgctcatgatgggat

SEQ ID NO: 38238 - DNA, 513 bp, Heterodera glycines
acaacataaaattattacttctaatgccataaaacaatccctaaacagcttaaaaaattgagggtcacattaacattaaacccttttggcgttctgttaattgttttccaaattcagatgctgcaacgatgggtgccaaatccgaaagaagtcaactgcgtgccagccaatttcatggagccgtaacggaatgattggatcggcgtggtgggcgtaatttgcacttgattaaatcgattgatcacttgtaaattagtttaattaagtgtaatttcaattattttgcttctattttaggtttgatcacatttgcaacacatttatttttttcgtttttatttgattgtgtctgcaggcagggccgaaacacgttttagcattttccttagcattctgacagggtctgtactgatgaggcccgccctgtcacaatgcgattgcttttcaaatttagaagcaaagattactctatttgaaaaataaaagtgaattaatataaaaatgtatattttt

SEQ ID NO: 38239 - DNA, 790 bp, Heterodera glycines
  unsure (1)..(790): unsure at all n locations
ctatatgcaatttttntgcggttcaaggaaaatgggaaactcccctgaagttgagagtaattgggaaatttcttggatttttttttttgaaaattcccgtaggggttgaaaaaattatgaaaaagtctacctgaatacttggagtataatcaccgggcccttctgatgaaatgcttatgagaatggcgatcacagtgttaatgcactaaaattaaaaaataaattattggttagccctagctttggagggggaggtaccgtctgggtggcgatttttttttttttttgcttttcggcctctaacaaaaaaaaactcaagaaaggaggggtccggcagacgctgccaggaaaaaatttgagaattttggtcaaaattctgaacggatttgtactaaaaactctggctaccctcttgcattatgtgtggtatgtctctaaaaaatttaaattttttggaaaaaaccagggccctaaacacagacatcggtttcgtcattgaatgcttgcaccgccgccaaataaccaatgcgtttttcgctgtaacgcgtgctcgacatcacttcaatgatgttaaatgttgtccaggaaatgtcgtagccgagcacttacagctaaatttggagaggaaaaaaatagtataatacagggcacgcgaaacggaaaattcaagaaaattaaatgaaaccaattttgaataaatgaaaaatgttgctttattgcataggataaaaatgatcaattcttttttattttttaaacaaagaacttcacactccaactggcagggcag

SEQ ID NO: 38240 - DNA, 548 bp, Heterodera glycines
ttattccactaaatttgatcaaaaacgaagagagttcccccccggaaatttcacttgattttccggggctcaaatttcgttgatttttcaaaaaattttaaacacctaccaaaacgtctgaaacccaaaataaagtatatattcgagttcagcaccagaaattaggccagaaaaatgcattttggctaatttaggagcaaaaaaaattttcatgaaatgcaaaaccatggggtcccccctttggttttgcatttaaaaattcatttttgttttataactttttttaaattcatgataaaaacatgagataaagcacattagattgggcttaaaattctctacaaaaaagctcttagacgattttttgataaattcaactcctgacgagttattgcgccagaactgaaattgaggcctagcaaccaaaaattttctatttccaaaaaatttttgaaaaatttttctgaatatgacaccaatcgatagagcatgaaaaacggttgcttgagagtggtctccgtttccccggaaaaatctgcaaaaatact

SEQ ID NO: 38241 - DNA, 935 bp, Heterodera glycines
catcggttcggtgggactgccccgaaaacaaaaatacccccacacggttaagtgtccgtttggggtactcaaacaattatcttggagcaaaaatccaacgcagaattaaagtacaggctatagggaagctattccggaaggattcggtctccccataaatctgggcgcatcggttcggggggactgccccgaaaacaaaaaaatcgattttttcaagtgtccgtttggggtactcaaacaattatggggagcaaaaatccaacgcagaattaaagtacaggctatagggaagctattccggaaggattcggtctccccataaatctgggcgcatcggctcggggggactgccccgaaaacaaaaaaatcgattttttcaagtgtccgtttggggtactcaaacaattatggggagtaaaaatccaacgcagaattaaagtacaggctatagggaagctattcccgaaggattcggtctccccataaatctgggcgcatcggttcggggggactgccccgaaaacaaaaaaatcgattttttcaagtgtccgtttggggtactcaaacaattatggggagcaaaaatccaacgcagaattaaagtacaggctatagggaagctattcccgaaggattcggtctccccataaatctgggcgcatcggttcggggggactgccccgaaaacaaaaataaatcgattttttcaagtgtccgtttggggtactcaaacaattatggggagcaaaaatccaacgcagaattaaagtacaggctatagtgaagctattccggaaggattcggtctccccataaatctgggcgcatcgggtcagggggactgccccgaaaacaaaaaaatcgattttttcaagtgtccgtttggggtactcaaacaattatggggagcaaaaatcaacgcagaattaaagtac

SEQ ID NO: 38242 - DNA, 1209 bp, Heterodera glycines
  unsure (1)..(1209): unsure at all n locations
atcctggacagtgcttgactgctcccggtgattctgcatatttaaatggggggaaagaatttttgaaagaataattcaaaactcactttagatgggtatggagcaaaagttgtcgcattaatctttgccttttctgtccggtcgaacgtttgccaaaccaagcggggaattgaatctgagcagtcaaataaccgtccatccgagcggagggaagcgcagaagaaaacattgcctagcaaatggaaaaagtttatgaaatataaaataataaatgtttttggcctctgcaaaattgaaaatggttaaattgccattttcctatcataaaaagacgaaaatagaaagacaaaataaaaaatcacatgttccggcataaggttccaatttccatgggctcgaatttgcttgtcgattatgtctccaaatgcaattgcatctgcggcgcgtccaattgcattcaaatggtccaaattcctaagcaaaaacaatgaatttaattagaggacattgttaagaaaaccccatccgtgatccgcgaacattcacataattttcttgtacgaaaagtggaattagtgaataatcggtgaagtacagctcattcttctgcataaccgaagtctccgcactcaaaatctgacgggcagcttcgaacacattctgaaagacacataaatattatttttaaaggaaatgctcatttttgaatgcattaataagtaaatgacacttccagggtagaatttaagaaaaattaattaataaggctgggatgttaagataagcaaaaaccgtaaagtaggtatttaaataagtataacaaaaaagttattacgagtaaataggtaattaaaatttattagtaacgatttttaggtagcataacctaaaaaatttaattttgattatttttcatttgtaaatgaattgttaaaaattttaaagttactttttcgaataagatcaatttttaaaccaaaatttttatcaaaaaaatattttatattttagtgaatcaatcaattttttatttacctaaaaatcccagccctattaattaaaaataaataattcatagtattctttaccacagtgacatcctttttctgcatttttttcgaagtgcccaaaccagcggaaaattgaagcgcattaatacactnggcgaatgtcctgatgagaagcttcgatgnatctatcgaggctatc

SEQ ID NO: 38243 - DNA, 739 bp, Heterodera glycines
gggacaaaaagccattttgtaaaaataccgtattattaaaaaattaaatttaattttttagttttactagaaattctaaacttggaattttttcagcagcaaaaaaacattgtttcaaggccgagttcggagattagcttctttccaatttcagtttaactgttgtttccctgtttttgtgttaaatttgcgctgcttaatttgttacgtaatgccaaaaatggcaaaaaaacgttgggtgaggccggcacgaaagacaaaacttggtcatttgtgtgtgtgctttccgcgatgttcctgtgccattttagttgcttttgaaacgcccaagggaaaaataaaacacaaatttatgatggcatgatgggtgaaggcggcttgcggcacaaggcacggaggagcatttttggcacaatgccttcgtcatcggttcacccgcccctctccggaatcgaagtgactaagcgccccaaaagtgacgcttttaacgtcattaaagccttttttgccgtgccgtggtccagtcacgtaagaattgcctttcttccaccaccctcacatccgtgccaaaaaacgatgaacggtgggtgccctctttgctccatcggaggggggggggtgctgccgaaaagcgttaaatggccccggagggaggggtagggaaaggtcgcagttaattgggaaaatgcgtaaaatgccgtaggcttttttttgtgtgggactctagaggtcccccggg

SEQ ID NO: 38244 - DNA, 1335 bp, Heterodera glycines
tgattgatgaaccaagcgcactttttttggctttacttcctaagttttaaccttgatgatctgactttgctctcaaactccacatttgcatgtacattttccatttggcttttcttttaacaaatcttttcattcttttatctattccttgcggtgtgccattttgtccattgataaaattttactttccactgccattcattctttttttccccttattgttcgattccgtgtgaaaagtaatgtaatagcagctcaacacttatatttttcctgtcggacggaaaccattccaaaaacgggttttccattttgcgagcgttgggcagggacgtgattaagtatgtgtaaacatcaacagaaacacccaccaaacgaccattgggggtggaagtacaacaaagtctcccccgcccctaatcgtccaaattgcctcaattgtccccatttgctgttgctttttgttgtcctttcccccggggcatttccaaaattctgtcccccaaatgaattggttttgctgcccctccgcaccttcttaagatgcttatcagcagcatcacacaacactttgttctgattttgctgtttgtcgggtgaggacggcgcgcgaattgtcgcaatttatttgtagagcaatgatttgctggtgctctctctctttctcgctctctctctctctctctctcgctctctctctctctctctctctctcgctctctttctcgctctctctctctctcgctctccctctctctctctctctcgtcgcccaatgaaaagggacatgaacacaaatttgcataggatttggttcatcatatcacaattagcgacagcaaaacagaaacgggacctttactttgtcttattttaacacacatccgtcgcttttgaatacctaattcaattatttattttacttttagttacattgtactgctcaaacttcatcatggcacccctgctccgtcttcacgccttccaaccgaaactgctgacccgctaaggctgaggtgttaacaaatttattcgtcgtccaaattttatttatttttttttttttaatttttatttgcattttgtttgttgtttgtataaaattaaaatgcgcccccccccccccgtttttaggaaaacttgttcaaatcgcactcggttgacggcgggtgagtcgatggatgactatgtgctgtttgactgtgtgtttggcattccgttgtttgacgaggcgttgaacaagacaatttgccaacgcatcatgcacaagcagctgtgctcaacggacaacctatatggaacaacaaattttattaaattttggatttcattaat

SEQ ID NO: 38245 - DNA, 770 bp, Heterodera glycines
cccctgggcctgcagaaaatggcaactgaagcgtgctcaaaaagtacacttcagtaccaggcgaatagcgcgtcggcgtttgatctgagggaaaggtgcccagcagacttattgtagagttttggaagctcgattttctgaaatttaaaaatttcgaaaattttcaaaatttttcgagctaggcctaaaaaacggtttttgggtttttgaattttaagaatttttaacgaattttcccagaaaaacggagggcacttccaaaacatagtttttcgagctctatcgactggtatttttttcggaaaaatttcgattttttcccggaaatagaaaaaatttttggcctcagcgggacatttgagtcccgggcccataactcgtcaggggttggttttagccaaaaatcgtcttagaacatttttgtagagaattttaaatgctatcgaatggtgtgcttcatgactggaaaatttcaaaaattttcgagctaggccccctcgaaaatttccggaattctttttgggtcaaaaatgggggtgaaaaatatttttctggggtattttgaggtgctgagcacgaatttgaccttggtttttcgtttcatgatttttggaattttttaaaaattttttattttttggcaattttttggccctagggattttggcctaatatttgaaaattcataacaaatcgaagggttgatcaattttacagtaataaagccttaaaaatagagaaaaatcctgagaatttttatggactttatt

SEQ ID NO: 38246 - DNA, 1400 bp, Heterodera glycines
  unsure (1)..(1400): unsure at all n locations
tctgtgccggccaaaaccaaatcgcgtcgttcgctgtccgcgccgcgtgcggcgaccagcgcaactgaaaaatgggtttttcagattcaaaatgcattttctgctgacttngcaatgcgctgcgagcatcagcctcgtgtaggaaaacgtaattaaactaaaggaaaatgtgaagaatgatacggtagcacttgttactgtagggaaaagaaaggttacggtataaacgataaaccaaagtaaagcattggataagtgtcattagcaagtttaaattaccgactaaataaatcatcaattggtctcaatgagcacctttttctattaattaattctttggaagagtttaattttcggattgcttcaaattttgtccaattacggtactacagtactaccaagtgcgtgttgacgttgccctcgcgcgcgtacttctccaaattgagccgtgccatgttcacgaacgggccgtccttctgggcaaccattgatgcctgtgattaagttgctgttaatttgatttaagttttgctgcgtttccaaactgtgccaagtcgcgcttgtcgcgcggtgaccgcggagattggccgcgaagtgcgcgaggtacgcgacgtacgcagcatgcgctccatgctgttttgggtgcccgtcttcaaacggctttcgggccgttgcatcccttggaagggttaacgaatgaatggcattggcacccatttggaataaatggacaaattcataataaataattcaaaaattcgaaaaaatatgcaaagtttaccagaaagtggacgtcccgaggcagtcctagaagaaagaaatacaataaacaaattcattgaagattgtaccgtccagttttctcatttcaaaaaagctgagtagtacggtcccgaggacaacggactgaccttggccgaactgcgggactcggccctccggcactcgtgccagtcagaggcctgtaaaatgacgagtttcgctgcttgcatttactttagttcgcattttttgccttgaaagcgatgtgccagggcgtgccgcagtggccaccgccgtgcccaagtccatgtacgcgtccgccagcccggcctcgtcgttctccaactcgtccacgaacacttcttccgcgaagcaggccaatttcaagctccaagcggccttttatgtgaacatttttgtatatcaaaaataatggattaaggagaattccggaaaaaagaactttttaccaaattctttttcaattttaccattttaattaattttccaattgcttttcgtcccattctctcccccccccccncccccgcttttcacctggtccaatgggttcttctccagcacacgtgcacattctcgatgcgcctcctcaattttgttgattcgaaataaagcag

SEQ ID NO: 38247 - DNA, 1184 bp, Heterodera glycines
tttataataataatataattgataatataaatcaattttttccttcctatattatacattttacgcatatccgagtgttgtatgacaccattagcaggtgggcaattattgaattacacaaaaaacaaatgataacatttttaatttattgaaaaaaatatttctcttaaaaatggattattaaaaaatagaaccccatggtaagaaacttagctaaattctttgaaaataattaataggttaataaaaataggcttgtaatgagcagcttaaaaaccgagaccgggacttgccgggatcagaaagccgaaacgagaggacctggattttcaatcgggatatcgggattttcacgttagcgtacccaaatattaccgtatccaaaattgtttgccttatatttattcatacgatgtgacacaaatatagaacacaaaaataggttatatgtgtaagtgtataaattagagtagagcgggaccgggaattttgggcttaaccgggaccgggaccttttcggggtgaaaaaccgggaatttttggctgggaaaaccgggaaaaaacccgggactggtcccggtcaaaaccgggacctcggtactcagttgtactcagttgtccgtgttttggtcccggtcccgctctactctagtataaataattgaaaaaaataaattttatttttattttaaaaaacggatttttcgtttgtccgtccgttgagcctcaataaatccgcgaacgatccgcccaaaaaattgctccaacaaaataaattaattcaaagtccttcaagaaatgtattcgttgtcatcaatgtccatgatattgggcatttcctgaaaaaattttcggtaaattttaaaatttttggggatttttttccggcgacttttgtacgcgccaagcgcgacggcggaatcatcacttttgccggcgacagctccacagaacagcatttttctatgaattgtttaagaaattgaaaaaataaaatccttaaaatggaaattttttttaattagaaaggaattcaaaaatttctcggaaatctaattaataatcgataattttaatttaaatcccgcgaactaggtgttgggattttgccaataggcgccagaaactaaggagattttttgtttcccattaataccagggatgtgtgtcgacgccctcaaaaa

SEQ ID NO: 38248 - DNA, 679 bp, Heterodera glycines
aatttttatttatctactagcggggtcagcgccttcggcgcatcccccgctaggtagtacgattgtattataggattatgaatgataaaatcgactggctcggccgcttcgcggcctcgcatccttttcttggctttttcttcaatcgccgggactcaacccaccagcattccaatcactgggactcaattctcctgcatttcaatcactgggactcaacccaccagcatttcaatcactgggactcaattctcctgcatttcaatcactgggactcaacccaccagcatttcaatcactgggactcaattctcctgcatttcaatcactgggactcaacccaccagcattccaatcactgggactcaacccaccagcattccaatcactgggactcaatttcctgcatttcaatcactgggactcaacccaccagcattccaatcactgggactcaacccaccagcatttcaatcactgggactcaacccaacagcattctaatcactgggactcaattctcctgcatttcaatcactgggactcaacccaccagcatttcaatcactgggactcaacccaacagcattctaatcactgggactcaattctcctgcattccaatcactgggactcaacccaccagcatttcaatcactgggactcaacccaccagcat

SEQ ID NO: 38249 - DNA, 852 bp, Heterodera glycines
ataaaaataacattcacggtgcgaaaaatggggtttgccttgtatattaggggaaaaaagactttacaaaataatacccccgtgagaagggagtgggaaacatgatttcaaaattttcaattttttatagtctaatctactcaaaacggttcagaattcaataaaaataacattcacggtgcgaaaaatggggtttgacaagtttattggggaaaaaaagactttacaaaataatacccctgggagaagggagtgggaaacatgatttcaaaattttcaattttttctagtctaatctactcaaaccggttcagaattcaataaaaataacattcacggtgcgaaaaatggggtttgaaaagtttattttgaaaaaaagactttacaaaataatacccctgggagaagggagtgggaaacatgatttaaaaattttcaattttttctagtctaatctactcaaaacggttcagaattcgataaaaataacattcacggtgcgaaaaatggggtttgaaaagtttattggggaaaaaaagactacaaaataatacccctgggagaagggagtgggaaacatgatttcaaaattttcaattttttctagtctaatctactcaaaccggttcagaattcaataaaaataacattcacggtgcgaaaaatggggtatgaaaagtttattggggaaaaaaagactttacaaaataatacccctgggagaagggagtgggaaacatgatttcaaaattttcaattttttctagtctaatctactcaaaacggctcagaattaataaaaataacattcacggggcgaaaaatggggtttgacaagtttattgggggaaa

SEQ ID NO: 38250 - DNA, 841 bp, Heterodera glycines
gaaaatcatcccatcagcatttcaatctctgagactcaattctcaggctttccaaacattgggactcaacccaccaactttcaatgacattccaatcactgaaaatcaacccaccagcatttcaatctctgggactcaacccaccagcatttcaatctctgggactcaaccctccagcattccaaacaattgactcaaatctccggcattctaaacattgggactcaacccaccaactttcaatgacattccaatcactgaaaatcaacccaccagcatttcaatctctgggactcaacccaccagcatttcaatctctgggactcaaccctccagcattccaaacaattgactcaaatctccggcattctaaacattgggactcaacccaccaactttcaatgacattccaatctctggaactcaactcaccagcattttaatctctaagactcaattatcagactttccaatcgctggaactcaacccaccagcatttcaatctctggaactcaacccaccagcatttcaatctctgggactcaaccctccagcattccaaacaattgactcaaatctccggcattccaaacattgggactcaacccaccaactttcaatgacattccaatcactgaaaatcaacccaccagcatttcaatctctgggactcaacccaccagcatttcaatctctgggactcaaccctccagcattccaaacaattgactcaaatctccggcattccaaacattgggactcaacccaccaactttcaatgacattccaatcactgaaaaatcaaccccaccagcatttcaatctctgggactcaaccca

SEQ ID NO: 38251 - DNA, 947 bp, Heterodera glycines
attcccgtgtatgatgatgatgatgccgatggtccctttcatgcctttttacccgtaccctccaccaccaccaaaaaattgattctcatttgtttttgttttgttgttgcacatttactcgatcaaatttaattttgcttattttttctctcatcaataaacaattgtgaatataacgcgcaaatattaatacaatggagtgaaaaatttttttgtagaggggaggggggatactgtagggtgagcagcaccacacgtacacagccaatgaaagttgttttagtgctgcatgtaaaatgtggtgctcactctacagtagggacatttatcagggctgggtgaaatttttaaatgaataagcaagcattgtcggcatagtcccacgtgcccacaggccccaaagaattgcgccacccctacactacacaaacacatcccctctatattcggatacaacaaagtgtcggggaactgggcagatgccaatgggtccccccaacgaaaaacggctttcgtttcgctaccagattgaagtgcggcttcctttgggttgcgcgcggccgttgcatttagctgctgttctctgctcaatggcccaaattcaagcgtcatgcgcccatgacacagccccattttggccagatgaaatatgttggttgagagtgggcgtgcctcctgggcaaagtttggagtaggcgtggcatcccttttccggatataaaagtgaaacccatccacatctgactttcattttctcctgcaatggttctcgtaagcgtattttgcagccagctgctcaaatgccctgtcaaattgttgcgagaccggctcaaccaccccgaggaccgggcgcttgtgttgaaacaccttatttggcgcaaatgcgcaccacctacaatgaccgtaacgggttgaccaaaactttcttcttgttgggatttcggcac

SEQ ID NO: 38252 - DNA, 447 bp, Heterodera glycines
cggagcggggaggagctcaattgtcgggggtcggggaccccgatcggggaatgaacaaattttattttaacccaaaaagacaaatttttctttttcaatactcgtagatcttccttttttcattttaatcatctaatttcgttagcgccaataagagtgagtccaagctggcgcctttaaactggtgctaccatttgttcgtatttgttctgattttggggtagcgacatttcttaaatatacttataattttgaaattttatgacataatgccactattttatcaagaaattttaaggtctgacgcaaaatttttttgatttcgaatgtatcgaaatttataattttgcattttcctccccaaaattatcaaaattgataataggagactaaaaaataatatttttttgatcgaataagttgtaaaaataactgatttgaaaaatg

SEQ ID NO: 38253 - DNA, 497 bp, Heterodera glycines
tttggaggcatatgtaccaaaattgcagccccaccaatatacgaataaaaaaatgattttccattgaattaaaatgaagtagccaaaaagaaaaacaggaagaaacaaatggaataaatagaaaaacaaaacgattgtatgaaaatgagacgaatcattgtgaaaatatttgaatttgggaaaattttgaaaaagacgtatgacaataatgagatttttcgcttagaattgtttgaggaaatttgaggatggttcaaatataaaaaatcgaaaaactcttcttcgctttgtccttttttgtccaacaatggcaaaatgtccaactcagtagaccaagtcgaaaaggtcgtccaccgaatcatcagcctaaaaaagataataggaaaagtgaaaatgttttgttgcttttacctgctcaatactctgttcttttgggagtccgttgttgtgtccattttgaaggtcattccggaggaggcggaggcgggggaggaggg

SEQ ID NO: 38254 - DNA, 580 bp, Heterodera glycines
cgaaaaccccaaaattaccatttttaaaatgtttttaacaatcgaatttaatttttttttaacaaaaatattaaaaacataaaaatctttcacaattgacattttattaaaatatgtttaagaagaaagaaaaaaaagtcaaaaacgcaattaaaagtgtccaaaaatttcaaaaaattttctcgaaaaaaccaaccttaacacccaaccgcttcttctccagctcattgttgccctgagaatttcacaaattaattaatccgcagtttaaatttgggatttaaaattttcaaattaaaatacggaccaaaaatgagccaaactcggaggcataagcatgctcgaacaggaaaatcaggaagcgctcgttgaactccatgcaggtcggatactggcgcatcagctgcaattttgggaggagaagggaattaaaatgcaaaaaaaaaatgtttttttaaaaatttaattttggggaaaaaatattttgaatggggacaaatacgcctgccatttggaaaaaaatggaaaaattattaaaaaaaaagttaactaatatttaaaaatagtaataattattttg

SEQ ID NO: 38255 - DNA, 740 bp, Heterodera glycines
gggttggtgatggtggtggacaggggcgagtagcacctcagcacggaaatgaacagcgcgttctgcttcaggctggcccaccgggaacagatcatgcccatggcggcaaagtcagctgcaaaggaaatgccctggaaaagtgggaaaagagtgattgaagaattgcggagaaattcagacaataattgggggagggggaaatttggtcggtaccgtatccttaatactgtgagtcggacatagctatcaattcgattaaatttcgagaaatttttagccgcccaaatgggatggctttccattcggttcccaaatttattctttttgcctgcacaaagcgaagtgccaaaaacaggttgaaactgaacgatgtcgcaattggaatcagcgcagtggcaatggcagatgccaatccggcaccgaacagcacgaaacgggcgccgaaacgggtgtacagccaggagaaggggaaagtgccgagcattgagccaaccgcaacggcccacctgaaaagtgccaaggcatgctcataagtgtgaaatcattcttctgctgcttacatcaattggtttttctgctgcggagtgtaagcgacggagtgttgctgaaaatggtcatttatttttaaaaataaaaatgcattttttgattatttccgccacttcggcaccgcttagatcggtgccattggtccgcaccgaacccatgcaaatcaatgtgaatttcagtgccaacatgtt

SEQ ID NO: 38256 - DNA, 818 bp, Heterodera glycines
aaatcaaaacaattattatgaaaataaaaagcaggaatttattaaacgaattgatgagattaaaagaatgtccaaaaaaagaaaacagaagcaatttgcggaagaattgggcattggtgaaaagacattctaccgatggaaaaaggaatttggcattgaaatggacaaaagtaaattattttatttttaattcttttttaattatattatttaggtggaaatgcgtattcgaatgtagaaaaaatgagtaaaatgaatatttattacaaaatgaagaaagacaattcctccttaagtgacacagaaattgcgcggtcattgaaaatctctttacccaccctaagcaaatggaaaaaacaaaaattatcgtaaattttcataatttctttttagtcttaatgacctaatattgtttcatatttgtaattattagagccccgatttttatgtgctaaaaatcctgaaatatgtatttttccgataaattttttgttatatattgaaagctccagcagagaacttcgaattccaatgaccaattaagaattcgattgtaaataaagaaattttgaaaatttgttagaaatgacaaaaaaaatagatttttagaggtgtatttttcaattttcttgtatttttattacaaatttttctcaagaatgccaaaatatgtgccaaaccccgaaatacgatttttgggcttctctcgtcataactaagccgcagaaaaaatactatctcttcattttaattatgtaaaaaaaaacatttacttctctccgtataacttttttttatgcatacaattttccccaatt

SEQ ID NO: 38257 - DNA, 720 bp, Heterodera glycines
tggggttccaactgttcgcggggtgccacgcatgcccattcgccaagccctcgggtttccaactgttcacgggtgcaacacatgcccattccaactgagcacgggtgccacacatgcccattccaactgctcacgggtgccacgcatgcccattccaactgctcacgggtgccacgcatgcccatttggcaagcatacccattccaactgctcacgggcgccatgcatgcccattcgccaagccctcgggttccaactgttcacgggtgccacgcatgcccattccaactgctcacgggtgccacgcatgcccattccaactgctcacgggtgccacgcatgcccattcgccaagccctcgggttccaactgagcacgggtgccacgcatgcccattccaactgagcacgggtgccacgcatgcccattcgccaagccctcgctttccgactgctcacgggtgccacgcatacccattccaactgctcacgggtgccacgcatgcccattcgccaagccctcgggttccaactgttcacgggtgccacgcatgcccattcgccaagcctccggttccaactgctcacgggtgccacgcatgcccattcgccaagccctcgggttccaactgttcacgggtgccacgcatgcccattcgccaagcctcggggtccaactgttcacgggtgccacgcatgcccattccccaagccctcgggt

SEQ ID NO: 38258 - DNA, 315 bp, Heterodera glycines
  unsure (1)..(315): unsure at all n locations
tcgnccactcttttctctccccccccccaccccttcgctttttagcattattcgcattagcgattcagccaaagtagagagaaaaactgaggggaggcaaaaaatgagtgaggagtgaatggatttgatgggagagaggggaaatcgacgggggaagtgaaatggacggagtgggtgagtgaatgaaccgaataaaatgaagtggcggcggcgggggcacaaaaaactgccccaatattcattcataaaagaacgaccaaaggggggggggcgaggaatggccaccgaatcagtcagaggggggggggggggggg

SEQ ID NO: 38259 - DNA, 1116 bp, Heterodera glycines
accaaaaatcattagggtgcataaatgtttgatttggaactcacttcagccgattcttagtgggctgaaattttgaatttgctctattgcctgggcgttgcaaaattatagcgcaccctctacaaccaagtcccatgggggtgttaaaattttgatcactcagatcaccctgaaggagtgatctgatcacctcgaaactaaaaaccattctgaaaagactgaagggaaattcgtctaaaatttcttcaaatttatgtaaatataaatgtgcagcctaattaatcattcattatcaacagcagagatggcaaaatgattgagtgaaaagaaaaggcacttccgctgggttttgacttcgtctttccttcctttcattggtaatttgatctgttccccctcattcgtagtcttcctcctcctcctctccgtcctccgcttcgtccgcgttcactttttccaaactccgtctcaattccttcagtctgatcaaaacactgagttggccgagccgcgggttgtcctcttgcaagtgattcagccaagaagaagcgaagtcgttggaattcaccccaaaaatggccatcgcgagaatggtttggtcggactgttggtgcaaattcgtgcggtaatcggaatggccttcccacagccttttgtgaagctcatcctcggtgaagattttgtgagaagaaacacactaaaaaagaaaataaaagttaaacgtccgaattccgccaataaaaataataataattcgctttgaccaattcggttatttcctcgtcccgctcaaccgatgcagcactgctcaaaacgacgtaattcaactgacaatgagaaaaaattattgatggaaaaaatattgaaaaaatcaggaaaataaataatgtataaaataagagagaaaatgaaaaatgagacttaatttaaaaatgcagagtgaggctgtttaatgcgaccaacatactaacagttgctaaaacagaaaccgagattttcaaatcatccgggccgggttgacatattcaaaagcagctggtttccgggtccggcctgctggtcaaacccaatttccaaattgccgtgaccggaaccagttcaaggttgataaaaatt

SEQ ID NO: 38260 - DNA, 1011 bp, Heterodera glycines
tttccgttttgtgttggatttcaacaacttcgtcgtgggactgttttttcggccaattcctccccagccttggaaaaaacaatggtcctcaattgatcattccttttcgggtgctttcactttgctgccgattccattttttttgggattttccctttaccgccatttttcaaatccaacattcaacggattccataatgccggcaattgggagttactactagccgtaaagctgagccggcggccatgagttttagccttcacattcgaaaatgcgtttgcaacaaccaaaagtgcagtaaaaagaccagcaaaaattgtcgaaacatcgcctaactcaatcggtttctgcgacgaattgcgtttcttttggccatcttttgtcgattttacgggcgaggagttatgggaatttttctcctcccgggaaattttcggtccaagtcattgagtcctcttttgaaaatttatactgggtttatttcgttcaaagccgcattctttccaactaaatttggcattacaatttcgcgctatatggccaattttacggcagttataacataagattttgttcgtccgtcggacataaaattttttccaatcggttgtcgcattttccgcgttaattggtttgtggctgcgtgccaaatatgcatttttgtcctcttcaattgactttgcagctttttgcgttgcttccgcacgcaccgccaacgcgaccaaactgtcatagctcagacccggacaacgagccatttccaacgcaatcgaaattttggcattttccaaagaccgaacgaaatgtttggccgcatagtcgctgtacaaatgcaatggcatgcaaggatatccacattgcacaagttggtaaagtcgttctgcaaattcttccaaattttcgtctggtcgccgttttggtccatcccacaattcgttgaatgcttgaattgcgggacaaaatcccattcgtccaaacgtgactccatttcgcttcgtattgcatcaaat

SEQ ID NO: 38261 - DNA, 758 bp, Heterodera glycines
atgaaaccgttgattgttttttaacaaaagtttgtcatcattttctatttttctgatttttttattttagaatttgttgtgttggtcagtgcatatttttggcgagaattttaaagaacgttgaaaagatgccggatgtatattaataaaatcataaaataaaaaatttttataaataaattgcatttttaaattttgtggcagttttacgaaacgcgctggcggttttacaaaacgcgctggcggttttacaaaacgcgcatgggtggcagttttttaaaaatacccatttggcagttttacgaaacgcaccagcacgctttataactagcgcaaaatttgcttaacaggcccaaataattgtcatattcgtgatcagcgacctttaaaacccccgggtaattggtttcaggactttttagacaaaaaaaatttgaccaaaaaaaagttgaaaaaattttcaaaacctgtcacttttcatatagcgacgaaatttcttactaaaactttaatttatggcctactgtcctgaaatctcagaaatttttcccagatgcgaacgttatccaaaaaattctgtctgctcactcaaaacttaaaatgctggaaatttttttgaaaatcttggtcttcttgcagaatgtaaattttgacatgggcacgtgaatttttaaaaaaaagaattggaacaaaaaataggaaatttttccaagagtgacatcttatgctacggtattttgtgacaaatctcggaaaaa

SEQ ID NO: 38262 - DNA, 778 bp, Heterodera glycines
agaaaaaaatgggtttaagtaaaattcgtaaattccgctcaaaaaacttctcaaccaattttagcgcatccaaattccttctacaatcgcctttatacatcccattatgagcgttaaaattatcagagtgcggaaaatcgcatgtgatctaagcctagaaaaaatggtgtaagtaaaaatcgtaattacgctcaaaaagctcctcaaacaattttagcgcttccaattccttctacaatcgcctttatacatcccattatgagcgctaaaattatcagagtgccgaaaatcgcatgtgatctaagcctagcaaaaaatggtgtaagtaaaaatcgtaattacgctcaaaaagctcctcaaacaattttagcgcttccaattccttctacaatcgcctttatacatcccattatgaacgctaaaattatcagagtgccgaaaatcgcatgtgatctacgcctagaaaaaaatggtgtaagtaaaaatcgtaactacgctcaaaaagcttctcaaccaattttagcgcatccaattccttctacaatcgcctttatacatcccattatgagcgctaaaattatcagagtgccgaaaatcgcatgtgatctaagcctagcaaaaaatggtgtaagtaaaaatcgtaattacgctcaaaaagctcctcaaacaattttagcgcttccaagaccaaccacaagcgccaggatacatcccacgaagagcgccacaagcatcagagaggcgaaaaacgcatgccaccaaagccgagaaaaaaacg

SEQ ID NO: 38263 - DNA, 689 bp, Heterodera glycines
gcatttgtatgggtataaaatttatcaaaaaaagagatagccatttttctgggatagcttataaatttaaaaattccctcagaaataaaaggtcgattgcgccccgccctccctatcatgctcgagagcttttgtatgggtataaaatttatcaaaaaagggattagccattttttgggatagacctttaaatataaaaatcctccaagaattaaagtggtgatgcgccccacccttcctttcaatctgcagagcatttgtaggggtataaaatttatcaaaaaaagagatagccatttttctgggatagagtataaatttaaaaattccctcaaaaataaaaggtctattgcgcaccgccctccctatcatgctcgagagcatttgtatgtgtataaaatttatcaaaaaaagagatagccatttttctgggataacctctaaatataaaaatcctctgtgaaataaaatggcgattgtgcacagccctccgtctcatacgcaagcgcttttgtgaggtataaaatttctcaaaaaaagagatagacatttttctgggatagagtataaatttaaaaattccctcaaaaataaaaggtctattgcgcaccgccctccctatcatgctcgagagcatttgtatgtgtataaaatttatcaaaaaaagagatagccatttttctgggata

SEQ ID NO: 38264 - DNA, 1704 bp, Heterodera glycines
  unsure (1)..(1704): unsure at all n locations
aaaaccaaattgccgattcncatcgtaaagggaaaacggacaaattaacatntaatntaattaaaattttatttaattttaagcgaattggaaatgctgcgcgcccgttggaagcagctgacggacgaggagaagcggcttctcggagacaacgcgcgactttgggacgacctgacgaaagctagaaatgtgagaaacaaagcatttttgagtgatttgcctctcattttatgtataaaaatttcaatttaaaaatattagcaaaatttttttctaattttaggatttggacgaggaaacgttgggtcgaattgacttccaaaaccaagtgcaaactctgatggaggaactcgaagtctgacaatcagcgaccaattagctaattgatcaatcaattaattgtttttttttagtttttgcgtcgtgtccatgagcaggaagtgaaggagttgcaggcactgctcgcccaggcgccggccgacacgcgcgaattcttcaaaaacgaactcgcattggtgggaaatcagcgaacattaattgaatttaattatgccaaataaaattggcactttttaaaatctcaaaattttaggcgattcgcgacattaaagacgaatacgattatatagcgaagcaaggacgccaggacatggagagttggtacaagctgaaggtggattaaacttgaaaaaaattgaaaattcaaatttggtgatggcttaggtttccgaggtccaaggcaatgcgaatcgggcgcaaatggagtcgaattatcaacgagaggaggtgggtgaaagaacactcggcttaattggacactaattatttgcctaattgactcattaggttcacactaacaaacataattaatgcttgttaggttaaacggatgcgcgacaacattgggcgatttgcgtggcaaattgcaagacttggagggtcgcaattcgcatttggagaaagaggtgcaaaacctgaactatcagctgaacgacgaccagagacagtctgtgacttttttgaatttaacaattttaaattgaatttgcattttaaaattatttttagatttgccatttctttgtcccttttctttgcttaacttctcaattttccagatatgagcaggcgctgaatgagcgcgacgcgacgctgcgcagaatgaaagacgagtgccaaagtttggttgccgaattgcaggtgccaaaatgggcaaaaagcatttatctacagtaatccaatgtgttcccctctttttcaggcccttttggacaccaaacaaatgttggacgccgaaattgcgatttaccgaaaaatgttggaaggggaagaaagtcgggtcggacttcgacaaatggtggaacaggcgagaaaaacagcggaaaatccacggaaaaccaacgccccccccccatttttacgcttttaggtggtgaaaacgcattcactccaacagcaggaggagacggactcaacgcgaaatgttcgcggcgaagtgcagacgaaaacgactttccaagtatttgaattgttggcgaaatgttttgaagccaattcaaaacgccgacgaattcattccctattaagcgctcagccaaagggaacatcacaatcgccgagtgtgaacccagcggaaaattcgtcactttggagaacacacatcgaagcaaagtgagcgaaaaaattcgacggggggagtgccgg

SEQ ID NO: 38265 - DNA, 1250 bp, Heterodera glycines
tcagaacccaactgatttcagctaagtttgacctggaccagtttcttgacaacaattttgtatgtcaaaagcacataaatgaattgctgatcaaatgggccgactcgcaaacccacttccggacattaaccgaagcgaccggaacctattattactgtgcctttccaattactgtcaaagggatggacgatgcgccaattgacccgcaccgaagggttatcagacgaaacgctgcacaccttctgcataagaaggaggcaaaatatgttttggaaaaacatggactgctaatgcaccttggcacacgtaagacaaccagatttattattgttaggaagaagctggttgggcggttaaaacgcggaaagcggggattgataagatccataaaagaaagggtggatgtgcctcggtagatcaatggtagagatgcccacgcaaatggtgcacgagtgggttcgattcccacccgaggcctaacatttacttatttcttattcaaataagatttatttatttttcaaattttgtttagctgtctgtgaatggcatcttgatttgatcaagaaagggatggctgaacaagctgaaagcagcagaaaaggtgaaagccattcaattaatgaagggatggccgaacaagctgaaagcagcagaaaagatgaaagccattcaattgacaatttattcaaactagaataaaaaacgctgaaacaaaacgaacaaagtttaaaaaaaacatgatgttgtagaattgaaaaagagctttcgaattttgcatttttagtccatatttcggccatttttggcaaattttctcaagaacaatgcaaaaaaagcgaaaaatacacccctaaaattcgattttttggaaatttttaaaaattacatccccaaaaataaaaaatttgggtttgcatcgtcattttggcatttttaataaatattttcaccattttttttgcgaacttttctttttttaaatgcgaattttttttgaaattggcaaacttggaggtgttcttttatacaacggacgacaataaaaaatttgcatttttaattttttaaatccatttttttggttgtttattgtatttttatagtttatttaagcaaatattgaatatataaacctttttaggaatttttgagtgtttaaaacatatattttgccagtttttagtccatattttggtccatatttgggcattttttagctttttagtccatatttcgggcttttttag

SEQ ID NO: 38266 - DNA, 816 bp, Heterodera glycines
aatttctaaaaagtacgctacagtatttctagaaaagactgtaaatggttcaattaaataataatttagaggtaataaatcagaaaagtgattatttataagctaaaatcgtaaaagtggcatttttggacaaaactcaataacaaggtgccgcaatttaatttttttcattttttcaagaatagcttttatttttcccaaaattatcctcaaatgtcccaatgcgctaaaaagtgcgatttaaataatccataatttaatattttttaaaataaattatataattaagcgtagaaaaattgctatgagttttgttttttagggtaaaaaataagaacattttgcgaaattgcttcaaatcagttattttaaaaattattcatcaaaaatgttatttaattattatatttttcgtctcccattatcgcttttaacaattttggggaggagataaacaaaccataaatatcagacattctggatccattaaatcagatttttaacattatttgcggcacagttttccaaaaaactcgggtgaatgtgcgtggaaaatttttaaaatttttaatggattttgttagaaattagccaaattcagaaatttcctcttttagatgaaaataagacactacccccaaatcataacatttcttagaaaaaagaacataaagaaaccctgaaataaactgactattaccagaattttggtgaataagaattattaacatcataaaataaatgggaatacgtgttaccatggtggtagtttagcaccgtcttaaaaacagtaaaaaaagaacggtaaaccgagaa

SEQ ID NO: 38267 - DNA, 1264 bp, Heterodera glycines
  unsure (1)..(1264): unsure at all n locations
cggaggggggagggcaacggcggggggtcagcagaccaaacatttagttggaccaaccaacagccccggagggggggggggaagaggacgagcatttaagcggatgtggaaaagccttaaacaaaggcagcaccagcattatagcaaagacagataaacagaaaagcgatgagacaaacaaaaaaaaggcaaaaaaaaaaaaaaattcggctatttcgtcagatgaattggccaaatgtgtggcggagagaagagacgacagagaaaaaggggggaacggatgagcaaaagagtacgggggaaatggagagaaaagaggatgtcagagaagtacggggaaggaaaagaacggcgggggttagacagcacacgcgaaaaacgtcgtccggaaatccccttgggggctgactggttggcgagaagaaattggcggcgactgggcgactggctgatgattgctgctggcgctaaggccggctggcacaagaagaggacagcagacaattcggcagggcagcaaaacgggacatggataattgtgatgtaagaagaagaagccgtagcagcaacagaaaactgtgtaaaaaatgaaaaattgcggcgaaatgtttttaaaaaataatagaaaatgaaaatgtgaaatgtgaaattggaaattggaaattatgtaaaattcttcgtaatattaaaaatgaaatttttgtatggtaaaataaaattgaatattaaatatgtttttaatagatttaagtctttaagtcattttttggcgctttactaacttaaaatcagtgcctgtcaaagtcttgaccgcattctggaccaggattttcaaattaataaaaatttattataaaaatgctaattgcatgcaaaaacttaagcaattttaaatttgccatttattttactttcgtttttttcgttttcaagctgtgacagacacttttttcgataaaaatattcaaatctatttatgtagatggtatctagaatcagaactgttcatgttaccagcttccccttttcggtaaatttttcaaacaaatccaaccggattaattgtttatatatattttttcattttacttaattttaatcgaacaatgtgcataacagtgatgtgtgtcggaatgccgacttccggtttccgaaattttttgagtgcgtcgncacacaaaagcggagataacctatataaaatttcctcttaaacctcagaaagtgcagctatgtagttcttttgtttgcattttttcatggt

SEQ ID NO: 38268 - DNA, 932 bp, Heterodera glycines
ttattaaaaattagagatcggagaaaaggattggccagttttttgagtaaaaagtctaaaaacccgaattctaaaaccttcgaaaaacataaacaaaagtctctatacctatgaaatactgtttattatgacaaatttcggactggccatttttgtggtgtcaatgcttactatgccattttctgacgaaggtgaggatgatgtcggtgccatttgctgtttaagtcgttgtacatatgccaatatttgttcgccattgaaatttttgacgcgaattcttagcggattcattccaaccgttatgcatttgttcaatcggcatcgcttacataatgtataatctatatatatttatagaaatatagaattttatttctatttttatactttttttagattataagtcaaaaataaattaaatgtttactcaaaatgtttattttcacaaaagaattctcatggtaattaggtgctatttacaaaactgaatgaataattttgatgaatccactctcaatttttaaatttttatcttatatttaaattttatagtatattaataaattttgttgttgttttaataataatttcctaaacaaaaatacaataaaaaagaaaaaacgatccgtatgcataaagatcacgatccgcggttcaggatccctatctacctccggagtaggattgatgagggatcatgagaggaaattaaaaaaataatctttagaaaaattaataaacgaaaaagattttatcattttttgacatgaatagaataaataaataaaatacccgccaaaaaatacaatacacgggtcgtgtccatataaatccatattttaggggttttcgtgaataaatccatatttctacatttttgcattttagtccaccattttggcaaattttcacatgaaaaatgcaacaaaaaa

SEQ ID NO: 38269 - DNA, 802 bp, Heterodera glycines
  unsure (1)..(802): unsure at all n locations
gcttccaccagtgcagatcttggtggtagtagcactattcaagtgagatccttgaagactgaagtggagaagggttccacgtgaacagcagttgaatgtgggtcagccgatcctaaggcaccggctaacgccgtaacacactacggatgacgacttttctgtgcttgcgcagttggtccatccggttgccgaaagggaagtgggttaacattcccacgccaggctagggaaatgacggttcgcaagagctgttttgcgcggtaacgcaaatgaactcgcagacgtcgtgtggagtccgagccagagttctcttttctggtttagggtgtgcgtgcctggaagtggctcagcctgagatagggatgttgcgcccgtaaagcaccacggttcctgtggtgtctcgtgcgctccacacggcccttgaaaatgcgagggaagctatttgaatctcctgcctgatcgtaccgatatccgcagcaggtctccaaggtgaacagcctctagtcgatagaataatgtaggtaagggaagtcggcaaattagattcgtaacttcgggaaaagaattggctctaaaggtcgggtcagccgggctgttgcgtgaaacaggcggcttttgcccgtggctgtgtgctgttctttcggggatggtgcgtggactagtggtgagagctgcttgtggagcgcttcagctgcgtgtatgctcgtcagggtatgcacttcggttggcgctgaacgaccagtttagaactggcacgaactcggngaatccgactgtctaattaaaacagaggagacggatg

SEQ ID NO: 38270 - DNA, 889 bp, Heterodera glycines
  unsure (1)..(889): unsure at all n locations
ccggaccccctttttttcctcactaaaagctttttggaaaagcgcgccgaaaaaaaagttatgtgaaaagcaaatctgaatttctaataatattcgatcatttagtccagaaatgattaatgtttgaaaatgagtgaagaagatttgatttgaaaattttcattgctttaatctagctttaacttttggagtttattcaataaacaataaaaaacaaagtaaaaatttaattttgtattattttcaattgaaataaattaaaattaattttttttttgaattttttaaatttcccggttgatcccggttcccggtcccggtcccgaagaaaaatcgatgtcncggtcccggcttctcaggtcccggcaagtccgggtcccgtttttgcccaaaattcccggtcncgcttcactctagaaaaaactattcaaaagtgttacaccgccagatttttattttatttttttatttttcagtcccgtcatttgagtcctaatggtataagaaatttcagttcagtctcgaagattgacttattttttggaagtttcataccaaaaagtcgaattttgccttaaaagtgtaaaaagtcatgaaaaaagtcacaaaaaaacaaagtcataaaaatcccaaaaagttgaaaaaagtaaaaaaaaaagtcacaaaaaatgtatgctagaagcttcaaacaaagtttagaacactttttaagtcattctaaggtcatttagagtcagcaaaaaaaaaagtcatttgacttaaattcccatccctaatacataatatcccaaaaagctgccttttttgttgaaaatctgttaacaaattacactcaaattttcaaaattttccccgacagcgcctatcggcaccgccagacccctttctt

SEQ ID NO: 38271 - DNA, 1120 bp, Heterodera glycines
  unsure (1)..(1120): unsure at all n locations
atttgagtcgttttagtgcctattttntgggggtttttcgatcctaaaaaacgttccctcttattcataactttgcgcaaaagtattaaaattttaattcttggtattaaattcatagctctaagcatttgctagaatattgttggccaccataacattttgaaacgacgaattttgtgaaattttatgctttaataaacaacacagagagaaatcaaattatgccaattaagaaatctgggttcatttgatttccaaaaaaatacctcaattacaaatttttttacgaatgacccaacaccttttgaaatgcgaaattgaaagcgaaacccatcccctgctaatccctatcgaacagtatgccaaaaaatcctttttttcctggggtccggacaatccgtcagtgaaggacaatccgtcagtaatggacagtccgtcagtggataatccgtcagtggacaattcgtcagcaaatttttttgagcaatgataaaaaatcttgctaaaatggttgttaaatttaataaatacaatttcttttatattcttaacatttctaattatttttaattcaattaattgaccatctcgagaaattatcatttaattcttttaaaaatgattaattcataatttttataataacccaaattattaattcatatttttagcgacttaaattaatttttacatgattacaaataaatctgggtgttttaaaaaaaaatttgattatggattaattactgacgattgacgactgacggactgtccactgacggattgtccgggagccattataacattatgtcaaaaacagatacttcaaaggaaaatgaaaaaaataacgaatttttgactggataataataaaccggtaaaaaacggtcagccgggccgggccggtttggcattttcaaaaacgccggttcgggcacggtctctccaaaataggtttcaaatcgggttttttcacaaatcgccgggccggtttgccgggcccggtaaattcagttccgggcccggcccggtccggatgtttattttttgatttttatagtgtttcatggacggtaaaaaagaaaagaaagcgacaataaatctttttatggataattat

SEQ ID NO: 38272 - DNA, 273 bp, Heterodera glycines
cggtgtcatctatgttactagatcggggatcgatccccgggcggccgctcgagtaggacctgcagaagctagcttgatggggatcagattgtcgtttcctcgccctatccatcggcacagagaggagcacgaaggggaggggagcggcgcgtagcgggggaggtgggtggcggaagaagaaaagggtggggggagtatgagtatgatggtcaatatggagaaaaagaaagagtaattaccaattttttttcaattcaaaaatgtagatgtccg

SEQ ID NO: 38273 - DNA, 882 bp, Heterodera glycines
agaatatttataatttacatactgcataataatcgttagccgtcttggcgtgcgttgatttctacggagttttttctcgataaaaaataattttgtattattatttaattatttctacgggcactttaaaataaattaataataaaacttccatttcttagtcataaaatggcaccccttttcccgacagagtttttcgacttttttgcaatcctttctctaaaaactcatttataataatataacggttttttctatgctgcctttctataattattacattatttagagataaatataataaatttttgttagaaactagttcttaatttctgtatcttaaccagaaaaaaatgttttagtgattattttgtattatttaattgggaataataaaataataataatagaatatttataatttacatactgcataataatcgttaggcgaacttggcgtgcgttgatttctacggagttttttctcgataaaaaataattttgtattattatttaattatttctacgggcactttaaaataaattaataataaaacttccatttcttagtcataaaatggcaccccttttcccgacagagtttttcgacttttttgcaatcctttctctaaaaactcatttataataatataacggttttttctatggctgcctttctataattattacattatttagagataaatataataaatttttgttagaaactagctcttaatttctgtatcttaaccagaaaaaaatgttttagtgattattttgtattatttaattgggaataataaaataataataatagaatatttataatttacttactgcataataatcgttaggcgaacttggcgtgcgttgatttct

SEQ ID NO: 38274 - DNA, 879 bp, Heterodera glycines
gcagtaactcggctcagagtgaagattaaggggacgcaaaagagatgatttaaaagcgattcgaaaattctatcgaccgatataataacgatgcagtcgcggcgttgacaaccgagatggaaccaaaagttccataatatctttccataaggctggaaaggcagaatttgtatggccagtcgatatttacactgagcacccgttgaagcgggtgatgcgaagccatagcaaactgtatttttaaattctggccgcaattctaccaaaaaacgtgtttagaccgcagtaactcggctcagagtgaagattaagggacgcaaaagagacgatttaaaagcgattcgaaaattctatcgactgatataataacgatgcagtcgcggcgttgacaactgagatggaaccaaaagttccataatatctttccataaggctggaaaggcagaatttgaatggccagtcgatatttacactgagcacccgttgaagcgggtgatgcgaagccatagcaaactgtatttttaaattctggccgcaattctacgaaaaacgtgtttagaccgcagtaactcggctcagagtgaagattaagggacgcaaaagagacgatttaaaagcgattcgaaaattctatcgactgatataataacgatgcagtcgcggcgttgacaactgagatggaaccaaaagttccataatatctttccgataaggctggaaaggcagaatttgaatggccgagtcgatatttacactgagcacccgttgaagcgggtgatgcgaagccgatagcaaactgtatttttaaattctggccgcgattctaccgaaaacgtgtttagaccgcagtactcggctcagagtgaagattaagggacg

SEQ ID NO: 38275 - DNA, 887 bp, Heterodera glycines
tttatgatttgttaatttcctcaccaaaatttttaaagatgataatcgaaggcaaaaatataatatttaataatttttgattaaaaaattgtaaaaataaaagatttgaagcaattttgcgaaattttcttatttttgaccctaaaaatcttattttttggccttgatgttcttattttgaaaaattttcgatcgaagccctgcttcatagtaattttcaagctaaatttgtctattattgtgttttttgaatcgacaagctttttttaatagcccaactatttttatattataaaaatgttaaattatttatttattttttgcctcatctttgcaataagaaaaatttttcgtatttttttttcaatttaatatcgtattttatgatttttaacgtaatttttccaaattaaaacttttaatatttctctatttttcgtttcttacgttttctcatttaaatttacagtgtttaaataaaaatttctgaataatatttaaagttttaattttgataatttttttatttgttatctcgtgcatgggttactatttgattatatttttccaatgcaaaaattttttaatttttattaaaacaataaattttaacattattattatatgtgtcatttaatgaagtaaagtgctagtattggttattttaatgtattccattaaatccacatctcgtccatcccaattagaatcataaacatttttcgaaaaacgtctggcagtgaatttgatacacgttttattatatgagaaatttcggttatataaattgctgaaactgtttaaaaataaatattattatttaggttaattattagatcttcatattttatttattatacattaattgcctttcatattaaattgtt

SEQ ID NO: 38276 - DNA, 1095 bp, Heterodera glycines
  unsure (1)..(1095): unsure at all n locations
gaaattcgcctatttatatttactaataattgccaacattatggcatcgggaaatggcacaaaaaatgacaaaataattgctaaaaaacggaaatgnatagcaatagattgaatcaatatgtattattattttttgactatttcatataatattataatatattaaaattggacaaatgaaaaaagtggagtgagggtgctcttgggatttgtgctattttcctcttctatttgtgcccgtaaaaaaaagtcggtcaccaatacttgattaattgcttttcatttaaattaattttttacatttcgccacatttcctttccatttagtttatttgttttttgtttctttcatttgttcttctttttttgttcagcttgtttcggaattttcatttcatttaaaaaaacaaaaattattaataacttttttttaatgttcatattcttccgttcattgtttgctcggctgctttgataaatgtacaacactaattgcccatttgatgttctgctgattttgctgctgttgttcgtccgcaaatggccgacgacaaagcaattgacgcctgctgatgtatactgcttaaatgggcatttgcaaattagcatgcttaatctattagaatacggtatgtaaaagatttggtagtaattttcaaaatgtgaaaagaatttattgaaattttttaaatgcatatttttaaaaatttttgcttttgtaatcgacaaagctaaccagttactagatggttccattactctttcatctctatacccaagtcagacgacctatttgcactgcccaatcgcttcaatacttccaccatagtttcctctggcttcttcctattcatgaacagttcaccatctttcatgactcaccgcatacgctctgtctccgccccatcgcatgcgatcgagacgggactatgttgcgccccaacaccgcagtgccagagatcacacatcagctccgcaagaagccttcactttcattgcgcctttgggttttgaacacccaatgacttgcgcatacgctaaactccttggtccgtgtttccaagacgacgcgaacagatgacccggtttttacac

SEQ ID NO: 38277 - DNA, 1568 bp, Heterodera glycines
ctcgccaatccgccgaacactttcacaccaaacagcatggcctcctctttgccttccgatggcagcccttcaagtgaagacgggtgagtttgtggccggaggttttcctttttttgcgaaatgagtccgagtgacgagttatatgacatgtcaaacttttcaatgagtaaacatggtaggggcgtggaatgtgcatgtgcctttttcatttaaccatgccaattctgtatttttcttcaattttagtttcccaaatgaaaacggttttgaggactgtgtgctcaaatcgccgatcactcgatgcatagttcagatggaagtgcgtcattctcctattatcccttcttttttgattgcttttcttccgtaggtggtcgactccgtctccaacatgttattcgggcgaaacgccttcaaagtggagggaccgacaaaaagaccatcttcgagtgccgtgggtgaaatgttcgccggcgcatcggccggtgctgcaaacacttcggaagattcgctttccatcggagaattgccggtactgtgggcaaaaaaactgtcaaaagacgaccaaaaatgactgttcattgtcagtcagttcgtcaccaccgactcattgaccttgacaggccatttggttgatccgttatttttattccgcaataaaaaagagagttgcgacgtcatcaaaaatgggggaaggccgttggaaattaaactttaatctttcgcactgttcttcaaattggattttttcgtgggacgtccccaaattgagggggagaagcaatttcggtacagatttgaattccaaaaaaaactttagtccgttgaactgtttgccattgttgtttttgtagaccaattaattattccccattttgcatattcagtgcatgttccaacacatttccacgccgaaccttctgaggattgtcgactgtttgctgaagagtcacacgatggctcgtcagctttccacaaatgcgtcggcacagcgcaatttgctgtggaaggccaccttcaaagggcgctccaaaccgaacctccccaaattggagggtaaaatcggcaaaaaaacaaatcatttattttcattgtcctttcttcagcccattcaatgcattgtgcattgaacattctcctccaattgttcgcttcacataacactccgacggaattcgttcctgcgatccgtgaacaattgcatcggttcgccaccatttcttctattttaagtattttaaatttggacaaattcagcactgtcaaatacgccctggagcactatttgagtacgcactcggacactttccgcagctattggcttaccggtcagcattttcatttcattgcgttttttcacttaatttcaattcgtttgttcatttagtgatccaaatggtactcaatcggctcagtgatttgccgtccgatcgcttttccgaattgagtgtcgaatttcggctgtcactcacatcgctcatcgaatcggatgagcaggtcgtccgtccactgttattttcccaaaaatgggtttgaaactctccatttagcccatcattcgaactgcg

SEQ ID NO: 38278 - DNA, 947 bp, Heterodera glycines
attctgcctttcctgccttatggaaagatattatggaacttttggttccatctcatgtggcaacgccgcgactgcatcgctattatatcagacaatagaattttctaatcacttttaaatcgtctcttttgcgtcccttaatcttccctctgagccgagttactgcgggctaaacacgtcccttggtagaattgcggccagaatttaaaaatacagtgtactatggcttcgcatcacccgcttcaacgggtgctcagtgtaaatatcgactggccattccaattctgcctttccagccttatggaaagagattatggaacttttggactccatctcatacgtctacgccgcgactgcatcgatattatatcagtcgatagaattttcgaatcgcttttaaatcgcctcttttgcgtcccttaatcttcactctgagccgagttactgcgggctaaacacgattttgggaaaattgctgccagaatttagaaatacagattgctatggattcgcagtcaccctcttcaacgggtgttcagtgtaaatatagactggccattcaaattctgcctttccagccttatggaaagatattatggaacttttggttccatctcagttgtcaacgccgcgactgcatcgttattatatcagtcgatagaattttcgaatcgcttttaaatcgtctcttttgcgtcccttaatcttcactctgagccgagttactgcggtctaaacacgtttttggtagaattgcggccagaatttaaaaatacagtttgctatggcttcgcatcacccgcttcaacgggagcttagtgtaaatatcgactggccattcaaattctgcctttccagccttatggaaagatattatggaacttttggttccatctcagttgtcaacgccgcgactgcatcgttattatatcagtcgatagaatttt

SEQ ID NO: 38279 - DNA, 1323 bp, Heterodera glycines
  unsure (1)..(1323): unsure at all n locations
gaaagcgatggctacggtaaccaaaatgagcaatgttcgtcagtgatggcgcgcttttattgcttcaacaatggcaaatgtgtgcatcggggagagacaccgatatgcgagtaaagggaatttattcatttaaaattgacaaaaatattnattatttttatatttctaaattttgcgctattttttgaaggtgtacaaatgaattcgtcggtaatcgctgccaatatacgtacgattcgaccattttcttctaaaaaaaaccctcaacaaaaatggccgtccaattcaatatgttaattgataggcctttctttccaaatgtttattattattgttgtacaaaagtgagcgtaaatgttgaaatatataaagaaatttaaataatttacgccaattaatttacatttgaataattgtataataaatgttatttaatttattgaaattactttcctgaataaaattattattgagtgaaatatttaatgttttatcaaagtttaaagccaactgtaagtttaaaatttgacacatcattagtaatttagttaatctctttattcgagggaatatgctcaactctgaagtgtaccaaatatatttcataattaaagtctcgatttctttgtcaaccaaataaaacgaagatattaattattcaattagagactcccacatggaatagagcccccccccctccccttcgacccctcacccaaattttaattcagtaaatacagtatgcatatgcgttattgaaattgtaatctcaaaaattttttttaatataaaatttataacacaatgccaaaagtaaaatattttggggtattaaaaagtggtaaaatcaaaatgaaggtgacattgaaatttccttgctttacgtgcataacagcgcttaatcagagttgttctttcagccttagtgctttccctgttaattttgtgttcagactaccgcctgtggcgctcgtcagactttttcctccgccctccgtctcaccccacttcttgctccgtcttcgcatgtcccttttgcgaaattttgcttttaaattgttatttcccgtttattatttttcggcacggaagtgtccattttcactgggactcagttgtcccaatgctcagatggcgtcggttcgacttgattctttgatttttagacttagctcgtcaagagctgttgaatgataccaaatttgtccgaatttgaccgttttaaaaggtcaggcaggagccctccttttcactcaaattttcgagttttaaaccggtaaaagaacgcggtttaaatactttttcgcgccanaattttaagct

SEQ ID NO: 38280 - DNA, 775 bp, Heterodera glycines
  unsure (1)..(775): unsure at all n locations
gtcaaggtgctttctgaaatttccagtttaggttgactttgtgcgtgttttntaaattcacaaattaggttggtcccagcagtgtttggtccaacgctcgtcgtgacttttcttttccttctgatcccgtccatgcgttcgattggacttttactagcgattatcatggcactgtcggcgaaggcgttcgagtggaaaaagccagtgaaaacgaacgaattgactacgaaagactgaaacggagagacccaattcatttttatgaacaaataaccctttacgaagatgaacttgcagacaacggctgtgcccaggtaatcaagcggaggaaatgactacctgagaaggagaatgaggttcattctgtagagctcgaccttttgaaaaaagccgggacccgtatttcctgaatggcaatgtgcctgtactttctgtataaaagtacagaaaatacaggttgccaaaatttgactctatccaagaaaagaacaagcctggaactagctctgtcaatctgtatactttgctaatttactcttcacagatgacagttcgaatacgcataatgcacgacactttcttctttttgtcacgtttttaccttcggattgataatgttatggtccgggtatgtcttcgttaacgctatgaccagccagcaaacctttcgttttctttttgaggtgtgtgacactcgcatttacgggacagccgaaaacaaaaaatttgtattgagagaagcgtctggacgagaagcgtcattacgcgactctga

SEQ ID NO: 38281 - DNA, 922 bp, Heterodera glycines
tttttccgaatttctttctgggcgagtttgatgtcgaaaatttggaaaaaacgcctatctctttttctgatcatcagtctgaagaattccaaccacattttcggaatgatagcgccgaccttaattttttccgaatttctttttgggcgagtttgatgtcgaaaattttggaaaaacgcctatctctttttctgatcatcagtctgaagaattccaaccacattttccgaatgatagcgccgaccctaattttttccgaatttctttctgggcgagtttgatgtcgaaaattttggaaaaacgcctatctctttttctgatcatcagtctgaagaattccaaccacattttcggaatgatagcgccgaccctaattttttccgaatttctttctgggcgagtttgatgtcgaaaattttggaaaaacgcctatctctttttctgatcatcagtctgaagaattccaaccacattttcggaatgatagcgccgaccctaattttttccgaatttctttctgggcgagtttgatgtcgaaaattttggaaaaacgcctatctctttttctgatcatcagtctgaagaattccaaccacattttcggaatgatagcgccgaccctaattttttccgaatttttttctgggcgagtttgatgtcgaaaattttggaaaaacgcctatctctttttctgatcatcagtctgaagaattccaaccacattttcggaatgatagcgccgaccctagttttttccgaatttctttctgggcgagtttgatgtcgaaaattttggaaaaacgcctatctctttttctgatcatcagtctgaagaattccaaccacattttccgaatgatagcgccgaccctaattttttccgaatttctttctgggcgagtttgatgttgaaaattttgga

SEQ ID NO: 38282 - DNA, 1403 bp, Heterodera glycines
  unsure (1)..(1403): unsure at all n locations
tgtgtgtgtgtgttcgcccatttgacnccgacccgccgatccgagcccggctgacccctgacgggacncagaggcactaccttgtgcaaattttgtggaggctccncacaatatatttattttattatttttattacttaataagtgaaatgaacgaattatttttttatatacttcttatattttttttaatattatattttttaaataaacgttattaacctttcctcttgatttatttttggcttaacatttgtaattaattaaatttctaaaaataacatttattaaatgacgatttgagtttaaatttaatatatatcgtttaatcattttgttattttatttgatatatttaataatcgtcgaaagtaaactttatctattattttaaatgccaaactataatgcaattatttttatttatcattcaaattcgtttaacgtttaaaattcaaaatattgatattctgtttatattattacttaagttccatattcatttaaatttcttgctctaattgcattcttttgccttattagcgaggaaatatctcgcatttgaaattatttttatgataaaaattatctgttgttttaaacttactttttcttttaatttctttcatatttttttaattcgtctttttttttgcttttctttttctcatgttttgtttcctcatttattgttcccgtgggaggtttttttttacacttattttgtcaatttctgttaaacatttattttttctttaatcgtctaatttttatcatttttccgctgaatattaatttatttattaattatttttacattaaattcaataatttctctatttttttaaattaatttaaggtataatttgtaattaaaatcaagtcaggatgatagtgatttctgtcgtttgaatgtgtggtacccattaatattaacttaatactattgtataaattaatctagattattgaatttattctaattttaaaatgaaaatttttaacattaataatttttttgattattttgccatatactgtaaaaatcgttatttgcttattttaatataacaattaagaataattattaatgaaattattctaaaatttaaaatctgtgggctttctttttaatcatccatatatatttgaataattataatattgttttgaattttattgcatagattttagcgtaaatctatttataaattaaaatcgttcatgttgttaattgcagatgccaacatttattttttggcatttctaataaaaattgttagttattcattttacatgaaaaaataattattaatatatttacttatttttaatttaattgattttattttaaagatggcacttttaaataattttgttattttttatttcatttatttaat

SEQ ID NO: 38283 - DNA, 1077 bp, Heterodera glycines
atcgatttaacaattagacaagttataaatgttttttctttttttgataatttttctttaaaatggtttttatttttgattttttgtcactattttcataactttttcattttagtatcattattagttaaccatttatgggtagcactttagcatttgtttgccccctaacttttataaaatatgtatcataccaaaagagtttcttgtcaagacctatcaacttgcaaatttcttttgggtataaaaaagcgattttttcggattttttgcggcctaattgagcttttcaagctcattcaaatgatatcaattttttaaagtttgttggcaagtaattttaacgtttggccccgaaataaccccggcatatcatgggaatgtaattttttttattatgttagtaattttattcaggactcccatcggcaaagttgggtttcaatgtatgggcgagccgattctcaagtacacaatggggaaaatatcgaaatccaagtacatttcatatcaatatggattaaaaaaggatgcgttggttttattttatacgcaaattccaattttgaattaggaataagatcggatttttcaatacttacaacttattttaagaacgctggcgagcaaataaaatagagaaatttcgtactattgtagaataaaaaaaaaacaaaaattttaaatttctttaaatttacaacccaaaatgggaaaattattcaaacaattttttaatttaaaattctaaaaatattttaagataatgcgagtcatttctcaaaatcacaaaatgatcagaaggaaattctggaaaacagtagtgagttggagaagcagaaaaaggtaaacgaagggggaagatttatattaatttttgtggaattttaaatatatttatttatttatgcctcctataaatttaaaataaattttttaaattaaattaagatgaatattttcaggtgcttttaaacttccgacaaaattattgggatgctgaagcatgtcacgaggacctcgaaatttctggtgacaattctttgactgtttaccgaaagagaactaatttgggta

SEQ ID NO: 38284 - DNA, 954 bp, Heterodera glycines
catttttacagtggacggaaagacaacgactggattgtaaaacccatttttttattggtttcttatcacttttcacgtgtcacgtgcaccgatcacccagcagcccagccaggaaaacaacaaatattcattcaaccaccaccaccccagcaagcagcacagcaatgagaaaagaatttggggatcaagaaaaaaaaaccagtcgattcggtggtagcccataatgaaagcaaaattactgatccaattctgctctgttttgctttgctgctgctgtgtgtgtgtgtgtgtgtgtttatgtgtgaaagtgatatctcttctgcccactgattgtgatcggtcggtcggttggtgccggggggggggggagaatgatcggtgataggaatcggttttgtgaatcgccgccggggggggggggggaatatttcgccaataaatttcctctctcttctgtttgcggttggaaagaaaaatcgatttgagttgagcgaggggggactaaagagacaatcccaacacagcacgacagagatggtcatcaacaggcctctacaaaaggtgctatgacgttagtcaaaaaccatcataattggcgttagtcaaaaaaccatcaaatgaaaatattttttgatataactttgctcaaaagcatctaaatttttaattattgatatcattaaatagcactaagtgttttctattagcctacaaaatttcaaaaagtttcgttaagtttcaagaaagttatgactgaaaatgttcaaaaaaacatggttttttgagcttctcaggtcataactttttttagacttaaagaatttaaaaaaatgtttgcaagatagtagaaaacacttaagggtatcgaaaaatatctagattataaaattttgatccattttatgcgaaattatgaataattttctgtcaaaattttcccttttgatggttttt

SEQ ID NO: 38285 - DNA, 1084 bp, Heterodera glycines
ttgagagaaaaattggaaaattattaggaacaaatcgaaaattaatacaaaaatggaaaaatgaattaaatttgaataaaaacaaaataaaaaacggttttatgaagagaaaaagcgcaaattcattgaacgatttgatgaatttaaagaattatatggacaaggcaaacagaaagaatttgtgaaaaaattgggcatttctaaagataaatttcgaaaatggaaaaataattgctgtcaaaatattataaaagtaagagatttattattttttagaccaggctacccaaaaccattttgagcaaacctccaagtgagcttttgagagccggtaagagaaacattatcattaattgtgtgggagaaagcatcccaaaaagagggccaattagactcatttccatcaaagtccggtaattggagtgatggcaaattaatttggggtcgaatttgggcgggaggggccggagattggcagggtggggcccttgatatcatggcccggatcccatctatttttatttccaactttgtcagcacttcatccccgtcagcgaggatttcgcccggagtaagccctcccaccgaaaaagagtcgaataaagcattttcctgctcccttacttctttacttgtggagggaaggattatagtccaaccctttagaagggcttgtgccttgcttaatttccgcgagagtttctcggcagcgaggctgataagctccagggaagtgggatccttaggcaacaaatcggaatcagccccctgtaatgagtcagcggaaatagcggttaaaagagcgcggagctgcttgtcggataatggccaacataattcagagaaaagagagaaaaaaacgcaaaaaatttgagtaaaaaaggagtaacttgacggtcttatcccttcacagtactaagtccctttagttttgccggtttagctcgaaaaaggcctggtcagtagagcaccagactcttaatcaactgtggtaacacatgaaaaagagggaacaatgggacaaggggcctgagtcaggggatgctggcataggcaacggaacgaacagggcaagcggcgtcga

SEQ ID NO: 38286 - DNA, 1640 bp, Heterodera glycines
ttacccttttttgcttttggcactttctccagatcaaatccatattcttgtcgtgaatttggtgctgctgctcttttattgttttgttgatttttcattggtaaatgtaatatttcttgaatttcatgctgattgttttgatttgatcttacagactgatcagttggattttccgtcaacggatgattattctggtcagtaagctgctgagaattggttactgaagctatcacttctggcaaattattcgctggatttactcgcataagcatattggaatcatcgtttatactccgttgcttggtctgatcagaattgcttggctgatttctcacagccggtaaaatcatttgattcgaattatttggttgatttgacaagtcaagtaaattgctttttgaatattctccaagattttgcctgcttaagttttgctgatatgcctttccggtgaaaaagtccaaaagcaatgggcctcctgtccttaatgcatctcttctgtccaaaccatcataatcatcatcatcgctgtcactatcaatgttaattgggatgtttatggaagatgatgatgcttcatttgcattttttgttgctaaaatttcaaattaaaataaaatataaattaaaaaaaacattttcacctttccattcgggatctgtggtattttctataacaaaattgcggaattgactaggagaaatttggtgaacagtcggctcttgcagataaataatccgtggccctttttgattgtctgtgccaacgctgaattgaagaacatttataaataagagcaaagtgattaatttcataataagcttattaaggagattaagaaatattttaattgaaataataaaaattgacataaaatatcacacataacacaaaaatttatgtgtttggactttgtaagtattggctcatattgttgcatttatgtcgccaaaatagctgcacatgcttttttgtaatttgcccggccttttgttggctttttttaatctggaaatgatacccaaaattgggttcaaacagcagaattaatgtccaaacaaactagaagactgtgttttcttaattttaatgctgtttaggctatcagggcttgaaaaaaacttaagtttgagtccgatttttgacataggcataaatgtccaaagcgcaaatctcatgtaacattatttgcctcgggagctcaatggtaaatctgcccacagattgggtggtggagtgggctcgattcccactcgatgctgaacactttgcctatttcttttattaaatttgtaacgttaataaatatgtagaaatttataagtgaatactacaacataaaataatatccattttattaatcggataagcataattattaagcataattatatttgccagcgaaaagaatcaataatgtttctttcaggacttaataataaaaaaaaataaatactcataagtttttttaaggatttaaataataatagtgataataataataataataattaataatttacaaataacagggctcccaattgaatttttaaaatcaacatttggaggatgaaaattaccattttgtaaagtttttatcaaaaaaaagcaagaaaaatgttttttgcggtttgctttt

SEQ ID NO: 38287 - DNA, 999 bp, Heterodera glycines
  unsure (1)..(999): unsure at all n locations
cttatctcacgaaaaaggaaggacaaaaatgcgaccggcccccctgggtctcacaaaagaaagtttatttgctttttgccattgttctgatacgttcgtaatgtaatcattacatagacagcgtttattagaaacatacattgacagataaagcacacaaacagtcaaaaaaaggttgaaatgaaatgtttatgagtggacggccgaatgtcctcggtcggagaagggcgaacgtcggcagacatttcagtccccgtccacccattggcctccttcgttcggctcgttcacaactcgtctttgttcgtcctttttcccgagacgaccttcttcaaatcgtcaactgaaagacatgactatgtttaacaatgcccgtgattaattcgaataatcaaaattcgcccacccaattcgcctctgctcttcagttccgcggtgctctccaccgagcgcaagtcgccgacgatctgacgagcttttccaaaatacacttcgttcagtgtcgccctcattttgctctcttggtcctgtttaaacacccttttgaggagagtcgctgcaattgtggccaacttcgatcattttgccgatgtttgccaagtgcgggttctgctcattcactgcacagtcttgctcgctctgccgggtcagagaaccgccgaggtcaatggttccggtggttgtcgggttttgggtctgcagccaaagcattaccgtgctggtcaatttgtacttggcgaatttcgccgccttaatttcgtaaaaatatgatgaattaccaacttttcaaaatggttaaattcctacggttttatctgttttagggagggaaagggggacggagagagagaaacttatagttagtgacacatatccaatgctttcgtcccatccctcgtaccttcgtcttctcattgacttcgagcacgtggatagagtcccaacaanccttgacgccctgncgccccgacagcgaattgtccgtctcctttttgagca

SEQ ID NO: 38288 - DNA, 1050 bp, Heterodera glycines
gaaaattttggatgaaaaaaggggcttcactgcagtttaggcgtccaatttttagtttcttgggccataactttatgttttcatacttggtcaatgcctacattcttgggagcaaatgaaggctttcaggaattaataaatttaagaaaaaaagcaaatattgatatttagacaaaattcaatgagaaaacataaatgcatccttttttgaatatattcaagaaaaagtttttttatctctcttgctttatgttcagattagagacaccaaaactgttcttggattacattacctaattggcattttgccagtttcaatgagtggtgttttcattctccagattcgcactccaaattggagggtaggcaatttaaaaactcgaaaacatcctaaattccgagatttatgtattaaattcaaaatttcgccttataaaatgcaaaaataccacgcaatgataactcatacaacaaaaaaaaaggtgaattttaaggcggtagtttaaaagtcaagcaagcttctaaacactttgaattgctgggccaaaacaatgtttaactaactcaaaaattaaaaataaaataaatgcattttaatttatttagattgtaccacccaacaaaaaatggcgcatttccaatgaatttgtgtcgctgttccattccattttgtccggcatttgggcacttgccattctcacacgctttgatttccaccaaattgacgacctggtcaacaaggattcgctcgacgcgcgttatttggttggtgattttggcaaaatgacaacaaaaaaacaaaattctccctttcacacccaaagaatgaatgttcagttttcaattgcgccttttcatagtgctgatatttggtgttcgatttaaaaaaattccagggcctcatgaattgattattttctcccctatgaaaaaataaaaattttaagggtctgtgaaaaatcgattattttttgtttcccacttatgcacgtccgggttcaagcccaataaactagagatatttttttaaatatttaatccccaacaact

SEQ ID NO: 38289 - DNA, 1428 bp, Heterodera glycines
ctgtatatgtatctaaaattccttctcatttttttattgtctttttcttccggttccgattcatctcaattcttcctttcactatcattcgaccataattgaaaaagaattttatttcactttttacaacaaatgaataaaagacacaattcaaacgccatgcgaaaaggagaatcatcaaattggaaaaatcgtggttcattggtagaatttatccttttcaacacaatggggaatcggaaatgtcgtcgattgcactccaaatcggatgagtgtctgtaaatgacaatatatgaaaaaggcaaaaactatgtacccataaaattttgtattttcgttttggaagtcgaattcgaggaaatttttaaaaattttcatttcaagggggattcttggaattttctgagtcccaaaattctgtattttaaattttttgcttttaaatcgctgtttttatggcaatgttttttcaaaaaacttttttgaaacattgggagagggcgggtccccgcggtgccgataggcgccgccggaaaaaattttgagtgagatttgctaacagaatttgtcaaaaaatgtttacatttacagcaataatcaattcatttaaaatttaaaacacacctcttttgccgtcggctgcagccaatagtctttggatggttggcgactcagcagtgcatagaaaatggctgcagcgagggccagagccagcttgaacagcgacgtcgaatccggaatcgcctccgatcggtgttcttcgtttggctttgccgttgtcgtcgtcgtcggtgccggtgtggttgatgttgaggatgccgtcgatgttgtggacgtgcatcctttacaccgcactgtgccgaacggtgtcgggtccagcacatcaagcgggctcttgctggtttctttttcagcagaagcagtgaccagcagcgcgatggcgagcgcaaccccgatgatcagcagcagcacaacgatgatcagcacaagcgtgctctttttagacataaatggcttcattctggaaatcgaaaacagttaggaaagttgtgaggaggcgaagataggcgccgccagggaaaatttgagttttggcaaatactctgtcttaaaatgaaaattttttatggaaacggataggtggatttgtaatttttgttagcatgcataagaagggggtctgtgtgaaaaatttgttatggaaaattagaataagaaaaaattcttgaaaaacttaacttaaatattcttttagagtttaaattttatgttctttatattgacagttaattattttttgctcttcatacattattcaatatgtattttcatcaatatagtattttggcgtctaattatttattttcaattttcggaaataacacaaaatcgcacccaaaataatgccagaaacggctacctcagttg

SEQ ID NO: 38290 - DNA, 1457 bp, Heterodera glycines
  unsure (1)..(1457): unsure at all n locations
taaaaacattcgatagagactctcgagctgctcccggctttttgtgtatttgttccgggaccgtgccattctttagactcacagccttcaccaaattcaccaaattgtcaggtcgagagtgcccattcatcggtggcaatggcattccgccaaaactctgctgctggcggcggcacttcgtcagccccgacagcacaagcggacggcacaaaacacgcggtgacagaaaacagtgccggaagcaatgggaaggtgccgccgctgccgccacaaacaaaattttgtggcgtaatggaggtgaatcaatgggcagatttttttttgcatgattggaaaaataattttgaattttttattatttattaatttcacggcactttttgtagcacttattggcacgtttaaaaaatataaggggatactttgattttttgatttttgaattttttttcttgacataacaaagcagcacctaaagaatatattttcatgatcaagaaccctgaaaatatgtatttaaccgtgttgagccgaacctaaaaaagtaaaaatgacaataaatatttaaattgaaatatttattatttaaattactgtcagcaatatttgtggaataaataaatcttagctttgctataagtcaatcaaattaaacatcttttagcaaaaatttctgagtttttcctaaggtttgtacaaatacagaccccctgaaatccaacatggaagcatggaacccaggtccaggcccatgctttttccaaaatacctaaaaagcgtaaaatctgttaattgcctgatcatttgttgccaaatttactggtctaatcagcataatttttgccaaataaaagtttccgtttttacagcattcaaaatattttatggtgttgctcaatcggatcatcgacggggacggaaacaaccatcaacaggaagtgagatgccattttgaaaatttggattttttaaaatttttaccaatatttattcccccgatttggcacctggccaaatttaaaccatttctttatgaaacgaccctttgagaaacgaaactaacctgacgaacagatttcatgtttagggatttttcaaattcaagcctgacaaattcattgttctgactagggcacaagaaacccatggacaatttttgtggtttcctgcgtttcaagaacgagttctcgaattacatgaaccagagccgaaatttcggggcttgctggcgattaacctaaaatcatttaaaaatatttaaaaattcttgccaaatccatgcaaaaattcgcaaacctgaaattctgaatggaattcccctctaatacttctanaatttagaccattttttcggcaaaattcgatacattttcgtagtcctattcaataccgaaaatctcaccataccataggatctggaacgagaattgaagctgatncgcgccaggcacgtcatt

SEQ ID NO: 38291 - DNA, 1426 bp, Heterodera glycines
  unsure (1)..(1426): unsure at all n locations
gggtcacagcaaactggggctaaaaagtgattttgtaaattcttcctagtaaaaaaatgcccaaaatttagctaaaataaaatttgcaatttttatttagggagatagctaattccataaatgaattatgtaagtatttttagagaaattaaatttttttcaaaaatatataaaaaattgcctgaaattatacacataaaatatattccgatttcctagaattgctctcttaattagtcttaaaaaacaaaaataatttgcttaaatggctattcaagaaatcagtccactgaaaaacgaccaaaaaaaattttgtcaaatattttttaaattttcaataaaaatttacggtctcttccattggctacaccacacaatactcaaaacgatcaaaaaactgaatgtcgtcaaaggtttgaacattgcgcacggtgggtgtggttggttactttaactgtgaattttaattattaaaatgcagagaattttttattattaatttaaaaaataatttattttttataaaaaattttccaactgaagagaatttgtgaaaatagaatatttgtttgcttaaaactcatctctctctaaagcattgctttaatggaatttatggaaattatttttgcttttctcaaatgcataatttgtttttattattccgatgagacaaatggaattgatttctcgctttcataaaatagattaattattagggatttcaaaaatatgtataaaaagtggtcaaaatatgtgtatataaatatgtaaaaaaaaaataaaaacaaaaatatgtaccaaatatataaattaaatttttaaagtggttttttttgaaaaaagttcttcgtaaagagcgaaataggcacaaaatgccataaaaatgacctaaaacagaaatgtttttcctactatttagaacattggagaatcgaggaaaatatgtattacataaaatttgcgcctctactaattataaatttttcgtcatttaatttaattttcttttgctccacaacaatgaaaatttaaaatacaatatattaatttttttcttcaaactgtctaattcaatacatcactttggatttttttttgcctaatgttagccatttttttgtgatgacaactgattgatgaatcacccaccaacgatactgctcagaataattaatttcaattacttttgattaataaaagatcacattaaatttcccaaaaaataaaatatngaaatttttgtaatataaattaattaataaaaataatattttaaaaggtcattgaatgcaaatggntaanngtgtgacacatttgtcaccttcccccgctccccaaatatcanatgcattttcacaaaactttntgattctattaatttattaaaaataaatgcttttactgtacaaaaatattttttaga

SEQ ID NO: 38292 - DNA, 1182 bp, Heterodera glycines
  unsure (1)..(1182): unsure at all n locations
atcgggatacatcgtgcagagcagctcgaacccatgtgttgcccanccanccgctttcatgcgtgtcanaatgccatcagttttcatttgcgtaaacagacgaccatatggaatgccgacttgctgttccgctgacaaccattcatagtgaaattggtgtaccaaggtccagtatggcgcaaattctggcaatttgccatcactcatgacacaatgctgcaccgacggttcggtcggtagaacaaagccgccgcctgtgtcgtcgccagatgaagcatttttctcgtcttcatcagcgatcagtggcatcagaaacatcagccaacaaaggccctccatccgatcaaagttcgggtacacctaataagggttcagtgatcactatattttaaaacagggttctacaaaaaatgatcatgagttatggcacaaggaagcggagtgattgagaaagtgggatgaaggattattgattggataaaggatattgctttcatactcagttgtttaacagggttcaatagtttgaaaaggcaatatgatcgagtcccatcgcacgagttagcttttaggatctacaaatttagttaatataaagggtaaattttaaactcgacatttttgaaaatcaaggaaaattcaggcttgtaaaggcctggatttgggcttcctggacaaaatccaggaaattccaggtcccagaaaacgacagattgacaaattggccttgatctcgacccaggaatttcattttcaaaatgtacgtgacaattacgcatttccctgtcaccgtttggaaggttcgcattttaaaatagtttttttcaaaaaaattttctgcggcgcatatcagcacttgagcaaaacctgtggaggaaattttgcttaaaatgtagaataatttttaaaatttatgcgcccatttttattgtgcctattcacaccttattgcgcactgtgctgagcgcagcgcgtgtgacattcacttgcagttggcccttgttgagtttgacttgcaaccacgatttgaaatatctgtaaagcattgttgtggccaaacgcacttcggccacttttgcccgttcactcgaagttcgttgaaacaaaatgtctgtgtacagctcaatgcgatgagacaggcaaagggcatctgtacatgattaatgatgatggtaatgataa

SEQ ID NO: 38293 - DNA, 1491 bp, Heterodera glycines
  unsure (1)..(1491): unsure at all n locations
tcctcaaaaaanaataagctacttaacctttttgccncctgaatttctttttttaaacatttttctagggttctntaaagtgctgaacacgaatcaggcatttattttatgctacattgcagatcacgtgagttacgtgcaaaatttacgtgtaaaattaaaaagtgcaacaaaaaaaaattaaattggagggcatattgtaagctcttggagaaccgcgaggatgggaaaaaactttggtggcaaaaaggataattaacaaaaaatgaatcctaaaatacacacaaaaaaattaattcaattcctaaactgacagaaaaaattgtacacaaaaaatttatttcctaaaatgtacaaaaataatatttacaatgcaagagggtatccggcgcatgaactgtctgagctgcaaacgccatctaaaaatttaataaaaaaggtaattaaaaataaaaatttgatttttttttgcctggggcaatgccaacaacaatgggcggggtgtcgcctccggggtcaatttggcttggtggcagcaacggcacgcggcccgacaattgtgggggttggtcatgttggacacctttttttattgttataaattgtaaaaatctaatttgcaatgtttataataaatgaaatttttgaaatatattttttaattttagaattaaattaaactaatacaagtaaatataaataaatatgtgtgttacttataaaaatgtgataccaataaataagtttttaagattgttttcaataatttatttcatataaaataatttttttaaatatttattattcattaaaaatactttaatttatttaattattaaatttttattatttgtcatcaatcaaataattgttaaaatattttgattttttcctcttgaaaaaaattcttgaaataaaaaataatttttttaatttaaccttaattttttcaaatattttttgtttaaaattaataaaaaaaatatatatattttttattttaatttttcaccaataatttcgccctcgacgcacgtgccatgctggggatgcatgccggccggacaatggcactttccttcaccagaacatgtcgcttccgggtaaaaaacggcacattgtcgccaatcaatgcaaccatctgaataaaattgaaaaagaaattatttttttaatatttaaccagggctctaattgtagtaaatttaattttgtttaatttatattaatcaaatttgaaaaaaaacaagaaatttttcattgtaactgtttactattggtgcacctccaagacctacctctacctcaccaaaaatttcccaaaatattacgcggaaattttccaaaatccaccaaaattacctattttggtgaaaatctgttaaaaatgagggaaaatcaaaaaaacaattttccgatggtgccatccctgattanatcctgnngaaagattgatagtaattgtgctcacattttttgcatttaaaaaaa

SEQ ID NO: 38294 - DNA, 1124 bp, Heterodera glycines
acccgaactcgaataaaaatcgaaattttgaatttttcacttttgttttttttgttcaaatttagattaggaaatcggaattggtcaaaataattgaaagattcgtgatcggggacccccaaaaccccatagaataaatttttatgactatcacaaaaaattttgcaaaacaaaagggtccccccttttgaaaaaattttcaaaagtggtaacttttacagtagcgccaaagtgtttttatgacttttgaacataaaaaaatttcgaaaaaaaggggggggggacaaactgaactattaccgtgcatttttattacctaaattctttttaggttctcatctatgtttttgatgtggaaagcagagaggtgcaaaaggactatcggaattatcagtcttgcctggaggcgcttatgcaaaattcgccaatggctaaagtgttttgtttggtccacaaaatggatctcatccaagaggaaatgagggataaagtctgaaaagctgcttttcgaagatatatttttgttttagatattttttgacaaggagagggacatcaaccaactttcggaggccaccgctctccgtcaacacgccaatccgataattcaatgctttcgctcatcgatttgggacgaaactctttacaatgcgtggtcagcaattgtttatcaactggttccaaatgtgagctcaatggagcacaaattaaagaaattcgccgacataatggacgcggatgaggtggttgaaaaagtcgccatgacgcgccctttcccttcagattttactctttgaaaaggccacttttcttgtgatcgctcaagcgcagagggcaaagcacgaggacatccatcgctttgaaaaagtgtccaatattatcaaacagttcaaactttcctgcaggtatttaaaatttgttttcttttaccatacaaaaatttttaaagtcgcatgggttcacagtttgaaagcatcgaaattcgcaacagcacttttgctgcattcattgaaagtgattttagtaaataattaatcataagtaatatttattgctattcatggttaggcttcacttacaacacttatgttatgttggttctgtcagatggaaacatttcgtcg

SEQ ID NO: 38295 - DNA, 672 bp, Heterodera glycines
ctgccctgtctattagcagtattttgaccatattaatttaggaaatttgaccctaatttgttaatttaaaataatatattttatatgtattgtttttatgtattcttttgtatttctcatgttttttaaatacataaatgtttttctcatgttttaaaacacaatttttttgtttattggcggtggaccttaggtaatgtgatttgcaactttttctataaaagtgttcaattgatcagtttaaaattaattatcaaatcaaacaatgtttaaaacaatttgtgtcattagcgttgcgattagtgccattaataaatttgcggtttgttgttgtcgctgtttcattgcgccgttccaataatagccgtaccgtccgtttggcccgtatcgttgagcattattgtaagggtcgtagcccccgttggaatacggtgaatgcctggaccgtatgggttgtgggttggacatggcatcgcaattatcgtagtcgcacgtataacagcttaattgtttaattatgccattggcatcctgtcaaattaatagtgaattgtagagaccggaaatttcaaatttgcggatcccgctgcgggattgaactcaaaattttttgcgggacgggatcccgcgggattaatcccgcaaatcccgcatttaaaatttgcgggaaaa

SEQ ID NO: 38296 - DNA, 796 bp, Heterodera glycines
aaaaaaatatttatgaaacaaaaaaatcgattttttcaagtgtccgtttggggtactcaaacatttatggggagcaaaaaatccaacgcagaattaaagtacaggctatagggaagctattcccgaaggattcggtctccccataaatctgggcgcatcggttcggggggactgccccgaaaacaaaaaaatcgattttttcaagtgtccgtttggggtactcaaacaattatggggagcaaaaatccaacgcagaattaaagtacaggctatagggaagctattccggaaggattcggtctccccataaatctgggcgcatcggttcggggggactgccccgaaaacaaaaaaatcgattttttcaagtgtccgtttggggtactcaaacaattatggggagcaaaaatccaacgcagaattaaagtacaggctatagggaagctattccggaaggattcggtctccccataaatctgggcgcatcggctcggggggactgccccgaaaacaaaaaaatcgattttttcaagtgtccgtttggggtactcaaacaattatggggagcaaaaatccaacgcagaattaaagtacaggctatagggaagctattccggaaggattcggtctccccataaatctgggcgcatcggctcggggggactgccccgaaaacaaaaaaatcgattttttcaagtgtccgtttggggtactcaaacaattatggggagcaaaaatccaacgcagaattaaagtacaggctatagggaagctattcccgaaggattcggtctcc

SEQ ID NO: 38297 - DNA, 1069 bp, Heterodera glycines
  unsure (1)..(1069): unsure at all n locations
cgttgatggcgatggatttataacgcgtaaaaataagtaatgaataaattaattattttaaaaattaaattttagatccgagctgaggatggcattccaacagatgggccatgcactcaatgatgccgatatcaaagccatttataaacgtgttgacaaaaatcaggacggcaaaatcaacttcaagggcatgttcttgaagaaaaaatcaaatcaaattatttcagaacttaagtatcttgcttaatgagagagttttttaatttgatctaattttattaggtcttttatattaatttaattaattaatttcaatttgatttattattttgttcctaggatttattttgagtttttgcgcgttgtttggtagttttggctttatgtcaacacctctaaaatatttttttatattttttgggtaattttacgtactgaacaggaagctctaacaaaaattccgtaatattaaaaatttcattaattgcatttcgcattttgccgattcaatcttgggaccataaccacggaagaaagtttcttcacctagatcacttaaaatgcatgtgttagcttaaagaaagttcagaatcatgttcagtaattaaaattagcctagaaaattaaaaaatatttcagtggtaatggcaaaagccaaagacacccattcaataattaatttttaatttgccaattaatttatttttaaatttttggcatttttttaaaattaattttctataatcaaaacaacacatttcattttaagaattttgtgagatgatgacccgaggaagcactagcaacagtagcaacagcaattcatgatgataaatgaatgacggaagaaggaatacaccataaattgtccaattaacttaagccaattaatggttgcttaatttttccggaaaacacttanattggcctaaatgataaagattaattaatcggaattaaaatcaaacaaaaactcaaagaataaacaaaacacagcccgattatatactanaaaatataaaatttgaaaagataaaaaaaacattttttttaaaaaattaaaaaaaaa

SEQ ID NO: 38298 - DNA, 1092 bp, Heterodera glycines
  unsure (1)..(1092): unsure at all n locations
aaaaatatanttgaaaattaacaattaaaagggtgctgcggacctctgatggtaattgggaactttaaattaggaattattatttttaaaaaataaaaagtaatttacattaaaacatgaaaatatgtggaaaatataggtcatattttgactttcaataaatttttaaaagaccaagccataataaaaatattgaatgaatctaatatttttttaccttttaaaggcttataaaaatttatggtttattaatattcaatgggaaaatgaatttttaatggcaaaaagccaattctttttttataacctttatcaaaaattttttttttttcaaataaaaaaacaaaaagatgtgacgtaatagcataaatagtttttaattgtgctctgaatacaaattttgcatttttctttatacaaacaaactgatttatgacgcaagcttcattgtcatttttaaatgccttctgaaaactaatgaaaaagtgcataagttctttcctaataatgatcatgcctaattaagaaaagggctaagaaaaccaatgaaacatcaaaatttaaaatagtacattcgtgaatgtagttaattagtgtgtacttctttcaaacatatcaaagagataaatccttcttataatgaaatgcgattgaaaaaattatgaggaaaagcttcgattttttttttctcacatttatacaaccagtaacattatttttaatgaatcacttatttttcaggaattaaattaataattatttatgtcatcaaatgtaactgatcaacaggtaacaataataataaaagatgtgccaaaattaataatcttttcattcactattcatttattcaaggatgacgctggttttgtgtcggtcgaagttgcaattagtgggatattacgctgatttgctttttcgaattgcgctaaatgcgtcactggtctacgtgaccgtcaaatccaagtacggtttttattaaggtttcaaatattattatttttaaaaattctcctttaaatatttgcacaattttttcaactaataaaattatattttttattaatttttcaaaaaaaaatcattttttaa

SEQ ID NO: 38299 - DNA, 848 bp, Heterodera glycines
tttttattgaattcgggaccggtttgggttgagttagccttgaaaaattggaaaatttgaaaatcatttttcccccctccctttctcccaggggtattattttgtaaagtctttttttcaaaataaacttttcaaaccccattttttcgcaccgtgaatgttatttttatggaattctgaaccgttttgagtagattagactagaaaaaattgaaaattttgaaatcatgtttcccactcccttctcccaggggtattattttgtaaagtctttttttccccaataaacttttcaaaccccatttttcgcaccgtgaatgttatttttattgaattctgaaccgttttgagtagattagactagaaaaaattgaaaattttgaaatcatgtttcccactcccttctcccaggggtattattttgtaaagtcttttttccccaataaacttgtcaaaccccatttttcgcaccgtgaatgttatttttattgaattctgaaccgttttgagtagattagactagaaaaaattgaaaattttgaaatcatgtttcccactcccttctcccaggggtattattttgtaaagtctttttttccccaataaacttttcaaaccccatttttcgcaccgtgaatgttatttttattgaattctgaaccggtttgagtagattagactagaaaaaattgaaaattttgaaatcatgtttcccactcccttctcccaggggtattattttgtaaagtctttttttcccccaataaacttttcaaaccccatttttcgcaccgtgaatgttatttttatcgaattctgaaccgttttgagtagattagactagaaaa

SEQ ID NO: 38300 - DNA, 887 bp, Heterodera glycines
atttttaattcctttttaaacaggccaaaaagtttaggcttaacttttttttcagaaactgatcagaagcgtaccaaactttgcagggatactccccggtaaaggactaacttacactgaaatgagcgccgagctagctggctcaaaaaaattttcgaaaatctgagtctttcgtttttatttattttttgcaaaattaatttttaaatattttttcagaaagggttctgaaacgcaccaaattttatttacatgttagtttaggcactctgatgctttttctatcaaaaagggagatgaataaaatttttaaaaatttttaattcctttttaaacaggccaaaaagtttaggcttaacttttttttcagaaactgatcagaagcgcaccaaactttgcagggatactgaaaggaagagaaataacctattttaaatattatctagtcagttcatttaaataatttttatccaaaaaatttttttttgggttttcggggcagtccccctgaaccgatgcgcccagatttatggggagaccgaatccttcgggaatagcttccctatagtctgtactttaattctgcgttggatttttgctccccataaatgtttgagtaccccaaacggacacttgaaaaaatcgatttttttgttttcggggcagtccccccgaaccgatgcgcccagatttatggggagaccgaatccttcgggaatagcttccctatagtctgtactttaattctgcgttggatttttgctccccataaatgtttgagtaccccaaacggacacttgaaaaaatcgatttttttgttttcggggcagtccccccgaaccgatgcaaccagatttatggggagaccgaatccttcgggaatagct

SEQ ID NO: 38301 - DNA, 607 bp, Heterodera glycines
agttaggtttggatgagttgggtttgaaagagccgcaaatgggatccgatgtcatgtaagcggcattaaaaacagcgatcaaaatgccggacatcactgaagcggaccagtcgaggcgcaactgatcaaaggacggatcaagagtgggtaattaggggaggcagttagtagtcgtgttacgacttttcgctgcgacatttgcgccgctcagtcaaaaaaaaattatttttttctatatttttttgcgatttttaattaattttgtgaataaaattttttcaacttttcccccttcgccagcgactcctccccctatggtcatccttaacggtgtaaaaatttctcatgttccgaaactgaaaacatagactgagaacgagaagcaaaaatccgagaaatttctcaagtgagaatcaaggctctcgcgctagccactagtaattagggtgttgcttattaattaggaactttagtgccttacagtggccatgaaagtggtcagacgagggctcaaagaaccaccagcagatggagttgaggaacagagaagtgatggccagaaacaggtcggggatggccaacaattggagcacctgaggtggcactt

SEQ ID NO: 38302 - DNA, 1027 bp, Heterodera glycines
  unsure (1)..(1027): unsure at all n locations
aaagtaatacgaatatttcaatttcttacttatcagatagacaaagataggtacacacgacattttntatagaattccggctgaaactaaaattccctcttttggtcttaacttatgaattttggcccattatggacgaattaagtatagaaggcgtcgcagaaataaattcatattttctcaattcgggtttcaaaaaattaagatttaaaagaagctaaattacagacgtttttcaaattttgggtgtctccgaatagaaagaagttggaaatcagtacttttcacgcctataaaattcgggccgaaaaatattggtgtttgtgactagaaaaatagcagatgcatatcaaatgactacagaaaattaaagcctccaagaaaataattgctttgcacaagcaatattttgtagagcccatcaaacacattgtgcttataggaaatgccgaattaaacaataggggcctttttattatgattacaacaaatcagcatggcgtctctctgatatggtatgtttcagttaaggtttagccgatctacaaatttcggcactgtctattttgtaaaagcgaatcaaattcctttggattccaaagtggaattacagaattgcaacggcaaatccaaaatagacaacgacgctttcattataaagctttaagggaggcaaagtaatacgaatatttcaatttcttacttatcagaatagacaaagataggttacacacgaacatttttatagaaattgcggctgaaactaaaatccctcttttggtcttaacttatgaatttttggcccattatggacgaattaagtatagaaggcgtcgcagaaatacattcatattttctcaattcgggtttcagaaaattaagatttaaaagaggctaaattacagacgtttttcaaattttgggtgtctccgaatagaaagaagttggaaatcagtacttttcacgcctataaaattcgggccgaaaaatattggtgtttgtgactagaaaaatagcagatgcatat

SEQ ID NO: 38303 - DNA, 1146 bp, Heterodera glycines
  unsure (1)..(1146): unsure at all n locations
agaaaaaaagaaagaaaatagggaatttttttatgaaattgaaaaacaaaaaaaggacacaaaacgattattaantgtaatggattggggtgtgatttgagaagggaaagagagcccatgagaaattagtttaattaataacatttataaaattatttgatcattaatgattaattgcgattgttattgtaaaaataatccgaaaagatggggctgtgatgatttggagaaatgcttgagattgaaccttgtgctttttaaaaccgacaaactcaatagttgctaataactcgaaaagtagcttaacaaccacaaaaaaaaaacttttttttttcgtacatttcaggccaccggcgggagttgaggaaaaaataggctaaaacctaaaatatcatcccaactcatgactcatgagtggtgtttagcccatttcaaatctcttacttatatcattgtattaactataatttgtcattattcacgaaccagcggcacactgactataaaaacatgggtcaaataactgaaaaagatacggtaacggcgtaatttccgagtgtttaccctgtaaaagatacggtaacggcgtaatttccgagtttttaccctgtaaaagaacggcgtaattttcgaggttttaccgtacccgacgcatttgtcgaacactgtttttaaaattcaattattttcacatattttctaacccttcctcaggaaaagaagtgtttctccattctcaaagttcgaccgatttgcgtcaattcgaccgcggcgcactgtccgaatttgaaattcgaattcgtctcgaaaaacactgctgacaatggcccaacgcagcagcagcaactttccactgctgcttcttcgtcttcctcctcagctgctgcttcttccgctgacgaagtgccaccgattgcgccctccgttggccaaatgtccgtggacattttgtcacgccattttggcctcacatgggaacagctgatggcacagtttgtgctgaagttgcaaattcgagagcgcgtcgacgacacggaagcagtgtttatggacattgaagaagcagggtgggacaccaaattggttgaacaccgaaccatctagtgtgagatgctttacccgnaaattggaggaggaaaagaacgg

SEQ ID NO: 38304 - DNA, 1540 bp, Heterodera glycines
tgcatcaagattcgtcagctgctgaggacaactcttcttaataatattaaaataactttttataaataaaatcaaatttattttcagctattttttaatttgtttctctaaaaataattgattttttctagtctgatcttccatcagctgttttatagcttggctaaactagtccatcggagaattttttatatatattacgttagatgcccataacagtatttagccgtaattgaatttttataaatttaaacccaaagattttatagtaattattccaaaactgggccataattttttatcattcgtgaatgggttatgcttataggttccggaacatttacagtaatttgatggttcataattttccatattacatcatattcagtacaatctctccggttagcaatgagcttttgttcgaagtgttctatgaggaagaggccaagctcgactcacaatcagcaaactgcgtaagggaacggaaattttgcgggacagccattcaaagtttggccgaacttcgccaagcagttcagcaacaacggcggaccattgaacttcaactacagggacgtccatatatggaagaaaaacaacagcaacaacgaaatcggaaaccatcacaacaacaactacagcagcaacaacatcagcaggaaatgtatggtgttctggtgatcaaggtaagaaaaattcttgcaattttgtcaattatagaactcagaaaattcggaattagcacttggaaagtgtctaaacctaaaaacatgacccacaatggcgttaatcaggttaattgtaatggcaatgcctccaaatacaatcgttttggtaaatcagaaatccgctttcaaaaatgaaaataggaatccactaacattctttattaaggccagcaagaaaaatggcacaaagtgatggaaaacataaatttataggcttcgctcagcaactgtcatggcaccaaccgagccttggtaaaacaacattcaacagaatttgtgggcacgttggaaaatggtcatcattatcatcagccaacgcagcccaccaaatcatgttcaccatttgcatatcctggtgacaatcaacagcatcatcccccgccattgtcaccatcaattaaaaagtactcaacgaccggttccgaatcatcatcaacaattaaacggtcattaacacgacaaaaacaacactatatatacaatgtgacagacgacgaaggccattcgccatcatatgatcgacaggtaaagaaactgttgagtatgaataaataagatattggcattaaatcgaacttttgttaaccaaaacaagaattttccgtaacaattacactaacaaagtttcatatgtatatgatttttgaataatttgcaaaaaaaagtacagtcttctgtcatatttttcatttaaatgttttttgttgagcaaacattttttgcgtgggttttttaattctcagaaatgtttttaatatacttaaaatttccaatcgcaaaaaattgctttatttatttgtatataactgtat

SEQ ID NO: 38305 - DNA, 1661 bp, Heterodera glycines
  unsure (1)..(1661): unsure at all n locations
tatcattaatatttataaaaatgtatcttctttataaataaaactgaattcaattaataatgcaaagcaaatataaaaagcatcggtaaatttattatagtcaaagctataaaagaaatttatatttttactaattattgcaaaattccttgtaaactcgcaaaaccataaaacaaataattgataaacataaatttttagacaaactatatatttataatgtgtatgaattattttattctttaattttgatatttttaagggggaagcaagaagtgttttatatgaatgaaaaataaaagtgatcataatagaaatgcaattaatttaaggacaatattattagcaatcaatgatcgaacaattcaaataattatttttaattgtgaatgattattacttcacgaccaacacaaatcttcaagttttcgatgtgcattcagagttgtattacaaaagagtagattgtaataaaaacttattttgcactaattatatttttgatatattcaatcttttttgtatgttataatattttatttattattcttatccgtaattatatatctaattaatatttttaatctagttaaagaaacttttggttttgccaacaaaaataggcagattgtcagtcatcataggcttttttaataacatagatttataatttttaaaaataataaggattcttatattatgtaaaaatctttaataacttcaataacattgaaaaggttgaacaaagtatttaagcataattatattttattttttaacttgaatttatttccgccagtatcacaatatttatagagcttttttaatctttggtggataattttcttatttaatggaattgaaaaaaaatatttttaattcttttataagtatagtagtttacttaattttattatttattattacaagtcatttaaatcaattagaaactaattaaaattgaatctgctattaaaattcaaatctggaagttaaataataggtcaataaaaataaaagttttatttaaaaaaatggaattggaaagaatttattaattaattaaataaaaaaatgacaatgtcaaaaaccttttaattttattatattttaattgaattattattttttaatttatttgcaatctaatcagctgcccgactgataaaagatgtgcggctatttaacatctcaggttgtatgggaaaagcacatttcattttatataataaacaaaacatatttaaataaactcgcaaaattcattaaagaaaatttaaatttaaattgacataattaactcaaaataacaagctcaaattttgtggaggaaatccaaagcggccacctctaacattttaatgagtttttgaatgtgcagctaaatatcttttaacattaattgttcgaatttaatatacaatttaattttatgcaatattctataatcagtgaataaatataaaattctttaataatattaatgaataaagtaatcattaaatatgaattaaattaataaagataaaataatttaatgaaaagcattatacaattgaaaagtgttattgtaacaataatatataataatatcataaacagtctattcaatcttttcatgaaatctcncaagaccaaatattcataataatattatatat

SEQ ID NO: 38306 - DNA, 1193 bp, Heterodera glycines
ttatgggttttcaatttagcattaaattatttctagtccttatattcaatgaaaaggaaggcattctattattattatatttttttaaaagtttataaataatgtttataaggtgccataaatttggtattagtttattttaatatttatataatctcatatataattaaattgataagataattttagtattgtacacttttatatcttgttgcatagttttctttgctgcaagattttcaataaattagtaaaagaatttcaatttcgtggattgttcagtttcttgattaatgttcttcttttaattattatattttaatatattcattgtattttaatattactatctacaaatttaaactgttattatttgttcattttcaatttaaaaatccattattttctttagttgacaataaacattattaccataatagaatttatatataattaaaaaaaaataaaattttattatttatcagctattttgttttagcttaatttctatgtttaagaatataatcatacctaatatattatcacattttcacgtttaagctcgcctatatatttaagactgttaatgtttttagtatattacttggctaacaaaaattattgcttataattaatatttgaaattaaaattttacagaatcatataaaatttaataatcattaccgccttttctgactataatataagcgatttctgtatatatttattaaatataaaatttatatttaataatgattacttaaattttaagaaactcgcatgcacatggtaattaataaaattaattcgccttgtgcaaatcgctgtaattttcacttttttattaatatataaattcaatggaattatgatacaaaataactgtttgaagtgaattattcttttaattaaatatgtgattttttgtttcttcttttttcttcttagtgatccaatggagaaagactgctcaaattaattttttttttgccttatattttgtttgtcctatattttaaaggaatgttttttgaaattttaattcttttattcaattgagaaatggatagatattattattatttttgttttaatgaaaaatattgtatatattaagacagagataaacgatattcatgcaaatattatgactactaatttaaataaatatcatatacgaccaataaatatt

SEQ ID NO: 38307 - DNA, 1161 bp, Heterodera glycines
  unsure (1)..(1161): unsure at all n locations
aaatgaaattnttgtttcactcttaaaataaaaaccttcaccgataaaaacacaaaaatttttcaattggaccacaaaaattgaaatttcgaaattgaattttgggttttctgtcaccattcccagagaaaatctggattcattaagatattccaattcaggaattgatagaaaataagagatacctcacttcaaaatcgtataccgaagactatgttgagaaacggcaaaatactaactcaatggcactcaaacgaaattttaatgaaaaaatgccaaatgggagaggcggacgaatgaaagacaaaatgccaatggaaatgaattccccaaggccaaggcgtaggaatggcactggtagtcatcgtggtgaaacgagtcaaaatttgggtgaaaaattccgacatgaaagccgagcagaccaaacaaatggtggacaaaatgccaaaatggaaagaagcgcaagtcaaaaccgccagagacaggttagaacagtggttggatatcgtacacttgacaaaacattttcaagtttttggtactgtccctccccatccattttggcattccgtttatccttattttgaaaaattgggtttttaacactttttttcagcgtactgaaatgggcaggcaaaagtcacttaggaaaaaagatgaaatggataaactatggcaagagttgcaagacgatgaaggtacggtaaaaccgccaaatccaaaaaaaaagtcacgaattaagaaaggagcaaaagaccaccatcactaaatgagaaacaattcgacaaactatgggaagattttaatgataaagataaggaagaagcacttgctgtggaaaagaatgcaaaaagtgggaaaaagcatcgaaaatcggcggagaaaaagcgacaaaatgccgaggccagccgaagttccaacgaaggcaaaatgggggccatgaaagtgaacggagaaagtgccaagaaaggaaaaagcggcggagcgaaaacgaaacaaagtcattcatcctgaattctatttgatgaataaaggggggaggacaaatgtggaaaatggaaaattgaaaaagaaaaatagggaagaaacatttactaaaaaaataattgtaacttaattgggaataaaatttaaaaaggaattttcaattttttaaaacga

SEQ ID NO: 38308 - DNA, 1016 bp, Heterodera glycines
tttcccccaataaacttttcataccccattttcgcaccgtggatggtatttttattgattctgaaccggtttgagtagtttagactacaaaaaatgaaaatttctaaatcatgtttcccactcccttctcccaggggtattattttgtaaagtcttttttccccaataaacttttcataccccatttttcgcaccgtgaatgttatttttattgaattctgaaccggtttgagtagcttaaagtacaaaaaattgaaaatttcgaaatcatgtttcccactcccttctcacaggggtattattttgtaaagtatttttttccccaataaacttttcataccccatttttcgcaccgtgaatgttatttttattgaattctgaaccggtttgagtagattagactacaaaaaattgaaaatttcgaaatcatgtttcccactcccttctcccaggggtattattttgtaaagtctttttttccccaataaacttttcataccccatttttcgcaccgtgaattttatttttattgaattctgaaccggtttgagtagattagactacaaaaaatttaaaatttcgaaatcatgtttcccactcccttctcccaggggtattattttgtaaagtcttttttccccaataaacttttcataccccattttcgcaccgtgaatgttatttttattgaattctgaaccggtttgagtagattagactcatgtttcccactcccttctcccaggggtattattttgtaaagtcttttttccccaataaacttttcataccccatttttcgcaccgtgaatgttatttttattgaattctgaaccggtttgagtagattagactacaaaaaattgaaaatttcgaaatcatgtttcccactcccttctcccaggggtattattttgtaaagtcttttttccccgaataaacttttcataccccatttttcgcaccgtgaatgttatttttattgaattctgaaccggtttgagtagcttagag

SEQ ID NO: 38309 - DNA, 113 bp, Heterodera glycines
cgaggagcggccagaagcggacgttctggctgacccgaactgccgcttcgaatccactctttcagagggtcggcagggattcgtgtaaaaaacggccaaaggtgagctaactg

SEQ ID NO: 38310 - DNA, 1047 bp, Heterodera glycines
tcagataacttttgttctattttctttttagcgagttcagttggctaaggttctctaaatttgagctaggacaaagcttttaatgaagttaaattcaactccctgctcggaagatatcagtcccgaaggataggaacacaaaatttcaataagtttccactcatttgaaaaaaaaacaatttgataggaacttaattgttagttgtctttttataaatttaataattaaaataaaatttagaattttatttaaaaaataattaaaaaaagaagaattaaccagtttaaaattattataaattcatatttcttattcatatcgaatatcgagcctcttgtcacgtgatcttgttattcaagatatatttcaaaaaattattttacaataaactcttaaattgtttaattcaattttatttatttaatacaaaaatatctttttgcataggttttttgtctgatgatgccttgcttttttaatccgttcgcttttacataaatgttttgactgtttttccaatgattgattgatgattggcatttcccccccccccccttttcattttttgccgacttttctcccattgcatccgtccatctgcgaagatgctttaggcccgactggcagaagaaaagcccggcccgcggaggagtgaaggcaatggcaatggtgcctcccccattgtcttcaattctcaaccgtcttcaacattttcccgaactgcttgccaaataccaagccgcaatacaagaacagcttcgactgtggctcatcgaaccagccgatcgaacccgaagactcgagcatttcctgcctcatcattgggttgtcacacacaaaggaatactcatgcgctttcgcctggctgggattgcgctatggggtgacttgaaaaagggcttcaattcactcaacctgctggaatgcgaccgagaattctgcaaagtgctctgggttaacgacgtccgttaaccaccgttgccggataacgaggtcatctaccgatgggcaagggtgccattcggtgtcattgactcggccttttt

SEQ ID NO: 38311 - DNA, 64 bp, Heterodera glycines
ccggggcgcggccaatatggtgcggggccacacgcagcgtttgctgcgcaatgagccggatgcg

SEQ ID NO: 38312 - DNA, 204 bp, Heterodera glycines
atattgaaataaaatgccatgggaaataaataaacattttccgcttatgcctaagaaatgcgcgagttttgtgctcccgggacagtgattttttacgattgttggggaaaggacaggaaaagtgaatggggtaggagggggaggacaacaaaaacagcgaaagagagggaaaagggggggagaaggggaggggaagagggggag

SEQ ID NO: 38313 - DNA, 1015 bp, Heterodera glycines
  unsure (1)..(1015): unsure at all n locations
gctattagtatatgcacaaaattcgtaatatttttacagcattttttatttttcatagaaaaattaagaattggcacattttttaccccaaaatgtcccaataaatcaaattataaatcagctaataatgttctttaaaaatctcacatcagagatctccttcaacgttttgtcccggaattcgtccgacttcatgatcaacaggtcaccctgagtccgttcaaacttgtccaaccacatttcaaccgatgaatggtcttggcgttgaagaggcgccctaaaacaaaaaacattcggtttaaagacatgctttatccattcaaatccctccaattttctttaaaaaaaaatcattttttgaaaataaatttttggtggaccagaatgccaaaaatccgtaggatttaaacattaatcattttacgcatactttgatcgggcggaaaagaatgcatgtgagcgtgcccgagcctggcttcgcacatgtgatggcctattttgggacgggatttgaatggatttttgcataagcataaaacaaataaacaaaaaaaaatttaaatatcaaaaagggaactagcaatacggtagatcaattgtaccgtatgaacgtcaaaaaaaaatttgacgtaattagtgtaaataattttttatagactcaggatttacttttttacataaaaaactatcattaaagacataatttacccggcaaattggatgatcatccacttaagaatctggggacaaatagtgagtggtactgtaatgaatgcatgttacagtaataatagtatactttatcctccggcatttcgaagttgcaaaacagcgtgcgtatctgtgatgtggcatttaaattttatggtctcatacgtaatgaatgactttcatttaactgtgccactggttgacttttgaatacagtagacgagatttacgatacgatactgactgcctacacaggntctcctactctcatacaataatacttattatttctacgtatcctgct

SEQ ID NO: 38314 - DNA, 1066 bp, Heterodera glycines
ttgtatactcatggctttcctatcgacaaaatatgattcctaattttttttaattgtagtttatcattttttaaagaaaatccgtacaaattgagcctagtaatcccaaaaaccagcctttgataagatttcaaaaaagtgcacccaatttgtaatcagattttttgcctctcgagaatgagtaatttttgaatgaagcattcgtccagctgtttgctgctaaagcatgtttatttttcactttttctcccttcttatggttccgttacctgttcctgaagcatatgctgaaactgagcatggagttggtccacttgcggctgcagttccacctcaccagcacgcacccggttttccaaaagaatgatttcgataaaaagagcgcgcatctcaggcgttcgaataacatttcccatgtattttggtgtcccggcgagaaataaattgggtaatctatgaggaggagggatacatcatacattggaaaacaacattctatgactatgtgcttttatcacataaaggtacgaatcgggcgtaatactgtcgattcagggaattacgatttctgacatttagggatcagaattccgatttccgaaaaatttgggattccgatttctgagatttgggattggaattccgatttccgaaaaatttttggacgcgtgaattccaatttctgacaattgggacgcgtgaattccgatttctgacattagggaaatatcgtggagaacatttcaaaacgcgaaaatggaaattgacgaacaaaattcgaattagaagaaaaataggagaaaatggcacaaaggaaatgaaaattgtcaattgcgccgatcggaaagcattgccaatccctcaaaatccgttgacaaacaaagtcatcggatttagaagcattaaaattgtgtaattaaattgttgcaaatggtttctgtgccatcgtttttttgaaaaatgcgccgcagaaattgttaaaaattgattttttgatcccgaatgctctcaaatttacgatttgcaaatttcctccccaaaattgttaaaatcgataatgagaaga

SEQ ID NO: 38315 - DNA, 645 bp, Heterodera glycines
aaagtttaggcttaacttttttttcagaaacttatcagaagcgccccaaactttgcagggatactgaaaggaaaagaattaacctggttttatcacattagcttgtcatcagtttttataaaaaattttcaaaattctgagtctcctattattttatttttttttcaaaattttgaagggcgggggggggggtgtgcaaagaagaattagccaactgtaaacagcaagccatccaaatgcttcaatgtaaaaaaaaattacatttggatgcaacctttatttttcctcgcctctcttttcgaaaagaaaagctattagcaagcgtgtttggaccaattctagaacaaatcggggtaattaatttaatctgactttataagataaatgggaattgaagcgaaggattcatgcaaaataatattctatagaaattctcaaaaaagtaggtcctcgcagattcgggcaccgtttctataaagctagagacatatgcgctgaccataaaaaagatgaatcatgttttgaaaaatttatatagatcgactagatttgcaaatcaagttatggtggacaggatgtttgtcgaaacataactcgacaggactttaagaaagaccctgccatttgctattcctgcaaatatgg

SEQ ID NO: 38316 - DNA, 1109 bp, Heterodera glycines
  unsure (1)..(1109): unsure at all n locations
aaatgccaatatttaatntaagaaagggaacggctgaataaacacaatgcgaatttgcgcgaatggcttatgcaatcgcacaacgaatttctgaatgaaagcgccaagttcgaggagttcgacgcggaagacataagcgactggtggaaagcatcagcaaacaaatcggaggaaacggccgttaacaaaaacttggcattggtcgcgaaaagtgtcgaagtgatcgcaggcaaattttattcaaattggaaaattaataattacaatttaaatcaattttaatttataattgtaaattagtagccattttatttagtcaaatatcttttttccattcctcattctacccttcctaatgttcttaaacgtatgagagtcattttcaagccccaaaaccctctcatgggcatggcactgccccaatgtttgtcctaattccctaaaaaatcgagaacgtttttaacaaaatggcatattttgaaatgaaaattactacaatattatcaaatggaaatttagcataaatagtaaaagatggaataaaagcctttattccgtaaggacaatgtaaagtaacattgtgaaattcctcaactcataacgggagaaggaaggatagtctggattcatatccgacagaattttgaatggaaagccaaggggaagagcttattaactaaattaagagagcgggaagaacacaaaggggccgccccaataaagaagtgccaaccaaactaataatgacaattaattatttttgctggtattccttggtaaggcagtgaatgaggcaaaaaaatcaacaaaaaaaattgtgcaattttgaattttccattattccaacaggtcataagccgcgtaacacccaattgttggccatctttctgcggatgtttgtgaagatattttgtccggaaatgcgcggtttgatgttgcaagtgtccaccggcgaaggcaaatcatggattgtcgcgatgttagcagtgattctgcatacgtttggcaagaaggagccactggctgatcagcaggaaggggctcagagtgatcaggaaaaggaaaagcatggtcatggtgaaacaagcactgatcagacggaggaggaa

SEQ ID NO: 38317 - DNA, 975 bp, Heterodera glycines
  unsure (1)..(975): unsure at all n locations
aaaaatcgatttttcagtgtccgtttggggtactcaaacnattatgggagcaaaaatccaacgcagattaaagtacaggctatagggaagctactcccgaaggattcggtctccccataaatctgggcgcatcggttcggggggactgccccgaaaacaaaaaaatcgattttttcaagtgtccgtttggggtactcaaacaattatggggagcaaaaatccaacgcagaattaaagtacagactatagggaagctattcccgaaggattcggtctccccataaatctgggcgcatcggttcggggggactgccccgaaaacaaaaaaaatcgattttttcaagtgtccgtttgggttactcaaacatttatggggagcaaaaatccaacgcagaattaaagtacaggctatagggaagctattccggaaggattcggtctccccataaatctgggcgcatcggttcggggggactgccccgaaaacaaaaaaatcgattttttcaagtgtccgtttggggtactcaaacaattatggggagcaaaaatccaacgcagaattaaagtacaggctatagggaagctattccggaaggattcggtctccccataaatctgggcgcatcggctcggggggactgccccgaaaacaaaaaaatcgattttttcaagtgtccgtttggggtactcaaacaattatggggagcaaaaatccaacgcagaattaaagtacaggctatagggaagctattacccgaaggattcggtctccccataaatctgggcgcatcggttcggggggactgccccgaaaacaaaaaaatcgattttttcaagtgtccgtttggggtactcaaacatttatggggagcaaaaatccaacgcagaattaaagtacagactatagggaagctattcccgaaggattcggtctccccataaatctaggcgcatcggttcggggggactgccccg

SEQ ID NO: 38318 - DNA, 787 bp, Heterodera glycines
ttcccccccggcccccggcgcggtcccccgaaggaatggatttaattaaattctctccttcggggatttttttccattaggtcgtccgttagcctttgaaagatatagtcaatttttcaaaatttttgttgaaatatttgtcgtcctctgaagggcgtgggaggggggggggcgaaggcccaccacgaggccgcgaagaggccgagtgagtaccttcggtgcaggaaaattattaaattttaaaaattttttaattgctttttaaatatgccaaaaaatgtaggcttaacttttttagtgaaaattcgatcactcatattttttgctaattgagcagaagcgtaccaaactttgcagggatactccccggtaaaggactaacttacactgaaatgagcgccgagctagctggctcaaaaaaattttcgaaaatctgagtctttcgtttttatttgttttttgcataattaattcataaatatttttttcagaaaatgctctgaaacgcaccaaattttatttacatgctagtttaggcactctgatgctttttctatcaaaaagggagatgaataaatttttaaaaatttttaattcctttttaaacaggccaaaaagtttaggcttatcttttttttcagaaacttatcagaagcgccccaaactttgcagggatactgaaaggaaaagaattaacctgttttatcacattagcttgtcatcagtttttataaaaaattttcaaaattctgagtctcctattattttatttatttttcaaaatttt

SEQ ID NO: 38319 - DNA, 958 bp, Heterodera glycines
  unsure (1)..(958): unsure at all n locations
tagactagaaaaaatgaaatttttgaatcatgtttccactncccttctccagggggtattatttgtaaagtctttttttcaaaataaacttttcanaaccccattttttcgcaccgtgaatgttatttttattgaattctgaaccggtttgagtagattagactagaaaaaattgaaaattttgaaatcatgtttcccactcccttctcccaggggtattattttgtaaagtctttttttccaaataaacttgtcaaaccccttttttcgcaccgtgaatgttatttttattgaattctgaaccgttttgagtagattagactagaaaaaattgaaaattttgaaatcatgtttcccactcccttctcccaggggtattattttgtaaagtctttttttccccaataaacttgtcaaaccccatttttcgcaccgtgaatgttatttttattgaattctgaaccggtttgagtagattagactagaaaaaattgaaaattttgaaatcatgtttcccactcccttctcccaggggtattattttgtaaagtcttttttccccaataaacttgtcaaaccccatttttcgcaccgtgaatgttatttttattgaattctgagccgttttgagtagattagactagaaaaaattgaaaattttgaaatcatgtttcccactcccttctcccaggggtattattttgtaaagtctttttttccccaataaacgtttcataccccatttttcgcaccgtgaatgttatttttattgaattctgaaccggtttgagtagattagactagaaaaaattgaaaattttgaaatcatgtttcccactcccttctcccaggggtattattttgtagtctttttttccccaaataaacttttcaaaccccatttttcgcaccgtgaatgttatttttattggtttctgaaccgcttttgagtagatta

SEQ ID NO: 38320 - DNA, 981 bp, Heterodera glycines
  unsure (1)..(981): unsure at all n locations
cttaaaagccgacaaaatgtcaatnggagcaatgtttncggcatgtagtgctggaattcagaaattctcgaaaactgacatcttagtgagaactgaaaacggtacggaagaattacaaaataagtccccatttgggcttaaaaggccgacaaatgtcaattggagcaatgttttcggcatgtagtgctggaatttcagaattctcgaaaactgacatcttagtgagaactgaaaacggtacggaagaattacaaaataagtccccatttgggcttaaaaggccgacaaatgtcaattggagcaatgttttcggcatgtagtgctggaatttcagaattctcgaaaactgacatcttagtgagaactgaaaacggtacggaagaattacaaaataagtccccatttgggcttaaaaggccgacaaatgtcaattggagcaatgttttcggcatgtagtgctggaatttcagaattctcgaaaactgacatcttagtgagaactgaaaacggtacggaagaattacaaaataagtccccatttgggcttaaaaggccgacaaatgtcaattggagcaatgttttcggcatgtagtgctggaatttcagaattctcgaaaactgacatcttagtgagaactgaaaacggtacggaagaattacaaaataagtccccatttgggcttaaaaggccgacaaatgtcaattggagcaatcttttcggcatgcagtgctggaatttcagaattctcgaaaaccgacatcttagtgagaactgaaaacggtacggaagaattacaaaataagtccccatttgggcttaaaaggccgacaaatgtcaattggagcaatgttttcggcatgtagtgctggaatttcagaattctcgaaaactgacatcttagtgagaactgaannacgtacgaagaaataccaaataagtccccatttgggcttaaaaggccgacaaatgtcaattggagc

SEQ ID NO: 38321 - DNA, 876 bp, Heterodera glycines
  unsure (1)..(876): unsure at all n locations
cataaaaatttngaaacaaaaaaatcattaacaaaaaaaaaacantttacggagagaaagaacggagggcggacgggcgggcggccgagccggccataaaattggacggattgaaaatgtgaaanncaaaaatgacatggnacaaaaaagggcgggagaaatgtgagtgatggngggctgccccacattttatgggncataataataatatataaaaatggataaatcgggtggtagtttctgtttcctgtgtggcggcacatcccannnnaaaaaatttgaaaaatttcgaaaaaanncagactatgtctgntgnnannnntannnnnntantanccncnnnnctataannncctaaaaaggggaaacnnataaaaaatttttnnntttttngtgtttttttttttctcccccccccccccccccaaaaaatgtgctctctttagnnnnnnnnncggggggggccccctaaaaanntttagaaaagaggggggggggagaaaaaaaaaataaaaataatacttaaaaaaaaaagtttttttttttaaaaaaaaaaaacccccccggaaaaaaaaaaaaaaaaaaaaaagaggccccccccccccccccccnanaaaaaataatttattaaaacaaaaaaaaaaaatttttttttttttttttgtgggcccccccccccccccccccgccaaaaaattttttttttttttttttttcctccccccccccaaaaaaaaaaaaaaaaaaaaaaaaaaaatattaattttttttttttttataaaaaaaaaaaaaaccccgggggttttttttttttttttttttttttttttttttgcaaaaaaaaaaaaaaaaaaaaaacacccccccccccccccc

SEQ ID NO: 38322 - DNA, 247 bp, Heterodera glycines
tgttttacttgcctgttgcacttcctcatgtattccgtcatttcctcatattataatgtatgtcatcaccgtgaaaccataaccaccgccattagtttgttgccggtactgggacacggcccctacaaatttgccactaacagatgaccgagtgccattatcgtggacattggcacactcccttcctctcccattgttaccgcaatggctggactcgcttcttgggcctttgcttttggcttaatta

SEQ ID NO: 38323 - DNA, 1017 bp, Heterodera glycines
taattagagatcggaaaagagggtcggtctgtcggtttcggataaaacccgaaaaaaccgaaaccgaaaactcaaaaaattctcggtcggtcggttttggttaaaaaaaccgaaaaaacctaagaaaaattttcggtttatttcggttttttgattttgtttattctttttcccaaaaaagcaataaaccattaaatgctctttaatatttatattaaattgttgggagattaaaggaattttttttgctttttctgcagggctacaaagtctactgatttttcagatttgtcctgaatttgagggtacctatctgaaaaatcaaaaaatgtcatgaattttcagattgtcctgaatttagaggtctccgagaaaagtctaaaaagggcgatacgttgtaataaaattcattaaaaataccaaaaattttcccggcggcgcctatcggcacaaccagaacctaaaaatgctatttttatttattttttacattacttgagatttcgttgaatttgctcattttgttgtttggcaaactgttcgcatgtcaaaattttgtgctcttccacccattttgcattgtatttgcgacacatttcgtaatggcactcggggcaatgaaatttcaatttatcatttggctcaataacggtttgttcattattggggtaattgtcagtgaaagcaattggaccatccatctcaacagcacaattgcatttagggcatcttaactagttgttaaattaattaattaattgcgtatctgactctccagtgttttaatagcctcgagctcatcgggtaacacaaattgtaattcttcttaattaaaaaaaataatttaataagcaataattcattatattacgccatggaatgtgattcttaaataattgattaattattattaaatggcatttttcgtttaattgctatgcttttttgtgcattgtttgagctgttaccaaaaattgcttcgcccattaaatgatcacagaaacagagctgatcata

SEQ ID NO: 38324 - DNA, 162 bp, Heterodera glycines
cttcgcgcacgcgtttgttttcgcgaggggccgaccagcggtatcagctcgcgtatgtttcgctgactcaagcggacaacgatgaagaagatccttccacggcacaattcctcgagcaaaatgccgtccatgatgacaggaagccgcttctgcccgcgggca

SEQ ID NO: 38325 - DNA, 1020 bp, Heterodera glycines
ctttatgatcatttttgtctaattcgcaatacagctcattcttcgcgaaatataaactgaatcagtgtttgcggaatgaccgagctgataatcgccaataatcttcgattacaattttctttgtcacctttttggaattccaccatttcaactccttatcctctaaatataaactgaatcagtgtttgcggaggaccgagctgataagtcccaataatctccaatttacaattttcatgatcacttttgtgatattctcaatatttcaatttcttatatccaaatgtaatctgtataagtttacagtaggaaattgtaatttgggggttattggcgatttcaaatcgatccttccggaacactgatgctgtttatatttagagcgtaatgagctgaaaatgtcagaattcaaaaagtggcgtcgcgaaaatagtaaatctgaggttattggcgcttatcaacctgatccgtctgcaacacttaaacagtttatatttaaagcctaattagcagaatgtgaaattctctcatttgttactttatgatcatttttgtctaattcgcaaaattacagctcattcttcgcgaaatataaactgaatcagtgtttgcggaatgaccgagctgataatcgccaataatcttcgattacaattttctttgtcacctttttggaattccaccatttcaactccttatcctctaaatataaactgaatcagtgtttgcggaggaccgagctgataagtcccaataatctccaatttacaattttcatgatcacttttgtgatattctcaatatttcaatttcttatatccaaatgtaatctgtataagtttacagtaggaaattgtaatttgggggttattggcgatttcaaatcgatccttccggaacactgatgctgtttatatttagagcgtaatgagctgaaaatgtcagaattcaaaaagtggcgtcgcgaaaatagtaaatctgaggttattggcgcttatcaacctgatccgtctgcaacac

SEQ ID NO: 38326 - DNA, 1043 bp, Heterodera glycines
aatggctatttttaatttgtttattctagggaagaccttggtcatcgaacaatcctggggcagtccgaagattaccattgacggtgtcactgttgcaaaggccattgacttcaaggacaaattccaaaacatgggcgccaaacttgttcaggtttttgttttgaatgcattgatttatagataaattggattgacagatttttcatgttattcggtgtaacaaatcattcatcgtttttaactcaggacgtggcaaacaagacaaatgaggaagctggtgacggaacgacttgtgccactgtgttggcacgtgccatcgcaaaggaaggcttcgagaacatctccaaaggttttgactctaagactatcattagaatcggaagaagaaaaaatagaaaccgattggtttctcgttcccgtttttcattgcaaaagtgttagtcgagtcaaatatggcccataaaagccactcaacacgtgtccataaacttcgttgctaaggtgctaatccggtggaggtgcgcaagggactgatgaacgcagtggacgaattggtcaaggaactgaaggcaatgagcaaaacagtgacaactcccgaagaaatcgctcaagtggccactattgcagcgaacggagacaaaaccatcggaaaactgatctcggatgcgatgaagaaggtcattgaaatagcacattgtctgatttaacaattttttgcttaggtcggaaacaagggtgtcatcacggtgaaggacggcaagacgttgttggacgagttggagttgattgaagggatgaagttcgaccggggttacatttcgccatacttcatcaactcggccaagggtgccaaagtggagtttgagaagtgcttgattctgttcagtgagaagaaaatcagccaaatccaggtgaataatggggtggttgttggtggtggctcgcattttttgacatggtaactaaagcgtgttttcctggggttctcttaccatgaattacatacatattcggacaactcctgaccttgaatctaatttgat

SEQ ID NO: 38327 - DNA, 1480 bp, Heterodera glycines
  unsure (1)..(1480): unsure at all n locations
tatgtatatatatatatatatatatatatatatatatatatatatatatatatatatatatatatatatatccatgaacaaatgtaatccgtttatgaactaataaattttttgtgtccatttaaggactcattataccaacaagttgctgatcaaaaatataaaggcctaacattccccggctttggagaaatatttaaacgaacacgctttttcttgatcaattcacaacctgacttggattttaatcaatttgacatagtcaacgatgttgaaaaagtcaaatttattggtggattcaatttgaaaccaattcctaacgcagaggttaatttttataattttaaaagtagtttttggcacaaaaaaatttaggcttaaaagtgaaaattaatattcttttaaaaatattttaatttatcttttcattttttgaaaaaaaaatatttaaaaaaatatttttataactattattttaaactgttccactaaaataaaacaataataaaatttttaataattttataattaaaatgataaatttttttcaatttaagttcaaatatccatacaatttggactcaaaaaaaggcgttgttttggtcagttttggcactgttgtcaacacaacaatggtacaatcttcgactataattgaagcaattgccgagacgatcaaaaaatttcccaattttctttttatttggaaattaagtcaagggcacccgaacaaaacatttgtaggattaaaaaatgtgattacagaactttgggttgatcagaagaacatattngggtaaaatattaagaaaaattaaacaaatttatttatataaatttatattgttttacatatctcttaaaaatttaaattctctaaattcatttttattaaactttaaaaagcttttatttaagaacttaaaaaaaactttatttaaaattcctattatattaatagaattgttttttatttaaatttattaattatttcaaaatttttaattagtttggaaatataacaaaatgatattgaaggaagtatttaaaactttttttaaaatattttcgaaatattaagattagttgaaaatatttgtggattttacaaaataatctataatttctttatggcaaatcaaaaaacttgaaccatgttacagaacattacactaaaaagattttgtatatattaaatggggcataaaaatgctttactcttttaaacaattttaattaattttagcaaatccaaaaacggtggcatttgtgtcttattgtgggatgaacagtgtgttggagggcatttacaatggtgtgccgatggtttgtgtgccattctttggtgaccaattttacaacgccgaatcattggcacgccaaaacattggcctggtgggtgaccgtgaacaggacaagaaagctgtacaacagcagcttactgtagcactggcccaagcattgngacaaacgaattgct

SEQ ID NO: 38328 - DNA, 1272 bp, Heterodera glycines
taggagttatgacgcctcgtggcctccgctaaagcgctcatagtcgccctcgcatcgtatttccgatccaattgaaacatgagaagaacctttgcctgtagtacaaacatctcttgtacaacacatttgtggacgtccaaaatgcgtccaacagcacagggctttttttggccccttttaatttggccgtaactgctgcatcgatttcccaaattttggtcaaattcacaaacttacgtttttcctgtacaaaatgttcaaaagtcaccacaatattgtcttttccgctttccaagacgaacaacgccgtatgaatggtgaactcctccatctctgcttttgcttttagcagtgctccggacacagctgccgcaattccatgttcacatagcttcaaatcagtgcttgtcgaaaaggggaactcataaccaataaccaaaccactaatccccgtgccaatgcatggttggtgaacgaccaattctctttcagaaaccccctcaaaatcggctggtgtgatgtaaatgcccttaggaccaatggcaatgtcggaagggcgatggatgcgcacgaacgtgacatttataagtactccaggcttaattttggccaaatcaattgtgctgtccagctgatgttgatacagtcgctggagaacttgactctcggggaaggccacgtccaccgcctttggcacatccttctgttctttcaccatgctcatgacaatccctatgcacttttccaaagaattttgaagaacagatgagactgtcatggcctcggcgtcggcattaatcctaaatgcattagagagccaaacggaaaagcgctcgattggggcgtaacttgtgacaaacacgatgtcaccaagtctgagctgtgcacccagctcgaacgactcaggaattccgataatatccggacccttcatctttccgccaaaccgaattgcaatgaccattttgtccgttatttgacaaataaccattttccgtccacttccttcgtcatccccctcattttcaatatctttaccgttttcgtcttcactcagatttcggtgtctcttgcctaaggggtttttctccgtaaacacttcaattccatcttggtccacttccaacacataattaactccttggctcctctggtcactctcaacaacatccatgacagacggaccgaggtccgtatttgtttcctcttcgcacttctctccctcatttttcatctctttcatgatcatttgcccaactgattctttcattt

SEQ ID NO: 38329 - DNA, 1242 bp, Heterodera glycines
  unsure (1)..(1242): unsure at all n locations
tatgaaatcgaactcagacattttttactggttattgagcatacgttttggcaaaccaattccaaagggcatccaagccacaaaggaggattaatttcgtcataattaattacttttaaataataaaaataaatttacccggcattgcgttatagtcctgtcgcttttgccgcaaaaagatgtcgttctttgtgggattttcgcgtgctctggatggtggcgtaacactgatttgcacctccatcagttcagtccatgccgtgtcagtgttcaaacgaaaagccttaaaataaaatgaattttattaaatttattttaaaaataattgaaataatttacctgaactccgtcaaacacacgcattttcacctcatttatttgtatgtttaatgtttgcatcatcacaactgttgcaatgatggcaccaattgagcacagcgatgcaaatccgatcagaaactttgcctcacccattgaataagcgtccacaaaaattgaataaaccctttaaaattgaatttaaatattggcaaattctgattattgtcactaatgagtcatcattaagctattcaattaatttcataattaaaatgataaaaatataatgagatttcacgaaaaaatgcccggataatcaaccaatgatcagatttctgattttggctgaatccaggatttggtcaaatgggatttgatcgtttttgttgaaaagaaacaatttggccagagatttttctagtcgagatgtttttgaaacattcattttttgataaaccccaattttgaaagataaaataaggccccaaaaattcctagatcaatcaaatagtttaactatcccggaaatgcttctcccgacaattactccccccccccgccccaaaccgaatgaatgaatgattggaaattccgatcaaacaatttttgcttaactaaatctgattagaatggactgatgaagccatgtgttgtatgtatatattgaaacatttatgtacaacaaagtgcttttataatcgccaaaatcctcctttacctcttcgtttgatcgccggccgacgtcgccgctgccgccgccggcgtcgatgattagattaagtggatttagcaaaaacaaatagtaattccattaaaacggcttcatattttagtcncaagagcagcagcagcagcagaaagctgtccaacacacacacacacacataagaacaaataataatattcacaaaaaaagtgtca

SEQ ID NO: 38330 - DNA, 400 bp, Heterodera glycines
  unsure (1)..(400): unsure at all n locations
aactgattcaggtcattgtccgaatttgtataattgcggaaacaatgatttattcgctgttctgtcgaccaaatgtcccccccccttccgccatttcgtatcatttccaaatgtccacccgcgccgcgccgttcggtggggcggaaaaaaaacaaacgacgaaagggaaagaagagaaaagggacaaaaggaaaaagagggaaaagagagaaaagagaggggggggggggagaaaaacattttgaaaaggtatcgaaatcagatcatttgaactccttagtaaaacaaatcaaattaaaattactgaagtggaaaatggagagaaaaacgcaaaaaaagaaaaagggagggaaagtgnagagatgccccaccgcctgccctccccccgcaactaccccca

SEQ ID NO: 38331 - DNA, 678 bp, Heterodera glycines
ccttggtttttctgatctgagtttttttgttccagaaaatacctccaaaatgtcaacatggaaatcaaaagcaaaatccaatcggcccttttcaaagaatcgaactctgagtttcacaaaaagtaataattttgaaacctttaagaaaaaacaaattcacaaatactttcgcttttctttttgcaattaattaataaatacattttcatttcacttttaattttgccgttctctcctccgtttttccccttttcttttgccaattcatccgaacgaatttaataaatgtggcaaaggcaaaaatggcacaataaacagacaatgaatgaattggacggatgaacttttcagcggatgtcccatttttttaaattgaaattaaataattttccattaaaatatttggaaatttttttccgtcttccaaagggtccactggcgtttcggcgccggcgtttcggcgccagcatgtttttggctataacttttttctatctaatccaaatccaacattgttgatataattcgaaagcttaacatgtttagaagctttttctaagcgattgcttcgcgattagacaattaccaaaaaagttatacatgaaaatttcgaaaagtcgaaattttcgaagttttttcttaataaaattttttacaggcttgaaaatctatccgctt

SEQ ID NO: 38332 - DNA, 500 bp, Heterodera glycines
ttttgcgatattgtggctggaaaaaagatgccatttcgctatggggagcgcggccgtctgggttcaagtgcttgcttgcgcttgtgctcggcattgaacggtgatggctgctgctggggtgccacctttgtcgtggcctcagtttctccagcgattggcagctgtcgaaatgaataaaacatgcagctcgtctgtgtgttaaagaaatttggcgagttaattgacttgtgtaaatgtggcctaaggcacaaatgctgtggggaactcagcactggggatgctgaacctaaagttggtggtggtgttggtatacgagtgagtggcgtattgccatggttgacaagccctatgagttcgtggatcggaactccttgcctggggaccagtgtgcttgcattcgaaaaaacacgagacataagcgcccgaaggcctttggcctgaggaagtgcctaaccgggaatccggagtgtcgtgtgagtgctgtgcactgcctcggagct

SEQ ID NO: 38333 - DNA, 841 bp, Heterodera glycines
cttattcgtgtgggtctaggattaggaaatgggttatataaaggtcgtattcttactcagtgaccccgaaaaccctaaattagacccgttttccgggtttttatgagctttttacacttttggacatttcgtggttttttactcttttggacatttcgtggcttggacaattcgtggcttggacatttcgtggcttggacatttcgtggcttggacactttgtggggatgccgagaattcaaagaaacataaacagcgagtaggacagagtaaataaaataacacaaattattcggagggaaaaggaacagacattaatgagagagtgtatctttctcccttttcctttttttcccattttttataggagggggtctgatgaaagaaaaaaatttggagaaaaataataatttaaattctgtctttgtcaccatccccacatagaataaatttcaatatatttcttaaaatatttttttatttaaattaaaattttataagttttcattccatccaaaaataaaataattcctttttaaaaggcagcatctacaggcaccgccgaaaccaaaattcggcaaatttgaaaaatttcgctcaataaatccataattgacaaaatattttaacaaatcacaactaaatttaaaaaacttatttgtatctagcagggatggcattttgattcgccaaaataattttttggaagtcggaaatcgaaatcggaaaatttttgaattcgtgcgtttcagaccataggaagcacgggtgtgcgaaattttgtgtcgttttcgtgtcgtccccttttttcgtcactttatgagtttcgttttcgtgtttt

SEQ ID NO: 38334 - DNA, 664 bp, Heterodera glycines
  unsure (1)..(664): unsure at all n locations
ccagaattctaaaaaattttggttttcatatctttaagatggccaaaaatcctaaattgttagaagaacttggtgcaaatttatgtaacaccctaattatatatttaaataaactttatttgctttaaccaaatatttagacattcccctacgaaaatcactgaagcttaaaatctactcaatccgtttattcgtattttgaaatgaacaaataaagtttccgaataaaggaaacattgaaaattttcctaaacatatttttagatttttgtaaatgaggattctaaataaagcctattaccataaattagaaaaaaaaccgaaataaatctcaaaaaataatttaaacttaaaagaagcaattcattaatataattaattccaaaattagtctacaagtctataaaagaaattttattaaattaaataatggacagttagctgacaagtgtcgtactccgggtttgagtgcgggtgtgggcgcggtggagtccgacaattgcctgcacttgggtgcaggacttcgacaatttggggggagagcacaaagggggcggnggcgatcgagacgggactacggtcggattgggccgcaaaaagaatcacagaaaattaccaccanattttatctcaaacttgngtaattaaccaaatgggtgagcaa

SEQ ID NO: 38335 - DNA, 1051 bp, Heterodera glycines
  unsure (1)..(1051): unsure at all n locations
attggaatgcngaagggttgctgagtttgaatcaaagtaaggaatgccggagaattgaatcccggcgattgggatgcagaagtggtgagatagaattccaatgattgtatgccagaggattgggtctcagtgatngtaatgctaatgaatcaaattgggatgtcggggggttgagtccatgtgatagaaatgcagatgagtcccagtgattggaatgccgagggtgtttaagaaatgacaagatatgtacaaagagatcagtagaatgttaaaattttgtgctataaattgccaagagaaggttgcgatgccgcgaagcggccgagccatagtcggttttatcattcataattctacattgaacacataaaatcacgacccttccgatgaaatattcaatcaaaaacttgcataaacaatgcgcctacaattcgcctggtaaagcattacataaagactaaaaattaaaataaattactgcatgcgtaataaatatttatttttttataaactacttgccgaatacgagttcgcatccctcgaaattcttatttggctgagttgacgaatcgtcacattttggctgggttgacgaatcgttggcgcgcccatcaatataatttaacctcaactggattttggtgttaataaataaaatatttaaaaatttagtcaattttcaaaaatgtattaaaataaacatttattatcaacaaattattgtaatttaagaaggaggagcaatgtttgaaactttcaattagcgggtgacagaagctttcgtcgataatattttttgataaaatttttaaaaggccttacgatggttttctttggtgattaattttaaaatgctgaaatttgtgaaaaaactgagcatttaggcttcttaaactaaaataaaagcataaattttccaaaaaatcagaaaactcaaggaatattgggcgagaccaggatcaagataaccgggaaaatcccgaagggatcccaccaattttggcttgggtcgcaaaaactcacataatttaggaacgcaaatttcaggaaa

SEQ ID NO: 38336 - DNA, 939 bp, Heterodera glycines
ctcctcttttcttcccctccttccccacctgctgcttcttcttccatgttccaccaatttcccttcccccattttctgctccattttctctcccctttccctccctccgtctctctttctctgcgtgttccttcggccactttttcctttttctgttttcccttcccttcgccgtttttttttgccattgcgtcgtttcgattatcaaaattgggcacttatttggcgctcacttagcggaaccaaaaccgcctttttgaccacaaaaaatttaatttgttctcaccctttttcggcattaaaatttaggaaaataaaaataatttttttgtttttgtacgtttcgccaatttttggcattcgtttttaaaccatcaaatggttcctttttctatggctttccaatggcattttttgccctaataacctctttgtccaaaactcttggtaattttgagcttttaaatgcgtgatccgcgatgcgcgattctcggcaatttttttgcgcgaccgcggcatttttctatccgcgcaccatccctgcttcacacaataattaaattttttggaaataataattttaatataaaaaatatttatataatttttattgttgagaattttttttccgttattcccacaatattttgcataattcactatttatagtgtccgatgccaaactgctgtctggactatgatggccggctttttcaggatcatattccaaaatactggtggtttttgtgggtccaccggtttcccggcttccggatttttcctgattatcttggaaaatcgcatcagcaaaaaattcttaaatttccaggatttttttttggtttcggattttccggatgccctgatttttagaatttatgggaatatccagcagatcttgattgagcttaatcggcactttaatttcttaaaaattta

SEQ ID NO: 38337 - DNA, 906 bp, Heterodera glycines
  unsure (1)..(906): unsure at all n locations
actaaaaatccctcaaatatgccctaaaaaccggaaaaatgcccaaatatgcactaaaatatgcttaaaaattacccaaaatggcttttaactctcaataaaatgccaaaaattgtgtgtaaattaagaattgactttgaaaagaccaaaacaagggataaggagcatttttaaattgcaaaattattgaatttttaaatttttattatatgctaaaacaaaattacattttttatataaataatttttttcaaaagttcatacaaaaagctcaatattttacggtttttggtgtgtattttctaaaaaattttaaaaagtcgatcattaggagtttatttttcgctttttttgcatttttcttgtgaaaatttacaaaaaatgatcaaatatgctttaaaatcctaaaaatggcaaaatatgcatttattctcaaaaacaccaaaatatgcttttatatgcactaaaaaccttaaccaaatctaaaaattttaacttagaaatgctatttttgagcccctttcttgatagcatatgcgcagaaaaaataagcaaaatcatacaacttcgaaccctagttatcagtactgtaggactcttaaagcttgctctgttattttgcactttgtcatatgcagtttattttgatttataaaaataaaatattcttaaaaatttaattttcttatatatttttccccaaaaattgtcagaaaatgtctggttcttgggttcatgttaagtcccgttcaccggttaaaaaaaaattcgtacttataaggtccttagggactcaattanaaaggagttanaaaccaaactttgattgctaattttttaatanataanattaatattttccctatttagctctctgaaaatattcgaattgnncagcagctaatt

SEQ ID NO: 38338 - DNA, 1132 bp, Heterodera glycines
gatttcaattttgttcaaactttgtttaagttctaatcaatttgggagccttgaatttaatatattcctgccatcattgtttaaaaaaatttcacgcgattttgttagataaatgtgaattttgatcagaaataaatgaatgaaattttaaattcaatttccgtaaaaaattttccgtttcgcgtcgggagttttcgttaacgggaacaggaaaaatacagaaacccttttccgttccgctttttagatattccagttttttaaattcatattgaaggacacttctgtatgcatttctaaattttttttacctcaagtgtcattcgttccttatacataatttcttcttcatccagcaccgtccataaatctcggtctttttcaaacagcgacggtggtggaagcccgtcgcgcattcgttggatacgccgtcccaaatcggcagtcctctggccaccgcgaattgccatgaaaagttcgtattcctctctagagtcgaaaagttcaggttgaaggagcgaaaattctcggctcatttttagaaattttagcttgactaaatatataaatgcaatttaatttgattttgaaaaattaaaaaaaatacaaaataagcattcacgatttaatattcaaaactaaatatgatcccgaagcctgtaaaacaaggatttttgtgggggattcagcccggatttactctttaaaattaataaaagaaaattgaaggacaaccaaaaaaaaacttaaaaattgctaattatgaaagaaaatggaaggacaacaaaaaataaataattaaaattgtaattaatgttcagttttaaagtatgaaaagttggttgtgaattgttcctttctaaaatagttttctaaggaaaattgacaagttattcctgagcaaaatgtcttacagatttttgtaattttgttgcaaaaaacccatccaaaagttttattaagaaaaatgttaaaattttataattttcataaagtttgctaattaatatttcattgtgcaatagcttagaaaaagtttctaaacatgttaagctttcaaatgataccaagtttattggacttggatgacaaagaaaaagttatagaatgttatagtggaaaacatgctggg

SEQ ID NO: 38339 - DNA, 1063 bp, Heterodera glycines
  unsure (1)..(1063): unsure at all n locations
tctanngagtcttgtnacatttgtaanttccgttttgcaccacacaaaacatccttacattataattactttattttttattctactttcttcttctgtcactctttcgtcgttaaattatcggtccatcacgaacaggctcataaactctgattggagttacaaaaaaataattggattcataaagtgttattgagactcataaatatttgatttgactcataaagtgcaatagagcctgtaattcgaactaaaatatttaattgaattatttcatgtagtttacattgttttatatttttttacaacaattttattaaataaaatttttgataatatttataaaataaatagtggaaataaggatgatgaatggaaatgttaagatgctaattggaaaaaacaataaaaccatgatttatttgaatatgatcagcggaaagcataatatagcagtttcttttattttcgcttcattttgtgatattttctccattttttgccccatttttaatttcttcgcttttcatttctcttctcctaaaaacttattttataaaaatatttcttttgcaaaaaattgttaccattttgcccttctgttttggaaccaaatctgaaagaaaaagcattttgtaaaatttatatccgattaattttaattttctaaattaattttgtgggagttacaagaattcgatcttcgtcgagcccagttttaagtgccaattcgtcccgctgtaacatgtccgggtaatgggaacagctgaataccatttccatttgccctgacatataattttaacaactataattaattaggtaatttaacttatttttaccaattatttttaataattaattaggtaattatttaacttatttttaccaattatattttataattaattaggtaattaaatttatttttaccaattattttttataattaattaggtaatttatttttaccaaattattttttataattaattaggtaattaaatttatttaaagcaattattttttatagttaattaggtaatttatttttagacctgca

SEQ ID NO: 38340 - DNA, 895 bp, Heterodera glycines
tggtcagttggttgtgttcttggttctgttcctttttttgcattggatcaattcccctccaagagttgtttctcttttaattttcgacaacctggatttttcctggacctggattttcctggatttttgtccaggaaatccaggtccaggcaaaacaggaaaaaacctggattttcctggacgaaattttagaatttattttttcaagtgaccgatgttttttcaagttttcaaaaacagattaaataaatttaaaaacacattattactattaattagatatttttagatgcttctagcaaataattgattttttcaagcatttgtttgccttttaaaacaaatttcaaaaaatccaggtccaggcctggatccaggtctcgaggagcctggatttttcctggacctggattttcctggatttttgtccaggtccaggtccaaaatggaatccaggtccaggtccaggcttttttcaaaataccgatctctataaatttatattttcttttagattttttaaatgaagaatcaaatatttcatacacactataaatttatattttcttttagattttttaaatgaagaatcaaatatttcatacacacgtaaaaaaaatcaatattttaaaaattatggtgtagaagtaaatcttttaataaataaaatttggttaaattttaaaactttaaaactgttaagaaaactaaaaaattgtgaaattttgtagaataattttcttacaaaatcaccccaaaattgcgaattatgtacgaaaaagtgcccaaacgtctaaatatatagaaaataatgtatatatggtaatacatatgtatataatagataaaatcctgaaaaatagcatatgcttgtttttctgcatgggacttttta

SEQ ID NO: 38341 - DNA, 1321 bp, Heterodera glycines
ctttgcatttattcgcttttccttttgtccaaacccatcgaccaacagaagttgccttattaaattaatgggtgccaaaaataacggcgacagcaatttgaaacggcgcactcggctgatcatcgacttggcctaccgatcggcacttcttttattgctggccaatcagcggcacttggcacgaacaacattcagtaaaattcagtaaaaatatgcagaaatatgtcagaaacatttaaaatcgaaatttatttccttttttacttcgatgcttttcattccgtcaattgcttttgcttctttttccgtccgtttcccttttcatttttcgatgctttcgcactttctcaggttggcccagggcgcgcattccctttgaggacgacccgcggctgctggtcgacccggaccaagcggttgcactgaacaacgcccgcatggacctgcaggtacgcacctgcgtccgcttagttccgcgtcgtgccgaggcggattatgtgttcttcagcgacctcggcccgcacattgagtgagctttaggcattttaaatttgaaatcattaattggtcttgatcaactcattattatttatcgtttcgatttattataaagccaatttgtgctgcttcagatgctggaatatgttcgaaccgttcccgccgaaagggcgaattctggtcaatgccggtacttcctgccttgagccgatgcgccgtccccaccggccacggcgcgtattcagcgattgtgagttgatttttaatatgtttgaatgtcactgtttctacacaatgccaacacattggttcaggtgacattgagtacattaaccatttgtacaattgcccacggcggagaaagtcttcgcccatttgcccagcggggcgactaattatggcaaaaccgatggaactgcgccagctgcagcaccacacaacgccaatggcagaggaccaggaggaattggacatgacgagcacaaacccaatgccaaccacaacgatgacaaagacaacgacgatagagatggaagaggtggaggatgaagagggagggggagaggcacaggaagaggaagaggaggtgaaagagcagggcgagcgagagggcgacggggaggaagggacggaaaacatcacgcctgggacggagacagagacagagagagagacagagacggatggagagagggagagagaggacggcaagggaaaaggggacacgggcggagcagcagccgaacaatccgcagaatgggccgaggtgaataaaggcgaatatgggggagggggaagggaacgtattggggaaatgaaagat

SEQ ID NO: 38342 - DNA, 995 bp, Heterodera glycines
atttcctactgtaaacttatacagattacattttggatataagaaattgaaatattgagaatatcacaaaagtgatcatgaaaattgtaaattggagattattgggacttatcagctcggtcctccgcaaacactgattcagtttatatttagaggataaggagttgaaatggtggaattccaaaaaggtgaccaagaaaattgtaatcgaagattattggcgattatcagctcggtcattccgcaaacactgattcagtttatatttcgcgaagaatgagctgtaattttgcgaattagacaaaaatgatcataaagtaacaaatgagagaatttcacattctgctaattaggctttaaatataaactgtttaagtgttgcagacggatcaggttgataagcgccaataacctcagatttactattttcgcgaccccactttttgaattctgacattttcagctcattacgctctaaatataaacagcatcagtgttccggaaggatcgatttgaaatcgccaataacccccaaattacaatttcctactgtaaacttatacagattacatttggatataagaaattgaaatattgagaatatcacaaaagtgatcatgaaaattgtaaattggagattattgggacttatcagctcggtcctccgcaaacactgattcagtttatatttagaggataaggagttgaaatggtggaattccaaaaaggtgaccaagaaaattgtaatcgaagattattggcgattatcagctcggtcattccgcaaacactgattcagtttatatttcgcgaagaatgagctgtaattttgcgaattagacaaaaatgatcataaagtaacaaatgagagaatttcacattctgctaattaggctttaaatataaactgttttaagtgttgcagacggatcaggttgataagcgccaataacctcagatttactatttttccgccccccactttttgaattctg

SEQ ID NO: 38343 - DNA, 849 bp, Heterodera glycines
  unsure (1)..(849): unsure at all n locations
tttttacatcatcttgatgctcactggcggcggtggagtggcgagatgagcgaaattgcgtctggtgttttacgccagcaactggatttgattgccacgcgcactggggaaaataaatggctgacgcgtgagcaaacctctggcgtgcagcaacaaatccgccaggctttgtcggcgttgccgttgccggttaaccgactggaagaattcgataactgccgtgaggcgtggcgtaaatgtcaggcctggttgaaagatattgaaagcgctcggttgcagcataaccaggcgtataccgaagccatgcttaccgagtatgcggattttttccgccaggtcgagtcttcaccgctgaatccggcgcaggcccgggcagtcgttaatggcgagcattctctgttagtgctggcaggtgcaggaagcggaaaaacgtcggtgctggtggcccgtgcaggctggttgctggcgcgtggtgaagcgtcccctgagcaaattttattgctggcgtttggtcgcaaagccgctgaagagatggacgagcggattcgcgaacggctacataccgaagacattaccgcacgcacgtttcatgcgctggcgctgcatattattcagcagggcagcaaaaaagttccgatagtcagcaaactggaaaatgataccgctgcccgtcatgaactctttattgctgagtggcgcaagcaatgcagcgaaaagaaagcgcaggcgaagggctggcggcaatggctgacggaagaaattgcagtggtcagtgccagaaggtacttctgggatgatgaaaaattacagcgtcgccttgcctctcgcctcgatgcctgngtaagtctg

SEQ ID NO: 38344 - DNA, 893 bp, Heterodera glycines
tttgagggttcaagaaatattttcaaatatttctccttagcggtcattttatttggtagtccacagtcggaattatttacggtacgtcgcctaaaatattccaatagaaaactgaagattcaataaatttgagagttcaaaaaatattttcgaatatttctccttagcggtcattttatttggtagtccacagtcggaattatttacggtacgtcgcctaaaatattccaatagaaaactgaagattcaataaatttgagagttcaaaaaatattttcgaacatttctccttagcggtcattttatttggtagtccacagtcggaattatttccgataggtcgtctaaaatattccaatagaaaactgaagattcaataaatttgagagttcaagaaatattttcgaatatttctccttagcggtcattttatttggtagtccacagtcggaattatttacgggacgtcgcctaaaatattccaatagaaaactgaagattcaataaatttgagagttcaataaatattttcgaatatttctccttagcggtcattttatttggtagtacacagtcggaattatttacggtacgtcgcctaaaatattccaatagaaaactgaagattcaataaatttgagagttcaaaaaatattttcgaacatttctccttagcggtcattttatttggtagtccacagtcggaattgtttacggtacgtcgcctaaaatattccaatagaaaactgaagatttaataaatttgagagttcaagaaatattttcgaacatttctccttagcggtcattttatttggtagtccacagtcggaattgtttacggtacgtcgcctaaaatattccaatagaaaactgaagatttaataatttga

SEQ ID NO: 38345 - DNA, 614 bp, Heterodera glycines
cgcgaaaacgacggcgcgaaaacgtcaacgcgaaaacgacggcgcgaaaacgacggcgcgaaaacgtcaacgcgaaaacgacggcgcgaaaacgaccccgaccgaatttttagctaggcgacattttgactcattttagcttgggcgacatttcgacgcggcgacattatgacgggcagcggattcaaactctgttaacaaattggtccaaattgttttggaacaaaatattctttgatgttgaacgtttatacatatgaaagaaaaaaaattttcttttttactattagttttactttttactcgtaaaaacaaaagcttgcttttaacagcaaatgtgcaaaataaatccggtgctatggacgaagtacgacaaaatgcaaatgattaaaatgaaatggaattaaaataataaaataataataattcacgattattaataaacaaatattttaatgggttcaataatcttagcgttcatcagatgtatcacttatttcaaatgcaccgtctccgacgattaaattttcccgcgcttttaaaatgctacaatttgaattacgttccatattacagcctccttcgtagcgcgaattcgcagaaatgaagttgca

SEQ ID NO: 38346 - DNA, 1263 bp, Heterodera glycines
  unsure (1)..(1263): unsure at all n locations
aaaattaataattaaaatatttatttttcgactttccccacccggtgtgtcgcctttgcccgttttgcgcgattttctccagctaaattaaaaaaatatttttccaaatgcgaagcactgaccataaggaacagtcgcattcgctccacttgctgaagtttgctcagcttctccaactccaattggtgctccaaaatgattgagtcccctcggggcctaaataattttaatttaattattatttntaattggcattttcgcttttcctccgccaacctccaagtgccaagattctcttcgcctcgcacatctgtggaaaatgaaagaatgaaccgatggctcttttttgttagctgtcttcccacatgttgacgatgtgtccaaaattcgccgctttctccgtgccgtgccgggactgttgttcgcctcactgtcctccattacggtgagaaggtaaacaccgggcacacggttcatttctgaaggcatcgaaaagcggtgcattgcaagcagaagaaggcaaaatgttaaaaataggcatttttggcattggaaagtccgacaaaaaaagggggcgatgacggcacgtcaaaaaacccaaaaatttcaaatgcttggtaggccaattgttgccatttttgtcgcccatttacccgcgctttttgagattccgccgatcagtgaccggcaaaatctgctggccgcactgatcttcgagtcccgtgcgtacacaatcagacccaaatctttggtgataattgccgactgcgcacaattttcaatttccatatacgcctaaacaattaataaaatgaataaattaattgaattattaaattgaattgaattcggtaccgaaattgtcatgtaaacgttttcgccgtagcccgagacgcggttgagaagcggcgaattgtgcagcgaagagtcccaagcggcctcaaattggaagaaaaccctgcgaaagaaaaaggaaattgtaattaattacctaatctatttaatatgattaaaaatccacctgtcgtccatggagaattcgaggtaagtgcccgggaaaaggcccaaactgagcacgtcctcgtcctccccacccgaccaatcgggacaactgcggattcggccgaccaccagctgaaagcaataaaatgcaaattgcagggaattgataggtcattttgtacacaaagaaagagaggaaaaagaagggggagagacaacttggacacacacacgccgaaagagagagggaggggagggggg

SEQ ID NO: 38347 - DNA, 1092 bp, Heterodera glycines
  unsure (1)..(1092): unsure at all n locations
tttttttgtatacttttctcattttttacagatttcttcactctgttacacgattcttcattttccgccaaatctttcttcccattcgtttctttgtgctctgatggcaaaattgaggcgaattttgggcctaatttcaaattcgatttgacgactctctgttgaaggaagaaaattcattaaatttggtcattttttattctttttattccttcatcaattattaaatttgattgttttttgctttttatttgtttagtaacaaagaaaattattcatgtctatacgctgcctgaagagcattattttgaaatagaaatattttcttatattgttccaaaaacccgttaacaatcgctaaaaactaaaaattatcagctaagattaaaatttaaaaatgtgttggttgttagcttagaccgcttttagcaattttgaacgactatgatgcatatattccaatctgagtaaatctgtttcaacttaaaaatttttagtcatttttcggacaaagtctgttaataaattacactcaaattctcaaaattttcccgccggttatgacagttcagacgaaggttgacaatatggaaaagggaaatgaacaccaaaagtgtaaaggataattataaaattagtcatttaaaaattacatttttaattaattcaattttacctctttttttgggtttttcagtttttctaataattcatttttcttatcattaaattacactaccacaaatccttnaccttntaacnnacaactnantacaacttantaccaanntccattcccnntttttcaacccnaaaanntcccnntcccnnntttncccaaaattcccnntcccntnncactctacattaaattccttttcatnttttatntnctcattttcctcaattccattntactnttttnnnttnttttntcaataaattcaatnaatttctttaaccattttcttntttctttactnatcnnttnttnatttacattttcnaaattctcttcttcncctatcntttttttntccttatttttagaaaaattttttcctcgtcttttgcatgaaacacctttgtgaa

SEQ ID NO: 38348 - DNA, 801 bp, Heterodera glycines
tcccttctcccaggggtattattttgtaaagtcttcttttcccaataaacttgtcaaaccccatttttcgcaccgtgaatgttatttttattgaattctgaaccgttttgagtagattagactagaaaaaattgaaaattttgaaatcatgtttcccactcccttctcccaggggtattattttgtaaagtctttttttccccaataaacttgtcaaaccccatttttcgcaccgtgaatgttatttttattgaattctgaaccgttttgagtagattagactataaaaaattgaaaattttgaaatcatgtttcccactcccttctcccaggggtattattttgtaaagtcttttttccccaataaacttgtcaaaccccatttttcgcaccgtgaatggtatttttattgaattctgaaccgttttgagtagattagactagaaaacattgaaaattttgaaatcatgtttcccactcccttctcccaggggtattattttgtaaagtctttttttccccaataaacttgtcaaaccccatttttcgcaccgtgaatgttatttttattgaattctgaaccgttttgagtagattagactagaaaaaattgaaaattttgaaatcatgtttcccactcccttctcccaggggtattattttgtaaagtctttttttccccaataaacttgtcaaacccccatttttcccaccgtgaatgttattttttattggaattctgaaaccgttttggagtagatttagacctaaaaaaaatttgaaaaattttgaaaatcatgg

SEQ ID NO: 38349 - DNA, 1283 bp, Heterodera glycines
  unsure (1)..(1283): unsure at all n locations
ataataaancaagccgtaataanntttttacacattgaaaaacaataataaaaacaaaatgtgaacagacatttccgaagcaattgaaattaaagaaaaccgaataattattaattactttaaaaagaatacttaaaatatttatttttaaaattttcttcaaaatactaaaaatctttaaaatatttatgatttaatgagttcggagtttcgacttttaaataagtccattcaagccaaaatttaaataaaaaaataataattttgccagcgaattaattaattttcgcaccttcacattcaaacacgcaagggtagaaacacaaatgcatcgccttgggcaacacaaagggcgtgccgcctctctcggtcggcacaatgcgttttaatgggtgccaccctcattgtttttgaagctttggcgcaagtacaaatgccggacaaattatgaggatgctaagatttgttaattgagtcggtggatgtttcggtgccgaactctgaaaataaatctttttttttcttagtgagccaaatcccataaattcgttatcatccgatccgaaagttctgcgtgtttggaagctttggttaagctattttgaagattgtgaagggctttcaaataataagaactttaaaagattgatttatgacgtcccaaaattctcggagccgaaatttttttttacctataaattttccatggaatttttattgtacaattttattaatgaaattttaattcctatatatattttcataattgtagtaaagtttatttatttgttatccgttttttgcgaataatttttaaaaaattaccctcaatttcccataggcatttaaagagcttaattacgtatttattcaatcgaacaaaataacttattcagcaggcgaatgtttttgcttttatttgctcgcattgacaagtaaacaattcatttattattgtttttaaatacctattttttaactaaactatttttaaaaattttattaaaacatttcattaaatttgcttttcattgtttctcttttacgtgttaaattatgaaaatgcaccatataaatatgtaaattgtaaacaatacgccaattttttccaatccggaaattattttcctgttttttcaaaatacccacggcacttttatcctgtaaacaatacaaattccaataatggagtttgtctgtcgtccattaaattttgtttcacatcatcctttatatgatgccctcgcattaggcattgtgccaatccattcaagtgcaatgcg

SEQ ID NO: 38350 - DNA, 1038 bp, Heterodera glycines
tcctttttcttcagtttcatctctgccgacggttggctttgtgtgttcgatttgcttaagccttctcaacttggcctcggaattgcgctgatcagccaccgatttgacttttacgtcgacgaacacttcaagactcgcaaatggacattggaatacatggaaattcgaagcaaaattggagaaaatggcaccaaagaaatggaaactgtcaattccgatggaaaattaatgccaattccgcaaattcaaacgccacgcaaagtcgtcggattcaaatggatcttcatctcgtaaaattggccataatgcaaacaaaaaacttaaaaatcaattcgcattcattttcagttacatcgacaaaaatgccatcgcttttctccgccatttttgccaacttttcgccaaatgtcaaatcaatttgtgcatcaaaacgacgagtgatcgcatttcggagttccttttgcacaacatttggccaatgctcaacaaaaacattcatgccttggaattatcccccagaattttccgccgtttgcgacatttcgtgccgtcaattctcaacgactgtccatcacttcgctttgtctgtttcacttttgacaatctcttcgccgaatttccatgcgatgacagtgccatggcatcggatggacaagcattggcaaaatggctgttcactcgacttcaaaatgatgtgccgaagatgttcaactgttggttgcataatgatgatccgaattggtcgtcaaacgttgaagcattcaaagcggtgattaatatttgattgatttaaaatggtctcatcctaagcgaagaaaagtgtcgcatttctaattgaatttcttaaccaatttttccatattttaggcttttgtcaatgcttcatttcccgtcaaaaaaattggcattgaaaatgactaactatcgttttttgctcgtccgttgtccaattgcgcgagatgaaagcaaatggactaaatgggaagaagaagcgatttattggcaaattccttatcaatggaacaaaattgacattca

SEQ ID NO: 38351 - DNA, 276 bp, Heterodera glycines
aaaaatgcttctgtgcccattgatcaatgataactgattgatcaggaatatattagagtgaatgtaggcccgattgatgatctgataaaactatgatgactaggctcagactaaggtgaattgggagggaccatgtcagatcaaactgaacgcactttaagagacggactatgggccgacagatcgaatcaagccaattcaattgctctgtatggatctggaactgatcagcgattaacgcaaacccactggagaacaatgaattaaatcaaatca

SEQ ID NO: 38352 - DNA, 1608 bp, Heterodera glycines
ttttcttttaaatgtttttttcagtttattaaatagtatgcaatacgttccatgttaaaaaaacaaattctgcataaaaaaattatgcaaaaaaaaagtgaaaaaaatttccaaaaactaaataactgtataataggttcagttttattataaattttaattgtaaaatttagccagaaaaacaaaaattctaaataattcaatgttaaatggaatagtgagaaaaaccatccgtaaaaaaccgatacggacccggcctctattcaatcagatttattaattttgttgttttttcagtcgagttcgacacgcgtttctcatgaaattgttttggatgacgatggcgtcgactgtccatccgttgttagagacgaattgccggcgaaaaagcagaagagaatttgaatgaatagaaatgaagaccttttatttcttttcgggtattcgttttgtttatcgttgctcttttttacggtgctcaataaatttatacatttaaatcgctgacaattttttaaaaattagtttcgaaattcgtttattccgttcgttttgttttcatttttgtcttttacacttaggaaaatggcttccactcatgaaaaacggacagattctcggcttgtttttgtgccattcgtcaccttcgccgaccctcttttttggaatgagattaaccgactgaaagtggaccattggaaattggacgagtcacttaagccaatttatgccacaacaacttttcgtaagttttatttacctaaatactattcattgcaattttatttgcattttttagtaaaataatcaaatttatttaattttgtacataaaatggtttttcttaagagggtgcccagccttctgatgggctcctctccttcgaccaattttccatcgctgccgaaagtggccaaactttgccgcttcaatctgtccaaccgtttgtctctccattccatggcacttttcttttgctaaacacaaaaaaagcattttccgatggttttgatcgaaagaaatttttggaacagtcagctgattcggtaatttattgaattttcataatataataaacagtaatccttggatagttatggaaagtcatcgaatcaaagaaatggttgacggaagcgcaactgctcaactcatttctgttaaccgcttgggctgtcagtgcttttactttcaattgaatttttcattattccaaattcaggacgtgaagaatttcacatattgtttttggaattgcgtccccgcacttcttttcccggacaatcttcgtcagttcagcatcggtccttccccaaatgtcgaaatgcatcaaatattgttggaatttatcaccaaaaacggatgtcgtccctttttgttaattgacggtaaattccttaatctctactcaatttttttcgtctttaatttatacagtcttttctattttagacaaaattccggctgaattggtgcaattagaaacggttaaatcgccaaataattttttgttagtgtttccaaatccgagttctgtcaaacgccgttttggttggcctttgcgaaatttaggcgcttccattgcgcatttaaggtccatttttcgttctt

SEQ ID NO: 38353 - DNA, 936 bp, Heterodera glycines
ttgtctttccagccgcgtccaatccgagcattaatattcgaatttcctttttgccaaatagtttcgataggattttgcccatttaaattaatctataaatgacaaaacaaaataggtggcatttccaactgatgttttccaattgatgtctcgagcgttatttgcatttttctgcatttttgctatatgtaaaagaaactcaaaaatagaattttttgtgttacaatttttgtttgttttggttaaggccgtttattatgagaaaaataagtccagaaatgggaaatttcatttttctactactcatttcttcaaaattaatattagttttattttgaatttttttttctaaatttatttcataccatatttaatgcttaaatttaacgaattgaagaaattttgaaaatttgaagaacgctcgcaattgaacccgaaatatgatgtccgatttctacccatttcgaactcctaacccggattctgacaatcatcaaaattcaattctattacatataaaatgctttcccactacattgacaatctataatattaacatacaaatttctatctataaaaaatattcatcattcttaaactctcatataaattttgaatttttttccaattaattaaatttgcctttgtgctgaatgccttcagcgctttgaccgcttctcgtgtcacaaagccatggccaaacaaataccaagtgatcgggaacaaaatgaacagtgggccaagtgcataaatggcatggtaaatgccgaattttttgatcgcttccatgtaattgcggccaactttctgctcaaggtccatttggacgcccatcaccgactcttcaaaaggcatcacaaatttttacaaaaaattcttgtgattgatcattgcctaatcagataatcatctgaactgataactataaaataagga

SEQ ID NO: 38354 - DNA, 1202 bp, Heterodera glycines
  unsure (1)..(1202): unsure at all n locations
ttcattttatatgacaacaaacaaagtggactttttatgactgccagagtcggcatataaaagcactcattttgcncatattttacattccttgtcaattgtttattcgtcagcaatgcccgtttcccccgtcttaaatcagcagaagggagcgccaaatgcaaacgaaatcgcgggacgtggcaacgcaaaaggagagaattccgtcagaggtggagccgagcaacattcattttgacaaaaactttatttcctctttttcagtgaaccgttcagtgcaatcaaacggagacgaaggaatggaaatggttggaatggccggtgagaatgggcgaaacattgaaaccgttgaaaaacgattgacaattttcattttcagagattcgctacgaacagaagcaacaggtcgccggcgggggtctctgctgctgctgcataccgtgttgctttttcaacgaatcgtcgcacgaggaaccgccgaaaatcttcaaattcttcatgacaaaaaagaagactccacaacagcctccagcagaagtcgtgcaaccgcaaaactccgttccatcgccaaagacatcgacaaaccaacagcctccagcagaagtcgtgcaaccgcaaaactccgttccatcgccaaagacatcgacaaaacaacagcctccagcagaagtcgtgcaaccgcaaaactccgttccatcgccaaagacatcgacaaaacaacagcctccagcagaagtcgtgcaaccgcaaaactccgttccatcgccaaagacatcgacaaaacaacagcctccagcagaagtcgtgcaaccgcaaaactccgttccatcgccaaagacatcgacaaaccaacagcctccagcagaagtcgtgcaaccgcaaaactccgttccatcgccaaagacatcgacaaaacaacagcctccagcagaagtcgtgcaaccgcaaaactccgttccatcgccaaagacatcgacaaaacaacagcctccagcagaagtcgtgcaaccgcaaaactccgttccatcgccaaagacatcgacaaaccaacagcctccagcagaagtcgtgcaaccgcaaaactccgttccatcgccaaagacatcgacaaaacagctgcctccggtctccgtgcatcagctccgctccgttcatcgccaaaggcccttcctgtcgaaactacacactncacgcgacgttta

SEQ ID NO: 38355 - DNA, 804 bp, Heterodera glycines
tcgcttcttctatgaaaaattgctgccgctgccgtgccacccttctgcttttagccaaattggcttaaatgtcaaattttcgccctctctctctgtccgatgcttttggcccttttcattatttttgattattccaaattcttcttcaaaaagtattttttacgctgaattgttttaggtaatgactgagttagaaaaatgccaaaaatagaattatccccccacaaacaatgattttttgccattgccatcctttccctttttcctttccctttcccgtgtctcccctccctccgcccttctcagtttctttgccatgccatgctaatttcccaatggataaatgacaaagggcccactgaacagaccataccatttggggtgggtcgcccccccccccttttttttcattgtttttcccttgggggtcaatgaatgaaatattttcccatccgtcgcgagacttaaaaatagcgccgcggcatttgccgagaatgagcccaaaactcgcgccggaagtgtaaacattttgttgctgctgttcctttgcatgtttttcccttctcattccctttccattctcttttcccaatgactttcgtcacatttgtccacccatcggcgcacaatgtgagccatcatttggtccttttgcgcttttctgcaccaaatttgggctggccgatggaggggaatggtccccgcgtggcgtttaaaaaaaagggagacaaaaaaaacggagggaaaaagggggggggggggggggaatcatcgtaacagcacagggggaggcaatgcgaaccc

SEQ ID NO: 38356 - DNA, 1562 bp, Heterodera glycines
ttaaatgggtaaaaaatttatgtatatattaatagatgagcaatggcactgctgcattaatttgtaaggatttgctgcctcccaaaactgcttgtgattgtgagttctcgacttttttggcactttgtctacttcggtgtcgagtgcggtttctgcgcgattattggataattatgcgccatttcagtctcgtagcatccattcactcttcaccatcttttcaatatgtgtgcctatgccctgggacagatatccgcgtgatatctgttgggattagggtcccattgggatttagccgtataatcccaatcagactcccataaaaaagtcgggaacaggattctgacaacatcagggttgaatcccgatgtcggtttgaaacccccttcaaaccagcaattagagtcccgctagccctatctcgatgtgtttttaccaatcccaaatgctgaaccgtgcccaactcaagtatttgaccggaaaattgaaaatcctcatttcgggaagccgaccggacggaaactgttatgaaagactaatccgagactgagtccggttcgaccatttcataagaaccaagactcgcccattataggattcaaaaataattatctctctgcctatcttcttaaaaaaaaatttattattaaaaagcggcaaaattaaactttatttatatcattgttagctctaaacattttcaattagcaaaatttcaaagatttcgttatatttcaataaaaagttatggccaaaaatattttatattctgccaaccaattttcaaatttattaaaagaaaaaaaagaagaatattctaggatatttcaatgatatcatgaactaaaaaagttgggttacattttattcatattttatttatttttttgtgttttaaatttatttttatttttcaaattttatttttatggtttttgagtaaccaccgcaaacaccgcaacacccccccccacccgttgctgttgctggttctgttgttgaccgccggcggttggtccaattgaggaggacgaagttgtggtgctgatggacggctctgtgcctccactgtctggccccgttgtgcagctgaaacggcgttgcataataaataatccaacggattgtgtgccgttcagtttacaacgtttaaacaaaagcaatgccgtgaaaaatgtcttttttggtgcctgaaaataaacaaattttatggcaatgatccgtgaaattgacgagaataaacatgtgaacgcatttcagtcttggtcttgactataaggaggtaggaaaagctactaagaagcatttttcgaaaatggcatgccaagcgaagactatcgggatttggcattgagagagaggtctgtctgctatgaaatttaagttaatataatttttcaaaaaaaccatcctaaattttcaatttttgctgtggaagaggaggaaggtgtctaatcaatcacccattttagggcattccctcccaatgtgcgagactctcgacgacctcggctcattaatctctggaaaaatattgttgaccataaaaaactataatttaa

SEQ ID NO: 38357 - DNA, 1220 bp, Heterodera glycines
  unsure (1)..(1220): unsure at all n locations
cacgaggccggaagcggccgagtgagtaccttgggcgcagaaaaattattaaggaggagggttcattatttatttattttttacaaaattaattcataagtatatttacagaaactgctctgaaacgcaccaaaatttatttacaagttgaataaggcactctgactcttatattatcaaaaagggagatgaataaatattttaaaaatttttaattcctttttaaacatgccaaaaagtttaggcttaactttttttatataacctgatcagaagcgcaccagattttgcaagggcatcaaaaagacaaggaaaagcaccgctatgatgctaacgcccctaactctttatttaaaaatttttattaacttatttaaaactcgcatgaattctattttatttttttaatagatttttaaatgtttggattttttttggcttaccaaaacttcatcgaacctggttctttctattctctttcaaatcgccccaaattttttttacagcttaactaggccctattaagcttatttccaaaaaatctcgcatgaattctaatttttaaattttttatagatttttaaatgtttggatttttttttggcttaccaaaacttcatcgaacctggctatttctattctcattcaaatcgccccaatttttttttacagcttaactaggccctattaagcttatttccagaaaatctcgcatgaattctcattttaaaaattttttaattgctttttaaatatgccaaaaaatgtaggcttaacttttttagtgaaaattcgatcactcatattttttgctaattgagcagaagcgtaccaaactttgcagggatactccccggtaaaggactaacttacactgaaatgagcgccgagctagctggctcaaaaaaattttcgaaaatctgagtctttcgtttttatttattttttgcaaaattaattcttaaatattttttcagaaagggttctgaaacgcaccaaattttatttacatgttagtttaggcactctgatgctttttctatcaaaaagggagatgaataaaatttttaaaaatttttaattcctttttaaacaggccaaaaagtttaggcttaacttttttttcagaaactgatcagaagcgcaccaaactttgcagggatactgaaaggaagagaaataacctattttanatattatctagtcagttcatttaaata

SEQ ID NO: 38358 - DNA, 970 bp, Heterodera glycines
tcgtttttaatttaatttcgttaatttttcctttgccctttttatttttgttttcttaataatcccaacgaaaccaaagtgaaatttaaatgaacgaatttgaattttctttattttttccaattttcccatcattacctttttaatccataattaaatatttaaaaaattgtgaacttcaattaacattttaaaggtatcaaaatgcattaaatttatgccaaagaaaaaccaattttattcacctcatttattttacttttaaagaaaaaccgcacttttgctcatattcacaatgctaactatccgcagataatccgctagcattcgcatattatgtaataatagttgaaagaaaaagtaaacggttaaaggagaggagataattttaaacagcagaaatattattaacaagttttaaagtcctttgttaaattaaatattttttgattttggtttccaaatatgattacataatcttaaaatgatttaaataaaggaatttaatatgaatttaattaaaatttatttaaattacacattttatctgataattttttgagtgattgtgccgattcgtacactgaaaatggcacaaaaagagccaacggaatgaatagtcaaattattggacaaatgaactaaaaatggagaatgatttaaaaacgaattttatatattcatttgaattatcgttatctgatcaataaaaaaatgtttacatttacatctatttcgacttaaaatttacaaaagaaaaacgaaaataatttattatttacgaaaaacagaatccttatgaaaaaacaaaatattgaaaaaagcctgcattgtactcgacgagagtaatttaaaaaagaataataaagcaaataaaacgaggaaaaataaatataataaaatgaaagagtaattttataaattaattgacaattaaaacttgggtagaaatctgtagtgcattgagagt

SEQ ID NO: 38359 - DNA, 1307 bp, Heterodera glycines
  unsure (1)..(1307): unsure at all n locations
gcattaaaatgacatgtaatcatatgtttttgtgccctgatttagcattagctgtggaaatttanccatttccttnttcatgtaggttttctatgacattgtttggcgtaattcgcacccttaaattcccattgctatgtctatgaaaggtttcatatcatgttatctgagttgtcagggatgagaatttaaaaaaataaattaaatttgaaagcattccgaagattattatcattatggtgagctaacgattccgaattgcccgaaccccngaatagtccaccgactttttggggcccatccataaatttagttccggggacgtgtcctctcccaataaataaggcccatgatgggccattaacgcaccctaattagcaaggatatgattttggtttcattttcaactgactggctgtttttttggaatttttcaaaaaaaatgatttaaaaaatctaattctaaaggacactcgttccatgccccgctgttccagtctcgagtcacctcaacaaagtccaacaacgacaacgacgtcatcaagcagtagcagcaacagcagcagcagaaccgcttcattgtcatcaacagaagaaccaccgcgcatgagcaaaggcagtgccgacctttcgattcatcattatcaaaaatttaacaatgccaacaaccgcatcaccaacaacaatggcattggcaaaagcaggtccgccgtggtccgggcccgctacgaaccggacgtggacgggatcaaccgattcaggcattatcataggtgggcgcacttctgagccagacaaaattccgaaaatgactcaaatcgaattagcccgaaatcaatgagtggatcccccattaaaaagtgatttgaattttgcatttttgacggtcgaccgattgctgaaatattcattacggatttcgttattgagcaattaaatttttgtaaatttttctacagacccaaaccaccgtcgaaattcttcactcatcagtcaaccgctaagaccattaaagacgatggtcaaagcattgacaaaacgtcgccacggagaacaaatcggcaccaatggaccaacggctttctaccggccattgtgtgtccgaatgttttggaaaacggtacgtttgtgaaatgggtacggtaaattgtgaggattcctgatgaaattcaaaaagagagtgatgtttgctttatggcctggatacgataggattgatatgttactatttntagttggctttccgtgaacccattttttaatcccccctctcccctaaggcgctngcaaccanagccttccaaaaa

SEQ ID NO: 38360 - DNA, 732 bp, Heterodera glycines
gtcaaattcgaataaaattttccaaaattcctcctctcccaagtaccatcctttttgtaaatgacatcatttcacataaaatttgtaagaaaaatcattttttttaaattaaattgaattatgaataattgaacaattgcaaaaaaatgtctgtacatttttccaagtaaaaatatataaaaatcgtatttttttgcaagttttcgagctgcaactttttttagtactttaatcgcatagcaaaaggcttaagaattgcttaaaacagctagatctttcgaatgatgccaaaaatttacaaaattcaagaattccttaaaagcaccgtcattggcacgcccttttcggcatcttcctccgcacctgagcgtaccacacacagtgaagtgttgagtcggtagtgtttgaacaaactttgaaaaaggaatagaaatatagttaaaaacatatatttttaaattttttttattatttattaatggggcttggctttcggcgcttttttggagggttctttgagccatttttacgttcggtgaggcaaaaaataaaaataatatttttgccattttggcctccatttttcaaaaatatggtaaaatggggggccggcggtgccggtaggcgccgccgagaaaatttttgagtattttaatgcaattttgttaagaaaattacttaaaatttcaaaaaaatttactgaaaatttttactttttgggtttcagggggg

SEQ ID NO: 38361 - DNA, 872 bp, Heterodera glycines
  unsure (1)..(872): unsure at all n locations
ttattttcattaatttcaaaaacacatttataggcatttaaaaatgtacgttaaaagtatcccctaaaccgaataagtacccttttttcatatttgtaaatgctgaaaaattagttagaaagaatattttcataaaattttatttaatttcctaagtatatatgtaaataaaaacctttgaattctaaaataggaactaaattctaaagaaaatttaataaaaaaaatttattttattttatttacaacaatggatcattggaattatttcttgtattttttaaattaatcgcttttccgtgttttgttttaatatttttcataaaaaaaaacttcgaaaatttgtatatttttttcaaaatattccacttccaaaagccttacaccgctacgacaaaatttgttgttaggtttcgcctctacggcagggtggtcaaaccgtggcacttggcaacaaacatctattattaatggcactggccaacacttttggccacggagtgccgcggccctgcccgcggtgtcaatgagcgtaaagggcggcaaaaagttcacgctctcaacgtgagtagtattgggttggtgcaatgagtcttgcccatttaaagaggaatcgatggatatattgggttgtctgtttcagaaaatatgttttatctcatattaaccgtttaaactgtcctctcgaaaaatgacaataaaagattttggccaacattcaaaaatgccttgtaaaaaattctgaaccagtaaagcccagatttatttaacatataatgcaaaggaccccatatgaatcgaccaattctaagatttttttatgatttttanaattcacatccaaaatctcatttacgaggagcatttaagct

SEQ ID NO: 38362 - DNA, 985 bp, Heterodera glycines
ataagaaattgaaatattgagaatatcacaaaagtgatcatgaaaattgtaaattggagattattggggacttatcagctcggtcctccgcaaacactgattcagtttatatttagaggataaggagttgaaatggtggaattccaaaaaggtgaccaagaaaattgtaatcgaatattattgacgattatcagctcggtcattccgcaaacactgattcagtttatatttcgcgaagaatgagctgtaattttgcgaattagacaaaaatgatcataaagtaacaaatgagagaatttcacattctgctaattaggctttaaatataaactgtttaagtgttgcagacggatcaggttgataagcgccaataacctcagatttactattttcgcgaccccactttttgaattctgacattttcagctcattacgctctaaatataaacagcatcagtgttccggaaggatcgatttgaaatcgccaataacccccaaattacaatttcctactgtaaacttatacagattacatttggatataagaaattgaaatattgagaatatcacaaaagtgatcatgaaaattgtaaattggagattattgggacttatcagctcggtcctccgcaaacactgattcagtttatatttagaggataaggagttgaaatggtggaattccaaaaaggtgaccaagaaaattgtaatcgaagattattggcgattatcagctcggtcattccgcaaacactgattcagtttatatttcgcgaagaatgagctgtaattttgcgaattagacaaaaatgatcataaagtaacaaatgagagaatttcacattctgctaattaggctttaaatataaactgtttaagtgttgcagacggatcaggttgataagcgccaataacctcagatttactattttcgcgaccccactttttgaattctgacattttcagctcattacgctctaaatat

SEQ ID NO: 38363 - DNA, 987 bp, Heterodera glycines
ctgcataaaactttttaaccatccccgctggctcaatcctttcgaggatatttgaacaaattttataaaacattgtttaaaattgcaaatttctcccggtggcatataccggcaccaactctcgatttttttctctattcgtccgaatttattttaactacaaaattaaattaaattttttttttgaatatttttttaatgatttttagcttaacaatcactgatgtgttggactggaaagaaggcgaatacatggtgattttttggctggaaataaagacatgcatttcataacatattatttattaaatataaaatttcgcaaaagaattattgaaaattaatttatttttgctgtttaaaaaattgaaaattgtcaaatttggctagtttaagtgtgtcgctgaagtgtacggcttcccgccaaaatcattgcaccacatgctgttgctgaaagggccgccaaaggtggaactgtccgaccaattcgactttgacgctacctctgtcatactgtcctgcaaggtacggtacaccaacaaccactaactatgggagacttaatttttaatgctttttaaattttttcaaaaccattattagctaaatgttttttagaatttcaaataaatattattttcaaaaaaaattattgatttaaaaaaaacctcaccaaaaattctgaagcaaattttttgaatttcatgactaacatattgttacttttttgttttcctaccccttggccggtttaagaaacgcccattagtgccgtaatttaagaaatgacctagcaccattagattaattatgataatttgtgctgccaggtccaacaccgttccgagcgggtgaaggtctattgataccacaacggacgtcgggtggacatcatcgagtcgggcgacgttcccgcgccaccaccaaccaaacagaaatgccgatgccattgacggggacagtgatggcgatgaccagcaacagtta

SEQ ID NO: 38364 - DNA, 754 bp, Heterodera glycines
ccgccggagaaaattttgaaatttttagtgcactttgttaatagatttagtccaaaaatgacatttttacaattttaattgttaaaattgtgtttgaactcccatcgaaaaaaacattaattttgaaaaatgagaagaaaaaataatacttggaggggaactgatccaacgcaaaaataaggaacaaaaccaagaacacaacccgctggaccacgcatatattaacaaattgaacaaaaagaacctaaaatttataaaaatagaagtttaccaaaggccaacaatcattaggggtgtaaaaaagtctcggtctcgagtctcgaaatcgagaccgagacttgaaaacccgagactcgagaccgagaccaaaaaaccccgagacttttctcgagtcgagactcgagaccgagactctcgagcatcactactgacaataggcaggtcatccagcaaacggtgagacaaaacgcaaaaaaaaaaaaatgggggaagaaaacgcaaatgggagaaagtggggggggggggaatgggtgcaaagcaatggaggacaaaatggttttgggagaaatatttaaaatattcgtttacacagtaatagaagcaaaattttatcttttttgtttgcttttttataaaaaaatttatttacctatttttctacctatttcagaatttttgtacttatttaatagggatgtgcgagaagtgatttttaccgggaaccgagaaacgagaccgagaaacgatacgagaa

SEQ ID NO: 38365 - DNA, 696 bp, Heterodera glycines
tttataggcacgaaacccgccaaaataggtagactttaggttctaaagaacccctaaattggcactaaaaaatggaaaataggcactaaaaacttcaaatttagggggtgtaaaatgacaaaatttattcaaaaaaaattctacaaaatcagtattgagttacattattttttaaattcaaaaaattgtccaaaaaatttttaaggacgatttttggtaaaatttttcattttttacatagtttattttttttatttttgggtcaattcttgtggtgtattttttgtttttattgcatttttgttaataattttgggcaaaacgccaaaataggcaaaaataggctctttcaaaattttttaggctttttaggcttaaaaaacctataaaataggcactaataactcgaaaatcagcttaacacagcccaaaaaaaacaacatgttttacgtgagccacggggagctcaggaaaaaataggcttttgcctaaaaatattagccctagtcataactttctaaactttcttgaaacttttaaaaattttgtaaactaatagaaaacacttaggcctatctaatgatatcaagaattaaaaatttagttgattttgagcaaaggtatatcaaaaaatattttcatttgatggttttttgactaacgcccattatgaaggtttttgactaacgtcatagc

SEQ ID NO: 38366 - DNA, 1226 bp, Heterodera glycines
gcacgattacgattttgccaaaattggaaactcagcggactccgaattcgaatgcttaacaaaattccaattaaattccgagtgaaggacaacaaaagaatgacatttattgacccaaggacaatgattttgagctccgatgcgagactggcaccatgctcacaataccgcaaagaactcatttttgtacgcggttcgctttacgaaattgatcaaatcgatgcacaagtaaagcaggtaaatgccaaacgcattgaaggttttagcctgaatctgtcgttggcaccgacttatacccgccactcttttttacaccttgccctagtgaatgtgtctgactttattggccaatttttcgacgccaatttggcaagagaaagtgaactcacattccaaattaaaagtgaggacacggttataacaaagactttgtctgagcaatgggagcaggtgagtcagtccattcgtagcaaactgattgggaactgggaacaaattggcaaaattgtcctgtcaataatgataatcattgtttttacagactttttgatccggtttggattaatgattagagatgaatacgttggcagaggaacatgacttttggtggaaacaaaacgcagaaaattgtgaaatctccagcacgcctcaacatgatggatctgaatgcatctgtagaatttggtaacgaaattgagctcagtcccgttaagctcattgaacccgcccaaacccaggcatacaaaattgcaggaaaacgaaagagaccggtaaaaaggactcgcttcagttttcgggcgccaaaagtactcattgtgcttttagtaatttttcttcccaatgcttttgcaaatcctgatgtgaataaccaaatttcaattcaattcactcctccttcaatcgtttatctgcttattattccgtttctgatttttgtcactattacggtactgctctggtcaaaacggaattcagaccttccaatgctcccaaatctgaatgcgatttcgccgcatcacgccgtcgtacagacattgattaattccacacccgtccgctgcttaatggacactggcgccagtttgactgtcgcaccacgatcagttgcagatgaactcaattgtcggacattttcatccgatttggaggcaatgagtgcctcaggacatgtcattcgcctcaaagaatatgctcaggtgaatttaaaaattgctgggtacacagtc

SEQ ID NO: 38367 - DNA, 1123 bp, Heterodera glycines
  unsure (1)..(1123): unsure at all n locations
ttttgacccgaaaaatctatctttatttcagaaaaattttactttatacattttttattcaaattntcgtccatattttgtttgtttttcgtggattaaaggaataatcgaattattatttcttctcaaacaaattatcttttctccaaatttttcaaaaatattttctcttaaccgcccatcccctcccattcttaattagagcacaatatgatagaactaatgaagcagttgaagaagcatttacaaattgatgaagaaatcggagaaaacaaagaaaaagaaaaggtggaggaaatgggggaaaagaaaggcaaaaaggaaaaagaaaaaggaaagaaaagggaaaaggaggacaaacaagaaaaaggagagggaaagaaaaggaaaatggagggaaaggaagacaaaaaagaagagggaaaggaaaaggagggcaaaaaaggaaaatgaaaggaaaaagagggaaaggaggacaaaaaagaaaaagggagggaaagaaagacaaaaaagaaagggaaaaatcaaagccaaaaaaaagacaaatgagagcagaggaaagtgaaaggagcaaaagatgctttgaagtagggaggaaaacagggcaaagtttgagcaccacataattctttatttcatgcttgagaaattacagacctgaaatttttcattcttaaggatgtattttttagttttagtgcattttttaaaggcaaaaatcatgaaaataggcactaaaaatggcgaaacttgggcttttgcctaaaaccccatccctaattataaaaaatgtttttcatatttcaatccgcaaaagtcggtaaccgaaaaaattaaaaatttatagcataatttttaaaattcaattataaaatgtggtgcacaaacttgaacaaaagtgatgtttttaaaaacaaaaactttcttcaaatttgcgatcgaatttatgtgcctgtttatatgatggataaagagtgacaaaattaattanaacatttatttaattatcgtcattttatacaatgagaggcgggcgcatggacagtaaaatcaactcctttgaattttgtagatggataaaggcatcaagccgaatgccaaaaacaaaattaaattttttatg

SEQ ID NO: 38368 - DNA, 829 bp, Heterodera glycines
  unsure (1)..(829): unsure at all n locations
taattccccccccccccccctcttaaggttcgcccagtatttgatcaccacaatggtcagtttcgtgctgatcagtcacctccacccaccgttttcttcagattcttgtcgctctgtccacaatggtttccgttgtcactgttaacattcgctttcgcagcggcgccacccaccaaatgtcgccttgggtccgcgtcatttttctcaattttcttcccaagtaaaggcatttttcaaaaattatattcattggcactctctgctgggtagaattttatttatgaaacggcccgaacgaccgccaaaattcaaattatcggcacaatcggagagagggcaaatgtcgaaaagtgtgtcgccaatttcggcgaatgatccgcccaatgctttggcgtccatttgcccgtcacttatggcaaaaacaacgacagaaaggccaaatagtgacgaaacagcaaatgccaatagcaaagaagattatcggcactttaaaacggttcaacaaacaaacgaaggaaaagtgagaaattttggctcaaatggatttttcggctaattaaattgtaaatggaagttagttgccgagtttagctaattccggtttcgtttgccattcgtgctaatcaattcactcttttttctgttcatcagatttctcccccgttcgtttctccccattcgccgtcctccgtcgactcttcccaagtgtttttccgtgccataaatgctccaattaaccacccaaaagtgcccattcctccgcctccctattcgcactcttccganagcatcaaaaagtgccgtccgtcgtccattttgcctttccaaa

SEQ ID NO: 38369 - DNA, 1127 bp, Heterodera glycines
  unsure (1)..(1127): unsure at all n locations
aattttaaatggaggccaaaaagattgacccggaaattacgaccgatgacgttaataaattcctagaaaagcagagaacatacacgattcacaagcccatcaggaaaaaattcccgagactaaagacggtaccgagcggcttccataccgattggcagtgcgatttgtgcatatttgaccagttgaaaaagcataacgacggttacaaatatctgttggtatgcatcgacgtgctgagtcgaatgatcttcagtgcaccggccaagtcaaagaagagtgaggacatgattgaggtttttgatcgggtgttcgaaaagtcgaaaattatcccgatgaaaatatatagcgacagcggactcgagtttcaggctggaaaaatgaaaaaatattttgaggaaaaatttattatcaaaaatgtgatgtatagtcctgaccttcacgccggagtcgttgaaagggcaaatcggacaataaaggagcgcttgtacagatattttacaaagatggacactctacgatgggtcgatgtaatagacaaaataataataaacattaacaacagtgtgaataggacattgggggccaagccagtatccgtaacttttgaaaatgcccgggcgctctgggaaaaattatataaggcgaagaaatttaaaatttcgaaaaagaaaaaatttaaaattggcgatatcgttcgaattatcaaggaaaaaggaaaatttgcaaaggggtatctcccaaactttaccgaagaattatttaaaatcgttattgttaattcaacgacacccgattcatacaggatcgaagatttggaaggaaatttaataaaaggcatattttataaccaggaattagtgaaaacagatggatgatttttacattgtactaccgtcgaacacaccggggcaggagaacactacgtcaaaattcacagtacgcctccccgagactttggaattgggcacaaattggtcagtagctctctcatcaattatttacccctactcattcaccgctctcggcataaatggtcaagagtttataaaagtatgggaaaatgacagcggtgtcccccattccagnttatttaccgacatgaattttaaaaccgcccgggggattgg

SEQ ID NO: 38370 - DNA, 53 bp, Heterodera glycines
gcagcagcttgccgccgctgcgatcgacgtcgtactcgtacgtggtgggctga

SEQ ID NO: 38371 - DNA, 681 bp, Heterodera glycines
tctcttaattttttgttaatgggtttttagactgtttaaaaatgaaagtaaaataaaagttggaattttatttattaattaaatttcaattaaagtaatgtaaacatttctaacacaattctgtttttacttttttattattttttacaagcaaatcggtgtttttttcattttttaaaattccttttcaatttacatgttcttcaaatggtgtgcaccagggatggcacggaattccgacttccgaaaattttttgggcctcggaattccatccctggtgtgcaccaatttgatgatgctgattgtaagagttaaggaaggttgggtcgaaggttgtgaaggaaataatgcaaatttcatgggttattcaaaatttgtgcttaggttttttaaaatcggaaaagtgataccattatcgttaacaagttaattttattgagactactgaatactaattttcacaaatttctaaccttacatacataaatatccattcaaattaacaaccgttaatgaattttttgtacaatatatacataagaataatacaaaatgtgttagtgattgaagcggaggaagaggagcggagggagggcgcgggctccaggtcttgagcatattgctggtggaagctgatgaactttatgaatggctcaatgttgttgttgtttgaagctcct

SEQ ID NO: 38372 - DNA, 1208 bp, Heterodera glycines
  unsure (1)..(1208): unsure at all n locations
cgggaccttggtactcagttgtactcagttgtccgtgttcatgtcccggtcccgctgcactctaatacatatatacctattttatgaaattagtttaaaaaattaaataagagcaattatttaaaaaaggcatagaaaaaattacatgaaaaattcacaacaagcataataagtgaccaatttgcaagttcatcaactaattttgagacttctttctccatcgcattatgcttactcttgacactcccaattctttggcaatttttcgctcgctttcccatgggtttcgttttttccttttgtcaatcttttcaaacaattccgatcgttcggcatccgtgtaggttttgtgccttactaaaggataaaaccgattaactttattattttattgttatttatgaattaaaaaattacttccgattaagccaaattttctcatccattggtaaactgtgcttaatccaacaccaatttttcccacaatttttctttcaatttcgtagctcggctttaaattgaatttcttagcaaattcatctttcactttttcaaatttctcaataatttcatgcctttgttggttggaaaaattctttgtgccaactgaaaaagaaaaattgaagatttttttgttgttgttaattaaacaattaaaagagaatttattaaattaagatcaaattgaagcctttaatttgaattttaattttcttttttatcgcattgctttttcccttttttaagggattcgtttttaggcaaatgccaaaaatttctgcgcacttaatacgctcagataagcacgaaaaacgagtttttcgtttgggttgggaaggctacgatgcttataatgcctatttcggggtttttgtgattgatgtgcctattttcaggatttccggaaaacccccaaaagttaattaaattagtataatcaaaatattttgtttaccaagttccttcttccattcttgaattttattccgactaaatcccatttcattcgcaattttcacttctaatttttttcgtttaattctgtcatatttaaagccatgagttttttcttttttctttttttcaaactttttcacaaattccaatttctccgcattcgaaaaatttgcttaaaaactcattaagttttaaaaaagtttagaaattttacatcgtttgattagaccgnaattcttgcttcccattta

SEQ ID NO: 38373 - DNA, 1130 bp, Heterodera glycines
  unsure (1)..(1130): unsure at all n locations
taaactnntcgggccattttgaaaaagaatccagtaaaagtagataaacatggccatcttggcatgggccggcaaaatcaatatgcacacgttggaatggccgtttggtggcattccaaggagaaagcaatgtttttggtgctgctttctgggcgctttggcattcttcgcagctttttaccaatttctcgatagctgagtccattccaggccagtatacgtgttggcgtgcgagagctttcatgcgcactattcctgggtgtgccatgtgaagcgctttcaacgttctgtctcgtaacactgttggaatgatgactcggttttgataaagcagacaattctcgatttgcaaaatttcgttccgttttggaaagaatggtgcgaggtcggggtcattacacttttgtgaccatccttccttggagaattttgccactttttgtagaatttcatctttttgagtcatttctgctatttcggttgcagtgacgggaagttgatcaattcgtgcctgcaaaattgtgccgatgaaacattctgtttcggtgcaaattttcgctatcaaaatatcttcttcgggtcgcggataattcgcgataagtcgtgaaagcatgtcgacttgaccaaacgcagtggtattgatgtagcgaatgtcaaattcgtaatttgacaaaataagtgcccatctttggagtcgactggcggcataaattgggatccctttcttggacccaaaaatggaaatcaacggcttgtgatcggtcagaagtgtgaactttcttccaaaaatcattcggtgaaatttttggacagcgaagacaagagccaaagcttctttttcgacttggctgtagttccgctgttcttcagaaagaacacttgacgcgtgctcaatgaccttctccgttttgtctgggaaaatgtgacttatggtcgctctaattcgatcttttgaagcatcagctgcgatgattattggaagcgaggggtcgaagtgggttaaaagcagatcagacaacatgatctcttttgctttttcaaaactttctgctggtcttcaccccaattccnaagttcgtcttttcgaagagttggtccaatggcgcccctgagtcgcgcatctttttgat

SEQ ID NO: 38374 - DNA, 1332 bp, Heterodera glycines
  unsure (1)..(1332): unsure at all n locations
catcatcctgtgtcctgataatgccaaccccttctcttactaagcctatgggcgggaaggtgtaattgatacggtgccaaattgttgagtgctcttgacaaaaaaaaacatttttcgccattaattgtttgctttctggatggattgttagtttgttgttatgtatttgcatggcttttttttggctttttgggaattttctctaaaaaggtgccgacgatgtaaaaaataaaaataaataaaaatccaaaaatggcttggcgcctcactaaattgaaattctaaaaaatgttttactccactaatttaaatttttaaaaaaaatactttgccccatttaaaaaaatcttggccctattaaattcaaattcttttaaataatgtttatcccttttaaattgaaattttttttaaatgcttgactccaataaattgaaattcttttaaaaaaaaatgttaggccccattcttaaaaaatgcttggccctattttgaaatttaaaaaaaaagtttttttaaaaagcttggctcctctaaatttaaagtttttaaaaatgcttggccctattaaattgaaattctttttaaaaaaatgcttgacagtttgcgagccatttatttattgactgttcccatttcaataatttgctgcgagtgttaacaaatgatgatggattgggatggttggttcttcgatggtttcactgataaaatgtgtgtaataattagtgacaaatcatcacacaaattttctcgtcccctttcttttacctccgtttgctctccaaatttatacttttataaagttattatattttaaatttactaattttgtaaaggacaaaattcgtcttatgactcagagaccgccacaaagttttaaactatgatctttatttacctttttaattgacatcatttttaattagccaaatatccaccaaaaaattaaataccgtactcagagaatgataaacaattaaacgggccaccgtaccaccacatttcattaaataggcaattttactaaccgttatgaaatatattcatattttcaactttatcccctaaatctcgacttttacaaatattcttttcgaatttccaacttcgatcgcctaaatctcggtttttaaaaatattcatactcgaataattcatcaatatcgttaattcaatttccaacttcgatcccacaagagtctcgacttttaaactcccaaccattatttcgttttttgcctatttcatacaagcataatttttttttcaaaacaattgcttcagattctttanagctgttttatgagctttattagcaaatctgatcaa

SEQ ID NO: 38375 - DNA, 835 bp, Heterodera glycines
aaaaaagtaattttaaacacgaaaaaataatagaattcattttataaataattaattacacaagaaaattaaaaacaaaacgaaaaataaagcataaaaagaatagttctaatgaattttttagaaatgtataattaaaaaaagaaggatttgataatgaaaaaattaaaataatatttctacaaagctcaattcatatgtcggataacatttgaaaatgataaataatttaagaagccgcgaaccaaacttacagaattcagacaccatgataatttgattaatataatttaaactgaattattatttttaaatactaataatgcaattatccacaaattaaataaattcatttcaaagtttcatgtctaaggcatataaaagcaaaaaaagttaatacatacctagataaataacaattaatcttattacttaaaaaaactttgttaaaggaatgaaggaatgataattagatatttcgctatttcgcatcaaacatgaaaatacagccaaatcatatggccgactttaaatcagattgtatcgaacgaggacacttttgggctgagacacccgttgtgaatgtaagaaagtgttatataggcacaaaattgcagaaaaatgacttaaattggtttagaataatcttttaacactttaaaaatgatattttttgtatttttaggggtgcattaaaaaaaagttttttattttctcgcaagaaaaatatgtaagaaaaagtccaaaatatgtaccaatatatgtataaaaatatgtacatatgtaatatatagaaaaatcccgaaatatgtaaaaatatgtaaataaaagtccc

SEQ ID NO: 38376 - DNA, 688 bp, Heterodera glycines
cctcggttcgcaccgggatgaatggaagtgtgcatcaacggacgttggatcatcaacaccaaattcgaaggtgagcaaaaatcaattgatgcaggcatcgcccgatgcatcgctggtgaactcccctcctcaaaaaggcgcccaaatatcgtgccgccgatgcgagaattcttcgactcttgcagagttacaatgccatcaacaataaccaggctccccaaaatgatcacaattaccatgcccttatcaatgttaaccccctataacatcatcaattttctccttggtatttctcggaattatgagatgcgccgtaatattttcaatgttttgttatttttttgttgttaacacattgataaatctgttatggtgttaattttaaataattttcgagaaacaaatcagaattggatcaatgtaggacaaaaacagcttgccagactaaaacgaccctctgactaaaccggccagactaaaccgaccctctgactaaaccggccagactaaaacggccagactaaaccggccagactaaaccgacccccaccgtaaaattgcatgttttcttttttatcacaaaatttttaatttttactgttattattttggtgtaaaaattttcggcattttatattttgtgtcctcctttactattatattatccaccattctcataacaaatgct

SEQ ID NO: 38377 - DNA, 1015 bp, Heterodera glycines
tttgactgcaaatttttttccttttttgaatggggtccaaaaaaattttaaagagaatttttgattattaatttgaagtcttgaatttatttgacaaatccaagacttaaaactgggagaagcaaggggctgtggctgggggcctaaaatttgggccacattggagaattaattctgatttctgaaaaagtcccagaaataactattttttctttccataccttcttgtagagctcgagctgctctttccaatggtcttatcccggtctcgatccgtgccgaactcacaaagttatggagtgaaatgtgaaatattgttttcaccacaaggcattttttctgaaaaccggattcaaaaatctggggtttggtataaccgttttagaaatagcgtagaaaacagcttcgatatcaagaaaccaagtcaagtccagaaaggaatattttaaaacgatttcgttttgttttggcattatgataccgaataactttcggaaattatggaaacaaaattggagaaattcgaataattttttgactgcaaatttttttccttttttgaattgggttcaaaaaaattttaagagaatttttgattattaatttgaagtcttgaatttatttgacaaatccaagacttaaaactgggagaagcaaggggctgtggctgggggcctaaaatttgggccacattggagaattaattctgatttctgaaaaagtcccagaaataactattttttctttccataccttcttgtagagctcgagctgctctttccaatggtcttatcccggtctcgatccgtgccgaactcacaaagttatggagtgaaatgtgaaatattgttttcaccacaaggcattttttctgaaaaccggattcaaaaatctggggtttggtataaccgttttagaaatagcgtagaaaagagcttcgatatcaagaaaccaagtcaagtccagaaaggaatataaagaacgatttcgttttgttttggcattatgataccga

SEQ ID NO: 38378 - DNA, 953 bp, Heterodera glycines
ccaatttgaagtcggtcccttccattccttcgtccgacgactcgccgtttgtttaatcgagaaaatagacggaaattttgtcgatttttgtcgtttatggaccaaatttctacaaattttgcgtcatcattgggagtacaatttgaacttgccaaagtcagtctcgccgattcctcctttaggtatttactttgcttttgagttgtcagttttgacactgatgaaaggccccaattgtcgtgctgtctcctgcaccaaaaactccaaatgattaacttttgcatttcggtgaagaaacgaaagcacaaagaaatggaagcgaacgaaacggagaatttgggcggaagtgccaaagatttgccagcaaatcgaaacactgcgggtaaattcggtgagattagtgggaaaaccgaccgaagacagaccgatttttaattgcatcttgttaaattgggagtgaatttacattatcattttggttcgttgaaattactctcttaagacgacgagtttttcgatgcgattgaatcattcgatcaatttgacgtcgccacttcgtcggagtgccctcgggggagaagccttccactcgattcgaatgaatttttaaagagcaatccaaaccaacgaatttttgttccttttactcaggtggtcattaattgtaagtaaattcgctgaatattaccgcaaagccctttaggaggagggcccaatgacggaagaccaaattgagcagagagagtcctttctgtgcaatttggaggacgccaatttgaggacgaaggcgcagtccgagctgttgttgtccgacatgcaagcattcaaagtaagccatgtttttgtctaagtttttggttctgtttaaggccgcaaatccgggctgtgaattggtggattttttgagatggcattcgccaagaggatctgacggaaggtgagggggaagggga

SEQ ID NO: 38379 - DNA, 1030 bp, Heterodera glycines
  unsure (1)..(1030): unsure at all n locations
ttttaccaaaaaacttaaacaagataaataaaacaaaagttgtggacgctaaaaactttgaccagttcccatagtcccggggattaagaacggaaggacccatgggtggctctaaaatggggacggcaatttggacaagttcggtctcctcgttcgtggtctcctcgggtggcagaattatttcccggtactcgtttggccattccctttctgggagagcccccgggttcccaagtcggcagggttatccgtagacctcacgaacttaaaaaaggcgcccctttcctttcttatttcagccaatcgattggcgatgaaaatgggctgagaggccgtgctggccaaccaggataagattatctgagaatccgcccaaaaataaatgttttcgaacgaaaaatccaaattagaaacgacaaaatttttggcacgaattgccgtaataagtcccagtaattccagccggggtatggtgaacccatcgtttttgaactttttgggtctcagtcgcgacttagcgaaaagtagcgagacccgaacggagccgttaagctctgagcgcaggtagactgcggaggcaaatgaattgggaccagcatcagaaaatacatggagctgaaggcttgcctggccacacggggtataccgagcaaacgttactggggggcagtcccactcagaaataatggcaacccaatccttctctaattttggtccgattgactcatcccaccccttggctgaatcccagagtgactgaaaaaacatttttgccttgacgagacaagggctgcacaatcccaggggatcaaacaaagaggcgatggtgctcaatactccccgtcgggtggtcggaaaattgctcttggcaaggaaattcaaaaaatatttttttcctgtgcaaattccnacaannngcccaaactctttgtacatcgcccaccanaacttctttcggcgnggaggtcactcaaaattgnttgggtcgctgccacaaattcgtggaggtgcatccctgcccttgtcatca

SEQ ID NO: 38380 - DNA, 901 bp, Heterodera glycines
tttaaaaggcaagaaaaggtcctcacaaaaaaatttttagtgtttttttccatttcgtaaaaattgtggcctttgattgtgaggggggggggggggggggggtggatgggaggtggcatttttggaaggcaaatttctgtcccccccgttgtccatatatgcctcaaacgtaatgcgtcagcgggtattccgattcatctacgtttgacatcttttccttacgtacgtaaaaggaggggctgaaaatttcgcaaactttgggttttcattaaattggttccttttaaaggagtgaggatgactttttcatagttgaagtgaatgctattttgtcttaaggtggcagctgattttgtgcaatatgttctcttcgcactttgttctgtatatccgaaactgaaggcttaccgttcgcgttccttcgggaagtggtggcattttggttatacgagtcctttgtccatccaagtaaattagtggaattattatatgcattaaatattacattttgtttgtttagcattgggcaatgcccgtggaccggaacaattgtaaaatggattggcatcggccaacctttgctgaaatcgactttgctctatctctggggggcacatacatttttgatgagttggaacgccttgttgaaaacgatggaaatgccgcgctcaaacaaactgacgacaaacaattgctgaacatactgacaattgcgttcaaatgtttcgagggctgttccgcacgttgtcctttgttcgacgaatccgaaaaaattgtccaatttttgtgctgacggcactgtataaataaacagttgcatgaatgaagttctgatttgacatgcaaaatatcatgaaattggggaaatgaaaaattcctgtactttcctgttatgtatgag

SEQ ID NO: 38381 - DNA, 870 bp, Heterodera glycines
  unsure (1)..(870): unsure at all n locations
aataaatcgattttttcaagtgtccgtttgggggtactcaaacaattatggggagcaaaaatccaacgcagaattaaagtacaggctatagtgaagctattccggaaggattcggtctccccataaatctgggcgcatcggttcagggggactgccccgaaaacccaaaaaaaaattttttggataaaaattatttaaatgaactgactagataatatttaaaataggttatttctcttcctttcagtatccctgcaaagtttggtgcgcttctgatcagtttctgaaaaaaagttaagcctaaactttttggcctgtttaaaaaggaattaaaaatttttaaaaattttattcatctccctttttgatagaaaaagcatcagagtgcctaaactaacatgtaaataaaatttggtgcgtttcagaaccctttctgaaaaaatatttaagaattaattttgcaaaaaataaataaaaacgaaagactcagattttcgaaaaattttttagagcaagctagctcggcgctcatttcagtgtaagttagtcctttaccggggagtatccctgcaaagtttggtatgcttctgctcaattagcaaaaaatatgagtgatcaaactttcactaaaaagttaagcctaaattttttggcatatttaaaaagcaattaaaaaatttttaaaattttattcacctccattattgatagaaaaagcatcagagagccttattaacttgtaaatanaaatttggtgcgtttcagaaccctttctgaaaaaatatttatgaattaattttgcaaaaaataaataaaaacgaaagactcagattttcgaaaattttttttgagccagctagctcggcgctc

SEQ ID NO: 38382 - DNA, 891 bp, Heterodera glycines
ttttagacattcctcaattttcactaaatacaaattctcatatttgcttagtcatctgttaatttgtgtaatttacggtgcatttacactgaattatgtgctcgcatttgcattcgaaaatgcgggaaagtatggcgcaattaaatcaaaaattaaaattaattaataattttaaatttattcagtccaaccaccggtgttgtggccgaaactttgctgggccccgttggttataaattcttcgccggcacattcattatttcattgggtagcacttgctgttatgtgtccatttttgtgatcatcagatgcaaaaatgccggtaaatcttggcattcatttctttggcattttaaaattcaaaatattttttacagtaacccaacagacgaacacacgagttttacggtcattgatcatcattttgtccattaacattggcggatatctgaccaatttggccatatatcagttgctgtatgcatttggttcaattttggggtattttaaattaattttaatttaatttaaattttccaatttccctaagtctcccaattcgtacttggcaagtcggttttattgctggcattttgttaaacgttgcatcgggatcaaatgttgttgtcctttattttaataggtcattatcgcaataattttaaaattttaaattgtaaaactttttaacatatttttaaattatattaatatattttcattaattttaataatttttattttttacatataatattacatttaattcttaattaaaatatatttcttttttcatactctcttcagcactgattatcgccgcgtgttcaaaaaagaatttcaagcgttgaaaggctatttttgtaacaaaaatggtaattaaaataatta

SEQ ID NO: 38383 - DNA, 986 bp, Heterodera glycines
agcagaatgattgatcatataggatgataataaaaaaaattttgcccgcggatgcccctcccccctccccgcgcgctcatcccaaatcctggaaaacccgaaatcattgaccgtcaaaaaaaaacgtccagcagattgaaggttggctctatacatcactttttccaccgaaatcgattttttcccatcgttcagtcattactcaaccagggctgggcgtaattacgggttacgaattacggaagttatggcatttttggacccccataatgacggatttccgtaattgaaaatccagttacgctcagcagccctgctgagtactatccctaattaggcaaaaaaatgactgtatattaaattatcttttatcaattaattcaatcactgaatgaatttattcatctgttaattgcactttctttttctccatcccattttcttgaattttaatccgcctcctttcgaaaatttattttttgtacatcaatttgccattgtttgtttcttctttctttgccaatgcttttaagttgccgaaattacaacggttctgaattatttttggccaatgtttaatccaaaatatttatttaattaattcaaaatgtttcatttttcatagcagccggatacaggaactcactttgaagaattgaagattctaaaatgtaaaatattttaagcattcatttagcattagggtgctagcaggaaacaaataactgcaaggcctactgtatttatttgcaatttttcaatggattttggacccgaatgattggacatttttaaaatatcatttttttaaaattttttataaaattaatagaaaattcgaaatttctcaacattgataagttatctaaaaaaaataaaattcaaaatttagttaggttgtttttctctaaaaattaataaaattagattgttatttttgctaactcattaaaaataccatttttagccggtttcagatgtttttt

SEQ ID NO: 38384 - DNA, 606 bp, Heterodera glycines
atcagcgtcggctcgcgactgtccccaaatggcggaagtcaccataacttacgccattcgtttgccaacaaacagttcatcgatcagttggaggatgggtcatatgaagtaatttttcatcattcattcattaaatgttcccaattgttgtaatatttaaatcaaagattgtccatccattccaaattcgcgatcggaaggaacggattggcattgacacgcgaaatcattttatcaactccacccatccccaacattatcggcatattacaattgtgattcggagtgccgtgctggcaaatgcgcgtcttaagctgttgttgtcgcttaacgagcatatttttcacgagaaaagcaatttcagaaaagtgaaaaaaatgcaaaaacaataaataaaactgaatgcatttgctttcagttggatgggtcggacgaatcgccgttggcggtggaaaattgcttttatcaggtaggatatttgtcttggtgaaatttgatagtcatccaacgaaaaggcttcagggcaccatcaatggcaattcggacactctctccgcgctgtccacctgcgatggtctgctcggacttttggcctttcccaacggg

SEQ ID NO: 38385 - DNA, 508 bp, Heterodera glycines
cagtgattagaagtggtacaaaaggattagaagaggttcaacagtgatgagaagaggacaatggtgattagaagaggaagaccagtgattaaaagaggtacaaaagcgattagaagaggaacaaatctgatcagaagaggtacaacattattagaaggggtacaaatctgatcagaagaggtacaacagtgattaaaagacgtacaaaagtgattaaaagaagtacaacagtgattaaaagaggtacaacagtgattaaaagacgtcaaaagtgattaaaagaggtacaaaagtgaattaaaaaaggtacaacagtgattagaacaggttcaacagtgattagaagaggtacaactgtgattgaagaggtacaatagtgattaaaaaaggaagaacagtgatcagaagaggtacaacagagattagaagaggtacaaatttgataagaggtacaaaagtgataaaagaggtacataagtgattagaagaggtgcaacagtgatcagaa

SEQ ID NO: 38386 - DNA, 1708 bp, Heterodera glycines
  unsure (1)..(1708): unsure at all n locations
taatgacaaataatattgtgtatttttatatgcaagcaaacaccatttccataactattaaatattaaaagaaaagaactagttagaaaacctatntaaaataaaattatattactatatctaaactagagtgcagcgggaccgagaatgggcaaaaccgggacagcgacttgccgggacctgagaagccgggaccgggacctcgcttttcgtccggcaccgggaaccgggaattttaaaaattcaaattttgttttatttcaagtgaaaataatacaaaattaaattttattttgttttttattttataaatcaaaaagttaaaactaaattaaattaatgaaaattttcaaatcaaattttctttaattatttcaaaaattaatcattttggactaaatttttttgtgttcgttatacttttgccgttagaatttgtttttaatttattttgttaatattttttaattgagatttaaatttttgcattgatttattctcatggtaaaggctaccgcgttagattacggcgtagaagaattgttaaagtaaaaatttccaataaaatttttatacgttttaaaaatcaaaaatgtaaaattacgttcgagcaattattatgcgcaaaatgtataagtaaatttgggttgaataacgtttaaacaatttttttatcacgcatattataagtttggtatttcaatggttattattttcataatttaaatttttctcaatttatttgaagcgaaagtattataaaaattatattttgattataaattaaaaaatatttgatttttttttgctatatttcaactccatgcagaatgtttgcttaaaggcaggcggcaatataaaaatgtaaataaatccgtttaaaattaaaaaaaattattataatatattttattagaaattttcatcagtcggagaaaccacaatagattagtcagatagtgtatgataattattcaattgttgtaattattatgttatctaattaggttgaataaattaaataaccataaatttatcttcttctaatttttgatcttaatcactgaatttattcaaatgattaataaaattcactttattatctgttaatggatattttatgtacacaaactatataataatattttttcattattctgtttttaattaattttatctttttaaaggtaaatttcttttcggttaaatatattttgttgcttacatggtaataatggtgattaatattaatttttaaaaggatataaaaggtatgattgtaaaatttcaaagtcttaagtcagatattttttatccataacttttttgaaattcaataaaattatttttttttgatttaaatcttccaaataaatatttctcaaaaattttttttttattttttttttactttattaattgcaatttaattttagttgattgtcgcattttaaaaaattaaataatttttaaattattccagaaattcaattgctcatcacataactcttttttaaattatcacattttaattggattaataagactttataaataataattaatttaaatgattattaaggtcttcaaatggttttttatgaattaataaattggaacaaaataaattgaatgtctattgttttccacgtaaatatttagattataatgaaagtgcgaaaatcacgctaacgaattgataagaaga

SEQ ID NO: 38387 - DNA, 771 bp, Heterodera glycines
gaatgatatcaagattataaaatttaatttatttttggtgaagttatgaataatttctgtcaaaaattttccatttgatggttttttgactaacgtcataacaccgtcctgtcttgctggtccatctctgaaaccttgggccgggttttttcgaaattccgtgttctatttttacaaaatgttcattgaattgcaattttgcatttaatttaggccactgtctctgccagcagatcaaagcgacgaaaaagtgttgttctcgactcccgggccgagtgatcagcggaatgagtgatcacttgagaaatgaccgatcattttttgtgttttttatgctgaatgaactgtgttgattgatgttattaaagaatgtaggcattgatcaaataaggaaaaagctatggcctatgaaactgagggtagtcactgatgattgaacgcctaaaatgcattaaagctagggcaaatttccaaaaatttgctacacctccttgctggtattcggcaagccctctaatgatgtaagggagaatatatttttgaaaaatctttcaagagtttgagaatttgtgttagagcgaaaaaaatcccgactcaatactgaaatcccggttccagactcttgtaattattacaaaaaaatttttttgcctacccggcaccaccccggccaccaaatgcatgcgctgctcgatgagcatgcgcttcagcgtacgccgtccgactccgttggcacctaacagcacaatgcagcggcgcccgaacgggctg

SEQ ID NO: 38388 - DNA, 1221 bp, Heterodera glycines
  unsure (1)..(1221): unsure at all n locations
catttatttgttgctcaaaggctatgtatatgttggaagaaaggaggccaaaaatagtatctcntgtgaacaaattttttgaattgtgaaagtttttggtgcttttgtggatttttgagaataattcatatttaattatttttaaaatatagaaaaaatgaaaatgccaaatgtctcacaattattttgtgttttaattgttttttcaacatttattgaaaagtcaattggtgcccccaaaaaaggaactgcttctccactagaaaaagcagagcaaaaagacgacgaaccaaaattgggaaaagaagacaaaaaattggtgaacaacaaaaaagaattgctaaaaaaagaggtgaattttaaaaatatattttaattgaaattgaaatttaattttaatatttttgattgaaaaattgcaaatgcaaatggaccaacagttgaacacaattttggaagaaaaaattcctacttttatacttgaagtgaatgaaattgcccaaatgattgacaatgaacaaaagccattggaacgcaaatttattcaacaattgatagacaaaatgcgaccattgtacggtaagtgaaggaaaaagtactgtaattttaaataaaaataaaatattaaaaaagtagttgatgcgaagaaggaccatcttcacttgtggtccaaagtgcgcattttaaagcatgacaaacagataaaagatgacgtgcccaccatggaagtgttggtaagaaagttttatgcagccaatttaaaaatacccaaacatagttaatcatttatcacaaatttttttagttcaaataattaaaaatctaaaaaattgaaaaagaaatcgattcgttttttggcaaagaaattaagtttttaattttctcatgatttattaacaataaacgaaatttaaaattttttctccaggctgtcaatcaccacagctattatttattaaatggttttcaagataaaccacccattttgaatttaaaaaagtcatttttttaaatatatggaatcacaaaaaattagagttgtacgggaccgggaattttgagaaaaaccgggaccggtacttttcgggttgaaaaaccgcgatctttttttgggaaaaccgaaaaaaaccgggacttttcccggtcccggtcaaaacaggtcaaaaccccaggacttaggtactcagttgtacgtttttttcagtaccaagtcccggtccc

SEQ ID NO: 38389 - DNA, 602 bp, Heterodera glycines
tcattaccgttacaattattgtttatcggctactaaatttacgggtttttcatttccgaaagttgaccggatatcaaaaggcaatttactgtaatgaatttttgttttatctgcaaaacattagtgaaaactgaaaaaaacagcaggaaaaatttacgatgaaaaactatcttttgaatattggttctcagccaacagagttaattgttgtttggggcaacacatttattcatcttttgttggtataaaccattgtatggaatctgtaatatatttaaaatttttttaaaatgtattgaagttttttaaaattaattttatactggcttttaccattatgattttaaggggtaaaatataaatttttaaataataattgacaatttttgtaaaagtttaaacatgtactaattttttgtatatttctttacttggtttcccaaaaatattttatcaaataaaatataaaacattttttttaattttttgtttttacaccttaatttactctaaaataattcgaatttcttaaaatggactcataaaatcccggaactttgaattttttaaaaataattaccgtaaatgcattttgaaactga

SEQ ID NO: 38390 - DNA, 883 bp, Heterodera glycines
tatccaagaaaaatgactatctcttattttgagaaattttatacgttacaaatgctctcgagcatgataggaagtgaggtgcgcaatcgccatttaatttcacagagaatttttaaatttatcttatatccaagaaaaatgactatctcttcttttgagaaattttatacgttacaaaagcgctcgagcgtgagagggagggcggtgcgcaatcgccatttaatttctcagagaatttttaaatttatcttatatccaagaaaaatgactatctcttattttgagaaattttatacgttacaaatgctctcgagcatgataggaagtgcggtgcgcaatcgccatttaatttcacagagaatttttaaatttatcttatatccaagaaaaatgactatctcttattttgagaaattttatacgttacaaaagcgctcgagcgtgagagggagggcggtgcgcaatcgccatttaatttcacagagaatttttaaatttatcttatatccaagaaaaatgactatctcttattttgagaaattttatacgttacaaaagcgctcgagcatgataggaagggcggtgcgcaatcgccatttaatttcacagagaatttttaaatttatcttatatccaagaaaaatgactatctcttattttgagaaattttatacgttacaaaagcgctcgagcgtgagagggagggcggtgcgcaatcgccatttaatttctcagagaatttttaaatttatcttatatccaagaaaaatgactatctcttattttgagaaattttatacgttacaaatgctctcgagcatgataggaagtgaggtgcgcaatcgccatttaatttcacagagaattttaaatttatcttata

SEQ ID NO: 38391 - DNA, 1025 bp, Heterodera glycines
gttgtttttccaaattatatatataaatagaaaaacttttaaattttatttcaggcatttataatttctcttcgttataaaaaaataaaattttacatttatttagcatgttacataaataattagactgataaaattcgtttatagattaattatggaatatttaaagattgatttacaggaaaattatatctaattgtactttctttatatatataatctcattattccatgctagctattgactcagtttgctgaatcgttcaatgttttttttaataaaattttatatagtgcaaacatcttggcaagatggtgttaatccattgtgattcattctaacggcgaaattgttatgcatattcacagaggctcagtgaactggttcttatactatgaattaatttacattttttcaaaatatattttaattcaaattttgaataatcgaattaattctttttttattactctggttgagaattatatttaaaagatttcaaaaacgaaaaaaaaatgaaaaagcactttttatataaattcctggcgcagcgtttttatgtacacaaaaaaattaactttcaacattaatcaaaaataatgataattttgaattttaatattcgcagtgtatttcaatataaaaattctatattaattatgtatcaattaaaattaataaaaacattatttattgtattatttagtttataaattatattgtatttacataaataaatattgtcattaattgtaaaatcagactattttttatttaatatttaaaagtgtttaattaaaattctaatgaacttacatatttacattttcaattgatttttggttacattgaatttttatttatgtatactttcgccatttaatattttaattgcttattttttaatatattatttcttctgtcctggtaatggttatgttagagacaatagataaatttaactataaataaattaattttattatgtgtaagtctcattacgatgaatcattattttattgat

SEQ ID NO: 38392 - DNA, 1274 bp, Heterodera glycines
  unsure (1)..(1274): unsure at all n locations
aaaaatgaaataattgttggcaaaaccaaaggcatggaaagaaattnttaaaaaaattttgtctcgaattaaaaaaaaatgccgcataaaaaaaataatattgcaaaatttgtcttttttaatgagtgcatttatgtagcgagaaaagcgtttggtttattaataatctatcattattttctgcaatttttacttttttggtttaatntaatattcattttggttaatgaattaaattgttttataaattacaggcttaacttaaatacacaaagatgattttgtttgcatttccccttatttttatttggtcccaaaacaatttttaaaacaaaaatatttttgcatttaaaaattactaattaaactttgggcaatttaatttaatgcacacagaggcgaaaaaggagagtaaatacataaatgcacaaaatcaaaacattcattcattttccgcgtttattcgtcggcgcggagataagcgccaaaaaggcgaattcatttcgtttcatttggtcattcattcgtccattttatattccattccctccgcccttatcgcagataattttggtgataattaaacctaaatttttatcaaaaaaatatattattttggagattaatttttgagaaatttctcatttcttagagctctattgaaaaaaaaatcttcaattctaagggggtgtattttctaaaaaaattttcgggtcatttcttagggtgcattttcccgattttattgcatttttaatggatttttcggaaaaacgccaaaaataacaccaaaatggaaaaatgccaaaaaggcatttaggcacgataatcccgaaaaaggcaaaataaaaatcaacgtagaagcctcaattcaagtggaaccgttgacactagaccaacaaatgaagatgcactaataatattttttattaatattttaatttatttttaagatttataaaaaataaattattatttttttaataaacttaataatttaaaagcaaataattaattaaaaacaaaaaagaaatttaaaaatgtggtatatcagaaagccaacactttgtatatcatgcgaaattgtttcgatttttgatttgaattttttaaggtatgaaaaaccgttcaaaaataggtcatacaaaaaaagtgcgatttttggttagtttttcgaacagttctaaacatttaggaaaacccgtgtttttcccttatagcacttcaaattatgcgtcgatagacccaactgtcgccccgtaacactctctaaa

SEQ ID NO: 38393 - DNA, 1244 bp, Heterodera glycines
gagcaaaagcgcattgaagagggacgaaaagcattgggaggagaagaaggaagcgacggggagcagaagggaggaggaggaggggacaaaaaggaagagcaatgccaagaggagaagcaaaatggagggcaaggagaaggaaaagcggtgatgccgaagagagcagtggcagcgagtcaaaattgaacaacaaacgatcaatcattctgcctttctttgttcatttgatcacctgtcaatcattgtcgtcaaccattctgatcagtaatatatacaataagtgctcgttttttgtttgtatattttcaaatagatttgttttatttgttagaaaatcgtaaacaaaattttaaaaagttggtttttgtgtgtattacacccgtacaaagcttgttttcgtatttagttggtgctcgggaatgcaaaattccagtcctgattcaaaaaagaacgaaaagtctgaatgttcttggtcgagaattgtgccgaactgtctctttacttaggattttcttggaaaagcccccatcccatttccaaccggcataaaacgggcagaccaatagacgccattgaaatggtgccattgagccgagactcatttggcccggactgaaacaagagatttctctggtagttcccgaacaccatcccaaatgtaagcgacttggcttcatttttatgccaactctttctgtcgatcacttttcccctcgccgcttctgtccccccgcctttttttgttagcatcgtccgcaccgtttttggcataacaatttgccaacgagtccctcgcatagctcctcccggttcaaatgcctgtcatggcacaacgctcgactccgatcggcacattctgctgttctctggtgctgatcgacgacgaagcggccgcccgcttctcctcctcccccgccttcgtccactgtcatcggtggcatttgatgggcggacgatggcgccgtcgtcgtcgaagtcgccggaggggtgcaagtgccgcaggagaggggacaaatctcggtccggatcacctccgatcgggcacaatggtgcagcattggcatggaccagaaaatgcagcgccagttttggtcttcgcacatgccgtcctcgtcatccgcggaatcggacggtttggcaccatcatcaacgatctgatgaggatgccaattaaagggacagataaattaaaagaattttatttttacaccgttctttgggcagagaaaaagcaacaaaatggt

SEQ ID NO: 38394 - DNA, 746 bp, Heterodera glycines
ccgcacctcagagaagatcagcatcagattcatgccgacaaacaggcgcggctgctgcgacaggtcgcgcacgcccgcgtcgcccaccacgccgatggcatagccggcgcccaacccacacagaccgcacacgaggcctgcagcgaactggctgaacccgcggtcgatggtgtagccgggcccggccgcctccagccggccggaaattatcaccgccaccaccagcccgtagatggccacaatgccggccatgaccactgaatttggatttttgtataaggggggaagggagaatggaaaaacgctaaaaaaaattgatttcccaaccgccggccaaaaaaaaacagaaaatttttttttgacaaattgtaattttcaaaaatttagtcagtttatcgggttgtgtcagattcgttatcagcgacaccgaaagcccccgggaagacttttcaagaatatgacaaaaaaacaattttttttacagccgataaggtctccccttttgttcaaaacaattttcaatatgtttttttttgaatttctttgaaaaatgtcaaatgaaatttccatccttcgctgcaggcatctcattaaaaaaaaattttaaaaaattaaagaaatgccattttgaaaaaacccataaaatttaaaaaaaaattttttttaattttctgtcttaccgggaatgatcgccttcatcacgaggtcaggcctagcgacagccatacaagcaatgccagtccctg

SEQ ID NO: 38395 - DNA, 859 bp, Heterodera glycines
agtgaaattacagtgcaacaaattgggactcatcacgaaatgaacagcagcagttgtgattgctttggacagtgaattcattgatcgctttttcgtcaacaacaataaattcatcaaagatttccattgaatgtgatttaagttctgttgaaaaataatgaatttatttattttacatattcttagataaaaaaaatgtgcattttgaaaaaagcctggacctggatttcatggacaaagaaaatccaggaaaattccaggtccaggaaaaattcatgttgccgaaaaatgtcttggacctggacctggatccaggaaaaatccaggcctgaaaagtccaggccgagctttaatgaaaattaaaggcaatggacttacatatacataaacgaattttatgaattctattttttcgcttaagggaattaccggactttcaagctttaaatttttgttgtcaaaagataatacaaatttaaaagaattttttttttgtaaaaaaatgggaaaaatctttataaatgaggaaaagatttttataaaaatgcaaatgcaaccactgcatatgattagagttgagcggtaatcggtaattgcaaaaaaaccggtaccggtactgaccggtactgcaaaaaccggtaccggtcccggtaccaactttttccaccggtaccggtaccggtaccggtaaaaaccggtaattttagaacataaaaatttttggactaaattttccaaatacaacatttttattcagttttcgcgcgagtgtctgttttttatcattagaattgttcagaagtatatgtatattcaggttgaccaaagttttttccaattcaggacatagaacactaaa

SEQ ID NO: 38396 - DNA, 1028 bp, Heterodera glycines
agggagtggaaacatgatttcaaaatttcaatttttctagtctatctactcaaaacggttcagaattcgataaaaataacattcacggtgcgaaaaatggggtttgcaaagtttattgggggaaaaaagactttacaaaataatacccctgggagaagggagtgggaaacatgatttcaaaattttcaattttttatagtctaatctactcaaaacggttcagaattcaataaaaataacattcacggtgcgaaaaatggggtttgacaagtttattggggaaaaaaagactttacaaaataatacccctgggagaagggagtgggaaacatgatttcaaaattttcaattttttctagtctaatctactcaaaccggttcagaattcaataaaaataacattcacggtgcgaaaaatggggtttgaaaagtttattttgaaaaaaagactttacaaaataatacccctgggagaagggagtgggaaacatgatttcaaaattttcaattttttctagtctaatctactcaaaacggttcagaattcaataaaaataacattcacggtgcgaaaaatggggtttgaaaagtttattggggaaaaaaagactttacaaaataatacccctgggagaagggagtgggaaacatgatttcaaaattttcaattttttctagtctaatctactcaaaacggttcagaattcaataaaaataacattcacggtgcgaaaaatggggtttgaaaagtttattggggaaaaaaagactttacaaaataatacccctgggagaagggagtgggaaacatgatttcaaaattttcaattttttctagtctaatctactcaaaccggttcagaattcaataaaaataacattcacggtgcgaaaaatggggtttgaaaagtttatttgaaaaaaagactttacaaaataatacccctgggagaagggagtgggaaacatgattttcaaattttcattttttctagtctatctactcaaaacgttcagaatttcataaa

SEQ ID NO: 38397 - DNA, 661 bp, Heterodera glycines
  unsure (1)..(661): unsure at all n locations
ttttttttttttttttttttttggaaaaaaaaaaaaaaaatttttttttttttttttttttttttttttttttcccccccccccccccctttttttttttttttttttttttttttttaaaaaaaaaaaaaaaccccccccccccccccacaaaattttttttttttttttttttcccccccccccgcctgccgggggggggggggggatttttttattataaaaaaaaaaaaaaaaataaaatttttttttttttttgttgtttttttgtggaaaaaaaaacaaaaaatatattttttttttttaaaaaaaaaaaaaaaaaagggggtttttttttttttttttttctttttttttttattaattccccannangaagacaaaaagaagagggaagaaggggaagttgttattattttttttttttttttttttcttttcccctcccccccccgcgcccgggcggggagaaaaaataataaaataaaattattaattatattagggggggggggggggggggggggtggggggggggggggggggacaaaaaaaaaaaaaaaaaaaaaaaggagaaaggggggggaggccgggcccccccccccccccccccccccccccccctcccttttttttttttttttttttttttttttttttt

SEQ ID NO: 38398 - DNA, 831 bp, Heterodera glycines
ttcacaacgccatttacaccgtaattcaggcagaattaaagaattactgatattatgttgggtcgagaaaatttcattgttttaaattgagggaggaattgttactttgccatttcagctgaagtcttccggtctgctcattgccgaactcgccgtgagcattaaagcggcgtgccgaattgatctgagaaattatcccaacgacaatcaggtcaaaattgcttttaaatgtttgaaattcaacctaattcagacttgtttcattttcctattcactccgacttattcggcatcgaggtgactgccacaaatgccaatgcttttccatttttacttttagtgtcactttttcgacattttcggcgatgctttccaaagagtcgctccaaggctcaattgggttcagtgaacaaagtgtggatgaggacagatcaaacattttgaacacaacaattgcaggtaaagctgcatttatgatacattttaaaatattttatattaaatttaaatttcaggaggcttcaaattggtcggaatgaatgtgcagcgtttttacgcttatggagagtttttcacagtcaatgagagtgtgtaagtaaaaaaacatgccaaattgcgaattaattatacactaatccttattataatttacaaaagtttcttttttagggctgcacttttctcgagcatcgccaacaccgttctgcgttatgaaatatgcctacagcgagaagtcggcggagtttacgccgccacagtgtccattcccatcttttgcatcacagcgtaaaaaacaaacaaacgaaagctaattagcataattaatcattg

SEQ ID NO: 38399 - DNA, 1177 bp, Heterodera glycines
  unsure (1)..(1177): unsure at all n locations
agaaggggggcggggtggtaaaatttggcgtctgttngtcgggagggttagctcgcgtagaactcggtctgctcactccttgtaaattcaggtcaaaatgagttntagacaaaagtggtccttcctataagtctaccagtcacacatttcgtttggaattcgaatgttagccgcccaaatttggagataaactgaaattcagagtgtgcccttccttctgtttcaattcctgagataggtaacactggtacaaaaatgacgaaattcacaaataaggacagaactcgttcaaaaaatcacaaataacaagccggacaatcaaatctttcctttgaaaaagtcattgcttgccttttattggaaaaattggccttttttggtctgttaacaaatcagttttccgccggaccccctcccctcgcccgttcaccagaagttttatggaaaaactgcacccgcaaaaaattgttaaaaatcttattgtttgatcccgatgcactgaaatttacgatttgcttatttcctccccaaaaatcgttaaattcgacaatcggaggcgaaaaaaataatacattattgatcgaataattttaaaaataactaatttggaggcagtttcgcaaaacaaaatctgttctgattttgaaaaattgtcgatccgagccctgggtttaacgactttttaaaattttcatttttttcgaaaatggggggaacaaggtaaaacaattcagggggatgacaaaaaggataagtaacgtatgtccaacggtttctgtgatgacccgctaataggggacgaatgtttaaacgccaaaaaactttatgccatccaaatgtctacgtcaaacagagagagggagggagggagaggaccaaatttcagttaataaattgacacacgcttaatgaccatcaattcaatttatttcggaacacagatggaaataaagtgataatacacagcaaatgatatatgcatacaaatgtacaatacatcaataaatacagatcacgattatgggacatcttctttagctttgcatcttctgacaggtcgctcgctcttcaggtttcgtccatccatccgccggtcgttgttgcatcttctcacatgtaggcgctctgatccggggacttctcctgctgcaaaaacaaaagattagtgatgcttttg

SEQ ID NO: 38400 - DNA, 151 bp, Heterodera glycines
cgctcgagaagcgagtcctcgtgatgccggatgggcacagtctcgaactcgtgggccgaggacacaatctccagtagtcccttgagcttggtcgtctccttgatcgacgccgagaaggtctcgacggtgacataggagatgtagtagaacg

SEQ ID NO: 38401 - DNA, 931 bp, Heterodera glycines
tcctacgctttctatttctccttctccctcactctctctctccctctctccattcttcttcctttctctcttttccccctctttttgcctattattcgccttttcgctttcgttttgatcaaatatattttttcattgttcgcttttcttatttgtcctccacttcttccgtcttctttcttttcccttcccttccctttcttttcttttccttttctgtcctttcctttgcattttaatttttgagggtgcgcaacgcacaaatgggctgatgatcaatcattagcgcctcaataccattcttaaaaaccagcagtatcagcagtcccttttgggccattcccccccccccacaaatcagcacagtcaattcatcaattctttcgttccttcgttcatttccattctttgctgctctctttttctatcatttctcaatgctgcgcatgctcaacttttcgtttgcacagtattaaatcgaatgaaagaataatgaatttttcctttttatattctcccgccgatcaaatgggcccggaaattgtcactcgcgcacaacacaacaacaattgagtggtgtgtattgtgtttggtgaatgagcaatggcttaagaaagcacacattgtctgtgcaagatgagaaaggatgggagacggcgaaactttttattctcctcaataaaatggcataatttatttaccaacgaaaaagtaataataataagaaaatttcccatagggacggacaatcgtcattttctcacattcttgattttacattttgattcccattgtgctgagctgatgaaaagagaatcgaattgctttaacgaactgctgatatgtgcacacaaacgatcgttgggatgggagaagttatgaatcctagaaagcagcagctaactgaacaaaacgagccctacccaattct

SEQ ID NO: 38402 - DNA, 564 bp, Heterodera glycines
ccgccccccgcaccctctgaaccgcctctccccctcccgcccggcccattcattccctccctcattttcacgtgtgttcagcctcatcagcgatgtgtctaaatggaaactatccacacatacacacaacacatacatattcattggacgatttgcggtccaagagaatgggcgcgaattgtcggcattaaacaaaagccgcccttaatttattaacagtttcgcattttgttccccacaaaagtgtcgctgctcgagaccgagaattcccgagacttttcgggacgaactctcgaggagaaaaagcacaactaattaggcttttaccaaactcataaactaattgtgatcattttgtgcttaatttgttttcttttagttattctctaactttcgtcgtcctttcaccttttttctgtcctttggccttcgtccccccttttcggtgctttgtccaaattgccatcggcgcactctttcgatggcggccacttcgtttacggagtgtgttttccgtcaaataaacattcaaccgatagattggcttcaatttcctaatctccc

SEQ ID NO: 38403 - DNA, 855 bp, Heterodera glycines
aaatcctcctctgcatcttcaatttgagctctcgctactcggcgtctgcatccggttgttgatgcggctgttgaacaggttgaacattgccgggtggttggaagggacggtcagagttttcacttggtgacatttttcgttaatgcttaataaaaatgaatgacgaataagaatgagtcgctttgagaatgctccgccagcatgagtcattatcgatattgtcatactcaagagagagttcatgtctgttttctctaacattacatcattttgctgcaataaatattggtggttgccggcggatatttttcatttcttccattaccgtctcggcttcgctaggcgagaggtgaccgtgacttttaagccacctaattaaaacgaaccaaataagtaaaaacacaggaaatgcaagaagataatacgaaaaaagtagtacatgcaaaagggtttcattaggctcttctggggaattcaaaatttgtatggcgggtttcgttgtgttggtgttattcattttaacattacgtataatatttttatttatttataatttacccaagctttgagtcggagacaatgtgtcgattataatcaatcataatcatttggtcaaattctccgagaacaatcatttccactcctccctttggaattggtgaatcaaatgtggccctaatactggttgtaccgcttcttaacagctcaaatccacagctatcgtctaaggttgaattcaaagggatgacaaaatgcctatccatttttgaattgatccattgaaacgtcaaatgaacgttctgaattagccatgcccaacgcttcatacatctccacgaatgctcttacatagta

SEQ ID NO: 38404 - DNA, 1041 bp, Heterodera glycines
gtcgtcgttcttcttcgaccgcatccaccgccacaacctgagaatgaattagggccgagacggtgcccaaaagtgagtgaagctgcccttctttggggtcggtacgtttcggcttttaccgtaattatcgcaaaaaccaaaaataatgataaaaaatgccttttatcagagactcaaatataatgtacagacaaactatactcatacatcgtaaggtttttgctcatttttcaccaaaaaggctgaggaggaaccacaaaatctgaatgacgtccagaaacagaataatcgacgcataaacgtattcttccgaggaaatttcgtaggtacgaccgcccatgaccaactaaaaaataaataaataaatggttggctattcatcgcttcaatttttccatcttataaaattacctgaatgtgaatggcaaaccaaatcatgatcagaattgtgccaattgcggcgaaaataacttgcagaatgtgcacattggtgaaaaacgcagcaatggccacacccaaaccgaacaacgccaaacacaaggtggcgattgtcataatgcccattatgctgtattaaatgaacacggattaattagcagtagaaggcacttgctcttttggtgtgtattgcccccccccgccataagtcggtcttttccccatcaaaaaattcttacaatttgcattacaaaaatagttttgttttagtacattttaaatgcctactttctcacgggaaacccacttagtcaagtcctttttgatgattgtggcaaaaagggccacgccgaagcacgaaagggcagtgatggtgaacaccataaacacggaatggagggcgtactgagcagcgagcatcatggtcacgaagccaatggaaaaagtctggagatgaaaaatgagtaattcgggataaatccaatccaatggagtcaaaaagaagcatattggcgtaactttcaaagaggagtcttttgaaaaaattttgcactttttttggtctattttttttacacataatgataaatgcccagaggtttt

SEQ ID NO: 38405 - DNA, 986 bp, Heterodera glycines
  unsure (1)..(986): unsure at all n locations
ttcaaattgaaaagaagactcgcctcttntccgtctccgtcccccaccaaaaaataaacatccgcgtcttctcccgtgctcaacaaatgcttcatccgataaaccactgattgtgacattataaacaattgtgaaattcgtaatttatctattttatgcaataaaataattcgaattatgaaattggaacaagccaaaataacatttgaattgcctttgagggactaaaatcacaaattgccaaatttatgaattctcttttttaaataatatttaaaagggaacttattgaacaaaaaagtaattgcagaagagttaaatgaagaaagatggcatggttcacttatatttatgatggggtggcgagggcataaaataataattaagggcaaaacgatgacccaaaaaataataatttaatctccattttatatataataaaaaaataatatcaaaatgtgcaacagatagagaattttgtacaagattatggggtgcgtctcttccacccaaaaatatttatccaggcagaaatttctattctatgatttaactctgtacttatttttacaaaaaacctgacaaacttggttatttattgtggatttaaatttcaaatttataaatttttattatatgctaaaacaaaattacatttttatatacagaaatttttttccaaaagttcttataaaaatttaaaaatttttcgattttaagggtgtatgtttaaaaaaattccataaagtcgatctttaggggtgtatttttcgcttttatcgcatttttcttatgaaaatttccaaaaaatgaccaaaatatgctctcaaaacccaaaaatggccaaatatgcatttattctcgaaaacccccaaaatatgcttttatatgcactaaaaaccttcacctaattaaaaaattttaacgcagaaatgctatttttgagcccctttctttatagcatatgagcagaaaaaatatgcaaa

SEQ ID NO: 38406 - DNA, 610 bp, Heterodera glycines
cttgaccattcttccattcttgccttcgatctccggcgggtggcgacgagtcctttatttctttttcatttcgcttaaaaatgcttgtcctctctaatctatgaattatttacctatatgtagttttcattaccattttcacaaagtatttgtatcaaatctaaaattctcaggacaactagtcttttttgtaaattatttcttttataaatttctcagattattaaatgaaaaaataaattatgaaattccataatattaaaattctgctaatcttagggatatttttttcaaaatccccccccccccccctcgcttcaaaggcacagttgctcagccccgcaatgaaattgatgccctcgggcgactggcggtgtcttctcgcgcaaaggccaaagatcacagcacaaattatttgtccgttttgttagacgtcagacgcacaaaaagcagtgcaaaaatttgggttttctgctcccatttgtgacgtttaattcaaaaattgggatccatttttttattttccatttttagatatcaaatttgtacaaaaactttcacaaaatcataatatccattgatgaaaaagcataagtaaattattatttct

SEQ ID NO: 38407 - DNA, 1274 bp, Heterodera glycines
taattgaagacggtttggctcccagtgttctattcacacctttgttaatgtttgttttattttgtctattacgtcgacccctcgaagagtgtctttctttgtaaaatatctgtacaagcgctcctttattgtccgatttgccctttcaacgactccggcgtgcagatcaggactatacattacatttttgatgatgaatttttcctcaaaatattttttcatttttcctgcttggaattcaagcccactgtcactatacattttcatcgggataattttagacttttcgaacacccgatcaaaagcctcgatcatgtcctcactcttctttgacttggccggtgcactgaagatcattcgactcagcacgtcgatgcagaccaataaatatttataaccgtcgttatgctttttcaactggtcaaatatgcacaaatcgcactgccaatcggtatggaagccacttggtatcgtctttagtctcgggaatcttttcctgatgggcttgtgaatcgtgtatgttttctgcttttctaggaatttattaacgtcatcggtcgtaattttcgggtcaatctttttggccgcatttaaaattttttgaattccagcaaaacttgccggagattttaaattaaaataaattttcgataaaattttctctacagtcttgcccatattagtggtttgaagggtttcttcactcgcactatgccgggtgtttttatagattttattgcctttttccttccacgtccccacatgacctttgatttatcaaccatgtcttttactgttggatccttcagtaaccgatctttgagaaattttgcaccgcgcggcgtttcatctttcttccctgcgagatacaacaaaacatctctataattactgttttcaatcggcaaattcatgttcgactgtacctttccggccgccgtaattttaaataaatctttgttttccttcacgtacctaaaaagaccgtttaaaagggtcgggtgtataatagttttgatcggaacgggtgttttgagtgtggatgttgtttggggttccggacttaactcctcaagtgtatcattatctgattcaggatcaggagtttgctctttaagtcttttcctaggaataattattttccgtggttcttcggtctcctgtggtttggattggttattgaggcccagatatggtgcaacatttggacctggtacatgattctcaatcactaccttctgtggtctattttcaagtatcccctttaccgtacg

SEQ ID NO: 38408 - DNA, 786 bp, Heterodera glycines
tgatctctctctctctctattttttgaatttttgacaaaatttatgaatcaatattctgataggttatgtaaatttagttgattttttgcaatttatgctttaatttttccattttagtattacccttggaggaatttacgaaataacttatgtatcatccaaataacctacacaagcaacgcaaattcaatcagtacacaaaataccgtcgtatacaattcataagaatagttgagcacattaatcatctcattgtcggttgtaagttgaaaatgttggatggccaaaagtggcacggtgccaaaacaatgaaaaagtggcacagaaacactggtgccaattgacgagcagttcgaatattttcattcagctgaaaacagggctttcgttatattcaaaaaggaaaagcgattcttaattggtaaggatttcaatttatgtaaatacatatttttttccttgattctccatggtttaaattgtaggaaaaaacactttctttttgtgtttgcgacaaaaatcgggacttttatttacatatttttaatatttcaggattttctacatattttggactttttcttaatagttgagcacattaatcatctcattgtcggttgtaagttgaaaatgttggatggccaaaagtggcacggtgccaaaacaatgaaaaagtggcacagaaacactggtgccaattgacgagcagttcgaatattttcattcagctgaaaacagggctttcgttatattcaaaaaggaaaagcgattcttaattggtaagg

SEQ ID NO: 38409 - DNA, 970 bp, Heterodera glycines
cgagatagaaaattgtcctaaaaagagataaccatttttctgagaattaattcacaatttccgcagctcttacggtaatggaaaaaattttgaagaggctctccggaacggattagcatcggggttacgagatagaaaattgtcctaaaaagagatagccatttttctgagaattaattcacaatttctgcagctcttagggtaatggaaaaaattttgaagaggctctccggaacggattagcatcggggttacgagatagaaaattgtcctaaaaagagataaccatttttctgagaattaattcacaatttccgcagctcttagggtaatggaaaaaattttgaagaggctctccggaacggattagcatcggggttacgagaaagaaaattgtcctaaaaagagatagccatttttctgagaattaattcacaatttctgcagctcttagggtaatggaaaaaattttgaagaggctctccggaacggattagcatcggggttacgagatagaaaattgtcctaaaaagagatagccatttttctgagaattaattcacaatttctgcagctcttagggtaatggaaaaaattttgaagaggctctccggaacggattagcatcggggttacgagatagaaaattgtcctaaaaagagatagccatttttctgagaattaattcacaatttctgcagctcttagggtaatggaaaaaattttgaagaggctctccggaacggattagcatcggggttacgagatagaaaattgtcctaaaaagagatagccatttttctgagaattaattcacaatttctgcagctcttagggtaatggaaaaaaattttgaagaggctctccggaacggattagcatcggggttacgagatagaaaattgtcctaaaaagagatagccatttttctgagaataattcacaatttctgcagctcttagggtaatgg

SEQ ID NO: 38410 - DNA, 1014 bp, Heterodera glycines
cggtaatggaaaaaattttgaagaggctctccggaacggattagcatcggggttacgagatagaaaattgtcctaaaaagagatagccatttttctgagaattaattcacaatttccgcagctcttagggtaatggaaaaaattttgaagaggctctccggaacggattagcatcggggttacgagatagaaaattgtcctaaaaagagatagccatttttctgagaattaattcacaatttccgcagctcttacggtaatggaaaaaattttgaagaggctctccggaacggattagcatcggggttacgagatagaaaattgtcctaaaaagagatagccatttttctgagaattaattcacaatttccgcagctcttagggtaatggaaaaaattttgaagaggctctccggaacggattagcatcggggttacgagatagaaaattgtcctaaaaagagatagccatttttctgagaattaattcacaatttccgcagctcttagggtaatggaaaaaattttgaagaggctctccggaacggattagcatcggggttacgagatagaaaattgtcctaaaaagagatagccatttttctgagaattaattcacaatttccgcagctcttacggtaatggaaaaaattttgaagaggctctccggaacggattagcatcggggttacgagatagaaaattgtcctaaaaagagatagccatttttctgagaattaattcacaatttccgcagctcttagggtaatggaaaaaattttgaagaggctctccggaacggattagcatcggggttacgagatagaaaattgtcctaaaaagagatagccatttttctgagaattaattcacaatttccgcagctcttacggtaatggaaaaaattttgaagaggctctccggaacggattagcatcggggttacgagatagaaaattgtcctaaaaagagatagccattttttctgagaataaattcacaatttccgcagctc

SEQ ID NO: 38411 - DNA, 761 bp, Heterodera glycines
tttggtctcttcataaattccgccaagggatgggaaaaccttaatggaacacataaatataaactcataatgactcagtttcaaccaaattaaaatatttaatgataccatcattcaatagctctggattttctctatctgctgggtattaattttccaaaatttaaaaaaaaagtaaaaaagaagttgtgagtactcattaaaatgtttgaaattttatagagaaaagccctgagctatttaatgataccatgaaatattttaattggttaaaattgagcaaattatgaatttttatgtgttgttttctaccccttggcggaatttaagaagcgaatcagcataatatttaagtgatttattttataaatctttaagcatttagaaaataataatatggcaaaatgaacataatgatgctcttgttaataacatagatcagacaaattgatgaaaattgatgaatttttgtttttttgttttttgggtgggattcactcgctgtaacagcagcgaaatacgcataaaaatattttttgaattaggtaatttgaaaaaatgagtgttgatgctttattttgggattacattttgaaaatataaaaaaaatatcatagaaatacagaaattaatgctaagagatgaaaaacatcagaagtgtaaaaccataaaccaattagatccataaattaccatcttcttgaggatcagcattgtctaagaatatttttgaaaagagttaaatttaaaaaaatatattt

SEQ ID NO: 38412 - DNA, 1034 bp, Heterodera glycines
  unsure (1)..(1034): unsure at all n locations
caacattttaaatcaaatcctaaataaaaattcgtgaaaatttcttcgcctcttatttgtgcaaaatttcgaaaaagtaatntactattaaaattaaaaaattcagaagcaaattcaagaattttttttatttttaaatgcattttttaccacatgaattatgattaaatttttgcgtttcgaattcattttggaattaagaaaaataaaaattgataatcatttgatcatttttagcgcactttaagcaccgccgttaggcagcgcagttccaaaatttattccatgccacagatattatgggcaggacacgccaagtacctcaaacttgggtaattaaaccgaagaaagaagtgcagtggggaagaatgacgcccaaaatgaaggaaatattcgatgctgtgcgaactctttgtgacccctctctgactctgccaatgcagcagtttaccatttttacaactatttttctctcactcatcgtctgctcgtctctcctttattataagctatttttccaaagccaacaacgcccttttctccctcttttctgttagtcatttctcattggtgttgacgatccaacattcagtgtacaaatttgttaaacctctcaacattttaaatcaaaatcctaataaaaatttcgttgaatttcttcgcctcttatttgtgcaaaatttcgaaaaagtaatttactatttaaaattaaaaaattcagaagcaaattcaagaattttttttatttttaaatgcattttttaccacatgaattatgattaaatttttgcgtttcgaattcattttggaattaagaaaaataaaaattgataatcatttgatcatttttagcgcactttaagcaccgccgttaggcagcgcagttccaaaatttattccatgccacagatattatgggcaggacacgccaagtacctcaaacttgggcaattaaaccgaagaaagaagtgcagtggggaagaatgacgcaagaaaatgaaggaaatattcgatgctgtgcgaactctttgtga

SEQ ID NO: 38413 - DNA, 1114 bp, Heterodera glycines
  unsure (1)..(1114): unsure at all n locations
aagagcttncgtctttatttcgcactgatgtgaataaaaatttacggatgtggtcagtttctggtgagtgtgaaagtgccgaaaatgggcggaaggcgaagaaaaacggaaaaagacgccgaaagtgaactcgtcaagcagcaggcggaggaggtaaatgggtgtgagcagaaaaaagaaaagcgcaacaacggcaccggcaccgaaccaaagggccttaggaaaacaaaaataaagtgcagaaaacgaatgaaaatttaaaaaatcccacaaccatataaaaacggtaaaaaaataattgagttgccaattcggaccaaaaatcgtgatctgcgaaggccgagaatgcatcggtcaacggccttgagcagagcaagagttggacgaggatgagattcgaaattggacagatagaaacgaacctaaaattaatcaatcatacaatgaatttgattcttttttttactaaaatttaaattaaaaagataaaaattacttggaaaggtgtgacagaaattcgatgcctttccaaaaaattgagataactaaaagcgaaatttaaaaatggaaaaagtaacataaaaaatcacattttttaccgttgtgaattcaaatagcgcaaataaaagtcggagaaaagaacgaaaatccacgcaaacagaaccaaactcagcaaagtgaaaaaggacattcgcacggcgacatttccaaagattaaacaaaatctgaaggcatttgcttaattagtaattgatgaatgatcgaggcctcaaacttcaattattgggctattctcgtgaaaaaatacctaggtaattcagcattcccaactttcaaactccgctttccgaaacgcgaagcgaaacaaaaacttttctttacatttgaaatttaaattaaggattatatttcgtcaaattagcattttattgattaatttaaatgatcaataacaattcacgaacgaaccttgggaaattcaagtgcctattctgggcgccagcgcccgataaaagttaatctcaaaatttacagaattagcaaatccattcaaattccgttcctttcactagaagtacatgttggacttgttttcttattccaaaccattctt

SEQ ID NO: 38414 - DNA, 60 bp, Heterodera glycines
tatccgttaagctatgaccacgtgcatcgtcgcggggctttgttctgtcggacgggcagt

SEQ ID NO: 38415 - DNA, 924 bp, Heterodera glycines
  unsure (1)..(924): unsure at all n locations
tgcaggtcgaaatttnttttaagtagaaaaagtaggtagggtagtctagcaaaacatttttcacctgggtttaataaatctaggaaaattagtaagcttttgtagtgttccgatacgtatctctgcaaaatttggtgagccgctgatcaattacaaattatttatggacgatcaaattttttgaaatttttattaattttgcaaaattaattcataaatttttttcagaaactgctctgaaacgtaccaaaatttatttacaagttaaataaggcacactgactcttatattatcaaaaagggatatgaataaatattttaaaaatttttaattcctttttaaacaggccaaaaagtttaggcttaactttttttcagaaagtgctctgaaacgcaccaaattttatttacatgttaacaaggtcctcttaggcttatattatgaataagggtgaagaataaaaatttttctaaattttttccttatattttggttatttcgttcaactttcggtggggtgcttggaaaagtggaatcatgcgtacccgtccgatctgacaagttaagcaacgctggctgactagtcaaaaggatgggggccgtgatgaaacgaaaccagcactgcttaccccgcggcacccggcacggacccccgaaggaatggatttaattaaattctctccttcggggatttttttccattaggtcgtctgttagcgtttgattgctctagtcaatttttcaaattttttgtgaaatatttgtcgtgctctgaaggggggggggggggggggggacgcgtataatgtgatgggacgacgtaaaatgttgttgggacgcgtaaagtgtcatgggacgcgtaaagtgtcatgggacgagtaaaatgccctgggactcgtaaaaccgactagaacccttttttt

SEQ ID NO: 38416 - DNA, 503 bp, Heterodera glycines
ggctgctgcgtgtcctatttcatggtcgcacactctttcgccggcgtcgtcgtcttcgtggatgcgtcgtcgtcttccccgaaggacagtcggggccgcggcgcatccaacggcttctgaccatgattgggaattttatttattttagttaattattcaaacaattatttaattttcctaatgagcagggaacggtaacttcccaccccccccccactccaatttaccctaacaattcgtccgcaagagcggcgagacacgcgcgtcgtgcgcacgattttttttgttggcgtgttgacgccatgcagctgtcgaacctgttgttgttgttctggggcaatcccaggtcgtcctcgtttcctgcctgaaacgcacgaaaaacatgtttttagcttggtttgaagcttgttggcaggatttctatatccatatttttccatatttcgcgacatgattgagaattttatatattttagttaattattcaaacaattatttaattt

SEQ ID NO: 38417 - DNA, 832 bp, Heterodera glycines
aaaaaatatgctataataattcttaatttataaataaggttcttagagagtatttctgaaagtaagatatttgaataaaataatttaaaaaaattatttattcactaaattcttatttttttttttaaaattaatcacagtgcttaaattagtaagtaaaattaatttactcgataaatttgcaaagtggtgacagaattcattgaggatgatcaaaaaggttgagtatggccatgctttgacctgcagttaaattggacaaacaattaaagtgaataaaatgattatacaataattaccatttctggaaaagttgaggccatcttcggcttttctgctctcctcttgaatttcacactgccattctgttgaagcattgacacatttttgccatcttaaaaattaaaaaaataaaaattaatttttaaaatattaaactttttaaaaatttatttaatctgcttacagtgttggttctcctcatttgctgaagacattattatgttataaatttttttttgttaattagccaatttgcgctttgataaaatgagaagttgttgaagcgaatatgaggtaattaattaatcacttaaaataaaagaattatttgtttgctctcaaatttgaaaaaaaactaatcatttaaagatttttatttgctctcaatcgaaaaaaattaattaaattgaaatcaaaacaaacaataaatcagcctggcccacaaatttttgtttactttttgtctcctatttttacgacattttttaattaaatgtttgcgctcaatttttgatggcgttaaatgacatatttcatgtgccgccgcccc

SEQ ID NO: 38418 - DNA, 891 bp, Heterodera glycines
  unsure (1)..(891): unsure at all n locations
tctcatcttccgcctatgagtcgggcacaatttgcaccccccaccccgcatcctgctcttcattggnactgttagtgctgtcccccttcaccgagtcggncaatgtttgcagctgtgcccgcctgtacttccagaaattgtgccgaatcgggtcaatcccctccaacacatccaaatactaaaacaatggtaatacatgaacaaaaaaaaaatgataagcagcaggaaaacggggagccaaacttaattccggtttaatttgaaaaaaaactagggatgtaagtgaaaatcggatatttttaggggaggaattttttgaattcaaaaatttttgataggtccgcaaaaatccatgttctagaaattgtttttatatgcattcgtattgttggtatttcaatgaatgaatatctctactatctactcaattctccactccaaaatgagtagattttatgtgtatttaaaattaatttaaaaaaaaattttttttttttttgcgattaacgcccttatggcacgaaaaataacaaaataataatttattaataaaattccaacttcgccacttttttgtgccatttccgtcaattgttgctcatttgcaaccgcattttcgcgcattttgtccgcaattttgtcgatgagaaattggaacagatgggacgagttgcacggcggatgacgagccaacagttcgtcacagcagtgcacaatttcgggacggtcagtgcccaacggttcattgatcagaatgctgaaaaaattttggcatagaccatttatgtacctatttagttttcaatttttttccattccatccgtttaaaaccaatttttcgtgtggcattttgtttttttggctctgaagccaccccccccccccaaaaa

SEQ ID NO: 38419 - DNA, 977 bp, Heterodera glycines
cctttgccatggaatttccacgaaaggacgcgaaatgcttcctttgggtccaaaatgcggcccttttgatccgcataatttatttcaatcttaaaacaaatatacattctttcgttgctacctcaaattaacaaatgccaccacaccttcggttcgtactccgctttctcggggaatggacgagttggccctgtccccgttgtgcccatacgttccaactttcgcatcgttttgtcctcaatgtcactaaagagtaaaatgtgctgaatatccgaatttgaaaaagggagcatagggaaaaagaacgagcgtatttctcctaattaactttcctttccacctcttagctcctcaaaaaatatccgttaattacaaaatttgaaatttcctcatgaagtactcttaaattgttcgggtgaaacgacctgctccaaaaaggagcataccaaaaaataaaacgcttcttcgaatagaaaacgcgagagaatccgttctaaacggggccagagacccctctccccgtctgatgccgaatattatttttccgaaattaagaaaacggattcgtaatccaagcatgactggcatcaattaaaacacttactatcgtccctgctcaactttggagaagcgtttgctctccaggtgcttcagtttgccttcctccagcttccgctcgcccgactccaaatagcccttttggccggccaatttcaacatcgctcccacgcccttcgtcacgtccttttcttcgcccaaaatgttcgtataagtggtcgattcctcttccccttcgtcctcttctgctttttttgaattgttttgtgacactttgttaccaatcagctcaccttcgtcactttcgctgaccgtcgatttgccattccccgtcgctattggccccaacccgtcaaagtcagtggcaatgtccatttcattgtcctggcaagaaagccagctaattgtaagtctcctcc

SEQ ID NO: 38420 - DNA, 974 bp, Heterodera glycines
  unsure (1)..(974): unsure at all n locations
gggatagagtataaatttaaaaattccctcaaaaataaaaggtctattgcgcaccgccctccctatcatgctcgagagcatttgtatgtgtataaaatttatcaaaaaaagagatagacatttttctgggatagagtataaatttaaaaattccctcaaaaataaaaggtctattgcgcaccgccctccctatcatgctcgagagcatttgtatgtgtataaaatttatcaaaaaaagagatagccatttttctgggataacctctaaatataaaaatcctctgtaaaataaaatggcgattgtgcacagccctccgtctcatacgcaagcgcttttgtgaggtataaaatttctcaaaaaaagagatagccatttttctgggatagagtataaatttaaaaattccctcaaaaataaaaggtctattgcgcaccgccctccctatcatgctcgagagcatttgtatgtgtataaaatttatcaaaaaaagagatagacatttttctgggatagagtataaatttaaaaattccctcaaaaataaaaggtctattgcgcaccgccctccctatcatgctcgagagcatttgtatgtgtataaaatttatcaaaaaaagagatagccatttttctgggataacctctaaatataaaaatcctctgtgaaataaaatggcgattgtgcacagccctccgtctcaaacgcaagcgcttttgtgaggtataaaatttctcaaaaaaagagatagacatttttctgggatagagtataaatttaaaaattccctcaaaaataaaaggtctattgcgcaccgccctccctatcatgctcgagagcatttgtatgtgtataaaatttctcaaaaaaagagatagccatttttctgggatagagtataaatttaaaaatcctctgtgaaaaanatggcgattgtgcacagccctccgtctcatactcaagcgcttttgtgag

SEQ ID NO: 38421 - DNA, 971 bp, Heterodera glycines
attcaaaaaagcaattattaaaagataaattgttttcccgacacagttaaactgcgggactgcttttgctacaacaaaaatgacaaactgatcacgccagaaatggttgcagaagtgttgtgtgaaggtaattcaatttataaaaattatttgccttttttaaattgcattgttttctaggtaattcaaaattttctttatttgctatttaagaaaattttaaaaaataggggggggagtattttttaaggagtaggaaaccttcctcaccgattttaaatatcattggcttttggtttctttaaaagctccagaaactttttgccttaatctttacaatatttgaatttgtggcttttaaaaattacgatttttatatttttggaattcccctgtagatttggatttgcctctcaacacttttttgcccgctattgcccagaacatccagcaacaaattgaggcccattctgaaccaatgccggacgatgtgcaggccaccgaccaacgcgcattgctcaagctgaacatccatgttggcaaccaatctctggtaatttacacaccgacggtattttcaattctgtccattgaaatgacttttcccatcccccacaggtggaccaattcgagtgggacatgagcaacccgaacaacagtcctgaacagtttgcacagaagctatgcgcagagttgggcttgggcggcgaatttgtcggtgccattgcctactcaataagaggtgggtctttttgtacatgaaaaggtacttatgcagtttgggggccaaatttcacacatttttaaatgccaataaatgtacttgtattatacattatctggatacaaaagttcggctccggattcgaattggccgaaattgatgtcatattcgcgatcatcgacctggaaacactctaagatctttaaaaaaaagtatataatttaaacacatttatgggcttttaaaa

SEQ ID NO: 38422 - DNA, 1041 bp, Heterodera glycines
agacatttgcgcctatgtccaaatcggactcaaagttgaattttttcaaccctgatagcctaattagcattaaaaagaaaaaaacacggtcattttttttgattatgttcaataatttgttgtttgacaatttaatttttttttcaaaaattctttgaagatcaaatgatccgatacaatcactttcaatcgcatatttaaagctgtttatgcgatcagggattgaaaaaacttaatttttaactcgatttttggccaaaggcgcaaatgtcggggcacgcataaaacatatgcattttccgacttcagttcacgcccttcccttgttagcgtaagcagttttatggatttatttatttttgctgaaattggtttcttcaccattattccttttgtgttgcacctgcaaaagaacgccatgccaaagtgtctgccagccctcgtggcgcaaaatgtgccgcagaatgtcacgcaaccgatttgttgagccttcctcacgtaatcgtgtccgaatcacctctaaagaaggcaaaaaacagaaatgttaaaatttttctgtaagaaaatccaaaggaaaaaaattttgaaaacttttgggacacttactattaattcatcataaagttaaaaaatatatgaaaaatttttcgaattttttcatggaattttcttaaaaaattttttttgacagtagattttttcttgaagaattttatatttgaaaattaaaaaaaaaattcggcgtcgaaattttgccccgttccgtgaagcccagtgccccacttcggtccagactccttgtggccaattaaaaacaaatgaaaaattcccatgcccccccctctcctccaaattttcgggtgcacaaaaaatcgccgcagaaatttaaaaagaaaatttttcaaacttagaaattatcaaacagaatcttaaaaaaataaaaaaaattttcctgaaaaaatcattgaaacatttttttttaaaaatcttctaaaaattttgacaatattcataaaattccgaaaagcgctgaaaagtttt

SEQ ID NO: 38423 - DNA, 967 bp, Heterodera glycines
ttataaaattatgtatagaaaaatggatttttgttttactttaggagaaaaaaacattcttgggaaaaaataaattaaagaaaataactataattttgggaaatatagccctgcccttatttgtaaaaaccgtttttgtaattagttattttaaccgtacttgtattcaaggaccattccagccaccttttgacttgcttgtgatgggacaaaaatttttggattcggtgacgcaaattatggtcaatggaatacaaagaggaaattttgaccaagaattaacaactaaatttgataatgaaagctcttttggcattttgttttgtactgccaattttgcatttgaaatgaacgacaattttggaaaatttctgagcaatttttgccatgaatttaaaactggaaaaaatctggaagaagcaattgaaactgtgaagaattctttgataatactaacaagaagcatcacaattgagcaaattatcattaaggaaaatatatttcaaaaaattgccaaaaacgaattttttggtgccaaaaatgcggaaaatattgcaaaattttttgaacatgccaattcttcgtttcgcctaagcttatcggcacagttggtaagaataaaaatttaaacgcaagtttttaatttattaaaaaaaattctatctttttttagtttgtaatattttaaaaatgttttagcatcattttaacaatttaatgagtgcatccgaaaatgtgccatcgacaaagaaacgaattcgtcgtatgatacgccgaggttttagcagagcaatggaccaatttcaaaatagcctggacaactcacgatatcgccttcgaaatgatcggaaaaaatgtgctttctttttggcacttagtgtcgttgtgctggttggcatgttttcacgatggccaatttggccaaaatcagtgacaatgccagccatggtcaattggcatttttcat

SEQ ID NO: 38424 - DNA, 762 bp, Heterodera glycines
  unsure (1)..(762): unsure at all n locations
aggaaaattagtaagctttngtagtgttccgatacgtatctctgcaaaattggtgagcccctgatcaattacaaattatttatggacgatcaaattttttgaaatttttttaagtgcaaaagtggtgggtgtctgcaaaaaattttcaccgggtttaataaatctaggaaaataagtaagcttttgtagtgttccgatacgtatctctgcaaaatttggtgagcccctgatcaattacaaattatttatggacgatcaaattttttgaaatttttttaagtgaaaaagtggtgggtgtctgcaaaaaattttcaccgggtttaataaatctaggaaaattagtaagcttttgtagtgttccgatacgtatctctgcaaaatttggtgagcccctgatcaattacaaattatttatggacgatcaaattttttgaaatttttttaagtgaaaaagtggtgggtgtctgcaaaaaattttcaccgggtttaataaatctaggaaaattagtaagcatttgtagtgttccgatacgtatccctgcaaaatttggtgagccgctgatcaattacaaattatttatggacgatcaaattttttgaaatttttttaagtgcaaaagtggtgggtgtctgcaaaaaattttcaccgggtttaataaatctaggaaaataagtaagcttttgtagtgttccgatacgtatctctgcaaaatttggtgagcccctgatcaattacaaattatttatggacgatcaaatttt

SEQ ID NO: 38425 - DNA, 70 bp, Heterodera glycines
gtccgcttggttgcagtttattttttgaaagaattgctttaaaatcaaaattatggcttttgcaaaatct

SEQ ID NO: 38426 - DNA, 414 bp, Heterodera glycines
ctttttgaagatttttagtgacttaaattcccagccctattgataatatatatcttgtggtacaaatggtacaaattattaaattcggcatttaaaaactagggttggtcgggaccaaaacacggacaaccaagggcgcaggcagcggggggctgagggggctatagcccccccccccccgaaacccaaaaaaggaaaaagtttcggtagagttttattaaattttaagcaattttcttgacaaaattgcattaaaatactcaaaaaaatgtccggcgccgcctattggcaccgccggatccctattgtaccaaatttttgacaaatggagatcaaaatggcgaaaaataccaattttgtggcgaaaagcggggaaaaatttgtgtaaaatacaccccgtacgctacgattcca

SEQ ID NO: 38427 - DNA, 1154 bp, Heterodera glycines
ccctgatcaattcaaattatttatgacgatcaaatttttgaaatttttttagttgcaaagttgtgggtgtcttgcaaaaattttcaacggggtttaataaatctagaaaaattagtaagcttttgtagtgctccgatacgtatctctgcaaaatttggtgagcccctgatcaattacaaattatttatggacgatcaaattttttgaaatttttttaagtgcaaaagtggtgggtgtctgcaaaaaattttcaccgggtttaataaatctaggaaaataagtaagcttttgtagtgttccgatacgtatctctgcaaaatttggtgagcccctgatcaattacaaattatttatggacgatcaaattttttgaaatttttttaagtgcaaaagtggtgggtgtctgcaaaaaattttcaccgggtttaataaatctaggaaaattagtaagcttttgtagtgctccgatacgtatctctgcaaaatttggtgagccgctgatcaattacaaattatttatggacgatcaaattttttgaaatttttttaagtgaaaaagtggtgggtgtttgcaaaaaattttcaccgggtttaataaatctaggaaaattagtaagcttttgtagtgttccgatacgtatctctgcaaaatttggtgagcccctgatcaattacaaattatttatggacgatcaaattttttgaaattttttaagtgcaaaagtggtgggtgtctgcaaaaaattttcaccgggtttaataaatctaggaaaattagtaagcatttgtagtgttccgatacgtatccctgcaaaatttggtgagccgctgatcaattacaaattatttatggacgatcaaattttttgaaatttttttaagtgaaaaagtggtgggtgtctgcaaaaaattttcaccgggtttaataaatctaggaaaataagtaagcttttgtagtgttccgatacgtatctctgcaaaatttggtgagcccctgatcaattacaaattatttatggacgatcaaattttttaaatttttttaagtgcaaaagtggtgggtgtctgcaaaaaattttcaccgggtttaataaatctagggaaaataagtaagcttttgtagtgcttccaaaactattctctgcaaaatttgg

SEQ ID NO: 38428 - DNA, 678 bp, Heterodera glycines
cgcctgccccctcttcgcaaaaagtttttttggaaaaagcgcgcctcaaaaatattgatttttaaatttggaataaaattttaaaaaatgatttttgctttatgattttaactattaaaaagttgtagaaaaaatttcgcttttcgcatttcgcttttcgcattttcgcatattttggcttttcgcatttcgctttttttttcatttcgcatttttcagtttcgcaaatttcgcttttcgcatttcgctttttatttttcaatttggcccatccctgatacatatacaaggggtgtctcggaccaagggctatacgacggacgattgggacagggggggggggtgtctcgggaccgatttttcatacgaaggtccaattttttctacagcgaccttttttttttgcttttcaaataaaccaatttttatacgccattgtttttattcatttgaaaacttgaaaacatagagatttgattcgtcaaaagcggtgtcaaagtcaaattggaattggaagaaccctccggcaccgtcggtggcatttgcatttgagttgaaggcaaagaaagaactatttttgtaattaagacaaattataaaaataattttcacttgaaagatggagatagggatttcgaaacggtccaaaattctttttttgcggcgctgttttttcaa

SEQ ID NO: 38429 - DNA, 350 bp, Heterodera glycines
cgctggtaaggaccgacccatttgaagaattgttcggcaacgaaacctttaccattaatcggagttattagcatattcgtcaacaatatctattcaatttgacactgaccaacgaaaaacaaaatgccaaaattggccattatttgcacgcgaaaagcccgtgttcgctgttgtacgattgcgcctgatccgttcacttcaatatcttcatatatcggaggaggaagaaccacagaagttggacggttgtgcattgtctcgtcatttggcaacggatccatggggacaaaaggaggtagggattaagctaaatgaataaacgtaaagatggggacggaaagatggaggag

SEQ ID NO: 38430 - DNA, 1127 bp, Heterodera glycines
acttttagaaatcataaaagaaatacggaggaatttaaggtttaaaattaaattaatttatgattagggcgtgaatttatatggacaacaaatcgcgaaatatggacataaaattgcgaaaatctcaaatatggacataaaatgacaaaagatgggcataaatttttcaaaattgagggtgtaatttctccaaatttcttcaaattcgctaaatgtaaggtaaacaaaaagcgaaaatttcgcttttttgcttatttttgacataaaattacaaatttaaaattaaattcaatattctcgagaaaattttgcaaaaaatgatctttcgggaatttttccgatctttgggggttaaaaaggccaatttagctgatagggccgttctaatagatgtttttggaaaaatgccgaaatatggacaaaataccaaaatatggacataaatggcgaaatatggaaatatatggatatagaaatccactctagaagcttcaaaccaagctaaaaacatgtttttcatacatcccaggcgcctcccagagtctaggaaaaaatatggatttccatataattctatgccctatttatgatcacgagataaaactgagatttatattttttaaattataattatttttactttttgtgaattaaaataaaacagcaaaatgagtaaataaaaattaaaagaaaaataaaatcaaaagaggaaaaaagtaaatcaaaccctgaagtaattttcggttttggggcctagattagaatttaaaaaaaggacgcgcagaattgaaaaatattcgtttccattgcataaattaacgataggacatttgctttcccaattcaccactcggatagaataaattagcgcagaatggccataccttggctctttctcatcgcgagtagagaagatgtttcccagtcgaatcattgacaaatcaatcgcctaatttgcattttgcaaccacaattttttatagatgtgaaatttaaacagttataaattgggatgaaatttttaagtgctaaaactgcccaaatagttatttaaagcttaccaaataaattaaaattaaattaattattactacaataatgaatggatattttttaagatcaatcct

SEQ ID NO: 38431 - DNA, 700 bp, Heterodera glycines
ccgatgactttacgctgacaagtgccggattggtggccttactcggtgaggtgccattgtcgaattgattccccccccccctcctcttgcaacagctttcaatcgaaacgaccatttcggtgttcgacaaatccctgtacagtcaatttgtccatccccaaggccaactccattgttggctgcgatcgtacatttccaaccaattgacttccaccgcgcacgattgggtcaaaatttttgcgcggtattttcactttatccgatgttttaattgcctttcctcccttttttcagtttcaattcaggcacttacaataaccaatggactgtaagccttcgactaatcgcttttattaattattctgaccatttgcaggtggtcgactacaaaatgttcaagccgggccagcagctgccccagtccaatttgatttgggtgctcgagcaaataccgtaaccgccccacgcgtgttacgggaactctcttcattcccccaggggcacaactgtcagtcgggacgtgacttggttcctgcgcaagtacagctattggccctcctacaacattcctttccttcgccgcatttccgagctcagcggatttgaccggaaaggcgaagagaacgattggtggaaatggtcagccgaacatttcaaattggcacaaattgacgccaaatgaatgcccaagggcatttta

SEQ ID NO: 38432 - DNA, 1270 bp, Heterodera glycines
  unsure (1)..(1270): unsure at all n locations
tataattcatattcgattatctggataactaaattaattttttttaaatgtaattaaacaatttatcttaccattactacatccccatntataatagaaatgatcatctgaaacggaaaaatatattatgtttattattttcaaattttgtccaaaaatggtttgtggccccctaaatttttaatgctttggaactgtttaaattggctgaatttcccaccaaaatggtcaattattctcttaaattcgcagttcaacaaaaaaaaaaggacacttttttcgagaccaaatgaaaaaggcaagaacaatattgataattaatttgatgacctggtgacgaaatgcacttggtgttgaagcaattagacaagtcacatggcttatatcccctgatacttagcgcaccatcgctcaatttctctcttttcatttgatcatccagctgaataggacggtagtctccatgaacgcaatcaaatgctacaacaagaaaaaatcgtaaattccaaaatcagcgccttttttaagtaattttaataaagttaacagaaaaaaattttgtaggttaataaagaaaacacttagttgctgactaatgtattaaatcattaaataagacaaaaaaaaacaaattttttttgtcggaaaacaaacaccccatttttgtggacgtcatggattaagaaaagttattttctttttttttgatccaattttaccacgacatttgtctggcataatgagcatgacaatgagagtggcaagaagtgcgaaaatggtagaagcagtgggaaagtcagtgttcatttttgtttaatttaaaaatttcaatttaatttgaaataaaatggaaataaaaataaaagaaatttttcttaagcaaattaaaaaatggaatttaatgaatgaaaatggaaaatgattacttaatgactgcaaaaattttccattcaaccaactaatagctaaaactctatgatttcgtggagcaagtgattgcagcgaaaagagatgattcattgagaaaataacagttaattgaataaataatttattcaaaatatttattttataatatattattaatttttgttatttaattattaaagagtcagtaaaataaaaattactttcaaatatttgtcatatttaaataattaagctttttatgctcatacaattatgaacaaagacataacttcgatcaaaatttcttaaataatatgcccaccaacacttaaaaacgaatgcaaattaaaaaaaaataaaa

SEQ ID NO: 38433 - DNA, 1321 bp, Heterodera glycines
gaaaagctcgaaggccaaaattaacaaaatgacgaattcctccaggaaccgtagaaatttcggcacgacattggggacactgtcgagaatcgctgccaattcgcatacgaagcgcacattccatgcaaatctaagcgagagggaattgcaaaagttttctttaaaccaaatgtatggagaagaaaggatttcaaaataccaacaaaataaagtttttgtattagtattttgacgcttttcctcccaaaatactcaccgggtgcaaacattcaccgacgccgtacacatcggagcgttggcaacagatgagacagtcactgacttggcccgacattggcacgccggcgtggtcaaaacgttgcttgtggaatattttagaaattaacccataaaaactctatgttgagaaaccttagcaattcgtttgtacgttcctcccatttgtccaccttcactcatttgtcgtgtgctccactgaccataattttgacgcggtccgccccgatgctaagagagagattaattaagcacagaattaaaatgataaatgagtcatcggtcccagacatttgtgtcgaatatttacgcatattcgaattaagcgaatcaaccaaatacccaaaaatttatagtcaacgtaggccaatattttttgaaaacaaagagacctcagcaaagccccgtcctctgtgctgctgctgaacattagtcggtgtgtttcgtccactgccttcgcctcttcgggaggaaatgttcgcggacgaatcatcggtggtgtccaaatggttttgttggtgttgcggcctttgccttgtccattgtcttgttgggcccttagattaaaaattgtgtcttgacacaaagaatgtttaaaaaattatgccaaacctgtcgctgctttgtccgttggtcttcgttgttcctttgtcccctgacattgtcatctccttccgcgttttctttcggctctcttttctgtttgtctcgacttcgtgcactaattcgattctcacgactttgatcagcaatttcattattttgactattgctatcttcgctagccttttccatttgttggttttcttgctgttccgccatagaatacaaaaacctaaggaaatttacatattccgcaactctatctaatctttttaaaacaattggcgtcttttaaattaaaaaatttaaataattttacgttttcaagttttacaaaaaagaaaagaaacgacgaattttttttataaatgttttcgtgatcaaaatattttgaaatttgcagtctgttagtccttatgctaacaactaacaataaaatgtt

SEQ ID NO: 38434 - DNA, 1488 bp, Heterodera glycines
  unsure (1)..(1488): unsure at all n locations
tttagtgcgctaggttctatgaaactttttataatataatcctcaactttttgtcctgtttaaaaaggtattaaaaattttttaaatatctattcatctccctaaagatagaaaaagcatcagagacccaaaattaacctgtaaataatgttttgtgtgtttcagagcactatctgtaaaaatattaataaattaaatttgcaaaatataaataagttaagaattaatctgtacctcgaaaattgtctcaatcaactagtattgtcttattatcatgatttatttgtccggttcattgtagctgttttccaatttttttcttgaaaaaaaaattttttttttttgcttcattaaattttctagaaataattattttaaatttctttgtttatttattttttaaatttttatttgattttttctattttttattttatttttattaattggaaaaatcttaccctatccgctggtgttccttgaatccaaagtcaaatttgtggacattcctcggcccctctccactgggcatggtcacgcaagtaattttcatagtaactggctcagataataaaagcattttcttattttcatctccgtccccgctctgccccaacttattaatctcctgcatgataacatccgcattgttttgcgggtacgcccgatacggcacccaaaccggggaagcaagcccagcacccgtaattgccactccaaacatccgcacttttcgcttcattttttcttccgtagtttttaaagccacctttatcatgttgtcgattgaatccttcatcgcttcatcggggcgctccacatccgggttgacacgaaattccgtaatatttttcgtaaatccaaatttttcgcaagttgtcgattggtaatccatcaatttataattttccatttcttcagcaaaattatttctgaacaaaaaaattttttgaaataattcttaaagggtatttattatcttataattgtatttataattgtttaagaaattatttttttatttaatttattaaaaatgtcttacccgattgatcggaaatcccattttttggccattggcacggcgggttggaaggagttcacgcgtttaaaagacattttaaaacaagaaattgaaacagaagaattaaagagagcagagatttgaaaagaaaaagacgtaggtaaatagtaatagatttaattaatgcaaataaaaatagagcggagagaaataaaattagagcgtgaagagagtttaatgaaatccaactatttagttgaatgatttgcgatttgngccgngtgtgcgaaataggcaaaaggggggaggggtctagtcacgtgactggtctgggtttgccttaatttttgagggtaatcaatcatttccgtagacaactgtcacattttattcaaactgcaaaaaaatcgtctggatatctttatttcgaatgtcatcatcattttccttgacaggtttgcaaa

SEQ ID NO: 38435 - DNA, 714 bp, Heterodera glycines
atatctttatatctgcaagaaattagattggcaatatgtggttgtaaaaatcttgtgtgtaaggatttatttttaggagtgagtcacactctctattagtgcttttgtgtcgcgagacccggcaggcaatagatatctttatatctacaagaaaatagattgacaatatgtggttgtaaaaatcttgtgtgtagggaattattttttgaagagagtcacacaccctattagttttttggtgtcgcgagagacgacagacaatagatgtctttatatatacaagaaattaaattgacaataagtggttgtaaaacttttgggtaatgaattattttttgaagtgagtcaaacaccctattagtgctttgctgtgccgagaaccggcaggcaatggatagctttaaatctgcaagaaattagattggcaataagtggttgtaaaaaacttttgggtaatgaattattttttgaagtgagtcaaacaccctattagtgctttgctgtgccgagaaccggcaggcaatggatggctttcaatctgcaagaaattaaattggcaataagtggttgtaaaaaacttgtgggtaaggaattattttttgaagtgaatcaaacaccctattagtgctttgctgtgacgagaaccggcaggcaatggatggctttcaatctgcaagaaattagatggcaatatgtggttgtaaaaaacttttg

SEQ ID NO: 38436 - DNA, 307 bp, Heterodera glycines
ctcttctcttgctgggaatttgttttcctcccccccgatttttcaagaaggtcgagggatttactttccttattttaagttcgaggctcgtccaatttgctttttgtccactgctgaatcaccaatgccaggagcgccaagtcgtaaaaaaagagaagagatttgtgtcgtcaggggctttaagattgttgttgcactgcacacggcaaaagacaacagcccaaagcaaccacaaacaatgccgaagaacaagtttcgtttaattccaaataaatataaggcgaggacaaatcaataggaacttgac

SEQ ID NO: 38437 - DNA, 622 bp, Heterodera glycines
tttatttgaggtagcagcgccgaaacttaagaatttttcccgcccttttaattgtttggcggcgccaccgcggaaccccgaattttcctctttttccaaatttaatcaaaaaaatctgattataactattttttggctaaaaccaattaataaagcagcaaatttccatggtttttcgcttataagcaccgctgttcaatttatgataaagaaattggactcaaaaattgggtctccacatgaataaagtcaaattctgtatacttttagattgcaaaattacaattaaatctataaatgtcctttttgtttaataaaaatttctgtcccaaatcactttttaaccacttctatcgtgtagagcttagtcgatttactattggtaaattttcggcttttttggctccgacgccaaaaatgatcagaaaaaagtgatcaaacgttcgaaaaatcgataaaaatgacaaaatttttaaaaattcataaaaaattttcaaaacgaatgatagaataattaaaattatttttaaaatgatcagcaaacaattctctatcatatagcatcataaaatagattacaataactgaatagaatgagctaggtgtaataatagtatgaaaa

SEQ ID NO: 38438 - DNA, 1011 bp, Heterodera glycines
  unsure (1)..(1011): unsure at all n locations
ttctcaaaagaagagatagtcatttttctgggatataagataattaaaaaattctctgagaanttaaatggcgattgcgcaccgccctccctctcacgctcgagcgcttttgtaacgtattaaatttctcaaaagaagagatagtcatttttcttggatataagataaatttaaaaattctctgtgaaattaaatggcgattgcgcacctcacttcctatcatgctcgagagcatttgtaacgtataaaatttctcaaaataagagatagtcatttttcttggatataagataaatttaaaaattctctgagaaattaaatggcgattgcgcaccgccctccctctcacgctcgagcgcttttgtaacgtataaaatttctcaaaataagagatagtcatttttcttggatataagataaatttaaaaattctctgagaaattaaatggcgattgcgcgccgcacttcctatcatgctcgagagcatttgtaacgtataaaatttctcaaaataagagatagtcatttttcttggatataagataaatttaaaaattctctgagaaattaaatggcgattgcgcaccgccctccctctcacgctcgagcgcttttgtaacgtataaaatttctcaaaagaagagatagtcatttttcttggatataagataaatttaaaaattctctgtgaaattaaatggcgattgcgcaccgcccttcctatcatgctcgagagcatttgtaacgtataaaatttctcaaaataagagatagtcatttttcttggatataagataaatttaaaaattctctgagaaattaaatggcgattgcgcaccgccctccctctcacgctcgagcgcttttgtaacgtataaaatttctcaaaataagagatagtcatttttcttggatataagataaatttaaaaattctctgtgaaattaaatggcgattgcgcaccgcacttcctatcatgctcgagagcatttgtaacgtataaaatttct

SEQ ID NO: 38439 - DNA, 956 bp, Heterodera glycines
taattaatgattggattgtttattgcctttacctttcccacggggatgccaaagtaaaagaacatcaaaattcggctgcgcatttgaccgacgaataaatcggcgattattgtgggtgcaatcactgcgtaagaagcctcgccaattccgacgacgccacggaggagcaaaaaagcccaaaaatgcttaaaaataattaactgtttattttcaaattaatatattttgttgttttacattttcactgataaacgaagaagcgaaaacggcgccgacccaaacggagagaccgacgagcaaaatgcgcttccgattgaaacttaaatgggacaacaaaatgggcatttgccaatgtatgggacaataaattaatttgtgcatttaccgatcccccaaaaagccgcaaattggggcaattgtcatgaagaaaatgataaaaactgtctgcagaaaacccgcacttttatcatcaatgtgataaaatttttggacgtcatttaaaactcctaaaaattattaattatttacttttttaaattatttatttttatttatttatttgaagtaaaatttacccgcaatggtaaaacggtccatgtaattgagcaaattaatggcgaaaaggacaaaaacgcaaattaactttgaacgatccatgccgaaaatgaaaagccaactgaaaattaattaaaaataaatttaaaaaggaaatggcaaaaataattaaagcgaagcaaagggaaaaaagaaaagaaagaaagaaaaagagattgattggctaatcgaatgaatggcggggaagaaacatttgcattggcacatttggggagagaaagggacgaacaaaaaagccgattgacattaatgaaaaagatagaaaattccgacaaatgatcaatgaaatgatcggttagctgttccccttttgtcgtccctttgtctttttgtcccttttg

SEQ ID NO: 38440 - DNA, 1355 bp, Heterodera glycines
tggagcaaatggggctttcagttgttgtgccgaatacccttcccagatcggattgaattcctggaaatttgaaaattatatttaaaaaataataattaaataatgcctatttgtcgatttaaaaattgaaccctacgatattctctagaaacccaaaattgattcgaataatctcttttttacgattcaacactttcgagcagcaccaatgaaaacccgcctttggatgtgaaagtgtataatccaaatcgggacgcaatgtccgctccaaatccatcgaagaacgtgtcaattcacaattcggcactgaaaacacaacatgaatactaaaaactattacaccgatgagcattgaatagcgatatcattaatgcaacggttttttttcacacatgtaattaattaattattaattaccctgtttttgcgacataaattttgggaatagcaaagacggtgctgctgttgaagtgccatgtttgtcctcggctccgtttcgctgctgctgcgtttttgccgattccttcttctctgccgccgattcatgacaaatgccgtcgatcagcaacagaaacaaatgcgaacgagcaaatggaagcagtccaatggtgctgaacaaacaaacaataccaatttttaatgggttttttcaattttattgttgttattaaaaatgggcacaatattcttcataattttctgttagcgcctgagggtatcgtcattcagttcaaagtttaaatcaaacgagaaattccttaaaattattttttgtatatgattaagtttagctctttttttgatgcagttagattcctaaatttattatagaatttaaaaatatgtaaatttaaattgtttttaatttttgtatattcaaatggtaaaatattttaatatttttgatttgatttatttagtttcatactgaacgagaatcttgaccaaaaaattacgaaatctcatttgttgcattacaaaacaaataaaaaatgtcttatgtgagtttataaaaaaacatttttgatttaaaaaatgtctgtaatatttttctaaattagtcccccaaaccgaccgattgcaccgtcggtctctcatccatacggcggcactttgatcattcctatgcgtgccaccgccaccactaccaccatagttgactttgtcctgttcccgggcacgtcctgttcgcagctgataacgaatgtgttcaacagtgcactgctccatcagttccgtgggctgatcattgtcaaattgacagtcataatcgcttaatccaacaaattgtggttgtagagggctagcagcattgttgtcgttgtcgaaggtgcaaatggctctagagatccccg

SEQ ID NO: 38441 - DNA, 789 bp, Heterodera glycines
tttcagtgacttttaaaaagttaaatatttttttcaaaaaaggggtcctaccatcggtagtattaccaaaatttttatatcccgattgcactgtatacgatttgctaatccctccccaaaattcttaacttaaaatccataatgcgaggcgaaaatataatttgtatttgatatatttttgatcaaataaatgtaaaaataagtaatttgaagtaatttcgcaaaatgttctgctgattttcgacccaaaaatttggttttttgggccaaatattctgattttgaaaattttttgttccatccctggattgagcatctaaacagtattttttgttttagtctgagcgcttcatgcggtgacgaactgctgctgaagatcggagaacaccaaacattgctcaattccattttcgacagacaaattggatttctttgataaaccaaagccaaaaatcattatattttccccaattttgttaaaatattgttcattttaatattttcgatcaaataaactcttcaaacatgatttacgagctaaatttttgtatatgccatcagattgtcatatgacgacatcaaatctatgatttttcgccatgtctatgatttttcatcaaggattttttccaattctaactcaattatgtagctcaaaaatgagctcggcttggttattgcacgaaaaatgcacaatattaaagcattgacaacataaaactgaccaatatggacgaacaaattttcgaatgccatctttatcatagatgaacaatgaaaacaatgaaa

SEQ ID NO: 38442 - DNA, 664 bp, Heterodera glycines
aaaagtccgcttcatcccccgcaatttgcagaacgcaaacacaccgcgcttgaagtgctgtacaaatgcaactcgtgtggccatgaagtgcacaaatgttacgaatgctttggtacggaactgaatgaatttcctctaatttttgtcacatttacatgtcctcccctttaagtgtactccctcgctttttccaacggtcaacatagagcgtatcaccaactctaccgtggccgaacgtacaattcgtggggacggtacacgagaaatgtcacgaaaacggtgctgcacaggcagatgaccatcaccaactatgaggcggtggagcaaaagttcgacctgatgagcggtgttcagaaggacagtttcagtaccagctgggcatgggcgaacgatttgataaggcgccttgaataagccgaaatgctaattaattgacatcggtttcttgttcaaataatgtattgtctttctgtatatgcataccgtacttcctttgtataaatgcaattaattattctgaataattgtgttgatgtgtttttcctggttgaatagtcgggaaccttttgaacttttcacttttagcgtacaaatttcgcaatttttttgaaattttttacataggaagtcaaaataaacaaaatttcatgtatgttttcatttt

SEQ ID NO: 38443 - DNA, 1413 bp, Heterodera glycines
  unsure (1)..(1413): unsure at all n locations
ttaatttaattttttaatgtaaatttaaatcaaaaaattttataatatatttcttaaatattgatttattatttttatctaaattaaaatgctaattttaattatcattcaaaaacaataacaaattaaaataattaaattatctttaaaaatgaaaacaaaaattggaaaataaattatntaattaatgtaaataattttattgtacctatactgtaatttaatgccttcgaaacactttgaacacaaaatggcactttgctgtcgccgaatgaaatgcgctaaaaattgaaaaaataaaataaaatttgcatttattttttaattattctttttacctggccatcaaccgtgcaaattgacactccccaataatttggtgacattctggctaattgtggaatataattggccacatttccgtcagtaattggaatgcactaaaataattaatttgtttttagtcacaaaaatttattttcaaaacctccgtgtaaatttctttgatgatcgaaccgaaatgagcccacgccggcacaataagatcattttgtagcgtttgaacaataagcgatactgtagacgggggaaaaagttattgttttgtttttttaattggaattttattggcaattagccaatggaatctattttcgagtgcataaatagataaaattttgaaaaactatgatttgaaatggcagacaaactttttaaacgggttttattttttaggactgaaaaactaccaacaaaaaaggcaatttttacaggggtggctgggttttctgaaatttgttaagtcgtttcttaaggggagggggcttacttttttgactttatgtttaaaaaatttttaaaattaaaatttcaacgccaattaaaggcttcttttcattttaatgcgctgtttatgcagaatttccaaggattttcctaagcgcttttggttggattcactcttttttttaaataaatttgccatgactttccattttgacaatttgaattagtgccaaattatatttcaccaaaaaaccaacgcgattcgccgatgacccgcttgaagtcgttgtggctcattttccaatgcttcgggtcccgtgcctcgttcatgcgttcctccttctcattttcaatttcgcgaattttgcgcatcatcggcgccagccgagggtcattctctttggagtccgtaatttttcagtagctttaatgggggcagaaatgtttttaatgggactagggactctaatttcaacttanattaccaaaataggtagaatttaggacccaaaacccctcaaaatgggagcgaaataacaaaaaaattacgccatattaaatttagcaatattcacaaagtcccgggttcaggaaattttttaatgaggcaaaattttgaaaaatttt

SEQ ID NO: 38444 - DNA, 815 bp, Heterodera glycines
agttctgttgtatgcttaggaagacccatatcccccgcccgggtattcaaaaccttgagaaagaacagcaggatgtcctcccgggtgatcctttcggtgggaaaaccgaggcaaagtaaatggaaagcaaaatgaagagaagcaaatcgaacagaagcatcagaaaggccaatccaaaggagaatttggagatgccacttccgagtaacgcagaccatccaatggttttcactaaacgatgaggggaattccattacatggccagggaggggcctaaattatgtaacgctactgcctatgagacaaaagtagaaccatgtctaggtggaaaactggggaggtggcacaccaaaaatttaagataatttaggaaaaaagttctaccgaattgctccaatacgagtgcacttcattcccccccccccccaccgcgtcgttttccccgcgaaaaattttcaagaaaaatcttaggaaaaccaattttcaaacgaaatttcttttaactcctgcacgtaatgattttggttcgaattgtgttatttttatggcctccgaaataatggcacgcaaagaactaactatttttggcactaacaataagttgcaaaaaagacgcgtgattatgtgccattaaagattgcatttacaagtttattgtaaattacttttttgctcggtaagcgcaataatatacatggcacttccgaaggcgaaaaagggattaagcgatgagagcagacacaacggcacatttgcgagatccggcttataaaagagaggaggcgcgcaaaaagaaagcgctgccatcagagaaa

SEQ ID NO: 38445 - DNA, 702 bp, Heterodera glycines
agaatcgaatctcgggctcaaccttcggatatgaaactccgcccaatcctaatgcatttctatcttttcatccgcaataggacaatcttgacatgagcttaatcagttgctctgcgaacatttcgccatcagtgtgcacccgctgaccgcgctcttccgtctgagtccccgcctttttcggcatttgcctttcctccacggcaaattcatccgaaccaaaacggtgtaccgtaatttggacgcattctttgagcgccaaatcgacgagcacagactgaaaattaatcagctacagcaatgggataatgacaacacagagccaactgattttgttgaggcttttctaaaggaaaagacgaagcgggacggacggaaacgacggcgatccgatgcaccagttcaagtgagcggctgcaaaatctgttcccataaaatgatgcatttgaaacagtcttccaaaatgtttgtccatcttttcgcaacattgcctatctgaaccatcatgcccagattcaacccaaaatgatcgatgagcttcagaggatggtggactatgatgatgaacatgaacaccaacataccaatgcggcaacaaatcaaacggttgcgatagcgaaccgactcacattaccgtacaccaacgcagagatttgtgtaaagtaatgtgtataaaacagggatgatttgatgtaataataatgg

SEQ ID NO: 38446 - DNA, 1573 bp, Heterodera glycines
atttggggcgttaataattgttgaatctaagagagaaccccccccgtaaaattgttaattttttatatttgcaaaaaaaaactaccgtacatcatgagagcaatttgtgtacaatttttgaacagacgcaaacaaaagcacagaaacaaagccggagaaggcattaagcgacgaaatcagctaaaaaaaaataatatttaaaattattagaaaaaaattctttttaatttaaattctattaagataaaatttatttattttattttttattgctattgaccaatttcactccacgacaaattaagaaagtagttttttatattcttcgatacgttgaagaaaatatgaaaaaaaatttggaggggggtgggggggtgggagaaaaaatttaacgcacccgcccccgattctgaccattttccatgtcccggttggcaacacggattcgaccatgtccaagtcgggcagcagcatcaatgcctggaccgagccgtgctgtccgacagtgcgcagcgcacggccaacaatttgggcaatgttttcctcgggcgtcgccggccccgcgaaaatggtctccacggagaggcaaaacagcggcaaatggtccacgcggttgacgaggacgggcaaaaagtgagtggactgtccaagagggccatggccatggagcaacagacgagctaattaggtgataattaattaattgattgtaaaaatggacaattttacacaattgtttttgtgatcgtgggctgaaacttttgcgcatatgcttaaaaatgattcaagtctgttagttttttttaattttaaatgtcaaaaataacattaaacaggtgggatgataggggagcagttcgttttcccaccacatatcctttcgtataaaaataatactttttattatgtataaaattttttaaaatccgtttttttttaaaaagcaaaatattctgaattaacagtttgaaaagtaatttttttcaaaaagaagcaaagtgtatgtagttgtccaaattgatgaataaaatcatttgatagccctgtgtattttttagagtgccacgggaccgggacctggtagcggacaactgagtacaactgagtaccaaggtcccggttttgaccgggaccgggactagtcccggttttcccagcaaaaaattcccgggttttcaacccgaaaaggtcccggtcccggttaagccaaaaattcccgatctcgctcaactctagtttaaaattcattcattttacaaacatgatgaataaaatcatttgatagccctgtgtatttttctttaaaatccaaaaaataattttttttttttttgaattatgattgatacgttcgggaaactattttgtttgtttgttttagctaacaacttttttgaaacttaaacttttttgttaattttgcagacaaaaacaataggcctattgaatggtaataatttagttaaaaattggtataacaatgaaagggaaaagtgcacaaaccattcggaacaattggacgcgtcttcagcgacaacaccacccgttccagttcagtcttgtacaaattgtc

SEQ ID NO: 38447 - DNA, 944 bp, Heterodera glycines
gctgatcacaatggtacatgtgacctgtgatatggtattggaaccacgattcggatgatactatcaggaaaagaaaattatgataaaagacatttctgcagaattattgactttcacatgcaatgactgatcaaaaaaatcatcaaattgattaaatgataagaaaaagtggcgagatatgttcagataaatcagcttattatatttgtatataaaagtccagggctaggatttatggtgcttaaaaatgcataaacatgtacctaagagctttttcttttcttttttttaaagaaaaaaatttttaaattttttttcttttaatcatttttttttaattttttaaaatagtgaaaaaatagtgacgatacgccaaaattttgagctcctttcttcaaaacaattgagcaaaaaaaaagttttttcactaaaagttgctgccctaattatcacgcaatagcagttttcttattattctagagaaccaagactaatttgaacggttttattggaaaatcacatgtacaaacacaacatttaagaggctttcaatttaactccttaacattccatattattaacagacaaaatactcttcagagtaaaatttttgtaatgcaattaaaattttaatggccaaaaaatgaatttatcaaagatatctgcgcaaaacgtaaagaaattcattcctatctaaatctttgcctcccgtatgggaattcagcctttatttttcgaatccacgcgaaaactctcaagaaatgggtttcaaaataataaattttcacacgcatattatttattgattataattgttgagtgcatttgtcagcgaaataatacaacaaataattaaatttaatattttttgaaaatcataaacttaaattgttttattatagaagatgcattgtccattcatcaattttagtgcctttttatta

SEQ ID NO: 38448 - DNA, 839 bp, Heterodera glycines
tctcctggggatttgaccgcaaacttggtaccaacatttgccttctctagtctggctctaccaaacactcacacgatatttgaaatgctaacgaaaaaaattcttgccgaaaaaatggctatctcttttttctcctggggatttgaccgcaaacttggtaccaacattttccttctctagtctggctctaccaaacactcacacgatatttgaaatgctaacgaaaaaaattcttgcccaaaaaatggctatctcttttttctcctggggatttgaccgcaaacttggtaccaacatttgccttctctagtctggctctaccaaacactcacacgatatttgaaatgctaacgaaaaaaattcttgccgaaaaaatggctatctcttttctctcgtggagatgacagcgaaaacgtgacccccatatttctcttctctactgtgtctataccaaactctcacaatatatgaaaagcgatcaaaaaaaatacttgtgcaaaaaatgtgtatatcttttttctctcgtggatatgaccgcgcacttgtgaccaacatattccttctctagactgtgtctaccccacactctcacgatatatgaaatgcgaacaaaaaaaattcttgtccaaaaaatgtgtatctctcttttctcttgtggatatgaccgcaaacttgtgaccaacattttccttctctagactgtgtctaccccacactcacacgatatatgaaatgctaacaaaaaaaattcttgtccaaaaaatgtgtatctcttttttctcttggggatatgaccgcaaacatgggaccaacattttccgtctctatagtgtgtctac

SEQ ID NO: 38449 - DNA, 1121 bp, Heterodera glycines
  unsure (1)..(1121): unsure at all n locations
ccgcttcgcgccctcaggacgggcgcttcgcgcccgtttttttaattttgtggggaacattcggccgcttcgcggcctcgggncgggcgcttcgcgcccgtttttgtaatttttttgggggacattcggccgcttcgcggcctcaggacaggcgcttcgcgcccgttttttaattttttgggggatattcggccgcttcgcggcctcaggacgggcgctcacactcctcagaatccccaatcacacagggattctgaggtcttaaccatgtctaaagtaaaatctgattacatattcgtaatcagcggcccaaataacccctaaagacatgtttttggaagatttttgtcgaaaaaattttttcactcagaaatcatggtcacacccctttggtcccgaatgccaaaatcacttttatttctataacttttttcaaaaaagtgataataagctaaattaaaatttataaaatagagcaaaaaattgcggattttttgagtatattatttttataaaatactttttcagaagggagttctgaatttttttctgaaaaatcgaattttttcagaaattctggaataacttttttattttggaagatagaaattcaaataaatctcataaaattctcccaatttttctctatttttaaagctttattccactaaatttgaccaaaaacgaagagatttatgaattttcgaaatttcacaggattttccggggctcaaattttgacgatttttcaaaaaattttaaccaccttccaaaaagtctgaaacacaaaataaagcgtatatacgtattcagcacctcaaattatgccataaaaatgcattttggctaatttaggagcaaaaaaattttttatgaaatgcaaaaccatggggtcccccctatggttttgagtttcaaaatcacaattaattttataactttttttaaattcaagataaaaataccggataaagcacattaaatagagctcgaaattctctacaaaaatgctctaagagaaattttcgctaaaatcaacgcctgacgagttataagccttgaacggaaatggggagctcaattccggaaaatttttctatttccggaaaatttgaaatttt

SEQ ID NO: 38450 - DNA, 1080 bp, Heterodera glycines
tttgagtagattagactagaaaaaattgaaaatttttgatatcatgtttccccctccctcttcccaggggtattattttgtaaagtctttttttccccaataaacttgtcaaaccccatttttcgcaccgtgaatgttatttttattgaattctgaaccgttttgagtagattagactagaaaaaattgaaaattttgaaatcatgtttcccactcccttctcccaggggtattattttgtaaagtctttttttcccaaataaacttttcaaaccccatttttcgcaccgtgaatgttatttttattgaattctgaaccggtttgagtagattagactagaaaaaattgaaaattttgaaatcatgtttcccactcccttctcccaggggtattattttgtaaagtctttttttcaacaataaacttgtcaaaccccatttttcgcaccgtgaatgttatttttattgaattctgaaccgttttgagtagattagactagaaaaaattgaaaattttgaaatcatgtttcccactcccttctcccaggggtattattttgtaaagtctttttttccccaataaacttttcataccccatttttcgcacagtgaatgttattttattgaattctgaaccgttttgagtagattagactagaaaaaattgaaaattttgaaatcatgtttcccactcccttctcccaggggtattattttgtaaagtctttttttcaaaataaacttttcaaaccccatttttcgcaccgtgaatgttatttttattgaattctgaaccggtttgagtagattagactagaaaaaattgaaaattttgaaatcatgtttcccactcccttctcccaggggtattattttgtaaagtctttttttccccaaaaaacttgtcaaaccccatttttcgcaccgtgaaggttatttttattgaattctgaaccgttttgagtagattaaactagaaaaaatggaaaattttgaaatctggtttcccactcctttctccaaggggtataattttgtaaaagtttttttccccaaaaaatttttaaaacccccatttt

SEQ ID NO: 38451 - DNA, 709 bp, Heterodera glycines
atacctctaaaaataaaaaattttgcaaatttggcgttttttctaaacgtggagttttttttttggctttttggtacctcatttttttcatttttgcaattataatttttccatgacttttgcagcaattttgcgacgacttggatggacattttaccactttttggccttgcacgctcaactcggtctcaaattggcattgcttacgccccaattcgatgcgctggtggacaaacatttcgatggctaacggatttcggcaagtttttttgaattgttgtaaaagtgaatttttttgctttttttaagcatttctgacaaaaaacatacggtctcaaatttcaaaaatggctctaaaaacaaaaaacatccaaattcggcaattttttaaaatttgttttttgtaaatgaatagttttttaggggtttttaatggttttaaggatttgtgcccaaaaacgggcctcaaattatcaaaatagtccgaaaataataaattttgcaaatttggcgttttttctattttttttggcttttggtaccttattttttaatttttgcaatttataatttttccataatttttacagcaattttgcggcgactttggatggacattttcccactttttgactttgcacactcaattcctcctcaaattggtattgctttcgccccaattcgatgcgctggtggacaaactatgttc

SEQ ID NO: 38452 - DNA, 977 bp, Heterodera glycines
  unsure (1)..(977): unsure at all n locations
aaatcttttgggggccgaggctttgcgtccggactgcgcaatgaccgaagggttggcttacctgggctcttttctgttcctctcccgtcatgagccgtggctttggcacgaggaatttgcccttttctcgggtaaatgtcccatctatcggtaattttcttttttttgagataatctttgtttttggccattcgtttgaaggacttacgaaacggcggacagaaaatggatggcagtgggagctgtggagccgaaatttcagcagaaactcttcgaaagtatgaagattttcgaatttggcacttattttcgattgctttgcagttttgggaatttccaccgaaaaaattgacggaatggcgaaattaacgcgcgaaatggaaaatgcgttcaggggaaaaacgcagggagaatgggccattatttttgaaggtgaaaatgaaaaaggtcgccttgcccctcccaaacggtgccattgaggggaggacgcgtgtgtaacgccggtgctgaacatggacgaagtggggaagtacgagcagcacaaaagacggaacgcattccttagggggggaagtggagggagaagccgtttgggtgccgagggcagtgccgaaacggatggaaacggagaaaagccaaacgaaagcaaaaagtgaaaggacggaaaggacggaaagggaaaaagccaaatgagggccaaactgtgagcaacgccaatgaatgaatgaatggcacaatgtcttccanatgcctttttctcccaaaatgccattcctttggcggncctttgcctttctctccttttgcttttattccgccaaatgttttccttctcttttcttttgttttccgtcacaaatacacaagggaatttgttccgttttccaaacttaagcatgaaaaagtcaatttttttaatactcaaacaaatttttataagcccttcaaattttcttcaaaatgggaaaaaaaaggtt

SEQ ID NO: 38453 - DNA, 280 bp, Heterodera glycines
cggtgtcatctatgttactagatcgggggatcgatccccgcgctggccgctcgagcaggacctgcagaagctagcttgatggggatcagattgtcgtttcccgccttcggtttaaactatcatgagagggaggagagggttggagaaggaaaggaaaaaaaaatgaaggaggagaaagggtggggggagtatgagtatgatggtcaatatggagaaaaagaaagagtaattaccaattttttttcaattcaaaaatgtagatgtccgcagcgttattata

SEQ ID NO: 38454 - DNA, 763 bp, Heterodera glycines
atttttgattttttctcttttataattgtcacttttatttccattcgcaaaaattaaactaataataatgattaattaatatttctctcttttccaattaaaatttttgccttttcaattgcttttttattaatttgtgaacgaaacggaggaacaattagcaaaattaatttggtaattaattgaaaaatttgtcaatatgaagtcacaaaattgtgaaaaggaactggattgaaatgtcagtaaaaatcagtacaaaatttatttttctgttcattacaacaaaaacaattctatttatttcttatataatccaatgtcaaaaaaattgttttttgttttttttatacattttcgttaaataaaaatattttaaattatgtaagttaattttctaaattatatggtaaactttgatttacaacgcttcttttacgtctgattttgctttttcaacaatgttgactttgcattgtgaaaggaattattttgaaattgaagcgtcattaatttatttgacgtgtttaatcttaacttttatccaaaaatctaaaattaaatttttttatgacttttcaattccgagacctttgcatttatttttaataatgacttgaaatgaacataccacattgacattatgaatatatttattcgacgcctcatcggtcttaaaaacaaaacccaatttttaaaaaaaaattacgaaatagaaaaatgaaattcaatttcgcaaattacgaaatttgagagaatttcgtat

SEQ ID NO: 38455 - DNA, 657 bp, Heterodera glycines
  unsure (1)..(657): unsure at all n locations
ttcggagaatgtcaaacgtgaaaggagaaaaaggaaattgagcaaatggaagcgaagtccgaagccagacgaaaagacgcggaagggaatgccaaagagaaggccaaagccgaaaaggaagaatggaaacgtgccctcctacgtccgccagttaaatattatgaccactttatgtacatatttttgacaaacctagtgatgacaaaaaaatttacaaaattttccctttattttatttaagctaatttgttatcctaccgtagtatattttttatttaatctgacaaattcttaaataaacgttgcttatttatttttttttgggggggggggggtttctattttagttaaatttatccaacttacatatcccacttcatttttatgatctctcaaaatttagagctcccaaatttgattgttgatatatcccagggcttcgatatctgaggaattttcctcattttgtggtcttttagagggtcaaagagtttgcggatttttgtggtcttttgagaaatttaagtatttttgtggtcttttaataaaaagtgacaaaaacgcatgatttttagaaaaattaggtatatttggcaaaatgtttgaactcttagtgagaatcttaaacattttttcgaanaaatgctcattttgcaa

SEQ ID NO: 38456 - DNA, 1035 bp, Heterodera glycines
  unsure (1)..(1035): unsure at all n locations
aggggtatattttgtaaagtcttttttcaaaaataaactttcaaaacnccatttttcgcacgtgaaatgttattttatcgaattctgaacgttttgnagtagattagactagaaanaattgaaaattttgaaatcatgtttcncactcccttctcncaggggtattattttgtaaagtcttttttccncaataaacttgtcaaaccccatttttcgcaccgtgaatgttatttttattgaattctgaaccggtttgagtagattagactagaaaaaattgaaaattttgaaatcatgtttcccactcccttctcccaggggtattattttgtaaagtcttttttccccaataaacttgtcaaaccccatttttcgcaccgtgaatgttatttttattgaattctgagccgttttgagtagattagactagaaaaaattgaaaattttgaaatcatgtttcccactcccttctcccaggggtattattttgtaaagtctttttttccccaataaacttttcataccccatttttcgcaccgtgaatgttatttttattgaattctgaaccggtttgagtagattagactagaaaaaattgaaaattttgaaatcatgtttcccactcccttctcccaggggtattattttgtaagtctttttttccccaataaacttttcaaaccccatttttcgcaccgtgaatgttatttttattgaattctgaaccgttttgagtagattagactagaaaaaattgaaaattttgaaatcatgtttcccactcccttctcccaggggtattattttgtaaagtctttttttcaaaataaacttttcaaaccccatttttcgcaccgtgaatgttatttttattgaattctgaaccggtttgagtagattagactagaaaaaattgaaaattttgaaatcatgtttcccactcccttctcccaggggtattattttgtaaagtctttttttccccaataaggtaggtcaaaccccatttttcgcaccgtgaatgttatttttat

SEQ ID NO: 38457 - DNA, 896 bp, Heterodera glycines
  unsure (1)..(896): unsure at all n locations
cgatcggacgtctgctccgtggccccgcatgacgcgctctccgcacaccgcgcgaagtcccaaacgcgcgcggtcgcatcgtcggaagcggtggccaatttgacatcggttgggcaccagctgaaaaagggcggaagggatgaaaaagggaacaagcagaggaaagaaaaaaacaacggaaatgaacgaaatggcggacgaaaagcgaacaaaaccaaaggcaagcaaagaagcgactttggttacggagaaagaattgaagaaacaaatgaaaacagtcattgggcagccactccctttatcacgccgataataattcaatggaaaaagataaaattaaattcgctaattatttatcggtgcccaacccaaagattataacgcgccctttacaaaataagagcaaatttattcgtcggtcggagtgccactttgcgaagacgtttgttcagtatatttgaatatttaagccggtttaagtcagtttgttcaaattcattttttaatctggctaaatgcgttgctttgtttcttgggttgggtgatccgagtcaaattttatcgaatttcgtattttcaccctttgccaattaattttaacgttttcactagataaattgaatattgataaatgacaaaaatccatcatttcaatgccgaagttaacacataatttaaacttttgttaaagacgcaaatgaataaaacaaacaaaaagattgccctcctcctcctcaaaatcgcagtaatttatttcaattgacaaatggtaatgaccgaaatttgacgacgaattcatttaccaaattttacccgtaatgatgtgagcaaataaggtgattgattgagtggagattgattgatgaggactaaatgatcgactncacacgacaaag

SEQ ID NO: 38458 - DNA, 895 bp, Heterodera glycines
acaccctattagtgctttgctgtcccgagaaccggcaggcaatggatggctttaaatctgcaagaaattagattggcaataagtggttgtaaaaaacttttgtgtaaggaattattttttgaagtgaatcaaacaccctattagtgctttgctgtgccgagaaccggcaggcaatggatggctttaaatctgcaagaaattagattggcaataagtggttgtaaaaaacttttgggtaaggaattattttttgaagagggtcaaacaccctattagtgctttgctgtgccgagaaccggcaggcaatggatggctttcaatctgcaagaaattagattggcaatatgtggttgtaaaaaacttttgggtatggaattattttttgaagtgagtcaaacaccctattagtgctttgctgtgccgagaaccggcaggcaatggatggctttaaatctgcaagaaattagattggcaataagtggttgtaaaaaacttttgggtaatgaattattttttgaagtgagtcaaacaccctattagtgatttgctgtgccgagaaccggcaggcaatggatggctttcaatctgcaagaaattagattggcaataagtggttgtaaaaaacttttgggtaaggaattattttttgaagtgagtcaaacaccctattagtgctttgctgtgccgagaaccggcaggcaatggatggctttaaatctgcaagaaattagattggcaataagtggttgtaaaaaacttttgggtaaggaattattttttgtagagagtcatacaccctattagtgctttgctgtgccgagaaccggcaggcaatggatggctttcaatctgcaagaaattagattggcaataagtggttgtaaaaaacttttgg

SEQ ID NO: 38459 - DNA, 1074 bp, Heterodera glycines
aaattacgaagctttattttccaacgacgatttttccaccgagattttttaaaatttctctagccatacagacaaatctcgtagcggaatttgctacccgccccccgaattttcttttccttatttgttcgggatggagaagaaccctaagatacataattcttgctctacttttattcagcaagaaaagcatttgatgccccaaaaattttaagaaagtgaattcagaaatccgatgcccaaaaatctcagaatttttctaaagataaaaatagcactctcatcgaatttgcgtgtaacaggcgacaagcccaaaaacaaagttttatttagttttcagtctccattccttattttcagaaattttaaaaaatttttttacgaaatttttttattttttcccaaaattgtccgcaaatgtccgtccgcaaatgtcccactgcgtttatgaatgtttaaaaatgggaatttttatgaagttattaaaaaaaaatagtaaatattgcatctatgggcaaatttagtgctgctcgagactaccgatcttctagtccagagaattttgggttttttgtggggctcaattttctgcttatcttggagtaaattcttgaaggcgactctcgaatctcggaaaatctttttgacttgatgtgggataaaaatggaatttattatgaatttatcaaaaaataaaattaaaattattgtcaaaaaaactatcattagtaattggtaaattttagtgcggcgcgaatgtttcggtcttcttgtccagaggcttttcgtttgttttttgtggggcacgtttctctgctttctcggagtcaattcctgaactcggctcttgaatctcagaaatttgcttttgactctcagagtggacatttttagacataagtacccttttacttatccctataatggttcgtttattcttcagattgtctcccaatagaaaatcttttctgcctcctattttctccactccgtgtttgctccaatcagttcgttggctcgtgcccaatgggtttcgataggcgttctcttcgttggcgtatgtttagtgcaatt

SEQ ID NO: 38460 - DNA, 1187 bp, Heterodera glycines
atgttgtaaatacaatatctcttaaatttattctaaaatcgcttagcttgaaattttttcaagcttctgttacaagcaaaaattttgcctttgcaattctacccaatttctttagcattttaacagatgattctgtgacaaattttgatgcaaatccaaaaaaatccttccgattgtaaaataaattgaattactaatttcctttctttcttttatggtgtttcatatcaacttcattatttttctgcaaaggcttattatatgtcacaaaaacttgtttgttttcgtcgattggtaatgcgcaaaatcataaaaaactagcgcattaatttttatatgcaaaactgaatttaatatgttagttaatttaaaattttcttttattttataaaagtaataagcaaagatgttgtaaaatacaatatctcttaaatttattctaaaaatgcttagcttgaaattttttcaagcttctattacaagcaaaaattttgcctttgcaattctacccaatttctttagcattttaacagatgattctgtgacaaattttgatgcaaatccaaaaaaaatccttcatactgaaaaataaattgacttataaattcccactcaattttctatggatgtcttattgctcacatgactgtgcccatgtcacttctatcactgcattctatattagatcaagttatttacaattatatttacatgtattacaatatatttggctttcaaattttatttaaactaaatatttcaatactacttaatcacaaattaaaaattatgattatattacccctaattaattctataattacctacattagactcatatatccatctcggctcaataaaacatctcattaccacgaatgggacactctatcaactgaaacattgcacttgtgatcaagctttgcacgtacttattacattggctcccctgctggacctgatggtaatgctcgccactagagagccacgtgatatccgaccatattgtacgcatatgtataattagctctttttttgcttagatcagatgagcgatcgagcaattttcgaaataatatcatccatcccataaaataagattgtattatccataataaggacattttgcaaaattgctttaaatctcttgtatctcactttatacaattaatatataatcaactttt

SEQ ID NO: 38461 - DNA, 1146 bp, Heterodera glycines
caccgtgaatgttatttttattgaattctgaaccctccccgcgtagattagactagaaaaaattgaaaattttgaaatcatgtttcccactcccttctcccaggggtattattttgtaaagtcttttttccccaataaacttgtcaaaccccatttttcgcaccgtgaatgttatttttattgaattctgaaccgttttgagtagattagactagaaaaaattgaaaattttgaaatcatgtttcccactcccttctcccaggggtattattttgtaaagtctttttttccccaataaacttttcaaaccccatttttcgcaccgtgaatgttatttttattgaattctgagccgttttgagtagattagactagaaaaaattgaaaattttgaaatcatgtttcccactcccttctcccaggggtattattttgtaaagtctttttttccccaataaacttttcaaaccccatttttcgcaccgtgaatgttatttttattgaattctgaaccgttttgagtagattagactagaaaaaattgaaaattttgaaatcatgtttcccactcccttctcccaggggtattattttgtaaagtcttttttccccaataaacttgtcaaaccccatttttcgcaccgtgaatgttatttttattgaattctgaaccggtttgagtagattagactagaaaaaattgaaaattttgaaatcatgtttcccactcccttctcccaggggtattattttgtaaagtctttttttccccaataaacttgtcaaaccccatttttcgcaccgtgaatgttatttttattgaattctgaaccgttttgagtagattagactataaaaaattgaaaattttgaaatcatgtttcccactcccttctcccaggggtattattttgtaaagtcttttttcccaataaacttgtcaaaccccatttttcccaccgggaatgttattttttattgaattctgaaccggtttgagaaaattaaaataaaaaaaattgaaaaattttgaaatcattgtttccacatccccttcccccagtgtgtatttttttggaaaagtttttttttcccaaaaaaacttttaaaacccccttttttccccccggggaaggtttttttttt

SEQ ID NO: 38462 - DNA, 800 bp, Heterodera glycines
  unsure (1)..(800): unsure at all n locations
cctttcggctcccctctctccccgcctccgttcgcttttcctcccttttgctttcgcccggctgctgctgctgattatgataatgatgctgataattgctgatcctttgttggtggacagaactgaacattcatgctttttctgtggcttttcgtcttcgttttgctttcgtttcgtccctttcgcttttcgcaccgtttgtggtaaaccgacccgcttctgtccactcccttcgactgatttttctgactgcccactgaaattgccaatgtccgccgctgtccgtcgcccccgtgccgttggaattggcgaattgttctcaaaattttgccatagcaaatcaaaacggtgaagaggcaaacatagcaaagcacgaaaatctgaaaggccaaacggacggggaaagtgccgagaaaggcaaaccaacgaaccattagcatgcacaacacgttgacagaaagcccggccacctgtcggcgttggactccgcttgggtcatgcggcgggggattccgtcgtcgtcgccctccgccgtctcctctccttcctcggtcattttgtcattctgctggtccaatgaaactgttctgttcattaggaccaaaaccaaaatgggaagaggcgaacaaattggcgaacaccgacccaatgccgaacagaagagagaccaaccaactgaaagtgccaacacattgaccgcctttaacccgaccgaccaaatttgcgaggatcagaacgacggtacgacggcaaaagtaacgcggggtagtggagggnngatattgatgacgatgaattca

SEQ ID NO: 38463 - DNA, 695 bp, Heterodera glycines
tcctaaaaaagtatcaatgataatgaataattaaatttaataattgttaataaaaatattttgaaatatagatatcatttttcttttcattagtccgaatgtattttctccaacttgattcatttccaattataaaaatagtgttagtcagctttttggagaagcatttttcgactcaagtgcaggtgatggatcaactttattgtttgtgggcgcaaaaacaatttttatttcaaatccggatttgtggccttccaaataattaagtaagagcaagagaaaaataaagctaataaaaaatattttcattttttatgtcaatatatgacaagaatgattttaacactgaaggggacgatattttataaattgaaaatttttattaatatggcaaataatattgacagcattgattatcgtttctgatgtaataataatatttcatgtttaaaataatttttattatctgcttaaatattattccattgaattataattaatctaattattcattatcattgatacttttttaggatcgacctagcacccattctcatcctctgaggatcaaaacattttgcctaagggataaaaagagatcactgcaatagttgaaataaatggtttaattttggatttctattctaggtccgtatcaatttgttttctttcattttcgactattcataatcata

SEQ ID NO: 38464 - DNA, 1071 bp, Heterodera glycines
  unsure (1)..(1071): unsure at all n locations
ttttccccagtgatttgtgagtgataagaaaatagaagaaattcagggattaattcctgaggaatttccaaggaccacgtccatcattgctacaccggtgccttaatggcattttaatgtcaaaatgcccgacactagcgcatttctttagacaacgaaaattaattcctgaggaatttcccaatgcattcgcagctttgttagaccgatgccgaaatggcaatataattggaaaaggacagacaacaatgcttttctttatatcagctgatggtttacaaaaatcgaaatacttcctgagtactttccaagaaccatgagaataaatatcgcactagcgccaaaatcgaacaagaacgctaatcatcagaatcatcttaattttccccagtgatttgtgagtgataagaaaatagaagaaattcagggattaattcctgaggaatttccaaggaccacgtgcatcattgctacaacggtgccttaatggctttttaatgtcaaaatgcccgacactagcgcatttctttagacaacgaaaattaattcctgaggaatttcccaaagccatgcgcagctttgttagaccgatgccgaaatggcaatataattggaaaaggacagacaacaatgcttttctttatatcagctgatggtttacaaaaatcgaaatacttcctgagtactttccaagaaccatgagaataaatatcgcactagcgccaaaatcgaacaagaacgctaatcatcagaatcatcttaattttccccagtgatttgtgagtgataagaaaatagaagaaattcagggattaattcctgaggaatttccaaggaccacgtccatcattgctacaacggtgccttaatggcattttaatgtcaaaatgcccgacactagcgcatttctttagacaacgaaaattaattcctgaggaatttcccaatgcattcgcagctttgttagaccgatgccgaaatggcaatataattggaaaaggacagacaacaatgcttttctttatatcagctgatggttttacanaatcgaaatacttcctgagtactttc

SEQ ID NO: 38465 - DNA, 793 bp, Heterodera glycines
catttttctgcagcccttcctattataggtagaagccctccacgtttttgttttttagaaaacacttcaacttagccccctcacagcgaacattttttgattcgagttttcgaaaaaaagttatgggccatcaaacgcaagcaaaagtgagaaattagccgccgggactcagttggccctcggagaaaaaaacctatagttttcccagatgcgcctcaaaaagttgtaagacccttccaccactttcagggcactcccggccttcggccgggagattttgttttttgaaacgaaactcaaaacctatataacatatatataactagcgtgtgcgtgaaccgtcggctatttagctggggaaaagcgcttcgcgctttgggagcttcgctacctagataagctatgggttgtgaaaaaattgggaattttaaaaaattatcagcgatttttaggccgcttccagtgattagaagaggtacaacagtgattaaaagtggtacaacagtgattaaaagaggtacaacagtgattagaagaggtacaaaagtgattaaaagtggtacaacagtgattaaaagaggtacaaaagtgattgaaagaggtacatcagtgattaaaagtggtacaaaagttattaaaaaacgtacaaaagtgattaaaagaggtacaacagtgattaatagagttacaacagtgattagaagaggtacaaatttgatgaagaggtacaaaagtgataaaagaggtacaaaagtgattagaagaggtacaacagtgatcagaagaggtacaa

SEQ ID NO: 38466 - DNA, 1479 bp, Heterodera glycines
cccaaaatataggaaataatgatatataaatacaccattcctcatacaaaacgaaaatttaatggattgacaatgattatgtccgtttcttgtaataatgtgtcgcatttccattggtcaatacagtggtgccattttgggcaacccgagcagcaggcatttccatgtttggcacattctcattttcatcggcaaacaacaaataaatacgataaatgatcgaaatgctggcccaagtgatgaacacagaaatcccggccatatgctaaatttatttaggcaaattattttatgtttttttattaggttcattttttgaaaaaagtctcaaaaatgctattgaaaaacacaaataaaaaaaaccatttagaaaattaaaaagcgattgtaattagaattgcaaataacgttttagtccaatttgtgggatccacgaaattttaaatggaaaattttgagttttcgcaaattttttagtaaaacaaaatcattttcggagtttgataaaccatcgttgaaaattaaaaaatttttcatcgagtaatttcatcataatgaaaatcgagggcctaaaattattaataatttctatgtaatttatttactttattggaccagtgagcatggtaaataaattgggaccaaaattgtgccaaattgatgcacacaatcatcaatgctcgtgtttctgctgccaatttgaacccttctcgacaaccataattaaacttaaaaatatttaaaattattaaaatatttttttatttatattgtattcttactgcatagttgctgataatgtacgaactcaaaaaattgaccccaataatttggccacaaaattgatgtgatgggtccaattgtataagcacttaaaattgtcagttaattttcaatgattaataaaaaaaaaataacaaataatcacttttattttgatggtattccttatcaattctatttttttaaaatttacttgattccgcagaagccataacggcgcaaatgcccagccaaatccaatcaaaattgccatcgcactgtccaattgacaaaaaatgttgccccaattgttggttgtcccaaatttttcaactgaattaaacaaatggaaagtataaatttatgcataatcgaaaattaaaaaaaaattttccaaataaatagctgaaagattttagatgaagcccaaaaataatcaaaaacaaaaaatctaatcgaaataattaaaaaaaaatttttttgtttgttgataaatgtttacttttcggccatccattaacaaataataggagcaagcacactgctgaattcgcaatgaacagccaaacaaatggacaaattatcacttcaaattgaaacattaattattataattttgcaatttaaattaattaatacaaatttaaaatatttatttaatacatataattaattaattacatgtctcaacgtattctgcattcattgcctgagtat

SEQ ID NO: 38467 - DNA, 957 bp, Heterodera glycines
tttttgaattctgacattttcagctcatacgctctaaatataaacagcatcagtgtccggaaggatcgatttgaaatcgccaataaccccccaaattacaatttcctactgtaaacttatacagattacatttggatataagaaattgaaatattgagaatatcacaaaagtgatcatgaaaattataaattggagattattgggacttatcagctcggtcctccgcaaacactgattcagtttatatttagaggataaggagttgaaatggtggaattccaaaaaggtgaccaagaaaattgtaatcgaagattattggcgattatcagctcggtcattccgcaaacactgattcagtttatatttcgcgaagaatgagctgtaattttgcgaattagacaaaaatgatcataaagtaacaaatgagagaatttcacattctgctaattaggctttaaatataaactgtttaagtgttgcagacggatcaggttgataagcgccaataacctcagatttactattttcgcgacctcactttttgaattctgacattttcagctcattacgctctaaatataaacagcatcagtgttccggaaggatcgatttgaaatcgccaataacccccaaattacaatttcctactgtaaacttatacagattacatttggatataagaaattgaaatattgagaatatcacaaaagtgatcatgaaaattgtaaattggagattattgggacttatcagctcggtcctccgcaaacactgattcagtttatatttagaggataaggagttgaaatggtggaattccaaaaaggtgaccaagaaaattgtaatcgaagattattggcgattatcagctcggtcgttccgcaaacactgattcggtttatatttcgcgaagaatgagctgtaattttgcgaattagacaaaaatgatcataaag

SEQ ID NO: 38468 - DNA, 868 bp, Heterodera glycines
atcaaaaatatgtaattagctgcagcatttagtggaattcctgctttggtatgtgtgtgctgtgcttcattggaattcagttgcacttaactgattatttacaggagatgccaatattggcatgagattgttatgggtgtgggggagggaatttatattagcattaaaagctttaaaaatatccgttcattgatcaacaggcatttgaaaatggaaaataagcaccatatggcatggaggaacatctaatagttcattaatttgtagtttatcgaacgaattccttacatttttggcatttcgttttccacgtagaaaaatgacggaattaatggcggatgataaagaaccaaaaaaagggttatacttcggaatttaatattgggttgtgaagcacaaccacgggtggaagaggtacaaccacgtgtggtagaggtacaaccacgggtgggaggtacaaccacgggtaaaagaggcacaaccactggtgggaggtacaaccacgggcaaaagaggcacaaccacgggtgggaggtacaaccacgggtggaagaggtacaaccacggtggtagaggtacaaccacgggtaaaagaggcacaaccacgggtgggaggtacaaccacgggtggaagaggtacaaccacggtggtagaggtacaaccacggtggtagaggtacaaccacggtggtagaggtacaaccacgggtggaagatgtacaaccacggtggtagaggtacaaccacgggtaaaagaggcacaaccacgggtgggaggtacaaccacgggtggaagaggtacaaccacgggtggaagaggtacaaccacgggtgggaggtacaaccacggggtggaagagttacaacc

SEQ ID NO: 38469 - DNA, 1234 bp, Heterodera glycines
  unsure (1)..(1234): unsure at all n locations
agataatattaatagaaacaaaattaaaatatttnttgcactacccatttttatataataatttatctattaatctatatgctcacctcagtaaaattctatggtgctgatcacgaatctaaactcggatttatcaaatgccaaactccgtaaaaaaggtctaatttttttccaaaatatttgatcacaaagcttcaattgttaattgcataaaaaatggcaatttaataaaacgaattaaactcgaactgactaggattaattattaaaatctaataaattaaaagtaatgcaatttaaatgattaaaaggtcaccgaaaatttaactcccggcacgacatgattaaataaatatataaaatcataaaattatctttttgattcgccgaaccctcggaatttgtgcaacctccttttccagagacacacgtttcgggcgaccccttcaatttccatttattagcccattgtccatgactgggttgcggatccacttaaatatattatgaataaataaatattcaaataactatttttacggtttgaaattgaaaaccgatgccctgggcatgaatgaatgtatgcgtttagattcttcgggttgtacataaacaaactgaattgtttcgagcaattgtcttattaccagaaagtttgccagccgtcctggccctcccattttggatacgaacccacagggacataactaaacaaacaatatgatttggtttaatattctattaaaccgaaacggcgggtagcgacagctagtttctaggtgtccttgcttgccgcaattccagcatgctttcgaaccctctaagaaaataaattaaaaacgtatttttcttaacacaaaccaatgaaagtgtacggatggcaattagtacactctctagcgtcatgactccacgtacgacagcggtgacacttcatacgttttgtgccgtccggacccacaagtttcggacagcatttaacaagatggtcatccccgcagtgccaacatccaccacgctgcgtacccacaagacgaagacggcgaatctctctgcattttcttttatttcatcagcacgtgacataatttacttagctataattcactatgncattttattgcaaaaaatgattttttaataataggttgacttggcaacattaattgtacagtatatatcacttttactcatacacacatcnattagggctgccaaaaatatggcacgaaaa

SEQ ID NO: 38470 - DNA, 914 bp, Heterodera glycines
gaagaggtgcaacagtgattagaagaggtacaaaagtgattataagaggtacaaaagtgattagaagaggtacaaaagtgatgagaagaggtacaaaagtgattagaagaggtacaaaagtgattagaagaggtacaatggtgattagaagaggtacaaaagtgattaaaagtggtacaacagtgattagaagaggtacaatggtgattagaagaggtacaacaatgattagaagaggtacaacaatgattagaagaggcacaacagtgattagaagaggcacaacagtgattagaagaggtacaaatttgataaaagaggtacaaaagtgattaaaaaggtacaacagatacatgaaattctatcaattaaaaaataattaatttaaacttataaaatttatttatcaaaaaaaattaattaaatataattttttatttattaactcaacaaaatattttaaattaattaaaatcattgaaaataacgtaaaaatgcacaaaaaaataatgttacaccgtccggattcgaacctgccccccccccctcaaaatgatgcctcagaatccccaatcacacagggattctgaggtcttgacgatgtcaaaagtaaaatctgatcacgtattcgtgatcagcggcccaaataacccctaaggacatatttttggaagatttttgtgagaaaaatttttccactcaaaaatcctgtccaccccctttggacccgaatcacaaaatcacttttatttttatatcttattttaaaaatttgataaaaatgtaaaataaaatttatattatagaggaaaaaattgcggatttttgtaatattttacttttacagaatgacttttcagaagggagttctaaatgtttttctgaaaaatctaaaatttccagaatttctggaa

SEQ ID NO: 38471 - DNA, 796 bp, Heterodera glycines
agagaaattgtatctctatatatgtatgtatatattgtatgtccatatccctgtggcattgtcttgctgaatgtaattctcccacaaatggttgttgttctatttaaatatgccatatatatgtgtattttttataattgtaatatgtttgccctgtttatgcatgttttatggtcatttattattattgccgaataaatacatttatatgaatgagtacattttccatgtcatcaattagggagtccaaaaatatggatataaaatcgcgaaatatggaccaaaatcgcaaaatatggaaaaaaatttttcaaaattgagggtataatttttcaaaatttgctaaaatattgtaaaacttacaaaaaatggctaaatgtggtattaaaaccattttagaagaaaaaaaacatgatacaactaaaatttactcttttttagcgaaaaatcaacatgggaagcaaaatgtcgaaatttgtcacggatggtcatgttagctttgagaaagagtgaataaaaagcggacgaacggcgcttctgttgggagagccgcttgacgagcatccgtatctctctgatcataattcgcggacaacaagacgaattgttgagacttttgaactgctccgagtaaatccggattaacaacaattggcaaatgagttaaaaaaggagtgagctcaccatcgtatatgaaatggacgaaaagcttcccgctgactgtattaaaattttttgataagccatttaaaaaactcgccatttcgtaaaatttccgaaaattcattctccaaaa

SEQ ID NO: 38472 - DNA, 1257 bp, Heterodera glycines
agtctaaaaaagttaagcctacattttttggcatatttaaaaagctattaaaaagttttaaaatttaataattttcctgcaccgaaggtactcactcggcctcttcgcggcctcgtggtgggccttcgcccccccccctcccacgcccttcagagcacgacaaatatttcaacaaaaattttgaaatcatgtttcccactcccttctcccaggggtattattttgtaaagtcttttttccccaataaacttgtcaaaccccatttttcgcaccgtgaatgttatttttattgaattctgaaccgttttgagtagattagactagaaaaaattgaaaattttgaaatcatgtttcccactcccttctcccaggggtattattttgtaaagtcttttttcccccaataaacttttcaaaccccttttttcgcaccgtgaatgttatttttattgaattctgaaccgttttgagtagattagactagaaaaaattaaaaattttgaaatcatgtttcccactcccttctcccaggggtattattttgtaaagtctttttttccccaataaacttttcaaaccccatttttcgcaccgggaatggtatttttattgaattctgaaccgttttgagtagattagactaaaaaaaattgaaaattttgaaatcatgtttcccactcccttctcccaggggtattattttgtaaaggctttttttcccaaaaaaatttttcaaacccattttttcccccggggaaggtttttttattgaattttgaaaccgttttgggaaatttaaataaaaaaaaattgaaattttgaaaatctggttccccctccctttcccccgggggattttttggaaaagctttttttccccaaaaattttcaaacccctttttcccccccgggaatgtgatttttattgaattctgaaccggtttgggtaaatttaactaaaaaaaattgaaaattttgaaatcctgtttccccccccctttccccgggggatttttttgtaaaggttttttttccccaaaaaaattgtaaacccccttttttcccccccgaaagtgttttttttttaaaatttgaaccgctttaggagaatttaaaaaaaaaaaaaattaggaatttttaaaatccttgtcccccccccccttcctcccgaggggtttttttttttaaaaagtttttttttcccaaaaaaattttttaaacccccttttttcccccccggaagggttttttttttta

SEQ ID NO: 38473 - DNA, 631 bp, Heterodera glycines
  unsure (1)..(631): unsure at all n locations
tttttgttttggttgacttggccattttggcttgtcgcttntactgaatatcgaagatacatataaatgtaatagttaaacattcttcatattgccatttttgaagatcatcaccgaattccactaccacaaatcgcacgtgccaacctatggggtgataatgctcgacccgacacttaattatgtgctgctcgtccaaggatattacgcctcgaaaaactcgtggggttttccgaagggaaaggtgggaaagtgtttcacaaaatatctaattccaattgacatttccttttcagattaatgaggacgaagtgcctttgaattgtgcgttgcgcgaggccttcgaagaagttggctttgacgccaccgaacacataaaaaaccccgagaaatgccgcccactgcagcacttttttggcgaaacattggtccgtctttttcttgccacggatgtgccgatggatttcccttttaaaccgcacttgcgaaaggaaatcaggtgaaagaaattccactgaataattttgcatcanagtcaatttcttggcatctttcgggtgcttttttagtttataaagacacttttaacttgcactttctgggccgataaaatttctttcattacattgat

SEQ ID NO: 38474 - DNA, 1826 bp, Heterodera glycines
ccaaaaatctctccaaaaatatcggattttacggggttatctccgcgccgccgatcacgaatacgtaatcagattttactttagacacggttaagacctcagaatcccagtgttatcggggattcttaggggtgggagcgcccgtcccgaggccgcgaagcggccgaatatctccaaaaaaattaaaaaacgggcgcgaaccgcccgtcctgatgccgcgaagcggccgaatgttctcaacaaaattacaaacgggcgcgaagcgcccgtcctgaggccgcgaagcggccgaatgtttcccacacgattaaaaaacgggcgcgaagcgcccgtcctgaggccgcgaagcggccgaatgtttcccacacgattaaaaaacgggcgcgaagcgcccgtcctgaggccgcgaagcggccgaatgtccccacaaaattaaaaaacgggcgcgaagcgcccgtcctgaggctgcgatgaattgctaaattacatcactttctagcgacgcggcgaagccgcgtcccatagcgcgatagcgctttaaaacatcacactaatggaattaatgttttgtatgttttaaaataacaaataagggccatatattaccaagccacgcatgcacaccatagccaactgggcaccctagtttagatataactaaagcaacatcgagtttcattgctaaaacaaaaatctcgagaaccgctggggggagggactcgggagtgtggcattgcttaagcaactttttgaggcgcatccaggaaaactatgggcattccggtccggtggccaactgagcgccggcggcgctgaaacggcttttcgtttcagtctcactgttacgaaatttttttcttttgctttgatcaaaaaatgcttgctgggaggattttaagttgaagtgtgccctacaacttcgcttccaatcatttttctctacggcctactgtattccgtgtacagtcgtggaaaaattgcttacttttttggccatttcagcgccggccgaataactcgtcggggttttgagggaggaggtcggtgtaagcggcttttttgtacagctcgacgagctctatccaaccatgtttttgtatttctgaaattttcagaaattttcgagctaggccccctcgtcacttttgaggtttttgaattttagtattttttgcagatttttccggggaaaacgaagaccactttcaagcaaccgtttttcatgctctatcgattggtgtgattttcagaaaaaattttcaaaatttttttggaaatagaaaaatttggttgctaggcctcaattttagttcttgcgcaataacttgtcaggagttgaatttatcaaaaaatcgtctaagagcttttttgtagagaattttaagcccaatctaatgtgctttatctcatgtttttatcttgaatttaaaaaaagttataaaattaattgtgattttgaaactcaaaaccaaaggggggaccccatggttttgcatttcatgaaaaatttttttgctccctaattagccaaaatgcattttttatagcctaatttatggtgctgaagacaatatatactttatttttggttccgactttttgaaaaaggattacaaatttttgaaaaatatcaaaatttgaaccccggaaatccaaggaaaattcaaaaattctaaatcccttcttttttggccaaatttaagggaataagtttgaaaaaaagaaaaaaattaggaaaattttttgggatttttttaaaatcctatcttccaaaaaaaaaagttattccaaaaattctgggaaaattcattttttaaaaaaaattc

SEQ ID NO: 38475 - DNA, 1128 bp, Heterodera glycines
cttaaatttaattaatttttgtatgaagctttattacttccctgcgaggtatattgaagaagtttgttctggttttaacctatttaaacaaaaacatttcattcttcatttcataaattatagcatttgtatagattagaacccttaaattttttcctctgtaacaaaataaagattcgattttatgtaaatattttaatagcaattatttttaaaattcttttttcttgttttaaaagtttatcttaaatatttttaaatcgagttaaattaaaataatagaaaatttctaactaacattttttgaatcgctattgtttgaatactatttttaaaatttggtatgaaaaatataaatcaaattatgattttaatttaagttaattattttgatacaaaatgcagatcgattattcattattgtatttcttttcaactataattttttctataaatattattatttaacttattaatatatttaaagttattgaaaaaataaatgcttttataaaaaattataaaataaatgcaattttaactaaaaatattaaacttaagtttttatatacaaaatttgtcattgacaaaaattatgcttaaaacaaataatttaaaacaaattaattataaaatcaattaatactatgtttagtgtttttgatggaaactaaaatttttttgtaattttgaactcgtcctgacggcctaaataaggatctgaagctgattaaagcttattaaactttttataattttcgctgatttttagatttaagtttgtttatattttaataatattttttatgaatagcttttatttcaagaattgccatttaataaggcatagtgttttaaatattatttgttttttcttaaaaattattaatgtaaatttatttattcgtacttttaatttctgactttattttttctggttataaaaatttaatatttggtttttcatgctaactttaagggggtaatattgaatgaccattttcataaaaatttaactcaatgattttattttattttcctgtgctttgatattttttcattactaagaacaatattggatttgataatgtcatcaaaaataattaaatattagagaaacttttatat

SEQ ID NO: 38476 - DNA, 785 bp, Heterodera glycines
cgcttctgatcagtttctgaaaaaaaagttaagcctccccccctttggcctgtttaaaaaggaattaaaaatttttaaaaattttattcatctccctttttgatagaaaaagcatcagagtgcctaaactaacatgtaaataaaatttggtgcgtttcagaaccctttctgaaaaaatatttaagaattaattttgcaaaaaaaaaataaaaacgaaagactcagattttcgaaaatttttttgagccagctagctcggcgctcatttcagtgtaagttagtcctttaccggggagtatccctgcaaagtttggtacgcttctgctcaattagcaaaaaatatgagtgatcgaattttcactaaaaaagttaagcctacattttttggcatatttaaaaagcaattaaaaaatttttaaaatttaataattttcctgcaccgaaggtactcactcggcctcttcgcggcctcgtggtgggcctttcgcccccccccccccccccgcccttcaaaattttgaaaaaaaaataaaataataggagactcagaattttgaaaattttttataaaaactgatgacaagctaatgtgataaaacaggttaaatcttttcctttcagtatccctgcaaagtttggggcgcttctgatcagtttctgaaaaaaaagttaagcctaaactttttggcctgtttaaaaaggaattaaaaatttttaaaaattttattcatctcccttttcgatagaaaaagcatcagagtgcctaaactaacatgtaaataaaa

SEQ ID NO: 38477 - DNA, 525 bp, Heterodera glycines
  unsure (1)..(525): unsure at all n locations
ccttcctttgacttcgttttttcagagccatatagtcccaacaattttggcacaacaatttgttttggataagtccgttgtgtgccaaaaattgtaaaatctcttcagagtttttggaaaaaagccatctcaaatttatatcgtccaatgtttgaaaagcgatgagcggcagattgttggaatcattaatggaatatcttgaaactttaaccatttgctaaaattgcatgaaaaaaatcgggtcctacatgcaggtntacgcgtcccaatcgactttttacgcgtcccaatcacaaaatttacgcgtccatncgactttgtacgcgtcgcaatcaaaaagtttaacgccgtccaatcacagttttttacaatgcttattctgtatccagtatatggtttcggtagatctaacaaataacgaaaaaattttttcagcaaattctcaaagaaatacgtattcaataccctgtctaatcatcttttcgttgtagtaatcaaaaagtcttctttttgacatttaagcat

SEQ ID NO: 38478 - DNA, 1000 bp, Heterodera glycines
agatagccatttttttggaccttccatacctcacatacccccccccggcccgaaaatcatttttagagcataacaactgatgacagccactgtcattgtttccaaagagatttctattaccagattgccaaaaaaagagatagccatttttttggaccgtccatacctcacatatactcaaacggcccgaaaatcatttttagagcataacaactgatgacagccactgtcattgtttccaaagagatttctattaccagattgccaaaaaaagagatagccatttttttggaccgtccatacctcacatatactcaaacggcccgaaaatcatttttagagcataacaactgatgacagccactgtcattgtttccaaagagatttctattaccagattgccaaaaaaagagatagccatttttttggaccgtccatacctcacatatactcaaacggcccgaaaatcatttttagagcataacaactgatgacagccactgtcattgtttccaaagagatttctattaccagattgccaaaaaaagagatagccatttttttggaccgtccatacctcacatatactcaaacggcccgaaaatcatttttagagcataacaactgatgacagccactgtcattgtttccaaagagatttctattaccagattgccaaaaaaagagatagccatttttttggaccgtccatacctcacatatactcaaacggcccgaaaatcatttttagagcataacaactgatgacagccactgtcattgtttccaaagagatttctattaccagattgccaaaaaaagagatagccatttttttggaccgtccatacctcacatatactcaaacggcccgaaaatcattttagagcataacaactgatgacagccactgtcattgtttccaagagatttctattacccagatgcaaaaaaagagatagcatttttttggaccgtcatacctcacatatactcaaac

SEQ ID NO: 38479 - DNA, 948 bp, Heterodera glycines
tttctcgaaaaatattttacttatacaatttatgatattctgacaccaaacagtttatttatttttaaatttattctaggcaaataaaataaatattaaaaagttattttatttaacaatgattttttaaattaattatgtaattatttaagaaacactaaaaacaattaaatttttatacattcaactatgtttaactattaattacttaattgaattattaaattttgcccaaaggttggcccatccgtgaacacatgcatttgtgcggatcgggaccggtgcaacaatgtgacatcggtggaaccatttgtggagtatcgtgacaccattttcggtgccatcaattttgacgagttggcacattttaggcaaatttaattaattaatttaatttaaatttaaaaatggacactaaaggaaatggatggatgaaaaaaaaattgcaaaattttagggaatcggaattttcaaaaacctttaaaaaaccttaaaaaattttcaaatatttttcaaagcttttttaaaaattttagaaaaaaaaacttaatcattcataataaaaattctgaaaaaatcgctacaaaaattttttcaaaagtttttttattgtaaaaaattttctacatttctgtttgaatttctttttaaattactccgaaataaaaaccgattattaaataattataattttttactattcgtattaaaaaaaaaattttgtattatttttcctacattaaaaattttttttttttctttcgtttggccattcaatcgttttttggccataaatcaggaaaaaaaaattcaaaatctccaattattatttcatttcttgttgttgaactgttcagacatcttttgccaaacgacccaattttgaatgattttgagcgtgatcggtccacggttggcggtggataccttctgatcaccaattcggtg

SEQ ID NO: 38480 - DNA, 714 bp, Heterodera glycines
  unsure (1)..(714): unsure at all n locations
tctagagtccatnnttttctgagaattaattcacaatttccgcagctcttagggtaatggaaaaaattttgaagaggctctccggaacggattagcatcggggttacgagatagaaaattgtcctaaaaagagatagccatttttctgagaattaattcacaatttccgcagctcttagggtaaggaaaaaattttgaagaggctctccggaacggattagcatcggggttacgagatagaaaattgtcctaaaaagagatagccatttttctgagaattaattcacaatttccgcagctcttagggtaatggaaaaaattttgaagaggctctccggaacggattagcatcggggttacgagatagaaaattgtcctaaaaagagatagccatttttctgagaattaattcacaatttccgcagctcttagggtaatggaaaaaattttgaagaggctctccggaacggattagcatcggggttacgagatagaaaattgtcctaaaaagagagacatttttttgagaaattaatttcaattttcccagatcttttgggaaagggaaaaatttttagaggagctccccagcagagtatcatcggggggacgagataaaaaaatgtgctccaaagagaaagacacttttttgagaaaaaattctcaattttcgcagctcttatggggatggggaaaattttttagagggtctcc

SEQ ID NO: 38481 - DNA, 697 bp, Heterodera glycines
cggccgccctttttttttttttttctttttttttttttttttttttttttttttttttttttttttttttaaggaaaaaaaatttctatttattttcattcacgatcaacgaaacaatatcgttttaacagagtttataggattttaaatcaaaaatctaatttcaacagtttcgggggggggacaaggggtttattttactaatacaaaagggagggaggaccttaactagggtggacatatacaaaaataaaaatatttggaaaggagtattttttttctttaactgcagcatgacgcagggtgggggtctttgcctgatcgttttgggacattgattctcgggaattcttctgctagggggggatgaaggcctacagtttccattaaatcctttacgggtaaatttaatttgattgctggggcaaatccttgaataatctccccagcgtttggcccaaggaagggcaatcctacaactttttgattaccctctctatgggcgactacctttaagtaacaattggcaatacttttctggggaataaagaactcagggggcttgaaatatccggggaaaacttcgatgttgtcttcaccgaatcgttcaagggctgtttcttcgctcaagccgacacaaccatactctagggggctgaatactgtaggggccacgttttcgtaatccataacttga

SEQ ID NO: 38482 - DNA, 613 bp, Heterodera glycines
ctgccgtccgtccgttgctctcttaattcattcccctcaattcatctatccatccacctttttatcgtcagccagcttggcagcattagcaataaatttggggcccaatattcgcttctcacccactttacctcggccggcacattttttgctccaacggatttgcccctccgggggcactccccgccccccgccccgctaatgtgacaaaggccgcccgaggcgcggggacagcagccgccattggccaattcattgccgtcctcgtcgccgccccttcggccacggctctctcggcccctgccctctgctgccagccgccgctaattgctcacagctgctggtggctggctggctgactggcgagagtgaagtggggtgaaggacggcgacgacgattttagttgggcggagggaggggttacggtggaatgaatgggcgggcggtgggaggggggggggcaaaggcgagaattgggggaatgaatgaatgaatgaaaatgaattgaaaattgctttagggggagggggagggggggagcagcaatttaaggggggggacacacaaacacacaacaagcagaacattattacataacacctaattgatttg

SEQ ID NO: 38483 - DNA, 975 bp, Heterodera glycines
aagcccattttattgaatgtttcctaaattaatcattctcaaacaaaatttgattattttcactggccaattgaacaaataaatgcccactcattcactttcaattcgctcactatttcctcccacttggccattcattattccactcatttgttttgtttttttccttttacatatgtccaacattccctcctcccatttggtggctgactgaatgactgttggttgttgggaattggaaggactgctgtttcattatcagtactcccacccactccgccacattcactcctctttcatcttttcgtcacaaccaaaacgggaattcccccggggggcaaagagaaggcacccaccccttccctatttcccccccccccatccatcgataggcatctgccgcttgccctgtgcttctttctcttctcactgtcgatattcctcgcttccctcaaacaaagaaagcggagggaatggacgcattggtcggcggacgatgttgtctttctttcacaacaaatgcatcattccctcctcattccctcccttgactcatatgctgacaaattaatgcgacggcgacaaaatgtcataaaaaacgtttgtgttcccttttcaaatagcttttctcatcttcacccctctcaaaatgggtttttaaatcattttcaacacatttttaattatcctttcggcatcatttttgccacaaaagccgttaaaagattcatttggcttttctcacttcaccaaatgccaattttggcttttgcgcctcgttctctcccctttcttttcttccgttccctcgcatcctttttcggccttcatgaattacgcattgcctccccttaaattataaatttgtcgccgttttctcccgctgtgagccaatactttttcctcccctctccctttgtctatcctctttcggacgtctctctccccctccccttttctcttttcctttcctcc

SEQ ID NO: 38484 - DNA, 831 bp, Heterodera glycines
cgctgtcgccttctttcgccggcaaaagtgccgtcgttgtcgcttcagagcgtccgcgtcccgaaacgacctcaccaggttggattggatgagatgctcaaacagttcttggcatgccaatgaattcaattgtcgcagctgcgcactgtgaacggattggatagaatgttgacggactgaaacaaaataaatgattatattaattactaaacttaaaaagggactgatattcggattattattttatttcgacaataggggttgtatcagaaagatgtctgaatttgatactttttttacaatggtctaattgatgggttgatttcgtcgcaatattgccaccagcagagggatgttacgagatcaaaaataaaatgcgagaagctacagtcatggtcataccacgatgccctatcgtgctgtggattgcttggatcgccacaatccctgtggttatcgtatgaatactactctaggtcattattctgcgtaggaatccttctgtaggtttctcaaaaatgatctgaggaagcgattttccactcccttttatagactttgagctcgagcaggataactacattagcctagtgtaggaaaggctagcgtaggaatcctacgctaggtcattagccagcgcaggattcctacgctagattttcacaaatgatccgaggaagcgattttccactcccttttatatactttgagctcgagtatgataactccattagcctagatgtaggaaaggcgagtgtaggaatcctacgctatggcatcacgtattcgtgatcagcgtcataaactaaccctactgacatgattttgaaa

SEQ ID NO: 38485 - DNA, 1416 bp, Heterodera glycines
gatttttaagaccaaaaaacccaaaatagttacctaacccccacagtaaaataaaaaatttttgccaagaaagtaaattttttagaaaattttttcatttcataggagtatattttgaaaaattttagctcgattcttaggggtgtatttgcatttttgacatagtgaaaaaatagtgacaaaacgccaaaatagtgaaaactccaaaatagtgatactcggagggggggggggaagatcgattttcttcattctcgagcgcttcattatgtaatgatgaggaacactgtgtgtgtgtattgtagacgtattaggacctttcaatgatgcaaaggaagctgagagaatgatagctttgggaataatataacagacgttgtgttttgagaaatggcatccccataccttgctaaagcattattctttggctagaaaatatcattagaaaatagcgggtgtagatactgaaaaaactgttcttataattttaattttacaattagaaacgccaaaggtacaattatagtaaatgccaaataggttgtaagaataggctcatttgctacaatttagaacagaatgtaatcggcaagaaagggtttttaaactaatttcaatgaaagaacttcataacaaataaattaatgacttctctaaatgaattgcctgcaataaaaatgctaattttctaaattcgcatgtgccaaccttgagcaccttccattaaacaccatcttttttgaggcagacaatcaatgaaactcacaaccttcggttgtaattagtggggctgttagtggaatagaaatgttaaattttttgcctatcaaatatttgcaataaatgcccatctatttaaaaaatattctattctattaaaatgttctgtattttgctatatattaagaatagccgtacatctaaaggagtcagtaattgaacaaatttctcaaatttcaagaaaggttcaggcagtcgccgtaaaaattgtctatataaaaacaatggcgttacgcatttctgcactaggtcctttttcaaaattgatgtgcttttattgaaaaacatgtttaacgggccacaaattaatagacaaattcaggcacattcttaaaaaattctgcttttaattagttcatttaatagattatgcttttgctttgtttttttaaattctacgcctgcgattatctgataggacaatgatatcaataaattttcttctgaagaagcgaagagttagcccaaacgttttccttcctttctatttaatgatctatcatttcagatataacagtcaaaatttaatcggccggctaaaatgaattcggtaggattttatgaaaatagtttgaaaaaaattgaaaatttcttttcaagatttaatggaagctagtagaaggaacctttttgagt

SEQ ID NO: 38486 - DNA, 1210 bp, Heterodera glycines
ggacgcaattcagcgcgaattgccaaaagaagagacggttaaaactattgaacaaggcaaccaaagtaacttttggccattttaatgaaggtcttttgtcaggttcgattgaccatggtcttaataatttccgaaaaaatcttaacaaaacttataaaaattttacgagagtgccttgtcggcactgtcggattctccccattattctttaaaaatgacaataattttaacatttttaagatgcgatgccgttcaatgttcttcctcagtgatggattgagtaggagatatatttgagttacattaattgtattatgtgtgtttgatatgataaactaggattgacatcggcattaatacgacaattctttaaattagagaccgagatttccaaattctccggaccggactggtattttaaaaaatgactggatcccggatccggtctctcataatccggtcaatccggattttcatattgccggatccggaaccggattggtaaaaatttaaaatttcgcatcttaaattggggaaaaacccgcaaaatgtcatcaattatatgtataaattcggtgcaccagaaaatgtcgccgttgaaaagacaatttcgccaaaaaaataatttttcaaactcagattttgcaaaatctaattatgcctatgacttttcatcaagtactcgattttctcaaaaattgatcttttcaatggcgtagaactcataagtctttcaactaaaacccatcacaacaattcggcattttaaatttgccttcatatattatagctctttctaaaaccacttattagttatatgccactgaggataatattaattttaccgccaacaattttatagaaattaaacattggaaatcaaatacttgatgaaatagccctatttgataaaaatcatttcgatcatagctataaagcaacaatgttagttgagatagaaatttataagaaaatctctatagaacaggtttcaatcagatcataaaaataaacggtcaatttcacaaatgtaaaggcggctcgatgaatggaaaaatgtttgtcattgaggctggcggaaaacgaaggctggcatacgctgcggcggagccatatgttgtggtggagcaacacgttgcggtggaggagccatacgttgcggcggagccacatgttgtggtggagcaaaaagttgcggtggaggagccat

SEQ ID NO: 38487 - DNA, 901 bp, Heterodera glycines
  unsure (1)..(901): unsure at all n locations
aaactagagatcgacctggacctggatccaggccctggtttttcccggatccaggtccaggtccaggccatttttcggcaacctggatttttcctggacctggattttcctggatttttgtccaggaaatcaaggtccaggtcaaatgtgaaaaaaaatccaggtccaggcaaaacaggaaaaaacctggattttcccggacaaaattttagaatttattttttcaagtgaccgatgttttttcaagttttcaaaaacagattaaataaatttaaaaacacattattattattaattagatatttttagatgcttctaagcaaataattaattttttcaaacatatttttgatttttaaaataaatttcaaaaaatccaggtccaggcctggatccaggtcccgatgancctggatttttcctggacctggattttcctggatttttgtccaggaaatcaaggtccaggtccaacatggaatccaggtccaggtccaggtccaggcttttttcaaaatgtcgatctctagtttaaacagctgtgagaattggcaaaataaaaaattgcaggtttcaataatttttttgttttcaaggaaatataaattttaagcacagggttgttaaaattataaaattttaattagatttataacattttatagattttatttttttaatccatccctttggtgcccaaacttcatatccgctttacagcaactaattaattatcgataatttaaaaaaaaatccatccaaaacttacccatgaagcgtcttttgttttcgactaaatcgataaaataattgaaaatttaatgattattaccgtatttcctaaaatacagtcctccctcccctanattagaacgcccctgaaataaaggaccctttttga

SEQ ID NO: 38488 - DNA, 1356 bp, Heterodera glycines
aaaagctcaggtcccggtcccggtcccggtagggcaaccgggaaccgggaaaaacaagcactggtaagaatggggtctgagtgaaaaattagtgaagaaaattggagtcaaagggaaaaataaaaaataataattaatatattctttaaaagtaacactgcccaagtgtgcaaatggcctaatggctagtctccttgactttcccttcttctttcccctggtttaatccctctacaaaaaatagattattttcaattttttgttttgtatactcgtgggtttcctataaagaaaatatgattcctcatagtttcttttaaattgatacatattttatcattttttaaatgaaaatcctaccaattgagcttaataatcgcaaaaaccaaccttttttgttgaaaatctgttaacaaattgcacccaaatttttaaaatttcccccggcggcgcctatcggcactgccggacaccttcggggggtgaaaattttttgattgatttcaaaagtgacagacgaggggaggggaaaatttttgacagaaaaattttttgattggtcaccaaagtgacagatgagaggaaattcaaattttgtggggagcgggtggggagggtagagagggatattttctcatcttttctctgtgcgcatccattcctgcccagcacaggaatggattatcgatttgacctgggagtggacattaacccttcccatttttaagcgttcccttccacattttcagcgttctttccccacaagcattatttcggcagttgcgagcaacaacaaaaacaacaaaaaaataatgccacagaaaaaggtgcgcaataaaaatttgaattaaaatagtttttttttcaattttagcaaaccccccgcaaacaacaacaacagtcattggcacagcttaaaaaagtggaaaattttgattttttttcaaattttggttttttcagtccaccgcgcaattgactcaaatttatgctgatttttttggattttttaattaaaataaaaatggtaatgattgtattaatttttggatttttttttggaatcaggcagcaccgcaagtgtacgacaattgcccgggggagcacgggcacgcatcgcagacactgttggagcagcaaacaacgccatgtatcgacttctgttcgacgacagccgcgagaactacttcagccatcttgagcgagtaattggtcagccgtaggatatgggatggggtgtgagcaattaattaattaattagggaaacctaaacctatgagggggcgtgtgtcaaatgtcatgttcttttttgatgagcggaaaaattgattgatttagcaactgacagccgatgg

SEQ ID NO: 38489 - DNA, 1204 bp, Heterodera glycines
  unsure (1)..(1204): unsure at all n locations
ctatacgtntaatcattantcagtgccattctgtaaaaaatgatctgatttatgaaaactgatcagtgatttgatcagnccntaatgttntacagtttatgctaaaaattagagactacccccagaatcggtacgaggccgagatcccaaatttgcgcggaccgcgaccgtgggatttctgtccacgacccaccccagactcgaacctctcaccttttttaattgactcttacgataactactaacaaatatgacaaaaacaattagccaagattgactggtgagtgtgtgatttaaattgtactgatctgcccagggcattttttaatttgcgcacttttttgctgctacgtatcacgcgctttctacggtgtgtgtaatacactttttgaatggagagaggttccccggagggcgggtggtggtggagtggggtgactgagtggccatgcggttgttattgtgctcatgttagttatgttcccaatggggaacgtgtcgagaggggagggacagaaagaacaaaatgtcgtacactataaaggccagggtttgttctttgccttattccaccaacccaaccaatgaccatttttgttttaaattcctatttcactcattcgcctgtcccttccactttttttcgtatttttcgctcctttctccgccatcccaattccctccaatttatatagcgaccgcgagaataaccacgtggtgggccatgtggtttgttagtgaaagaggcgaaaaaacgcatgcgggcggccattttgggtacattgtgctacaaaatgggaaatgacgtgactaatgatcactttaatcagtcagcgtttccaaatttttaattccaaattttcagattactcttcaatttttggtgattttatcaatgctttgtaaatattttagtatttttttgaatttttcatttaaaattcagaataatttaacaagcaataaaatgatttttttgacggtgacattttttggccaaaaatttaaaaagctgcaatctcgaatcttaacngagagtgttttttattcaacttctgtgaagcctttctgctgctaggatacaattttcttcgtcattacgtgaaggggtgaatttgattagattgatatctatgaaggtattttgtttagctttagacagaccaacaaagataactgctttttaatctcaaatacacatttc

SEQ ID NO: 38490 - DNA, 834 bp, Heterodera glycines
ggaaaaaaagactctttacaaaatattacccctgggagaggggagtgggaaacatgagttcaaaattttctattttttgtagtctattctactcaaagcggttcagaattcaatttaattaacattcacggtgcgaaaaatggggtatgaaaagtttattggggaaaaaaagactttttacaaaataatacccctgggagaagggagtgggaaacatgatttcaaaattttcaattttttgtattctaatctactcaaaccggttcagaattcaataaaaataacattcacggtgcgaaaaatggggtatgaaaagtttattggggaaaaaaagactttttacaaaataatacccctgggagaagggagtgggaaacatgatttcaaaattttcaattttttgtattctaatctactcaaaccggttcagaattcaataaaaataacattcacggtgcgaaaaatggggtatgaaaagtttattggggaaaaaaagacttttacaaaataatacccctgggagaagggagtgggaaacatgatttcaaaattttcaattttttgtagtctaatcttctcaaaccggttcagaattcaataaaaataacattcacggtgcgaaaaatggggtttgacaagtttattggggaaaaaagactttacaaaataatacccctgggagaagggagtgggaaacatgatttcaaaattttcaattttttgtattctaatctactcaaaccggttcagaattcaataaaaataacattcacggtgcgaaaaatggggtatgaaaagtttattggggaaaaaagacttttacaaaataatacc

SEQ ID NO: 38491 - DNA, 948 bp, Heterodera glycines
ggcatttcaaataaaaaaagagaggagagagagagagaacgtttttctgatgtcagagaaaaaaagaccgtatgcatttactgtctttgaacccacattgaattaaaacccccgggggttctatctaatacagtaaatacggtaggtaattccaaattgttaaatttccaaaaaattcggacgtttgctttctgccggccgccctgaaaatggcgctcagctttttgcgcttctgctccaactccatcatggcattggccagctcattggcacggatcagctgcatgtccttgggcgcaatttgaaagtcggacaaatgccctttggggatgatgtcctggagggcgtgaaatttcatgaaaaatttccaaaattttaaatgcctgaattttgaaggatgcccgcgtgtgcgggagcgtgacctccatctcatcggagatctttgacggaatctgatcggccaactcggaggctatcatatgcgctgatcagagagattaaaataaaacagtcaggagagagattttattagggaccgaataaggctcaaatttagaggttttttatcaaggaaatttgcgtaaatcttcgaaaatcttggttgtttttataggttagaaattactatgcctcctaagtcaaattaatcttatatttgtacatagtaaagctcgacattttgaacagcctggtatggacttggattaagtcattccgttttaaaaccaatcacacctaccgatgtatgtgttccgatcaagcacataattgagctcttgagaaaacaaaagtcaacaaaatcaaattaaaactgtcaaagaaacaaccaaaatcgtcgtcgtcctctgaaaaaatgaaataaaaaaaatttcaaaaatttttttgtggacctccgaatggattcatcaaatattgtccaactttaagccatccgatgtagaacacatt

SEQ ID NO: 38492 - DNA, 977 bp, Heterodera glycines
  unsure (1)..(977): unsure at all n locations
tgttgttaatggcatcgcttgtgacggcgctactgacagtgtgtggtggaaaagttgaggaaaacgctattaatagtaaagcattaatttgtgacgataaagtttggtatcagactcgattccgatgtcactgcagcgcccgactcgtccacataaaacattgtttttggccgttgttttttggcgcttggcccggaatgcgtggaacagacccttcgaagttcatcgtaaagtgaacgtcgagagcgagtcgaattggcaaccgccgttgaggacagtgcaggagctgagaagtaacagagtgaaaaaggttttctcattgcttaccgctgatttggcgttgatggacaattctttgataggttctgagctgagaggggtccctgcgggtgaccagcgaccgtttttcagagatcgacctaaacgaaaattaatagagtaaatgtgccaaagtaattaggattatgattgaaaaggattcgtccatgaatcgatcgttttttaatttaaagacctccgtgaaggcgcttcacggtcgaaatttgacagctgactcaaatcactgtcactgccacgtcttgcgccaccaccgaatggcttcgaatcgcgcgattgatgcattttacgcagcacgaatagtcttacataatgcaaaaataaataaatcaaaaaattagcattatctcaccgtagtgaatgtttcgattgaggcaactgagaaatggtccgcataaatgcctccaaagcttccccattcagttcatagttaagcaaattttgggtttcgatgccaaccaaacggtcgttgacttgcaagcgcccgtctttgaaggctgcggaaccgtggaggatctaacaataagaatgggacatcgtaatncaattcgtattccttttattcatgactattaactcacactacgaaatgaaaggnccgcatccgtggccccgactcgctgtgctttcagtgagagtcc

SEQ ID NO: 38493 - DNA, 995 bp, Heterodera glycines
  unsure (1)..(995): unsure at all n locations
ttttttcaacaaatgtggccattttccgcccatatttaatactcccttcctactggccccagaaaatttgatatttttttttactcgaatgacctattgatattatttttgtgactattttgggttttttacacttaaaatgcctttttttttttgccagttccttctggtctgctcttgtggcccaatttcccaccaccaaacgcaattacgaatgccgggcaacgcttcggcagaaaatcgacaattttgccgaattggcttgacaaattgttggcgacagtaaacggagctttgacagcgttgaaatcaggggcgtaatcggagctaaaaaggatttacataaagcagggaaatcccagacccttaaaatatttttttggcatgaaattttggaaaattctaaaatttaatttcaaaccgtttttaagcatatttctttgtcctaaagtttattttttaaaatttttttagtggacttaaatggcaactgaattcttgtgtgttaattgatcatatggtgaaagatggtgaaaaactaatcagttttcgtttcgatattgattgtgacacggacagcaaaatttgtgagtaaaaaaagacaaaaatttaaaatttcatggtttagttcaaggggtacgtaatttcgtaaattttggatggaaatcggaattttgatcgaaaccgaaaatcggaaaaccaaaattccgacccctctccctcccaaaaagttatgtcggaaaccgtaagtccgcgttatttagcaaatgccaaaattttctaaatttttggcgaatgaataatgaaaaaataattattttcatccatttgcctaatttttcaaataaaatttagtttccgaccgagaaatgttctttgaaacacatttcgaatttgttcgcaaaaagatgaaaagaattatcgcgtggaaaagtngtccagcatattctacaataataatttttttagttgaataattaattaattaaaatgaa

SEQ ID NO: 38494 - DNA, 958 bp, Heterodera glycines
ccatccaacaaatgccatccgccgcggtcgccgatgcgctccacggcatttgcccagccgaccctcgccggcacgggccactcgcgactgttcgaaagtgtcagtgccctgaagtacagcgtcagcttcacctttgtacgaagcgaatggcattttgccaaaaacacacagaaattgtgggtgttgtaatgcaattttagcaaatcaaagagctttgcgacatacttccccatccgttggctgtccaaatttactcggcattggcatcgaacacgctgaacattgatgcgcgcaattaacaacaattcaatttaaaaatcaagagcgtacaggggggggggggctaagcgggctaaagccaccccccaaaaagaaaaatacatccctaaaaattgaattttgaattgagcccccccccttggctacgccctgattaaaatatttaaaaataaaaaatttttctagcaaaagttggccaccgttgagagtgtaatggccgaattgccatttggcgttttggaccgtttgtttttcgtcggagtgccaattgtggacgcagaagtcagagagcgatttcgaagactatggtaattggaaaattataaaataaagattaattctcaaattaattaaggtatgatcgaccctattggaagtcatcagacaattttgaaggggaggagcaaaatgatgagccgaaaatgccaaatgaggaaaatggtttaaaaattaataatatgaaaatttagttaaatgcctataaaattgttttgcccttttttaatggcactttttgccgtgcctttcttttcagagggcgtcgacactttgccaatgtttttgaatgtgccgcagccccgcctccatgagcccgtggggagcgcctcaatccgttacagcaaaaacaaatgccaatgccatcgttcacttctgccgatatgccacaatttctccccct

SEQ ID NO: 38495 - DNA, 1248 bp, Heterodera glycines
ttagtctgccctctgccgcgctctttgccgcgcggacccccccacataaaaatgtttttttttggaaacaggcgggcccggggatccttccaaggccataaaaaatttttggacgaaattttgtgcgcaaaagacagatcaacgaacgatcataaaaatttaagccggcccaatttagcctgataatagaagggcacaaatctgatgtttgattcgtcgaattaaaaatatatttagaaagcctaaatttggattttctttaaatttcaaaatttttaatctttgaacccaataaaaaaaagtaaatttctaaatttaattttagttagatcaaattggtctttgatcatttataaaagagcatttaaaatggtatttaaggatgtcactttcctcaaataaatgcataaaagaattaataaatatattctaaatttacttacttcacccttaaaatttaatttgctcttattttaatgatgcggccacgttccaaatccctttcaaatataaattttgaaattactcaaacaccaatctgccgtttttatctacgctttatggatgcgttatatggtagaaggcgtttatcaactcctcatagaaattttttcccaacaaaaatgaacataggtctttctcagcacttttttcattttaaaatatattttttaaattttagaagcaaaacatgatcggatttttttgaagcgaaaaaagaacaatcattgggtgaagattcgacgggtatatccagtattcatcttggcgttaatataatttaaataatttagtcgtcacgtctgctggataaaagaaataatattgataataaaatgaaaatcttttccaattaattaattaattatttttttgttttttggaaaagatgaaaaatgttgattaaattgtatttgtaaaaatttattcgcagataaaataacaaatttaaataattgtagcttacacattgaaggcaatatcaactaaaatgaatggtcaaataattaatccataatattcaaaagagtacaaatcacatggataagataaacaaattagtttgaattttttcatcatttcatcaatttaaaaataagtacgatttgttgtatcggtggtataatggttagtgtgctttgtttaggacataggagttcaatgctgcgcgaagtagtgtaattaaagcaaattaaagaaaaggaaaaatacagaacaccgaaacaaatggtcgacactaggacaaat

SEQ ID NO: 38496 - DNA, 635 bp, Heterodera glycines
tagtgattttttctggattaggccggagaaataaaatcacttcctatttcaaatgcagtgggcaagcacagcgagtcgcttaaatgcacaccctttgacacgtaaaatattccaaaaaaagagatagtgattttttctggattaggccggagaaataaaaattaccagctatttgaaatgcagtgggcaagcacagcgagtcgcttaaatgcacaccctttgacacgtaaaatattccaaaaaaagagatagtgattttttctggattaggccggagaaataaaaattaccagctatttgaaatgcagcgggcaagcacagcgagtcgcttaaatgcacaccctttgacacgtaaaatattccaaaaaaagagatagtgattttttctggattagggcggagaaataaaaattaccagctatttgaaatgcagtgggcaagcacagcgagtcgcttaaatgcacaccctttgacacgtaaaatattccaaaaaaagagatagtgattttttctggattatggcggaaaaataaaaattaccagctatttgaaatggagtgggcaagcaccgcgagtcgcttaaatgcacaccctttggcacgtaaaatattccaaaaaaagagattgtgattttt

SEQ ID NO: 38497 - DNA, 96 bp, Heterodera glycines
tggccatgtccaggctgcggccggtctgttcgttgtggccctgcttgaactgctgggcaacgttggagacgcgcacgcccgaacccacggcgttct

SEQ ID NO: 38498 - DNA, 979 bp, Heterodera glycines
  unsure (1)..(979): unsure at all n locations
aaaaagggtggcatacaattaactatgattaatccaaaaaaaaactattcaaggactatatatttttttaaaagttactttcctttttttgatcaccacagcattttcattacaaaaagaccaaattgaattgataaaattgtttttaatctctgtttgtttttggattgtaactttgttcattgtcgaccaaatccaataatcatggtatcattcaaaagctttacactttagtatgccatgctaaagtttcattatttctttgattaatctattggaaactatgccgaaaaaataggagttttttaaataaacaaattgcaataactaaatgttaattgggcttttaaatttttgcagaatggccaccgctatcagctggatgcctttcgcaaaggtaacatggcccgttttgtcaaccattcttgccagccaaactgttgcgctctgctgacaaccaccacaacttcaacagatgatgccaattctgatcagaaggaagtgccgtccgtgttggtctatgcgctgcggcgcatttttgcgggcgaagaattgacaatggactacggtaagttgtcaaaattgacgcagttacggtaccggaccgcgagttactgactatctgtcctactgtaatttggaacaaattctggaatctctgaacatccgctactgggaaatattggatagatttttgaaaaagattttatactttatggtataccaaatctcgaaagagataatgctttcgacaaacaaagatacatttctaggggggggggttgggtcattatanggaataaatctttncgctaattagtcgcaattaatgattttgattgatcaatacacaaaaggtgaacgtttggtggattgccaaggcggactctgactcattgaattgtcagtgcggaagcgaagagtgcaatatgacgaaagattgnnggtgccgatgtggacaaaaatgatgccattgcgc

SEQ ID NO: 38499 - DNA, 899 bp, Heterodera glycines
aaatgttaagcagaattgccatgaggtattaagtcatttataaaaatttatttaaaatattaaaaaaaactcgcccgatttcagaaataattcgcccatttgcgctgggggcgtttcccctgcaaatccctccaaccgttgggcgacttttccgtcggccattgaactgagcgaaagtgaaaggcattcgacagcaaatgcactgctccaatttcttggcctccaattgcagcaagaaaagttcggtcagaagccgaaaagtgtgcaaaactgtggtgccaaattgcgcccaattcgcggtcattcgcgccaatcggcgcccatttccttagcgtccgtccgacgcccaacggacgacacatcgccacaagtcacaactgctgatagcgactattcccatgcttctgcttcttctcttgtttctgcttcgtccccttcaattcaccgtttggactttttgccttccgtgccgaatgattttcgtccggcgaattgccacagcgaacctttgcccgacttcatctttttcctcgtcacacagtccgaactgctcgttgagctgctccgttgtggccaatttggccattatttgctgaataaattcgtctcttttgagcggcttaaggacagcggggcggaacacaaaatgatcgaatttgttggcaaaatggactttctgatcactaattttgacatgctcactggtctcaggcactttgtgcccaatttgggtgcccgattagtcgaggtgagaggcaaaacatcgaaggaatggaattttacgaaaaaaacttaatttgaatattttgcaaaatcagtttctgcacaagtactgctcttattcgtccggcaatttgctgatgagcgaattaagcagaaggctctgtcagttcttctcc

SEQ ID NO: 38500 - DNA, 1317 bp, Heterodera glycines
  unsure (1)..(1317): unsure at all n locations
tgacttgtcccaattgtgcgagtccttcgccgtacancccctccttnccacacccttccttgcgcattgcgtcaatgatttcgttgggtctaaggccggtcgcgcggcacaccgagttgttgatgcactcaaaaacttgnccagcacattcaaacccaaaccgaagtgtgtggcggaaaaatatttgtacagccgagtctttagggtgcggatggcccgctccgcccaaggcggccttcttctttgaactggtctcaaacttttgaatgcccttctccgcgtaaaactccttcaacggttttgccacaaactccagccctcgatcggtgtacattgtgtctggcacccttggcatttgctcaaatagctcttcaaacgcccttttcatgtccacagggcgcttactctttacgggcgcgccgaacattcgcctcgatagaacatccaccgccaacagcaagtaacggtagccgctgttcttgcgcgaaagtgcctggaaatctgccaagtccgcctgaacatctgaaccctgaattgtgcgcaataagccccggtacaacgtaccggtcatgaaacccgtaggcacagtgcgtaggcgtcggaacttgtctctctttggcttgaacagcgtgtaggtggtgttcctttgcaaaaagtcctcaaactcggcacgcttcaacttcgggtgcttctccttcaccgccgcgtacagagcactcgcccccgcatacccgcccggattggccgggtcggtgtatattttgtttattttcttgtccattttgagggaacaaatcctctcgtttgtttgacttgtccgacgaacccagacctaacaaacagtcgatcgagtaggctactggcgagcggattctgtgcgagtttcctcttcaactctttggttccgcgtggcgaaggggcattctccgggcgagggtccaccaggcgttcaattgaccaggccaggtccgagtcgataaactctcggcccgtctttgggttaatgattttcccacggtcagttgcgccgaatctctgcggatcagacataatgatggccaacaggtggtccttcttctcgatcaatttttgctgatttgctgctttcttattggtcctgggtgatcggctgcttccctgcgtctggcttgatgaggttaaaaactttggcacttcaatttcttcatcttcatcttcgtccgtaaccatcacggacttgtccttcggttcgtccggaccaggccgtacctgcacacccgtctccactgttttaattagcatttgagcgccgttgctgagatgtactcggacgggccg

SEQ ID NO: 38501 - DNA, 1264 bp, Heterodera glycines
ttggaattccaatttacttaattaaaatatttcacttctttcaatttgttgtttattttggtaattttttgtctattacttttcttcctatttttacaattccattgttcatattgctaaaatctttctcatttaccattgaacataataattctcctattttcttctttgtcaatttccaaatccattttttatgtcatttgaattccaatttctctaattaaatgtaataaaatgctttaatttcgatcagaattccttttgacaagcaatcaattcgtttttattaaaaatgggcaatgtcgtcagtaaagtgggcaattttatggtcaaggcagcatttgttgctgtcgacggatttttggctgttggcgaagcgtttggccaaggaatgcgcgcacttttgtccccggaagagcacgccaatcctccgatcactcaagtgcttttggttcgacgccgtggcgatctcatcccgtgctttcgcaatgtgttgaaaagcaaagtaaaaattttttttgaaattttaatccattttttggatgccattcgccattttgtatcactttttctttttttttctttttaaatttaagaatgaaactgctcttggaagcatacatgatgaactgagcgacctcggcttggaccacatttcgtacgcatttgttaagggcgtcgagtgagtgaaaaaggaaaaggcggaaataatttaaataaatttaattttaattatttagtctaaaattgggcttttttttacgttcagagtggacatggtctgcaacaaatgtgccgccaaagtggagcaactcgacgacttgtgttattgtgtggatgccaaagagagatgccatcaccgcaaatggtgggaaaaaagcagattttaattgggatattatgtgctggtcaatttaaattggttttaaatgcattcgacatatttttaccatttttaatgttcgtgcggcatgggagcaaaaacaattggaaataacttagttaaattgataattcacaaatttcaaatagttattcagtttataataataataataatttctaatcttataaattaatttgcttttcagctgttccttccgcaacaatcagctcgctttgacattttactgattttgatgaatgaaagaaaataatttttcattttatatattgaggagcccaaatgaattggaaagaaattatttcttcgttttatgaaaaatatttttgtgaattttctcaattcacgagttttttctat

SEQ ID NO: 38502 - DNA, 1104 bp, Heterodera glycines
  unsure (1)..(1104): unsure at all n locations
tgaattggacaactcgtcaagtgttttttacgtacaatggacaacgcttgagtttgtgtttatgatggcaatttacataaacttgctaattgcctaattaagacaacaccaatttgtacgttgatgagggcacggcggacctttacccgaccgtttcaatgctcgattacttggaagaggtcgaagccaacttcggtcccaacttcaaatacgatttgtccaaggaattttgagactttggaaatgatttaattggcttactgctgggataaaaaaaaagcttaataaaattgagaaagttttgcctaaatcgttccgcttttgttccaccgtttgtctcgtaaaaacttaatctttaaggcacaaaaatgaaaatcaaaagtgcttaatttatttaataattagccatttaccggcatacttgtttcaaagaggcgcggcatggcaaaattgcaaatttcaatctcacaattagttgagaaaatgatttaaaaatatttttgaataagaatttgtcttgttcttggaaaatgttttgaagaatttttaaaagggatttaaggattttcaaaaaaagcatcagttttttatttttaaattcatataaacgtaaggtttttggtttctagagaatgtttttgtatatttttaataggcaaaaattaaaaaaatattttaattaattttaattgaaaatcattaaatttaccaatgatgagtccaaccatcatcaatgccattcctccgccgttgccgtggcgaattgtaaattaatttgttaattttacaatattttatggcttaattatttgtaaaggggtttgatttttttgcaaaaaaaataaaacatttttttagccattatttattcatcatttatataaaaattgtcgtccttaaaaatttttgtgtccttgaaaacagttctgcacgaaattttgtttcgtccccttcttttcggcataatttttgagtttcgtattaagtttttaattaaatttgagcccggaactttgtaaatttgggaaatttttatttcggcatcaaaacatggtacaaaacctcatatactngatatatgtgagaccaaaatgcctaaatctc

SEQ ID NO: 38503 - DNA, 793 bp, Heterodera glycines
gttaagatagtataaaaccaatttagtcttttagaaacttgacctcattaagaatttttcaaagaaaaagaccgtaccgtttttgaacgtattggcgttttgtttttgccgctttttcttcttctctccttcaacaaaaatagtgcactcgtctgcctgtctggtaatattcctgacttaaaattgtaatgtcaggttttttccaccttatttgttaggtgtgtgtgaacttctatataaaaggttgtttttaagattttcattcattataaaaaattaattccgcacatcgaacacattcttccgcccccccccccctccatcttcaaaagcctttcatttctcctcccaccgccccctcctttcttagcatttttagtatttttcgtacatataatattaaagataactatggcctataaaaaaattaaaaaaaagtacgaggcgttgaaattgtcatagtattcttgtgctccgccgatcggctctcctccactgcttttccttcctccccaaaacactcattcttccatccatccaccccctccctccatcatcaaaaagcctcaatttaacaaataatactgaaatctccgcttcctgatgattttattctttgacataaataaataaatttaactacaatttgtcattttcaagattaaattcaagattttcgatggcagtgcattacgcgggaacggtgcgatacaacgcgaacagtttcctggagaagaacaaagacccgctgaacgattcggcggtaaacaaaaaggggcaattcgttaattaa

SEQ ID NO: 38504 - DNA, 896 bp, Heterodera glycines
gtcatcaatgggaaaaatttttaatcatcaattcactaaatcaatgaaatgaaaatattttatatttttacatatttacattttccacataataatttttttcttcatttattactcttttttgcttttttcttcatttattactttttttcgctctaatttcgcataaagctcttaaatatcttaataattataatgaataaaaattttatattttttataattaatattaataaccaaataaaatattctccttggttattttaaaacaattcaaatttatgattttagaatatttagagcaccgatttattaccaatatttggggaacaaaatgagaaaaagcaacaaaattttcatcattttggcgttgtgtttttgcgcaattggaacaatcttatgcatggacacgtcgcgcagcaggaaaaaaattgacggagttaatgaacatttgcctaatggacatatagcaattaaaagtaaagattaaaaaaaattatttaaattaagtaatttaaaattcagtgaaacaaactttaagatggagttgaattagcattaaccgatgacgagtcatcagcagatgaaaggtcgaaaattgacggcattaaccgacaaaaaaaaagtaaaacaaaaacaaaaatggaaataaaaaataaaatttatttaaaacaaaaatttaaaatttaaaagccaccaaatttgccatacatatattaggtaagaaatattgcgaaaaggtatttaaatttgcaaaaggtaaaaccatatgatgaaaggtaggccttggttgggaaaaaattctttgaaaagagatgtgctatgaaatttttgtaaaatagttaaggaaatttttttttgtcataaatcaggaaaatgatacgagctattaaata

SEQ ID NO: 38505 - DNA, 1130 bp, Heterodera glycines
atttttggctgccaaatggatggatttgatcggattattgattggatccatcgtgtttaaataattgaaatggcgaaaaatgccaaaattggtctcagtctcacatagcattcctcctgcagcgcgcgcaccttcggattgtacaggccgtatttgcccatcaccaaaccgccacaacgcgtgccctccgggagacgaggcaaaattttaccataggcctgtagaaagaaaaaatgataaaataaaaacacggtagaaaaaatttgtggtaatgacacagtacagtatacaacactgttaaagacttttaagggctcaaacatcaagaaacatgaattattcctcactaattatggctttgtcgtttagaatagttttgaaatggtggaaatttttttttttttttttgtcaaatgatgccatggcaactcattaaaagacaactcgtaaaaatttcttaggtttggcccagaggcttcggcccaagctttaggctaggctttgtttttgtaaaatacgagtgctttttgtattcccccactcgaaaattgttaagtgagaaaactcacccccaactgccactcgccggggttcaaactgaaaaaacaaatcgctttcaattatagcaattaaaattgagtgtttttacgggtcgaattcctcaagcgttggcggctctttgccggtcaccggatggaccaaaccaccgccttttattgaacggcagcaaatttggacggggctgacaaggcgtttgaagaggaaaacattcgtcggtttggagcacattttgggtagcttttgctttgccttctcgttgaaaaaaaaataatgggaaaattttaaagaaaaatgattaaaaatattgaaaatgattcaaatcactgacataaatgcgcacaaaaggaaataaatgaaaaacaatttattaacaaaaaaatcaaatcaaaaattatttgaaaaaattaaagaaagcgtctgccgattcggcacttttgcacagcgaagtgagcattgacagataggcaattttaagcgaaggtgccgagattgcccgattttcggatacaaagtcgtacaaatccttcctgaaaaaaagcaaaaagaaaaaatgtatataattttgaaaa

SEQ ID NO: 38506 - DNA, 1198 bp, Heterodera glycines
acgagtgttagttaacacacatttcaattttggcctctcagttccaaaaatatttgtatgtgtggcgaagttgttttttgtaagatagtaaaggaacaaagggagaagattcgagtccattgtgcaacatgaatttttttattttggttccaaatattaaaaaatgtgcacaaattctcacttgcgtgcaatgcatttgcttatcgcattctcgcgcattttggactgttcccctgacgaagtgggcgcgcgaatttgctgtagtgttgcggatcgagaaaaattgttgaaggaatttgcacatcgtaagctcatcactacatactccgaccgtaatggcttcacccacacactcttctttgctgggctcactgaagagggcgccaactcagtgcttgcttatggtaacctgaggcgcccctacaatgtttgcgttgtcgcccattattactcacgacatcgtattatgctaaagtacccgaaattcccatgtgtaattgagaagtgttttggtcaaagggatgatggacccttgcacaaatattacccgcttgaactggtaaaagtcgtcgatgactgttttccgcctgtgtacgcgagtttactgtctcaaaagcgtgacagctcaacgtcatcgtcatcatcctcgtcatcattgccgcgaaatttcctatcatctccttccgacgatacggatgctgacgaccatggtctctggtttggctcgatgcccacaaaaaaaaagtgttgcggaaacaccacctcctccgtcttgtgggtatgtgaagggaataatatggattgaaaaagagcaaatcaaaaatattctaagtcaagcaattaaacatgactaattgtaaatttttctacctaaaaacagcaactctgtaactcagatgatgatgaatctttttaatatttccaaaactgctacttctcttactaaattatgcatttttctacctaaaaattacaacttcgaacgcttcattattttaaattgtaatcttccatttgttaattatgcatttttaaaaaagtacaattccgtataaattacggcctttataaaaccaaaatcatgtacaatagcattcatccccacaaccccatttagttacaataggacgatagcgtttcgacagcttaacagaaataacagttccgtccttaatgttgggcctcaggaaattggggt

SEQ ID NO: 38507 - DNA, 878 bp, Heterodera glycines
attttccattattagtcttaaaatggtctaaatgacttgttattgaagctctatgactttatttcgttttcatgtatttaaacaaaattacgaaatttgagtttttgactttttgttcgagttcgggtccggttttcggagttcggagttggtcaaaatgggtgacgaattagtgatcagctaagcagaaaacccttggaaacatattttaatgacttttgaaaacaaaatttcttggggggtcaattatatggacataaatcgcgaaatatggaaaaatatggatatagaatccatcctagcagtttcaaaccaagttaaaaaacatgtttttcgtacgtttcagacctctcacagtccaggaaaaaaatatggatttccatgtaaatgatagccctaattattacacaaatgccttttttaattgctcacccaatgcaatcaattagtgccactaaaaagccaaaagaacacattgttacaattgttgtcccactttccgtcttcccaatgaaccgccgccgtctccccaataattttgcatcgtttcattatccaacttttgtccaattcattttcatttgctttggccaatgtcagcttttcctttgtccattcgttcaccaattcgaatggcattggagagaaactttgatgaaatataacttattaaatacataataaagtttgcttttaatgtattattaaacgaaaaaattctggcggcgagattgccaaaaaacaaggcgcggcgagttggcccgcggcgagttggcctcgcggcgagaaagcgcgcggcgagttggccccgcggcgagttggccgcgacgagttgggcggttcccgaatttttaggcctttgtcgccacgtcgcaaat

SEQ ID NO: 38508 - DNA, 154 bp, Heterodera glycines
tttgtcaccaaaaaaaattatttcgaatttgggtttgaatgtgttattttgtttcgagttaatgaatgattgttgattaattgatattttacgcatacccagctaagggccttatcattagctacaatatttttttacctgattgaaagtcgga

SEQ ID NO: 38509 - DNA, 1132 bp, Heterodera glycines
ggggagaagaagctgaatgggttgggttgttgttggttggtcacgggtgtgtgggtggcgaggagaagttgacttgaacgactgctccgactgaatgatttcatcttcccaaaactgaaggaagacggaggaggggaagaagaacccgatcatcctcctcttcatctctcaccccttccccgcctgataaactggactcgaccagtagcagaggaaaagcatgcgttgcaggggtgggaggaaacggattggatcggtggggaacgacgtcgacggaggggtggacgacgacgacgcatcgaatgggctggaggtggtacaaatgggagaagcgccgtcttcgtttgatgatggtatccgggcattcgggcggagatgagccaggaagttcaaaaaagccacaaacaaagcatccataagcttacatgcatccaatttaaatattacgaggcgaaacgttcaaaatgctcgaaaatgatcaaaaaaacgaaataattggccattatatgaagccctttggccttaacacataataccagctttgctggtgacgttttaaggtgtttgcttcgacccttcccttttcctctcggttattttacacttttactttcatttccaaaaaatgaatgccaaacatttccctccccccccctttttttgcgttttcatttcttttaccttattaattccattatttatttgaatgtgtttacctgttttttttctttaagtttcctttttctaaaaatgaatagcgcaactcaaaatgagcacgtccatcaccagcagcagcagtttcagcccgccgccaccttcaacgaattgttaataaacgaagtgaacggattaccccttaaaactcggcggaacctctccaaattcacgacgactttctgacaatgacaaattctaaaaatttccatttttgaactaattgggcaaaactaactcattaaatatagaaaatactatttattttttaatttaggtccgttctcatccgcaactttatgaccaacaacatcgggtgggttagtgaacggaatgagcatgacacggaagattctgttagaggggacgcgtaccaaacagaagttgaaaacaaacaaaatttggcactgtcctctct

SEQ ID NO: 38510 - DNA, 1194 bp, Heterodera glycines
  unsure (1)..(1194): unsure at all n locations
tgctttaaggttttgtctttgactttgcttttttgtcctcacccatggatcgaccacgttaattcattctctatacatttcttttcttatttcatgaaattatatataatttaattttaaataaagaggcaaatttttacagaaaataaatagacgctgactaattagctaacatttataaagaaagtagaaatttgattaaatgcatatacaaaatattacttttttaaaatttgtataaagttcctagtcgtatgtgctttgcgttggttggttggcgtgggtgactgtggtggttgggccgtttttgcgatattatggctggaaaaaagatgcgatttcgctatggggagcgcggccgtctgggttcaagtgcttgcttgcgcttgtgctcggcattgaacggtgatggctgctgctggggtgccacctttgtcgtggcctcagtttctccagcgattggcagctgtcgaaatgaataaacatgcagctcgtctgtgtgttaaagaaatttggcgagttaattgacttgtgtaaatgtggcctaaggcacaaatgctgtggggaactcagcactggggatgctgaacctaaagttggtggtggtgttggtatacgagtgagtggcgtattgccatggttgacaagccctatgagttcgtggatcggaactccttgcctggggaccagtgtgcttgcattcgaaaaaacacgagacataagcgcccgaaggcctttggcctgaggaagtgtcctaaccgggaaatccggagtgctcgtgtgagtgcctgtgcactggccctcggagctgtgtccagcggcgagatggttcttcccaagtccgggaagctcggatgcctggccagcgctgtgtcattaccacttgctctgtctccttcgctgcccatgcgcacgcttgcgctgaaacgggangttgtttctgctgaaactatccgtctttacaagacggctgtaatatagcggcgcttggcaacgctcgctagcagtattctggttgatcctgcctgaactgatgtgttcatttcaaagattagccatgcattgtgtaagttcaancctgcagacagggaaactgcgtacggctcattacaccagctataatttacttngacttgacttctacttggnatactgtggtattctagagctatacatgcaccaagctccatctcc

SEQ ID NO: 38511 - DNA, 874 bp, Heterodera glycines
ccattcccttaagagctgcggaaatggtgaattaattttcagaaaaatggctatctctttttaggccaatttctatctcgtaaccccgatgctaatccgttccggagagcctcttcaaaattttttccattaccgtaagagctgaggaaattgtgaattaattctcagaaaaatggctatctctttttaggacaattttctatctcgtaaccccgatgctaatccgttccggagagcctcttcaaaattttttccattactctaagagctgcggaaattgtgaattaattctcagaaaaatggctatctctttttaggacaattttctatctcgtaaccccgatgctaatccgttccggagagcctcttcaaaattttttccattaccctaagagctgcggaaattgtgaattaattctcagaaaaatggctatctctttttaggacaattttctatctcgtaaccccgatgctaatccgttccggagagcctcttcaaaattttttccattaccctaagagctgcggaaattgtgaattaattctcagaaaaatggctatctctttttaggacaattttctatctcgtaaccccgatgctaatccgttccggagagcctcttcaaaattttttccattaccctaagagctgaggaaattgtgaattaattctcagaaaaatggctatctctttttaggacaattttctatctcgtaaccccgatgctaatccgttccggagagcctcttcaaaattttttccattaccgtaagagctgcggaaattgtgaattaattctcagaaaaatggctatctctttttaggacaatttaatatctcgtaaccccgatgctaatccgttccggagagcct

SEQ ID NO: 38512 - DNA, 924 bp, Heterodera glycines
aaaaaacaagaagcgctaaaataatgaattagcaatgaactgaaaatcgatctattctgcgcgtcccgaacggacgaatacaaaaaaattttcaatttcttatgacatatcatgaagctggcgaatgtctgatcaagcactcataattaagccaattatcgataactaaacttcaaataatttaatataaaataaggtttaaatatagcaaaaaatcttttaatcatcgtactaccacttttatctaggatgcggtaagtgaccaaataattaaaatattaaaccattttcaatattattccatcgttaatattcccatattttttttcttctcaaacaccattctcatcaaattctttgtggcatctcattcaaaattttgcgtcgttctcactcaaatacaaatttgcatatagtccaacatttacctaaagcaaatgacaaaatggccacagcatttgaaattgccaaacattgcagctctccttctctttgctatttatttaatccatttttaataatgtatttggtactacaacgatcccttgccgtttcatccacttttaccctaatgagtaccttacaaaaaaactaactagtccctaaattccaaaccaatccggaaaaatttagactcattaaaaagaacagagcctgggcagtcaaactacttaccaaatatttttatttgatctccaactcgtgttatgtacagttgaaataagccacttttgatttgcccaattccaaaaaaggacattttcataaaataacgattttactaaatgtttactaccatttcccatattcctttatgtacagtaagcattgaacttcaaaaaaaagcaataatagctttgaactacagtatgcttgaattttaaattactgtttttccattaatcgtaatagttttttttctca

SEQ ID NO: 38513 - DNA, 807 bp, Heterodera glycines
agtacgatagaatttacactttaccatttgtttatgactaataattaattaccaactaataaaatttaaacgttcttatgaaaatacccgcaagaaataattaaattaagtaatccctaaatatttggaataattaaaatctttcacaaaggaaataaaatggattaaataaaataaatcattttgaagattgtattaaaataacatttttgtgcgttaattttaaattttatttaatttcttattttgcaataaaaccattaattttttgaattatttatttattttataatttaaaaatctaaaaatattagtagtgataaataataaaaaaaaaattaaattaaagtattaataaaaacacgaccaacgaaaacgtgcggagtctcatggacataattaaaaaaactaaaataaattattattcaataaagacacgaataaatatttatataatgaaccaaaaatgaaattaattattgaaaaaatttttaaaaaaaattgaagtatttaacaaaacgagaacaaaatataattaacatttaaaatgacaaatatgcaaaaacatttttaattatttattaaaatctaagtaaataaaatgaaagccattgtaaaaaaagaactaaattaatatttagttaaacaattacttttaatgtttttcaaaaaccagccgattaaaaaaatgcataactaatttaattatgtaaaagtgaaaaaaaaaattcatttttcattaggcacaaatttaaacaaaaaaaacattcgtcaacacccgtggtgagtcaaagtgcaaaaagtccg

SEQ ID NO: 38514 - DNA, 768 bp, Heterodera glycines
tgaacaaaaaaaaattataataccaacgaagtttaacaaacaacaacaaaaagtagggggtagtctgggaattgaacccaggacctctcgcaccctaagcgagaatcataccactagaccaactacccgcacagatcaatggtgatttgcgtggatgataagcatgctattgatcaatttttcctattcataacaacgaatgatcataattgctacatttaaattcataaaatttaaattaataaattcatttttgggttaataaccttatctttattacgaaaaaagttttttaaagaaatattgaataaagctttaaaaattataccgatcttcaatgagtctactcaaaatttccatagcaaccacctaagaacctttatcgaaagtttcaattatttttaaatttgatttaagaaaggatttagtgagtacaatggtgagcgttcatcagtaagcgaccaaaaaataaataaaaaatacaatcatttcattgtaaaatctatttttgtcgaattagggtcaggagttcgaaattgggtgaattggctgttaaattcttgaccagtggaccaaccaaaaaataatttaaaaaagatttcacaagcaagtgcatttgaacccatgacccaaaaacccatttttaaccaaccgtgcaactcagtttcgctggtttcctctgtcgagaatgggaaaattcccgacttttgaggccctgtaactcttgaaggaggcaaaatgcaccgctaaaatcaaaaattcacaata

SEQ ID NO: 38515 - DNA, 1030 bp, Heterodera glycines
  unsure (1)..(1030): unsure at all n locations
tagtactatctcgtcgtttttctgtttctttgtaatttctctcactttggcgtactatctcttcatttttaatgatgtaaaaaacaacatttacttctctccatataacttattttctatgcatacaatttgcaccaaattttgcaaacctatagagaaaaaaattctgaatcgataataaggaaatttaatacaaaaataaggttcactcaaaagttatttggtgaaaaattttgtgaatttctttttctctctttttggcgtactattttcatgtctctaacacatgaaaaatagaaattcacaaattataataatcttgattgtaaaggtacaaaaacactatggacatttagaatcaataaaaaatgattaattttagcatttttgttagaaacggcggcctaggacttgagttataacatgataaaagtttgaaattcccacaactttttgctgagatgacaaattacttaacattcgcttagaaaaagattctccttttcaaaaactttttttagatatcaaatttgttcagtttcattgggtatgaagcgagttatggtagatcaaaataaaaaaattaaaaagtcattttccagtgtaaattttgaaataacgcgcaaaaatttacgccaaatgcgctatttggctttatgagtaattttgtctgacactggcgcgtaccgatagtggacattgaaacgaagagaaagagagagagagagagagagaggaaaagcgttagaacgggataaaagagataggagagaggaaacggagaaggagagagagaaacacagaggaaaaaaggagaaaaaagaaatcggaattctgtgccatccctggtacatacttttatcttannattaaatttcctgctgattttattattanattntttgtagctttttttggtttttcttttatactgactcnaagaaaaaaaatcgaaggaaattgaggtgtttccatttgatcgctngctcaatatcccatagatatggatatgacacatactgtagaatag

SEQ ID NO: 38516 - DNA, 996 bp, Heterodera glycines
ttttgaagcgaccaaacatttgtggcaatgcctctcaactagcagcatttgacagaagtgaaaaatgcgtgcagttcggccaaggcaaagtttgacagcatttggagaatgttcgtcgactgcgaacaggcggtgaggacggcgctgagtttggacgaagcgaacattcagcgcagaaaagcggtgcattttgttacattggaaatggcattttcgaacttgacattatgtttaggaacaagaaaaactcagtttggaccgcttcagtgacagcacaattgacgaaaagctaagtgatccgaacggaataattttggagccgatgaaggaattgttgaagacagaaaaggactacattgaagacatgaggtgggaagggactctgaatttgcattttcgaataatttaaggcgatgcgttgacatttatttgtacgcctaccgtacgtccggctcaatgtgtccaatgacaatccgaggcaaagagcgcgagatttttgggaacattgaagaactttatcagtttcatagcaggtgatccgaattaaaactatccaaaaaaccacaaaagtgccgcaagttaatatgaaagtaattgttttagtgttttcctcaacgaactgatggcttatgcgttgaatccggaggatgtcggctattgtttcattgaatggatggaaaaactgaaggaattgtacgcggattactgcttgaacaaggaggagaacaattacctcatttgtcttcctgaaaccatcaaaattttcaatgtaaaaataaatttgcattagtcaaaattgaaaacttcttcccattttaggaaatacgcgaacagaatgggctcgacgtatcgcatgaccttcagtcactcgtcatcaaacccgtccaacgagtgaccaaatatcacattctgttaaaggaactgttgaagcactgctccaaaagtgcgaaagaaattaaaaatgcccacgaaattgtgctgagatcccaaaactgg

SEQ ID NO: 38517 - DNA, 917 bp, Heterodera glycines
accgtgaccggaagaattcagtttttcctttacgatcgtaatttttctgagaatggtcaggagtgtccagaattcttttccggaaaccttgaccagagttccaattttggaaaatcgtgacctgattttatgctacttattctgaaaagggccagaatctccaaaaaaagcaagaaaagaacaacaagaacaaaaaacagaccaatggaaagcgaaaaaagagaaagatacggtaaaatttgtgtagttttggaaatttctgactcttcggcctaattgattttcctggcccatggccgaaattgggcttttcacttgagaaaatggaaaaataaatttaaatataatttgctactaaaaagaaaaagttctctggattgatgattaaactaaagaacatcacaaatgctcctatgtcaagtcaattttcaacggaacagccactgcaaatatactttcattttgccaaatccttcatccgttttcatatttttcgtcgtctccgtcatcgatttcatccaattttcaaatgcttttcgtgccaactcaatttccgcttcatttgctccatgttctttgtctttgtcaattaaattttcctttaatttttcttcactttcttcgggtttttccccatccaacatcatttgcttattagcgttgtcagcaactttaacattttgcgcaatttgttgcccaatcgttttgttgtccgacgacgccgccactgctggagattccaacggctttttcatgttgtattttttaattttttgaaaagcatttttgattagctgcccaatcggcggtaggttgcctgaacaacttcggttccgcataacttttgaacatagcgctcaaactggtgtccatattttttggccgtaatcataatcaaaaaagaacgcccaaattgg

SEQ ID NO: 38518 - DNA, 1672 bp, Heterodera glycines
  unsure (1)..(1672): unsure at all n locations
tagaaganatacaganccattacaattaaaatgccacccgagaccnttccccctnttttaatttattttttaatagctgaaaattgctgtaattcattgctttccaccaacagaattgtggaagtgtccggcgacaacacgcccgagccacacgaactaaacagggcatccattctgatcacaacacccgagaaatgggacgggatcacgcgctgtgcggacacacggcactacgtcaaacaggtggaactgttggtcatcgacgaaattcatttgcttggcgttgaacgcggtgctgtgcttgaggcaatcatcaccaggtgagtgggcaggcaatcctcggatattgttatcatgtaaaatttcaaattttttgaatttttattgttaaagaatcaagtcgatggcacgccgtcgtgagcttgccaagttgccggttcgcgttgtttgcctgtccaccgcgttggcaaatgctggcgatgtggctgaatggattggcgttcgggatcatgggctcttcaatttcaggcccagtgtcaggccggtgcctgtccaggtgcacattcaaggctttcctggccaacactattgtccacggatggcactgatgaacaagcccgcttatcaggcaagtgccatagcgactgatggcaagttgtgggtgccatggtcattgatggcaccgtgtggttgccatggtcattggtggcttagtgtggatgccaggtcattcccccatccatcactttttcagtacatcaaacaattctcgtccacaaaacctgcactgatctttgttgcctcacgacgacaaacgcgcctgacagcgatggcactgctcggcttgttgcagcgtgaaggggaacaaagccatcagcaatggttgggcatgaatcagacagagttggagcgcacgttggcctctgtgcgggatgacaacctgcgactgacgctgacctacggtgttggcatccatcatgccggactgcacgtggtcagtcgatgaaataatgtaatgtcatgtcactggcattttctacctctcgaaactctcgatttggttcatcgagtctgaaagatgaaaacattgagtcccatattttcaaatctccaccaatctgtgttattgttttgttgtacaactacaggctgagcgtgcactggtcgaacgactgtttgttgaacgcaaaattcaagtgttggtcgcaaccgcaacgcttgcctggggcatcaatgtgccggcccatttggtcattgtgaagggcaccgaatactatgatggcaaaacgcacaaatacatcgatttcccagtgacaggtgagaggagcttgtcatggactctcgattctcgagagacactagttttggcgttcattcattgtatctcttggtcatgtgccatggtttttggttgtttacagacgttttgcaaatgattggccgcgcgggtcgtccacagtatgacacgtccgctgnntgcggntggtctttgtccaggacaccaaaaagaacttttacaagcgcttcctctacgagccattcccgtgggaatcgaagtgccaaaaaatgacaaaaatgaaaaaataaatcaaagcaattattttcttcagccttttgcccccgtgtggcaccacgtgaatgccgaaatttgctcaggactgatcacaaatcg

SEQ ID NO: 38519 - DNA, 1399 bp, Heterodera glycines
tttgggctaatgttggggcatctctatcccggtttttagcgttttagccgatgttcggcaatgtttgtgtctgtttctggtagtgtatttgtcaatgtttgggaatgttctgtccatgtttttgtttttattttctggatgatttagcaaatattgccaatgtttgctcctgtttcttataactcgaaaacattgacagagagagattcccaacatttgccaaaaacattgccaaaacaggcgcataccaaaaacaggcggaatgttttgggctaatgtttgggcatctctatcccggtttttagcgttttagccgatgttcggcaatgtttgtgtctgtttctggtagtgtatttgtcaatgtttcggaatgttctgcccatgtttttgtttcatattttctggatgatttagcaaatattgacattgccaaaacaggcgcataccaaaaacaggcggaatgttttgggcatctctatcctggtttttagcgttttagccgatgttcggcaatgtttgtgtctgtttctggtagtgtatttgtcaatgtttgggaatgttatgtccatgtttttgtttttattttctggatgatttagcaaatattaccaatgtttgctcctgtttcttataactcgaaaacattgacagagagagattcccaacatttgccaaaaacattgccaaaacaggcgcataccaaaaacaggcggaatgttttgggctaatgtttgggcatctctatcccggtttttagcgttttagccgatgttcggcaatgtttgtgtctgtttctggtagtgtatttgtcaatgtttcggaatgttctgtccatgtttttgtttcatattttctggatgatttagcaaatattgccaatgtttgcgcctgtttcttataactcgaaaacattgacagagagagattcccaacatttgccaaaaacattgccaaaacaggcgcataccaaaacaggcggaatgttttgggctaatgtttgggcatctctatcccggtttttagcgttttagccgatgttcggcaatgtttgtgtctgtttctggtagtgtatttgtcaatgtttgggaatgttctgtccatgtttttgtttcatattttctggatgatttagcaaatattgacattgccaaaacaggcgcataccaaaaacaggcggaatgttttgggcatctctatcctggtttttagcgttttagccgatgttcggcaatgtttgtgtctgtttctggtagtgtatttgtcaatgtttgtgaatgttctgtccatgtttttgtttcatattttctggatgatttagcagatattaccaatgtttgcgcctgtttctttatactcgaaatcatagacagagagagattccctacatttgccaaaaaca

SEQ ID NO: 38520 - DNA, 925 bp, Heterodera glycines
tttagaggggatttcttgtcccttccctggctatacatataatttttaaaatcattgttcttgtacatgcgcttttcaatgtgctgttccgcgtccaccacattgcacgtcacttggaattgctttttgtgcttgaacaacagccgatgaatgtacagtgtggccaggtggttcatcaacatgctgcgcgagtactggcgaaatttgtcgtacaccgagcgctcgcacatcaaatcgttccagtcaattgagcagcttaaaatttttggcaattttttataatttgatttaaaatggcatttatatgtgtacaaattatgtagcattgagccaacagtcaacaagcgtgacggcgaattttgctcgagcagtggcaaaagatcggtccacaacaaaacatgcgccaaatgattcacctaattggaagagggaaattaattttaaaaaataataaatttttttaatttaaatatatattttgacacatatttaaattaattgaaccacctgaattgtaagttcaagaccgtcatggctttttgtcctacgacttggaagcactgacgcacagctgacaatgccattcaattttgggaatcgtagccgaatttcctcacacatttgtgctacctacaaataaaaaaattattattttttctacaaaataccgtttttggggcataattttttgaatggtttagctacgcaattaaacgtcactaatatttttatactaatatagccaattacttgagcaattaaaagctaaaaaaaattgtctagtgacattcggccggcccaattattacgcgtcaaatgccatccgcggcccgtcaaaatgtgatgccatttttttcacacattgacgcattttagcattaccatttgattgcatactaacatttatttaattgcctttaactgc

SEQ ID NO: 38521 - DNA, 1006 bp, Heterodera glycines
tgtctcgtaatgcaaaaaccagcgcggagcaaacgccgctttgttgggttgcctccccccacccccgcccaatacgaaattatgtccctttgccctgagcatactttattttttttttggtgtaaaacataccaaacggtctcgaacccctcctgttcacaacgcctaggccaacaacgtccacttgattttgaagcatttttttgacgaaaattttacttctaaataaatagaagaaattgattatatgtatctaacttttgttattaggttaatatgaaagaacaaaaaacccagtggaaatggataggtttgggaatcggagactctctgttcatgaacctgaaaagccattttgaaaaatgttttttttcagtgtttcaagcatttgcttaataaaaaaatgtcaaaaattccgaaataagggcaaaacgatggtactcttaaaaccctctgcttttttaacgaaaaagaaccaaaaaggaaacggcactttttcgtacggttatatttcaagaaattcaacaaaaattgtcggcgtcgacggaacctatctttctatttttaaagatggttcaaaaacaccccaaaaagcgttgaagtttaatcaatttggacaaattctattaaaaaattgtctaaaattttacataacttttcccggaagcggctaaaggtcccgcctctgaccccatatttccagagttttttgtaaaagcgagtctcataaatatgcgggactgggacaattagaattacaaattccttttaatttttcggaaccttccaaataaaaaatagcccatttatctcttaaacaagtttccttttagcatctcggcgctatccccctgagaattttaaagaaaatttttttaattcgggcaaaacgcgatactagtttgttttgtctcttttattccaaaaacgggggatgctcgggaaggaatggcattttgtccacttttgtctcccagaatcaagcaaacacaaattgtgggggggg

SEQ ID NO: 38522 - DNA, 1059 bp, Heterodera glycines
tagcattttctccgaacaatttttgatttagagcgacttatacaaacataaaaacacacattttggcgttttggcacataaaaacacatcgtacatttcggggtttggcacattttgtacatattttttacatttttgagaaaaattaagaaaacacataacattgaaaaatacactccttaacatcaacattcttgccatttcttttagcattttcaaaattttctttatttatttctgtgccgaaaatagcctaattcaattcttcattaattcgtcaccggatttcgaactttattgctggtacttactcaactgatggcatagggagtcgttcctcccgtcatccgttcccactgtcatgatattttgtataatgtgcagattttacatttgataactgatatatgatgtttttgtgggtagatattcattatttctaagtaattttttgcatgtgcagaactatatacctcaaaaaaatttttcgggttgtctggtacagaaaccatggggaggaggaaacgagtctgctttttttaatggttttctcattgtatcttttacaatcctctctccaaaggaactcgcgcgaaataggagtgctaatgttttttatcttgagtgtgtaggtaccataatcccgtaaaatgtaactcgacgtctgtcttccccgtctccgcagtcttgtaatagaatattcgatttagaagtgaaaataatgtgatcacgtctatttaataaggtcacatgtaatgttctatgcaatattacttgaatccaaatacaatttgttgcaggagagtgtcctccgtcgggacggttgcattgtggtgaaagacaacgtggccaaagggactgaaaaagaatttgacgaagtcgacaattcatgggccaggcctcgggaaatgctgcacaaattgttcgaacgagccgactgtcgaattgtgctggagagaaaacagccgaacattccgaaagctctttacgaggcatgggaaagtttctcattttttaggaggcctaaaacccttaaatcgctaaaagtttttccttttt

SEQ ID NO: 38523 - DNA, 1258 bp, Heterodera glycines
  unsure (1)..(1258): unsure at all n locations
catatatgacgccgtcgccatccctcgtaagtttggcgagaatacgttgccgaagaactgcgtcctttgaagacttcagcgcagttaggagcattagccctttgaattgttcctcattcaatttgtcatactgaaaatctttcaaaagtcgtttgtgcctgttaacaaattgttgaaattcttcgccatcgtctttggtggccatcagacatgcaaatcggtccacaaatattgattgtggtttggcaaacagcttctccaatttcgaaattgtttcatcaaagtcgaaatccgtcaccttggccgggagaacaaatttgctgtactcgctgaacgcggtttccgacagtttgttcatcagtgcctttacttttatgtcatcggccgcgttcggtgcgcacgagtcaatggcaaaagtgaaacgctccagccattcggtgatgcgatgcttttcgtcgcaatgttcgaaaattgcgacgtccggcattgacggtattgtttggatgattgctggatttggctgattgtttctttgaacatttatcagctggttgatttgcgtctgttgctgagcaattacgtcgattaattgctgcagatttggctgaaccgcggcgggttgcgtcattgtagacgattattgtttcgacccgaaatcaataaacgttgaagtattgcaccaataggtgtcaatttaatatttagccaacccggcttttgacgaatttggcgtgccgactccgctttcgaataattttagagccgtctcggctttagaagaaatcaggtcggtgcagtcaatggcacagtcttggcagaatgtttgggtaaactccagcttctcttggccactgccagtgttgaggatgaagcgcttgtcgcctcgcttgaagttttcgtgacaggcatttcgtctgcgtcataacatgtgtgaaactacatccactactttctcacggaagtatgactcgatcgtacgaacaaactctcagaccattccctattccaaatggcgcgagagctcccttgtacgaactgccatgacccaaaaaaagatgccatttgtattttttacaccaaattaaggggataaagggcttcattcaataatctaaaaattttctcattaactctgcaaaattgaaaaaaaaatcgttagtttcaaaaaaattagggtcaaaatttcttgacttttgcttttcggttttactggattcaccctagcanaatttacatatttcaatgtttttctttgatg

SEQ ID NO: 38524 - DNA, 917 bp, Heterodera glycines
gtgcttttccttgtctttttgatgcccttgcaaaatctgttgcgcttctgatcagtttatataaaaaaagttaagcctaaactttttggcatgtttaaaaaggaattaaaaatttttaaaatatttattcatctccctttttgataatataagagtcagagtgccttattcaacttgtaaataaattttggtgcgtttcagagcagtttctgtaaaaatacttatgaattaattttgtaaaaaaataaataaataatgaaccctcctccttaataatttttctgcgcccaaggtactcactcggccgcttcgcggcctcgtggggggagtgcgtgcagtgcaactgtcgcggcgcaagggtcggtgggcaaatggcagcggcgcaaatgtcaacggcgcaagtgtcattttggcgtgagcggcgtaagagactgcggcgcaactgtcacggcgctaatgtctgcggcgcaaatgtcgggcaatccgaaaaattgattttttaatgctttccaatttccttctcctaaatcacgattaacttaatattttaatgattaaatattttaatatcttattagatatgttaaaatgtttattaaaaaattttttagttaaaaaatgtaaatgctattattaaatctcttttttacttttgaattattatcagggcttctttttttatgtaagaaaattcgcgaaatatgtataaaaatgataaaatatatatgaaatatgtacaaaaatatgtaaatataattgtttaaatggttattttttggaaagaattactctctaaatgatgatatagggacaaaataacataaaactcaaatatgtaaaaaaagaaatttatatgataaatccaaaatatgtattgaaatatgaacatatgtaaatatgtaaaaatatgtaaataa

SEQ ID NO: 38525 - DNA, 755 bp, Heterodera glycines
ttttgaacaaaatcaattccgaaaattctattttattaaattttttttgttatttttgtccatttaattttaaaaaatactcaatcatttacacatagaaattttttaaaccgtttaaattataatattttcacttgaaaaataattaaagtaaaaaatttttaaaaaatcaaaatttttcattaaaaaattttttcccgtttcccggcgggattcccgttaaaattgacgggatttttacgggaacgggaaaaagccgggaatcccgtttccgtttcccgtcccgctctttatcgattcccgtttcccgttccccgttcccggaaatttttttttaccggactctaggtaatatgataaaggcgcaacaatcaactgtttttaaaaaaatgtaattaaattaaatgttgaaaaaactaaaaagtttatatgggaatttaaaacaaaagggattcttactattacaaaagttaaaattaattgttgtttctaaacataaaaaaccatagtttaattaagaatatgaaagcaaaaagaaaaggatcaaatttcacaatgtttgtttttttcacaaagcagccatcattactttctattttgttttcaacacattaaactgctgccctttctctcgtttttgctctctaatctttaccttttctctcgcaaaaatttaataaaagttttcgtttcaataaatattccgttcaaaatgtgacatacagaatgacagcatcaatttagtaaggttgatt

SEQ ID NO: 38526 - DNA, 1112 bp, Heterodera glycines
  unsure (1)..(1112): unsure at all n locations
tcattttcaatagaactagctccaatgtttggttttcaaattaaactaagtntaagctaaaaccgatcttnatgatggtataaaaatgaaggctttaaaaattatatttttgattgccaatcatttgacttttctttaccagtatgtaaaatttgaagcagaaaataattaaacatcacgaagtattttctgtttttctcagttaaccgagataaagaaataatagacccgtgcctcggtagctcaatggtagagctgtccacggattggctgaacgagtgggttcggttcccacccgaggccgaacattttgcccatttctcattttatgatgtatacattccatttgtagttcgttccattttcctaatttcatcttatcctaactgttatatttttcccccagaaaatgtcatcatctccgtccactgctgtattcattttcgcttacacacttttttccgttgaactgatcacttgtgtcgccgttttggccatcacttttctgaatttggctgtcattgtgccaactaaacttttgcatttgaacctgaaaagcattctgatcgtccaaagtattgccgttatgctttatgtgttaccgcgtgtagtaatgcttttccaaaaattcacatccgacgacccatttgcacctgccaacgttgtactacaggtacaagcacagggatggcataaattccgaacaaaatttaaaaaatataatagaatcaaaatttaccgatagtcggaaataatttttaatggatttaaaaaatcgcaaaaagttttttttttataaaatgaatttctaaaattatagaatataatgacttttgacgctttgttccgccgtctgcttggtcatgctttgatcattgaacgatttatcgccacacttcgcacaaattcatatgaaaagttttcaaaagtgttttttactctgacttggttttgcattacggtattcgttggtttttaaaaaaatttaattctttaatttaatttatttattttttacagttcgccatcgcttttgtgaacactaataacacaatgaatcagtcagtggactatttaccgaaattctaatttaattacttcagactctagag

SEQ ID NO: 38527 - DNA, 846 bp, Heterodera glycines
ttttggcagtcccaggcatctttcatttctctctcatttcattcttctttggaaaaacccgaggccccctccacgtaacactctgtgtggaattccaactcattgcgagctctgtgaacacccacacagtttcaagtgaatgagaacgcgttgaggtggacaggaagccgacatacgcgtattccattcactgcgcattcccacaaatagccgacggtttaaacgccaatcattttatttcattcatcatcatatttgacctgcggactggccaattcataagcattcacaccaaaagccattgctgacgccgcccaattcatttgactctcatttggattcgatcatttcattgtcttcattccactcataatcatggcaaatcccgcggacatggcactgctgttccaacagctaacagacactctcaaaaacattgcaaatcaaaatgcaaatcccaataaacaaaactccgatttattcgctacaattaattcacaattgtccgaattcatctacaacccggaggcggatttggtttttgagatttggcatgagcgctatgggccattcctcgagacagatggacagtcattgccagatgaaatgaagacacgtctgttggtcggtaagcttggtgcgcaagaatacgcgcggttcacggagagcattctcccgaaaaaaccaacagacctatcatacaatgtcacagtaagcaagttaaagagtctattttgcggcatcaaatcaatttttgttaaacgatttgagtgttttcagttgcagaaagcaccaacacagagtccaatcgatttttgcgcacaagtcagcgcacaatgtgaacgg

SEQ ID NO: 38528 - DNA, 1021 bp, Heterodera glycines
tattttatttttcaagaatatcttttcagaaccgagttatgattttttttctgaaaaatcgaaaattttcagaaattctggaataactttttttctttttaagatagaaatcccaaataaatcccataaaattctcctgatttttctctatttttaaagctttattatagttaaatcgatgaaaccatcaccgagttatgaattttccaatattaacccaaatttccaagggccaaaaaattgccaaaaaataaagaatttttaaaaaatttcaaaaattatgaaacttaaaatagacatcatattcgtgctcagcacctcaaaataccccagaaaaatatttttcaccacccttttcaagcctaaaaaaattttcgaaaatttctagggggcctagctcgaaaatttttgaaaatttccgaacatgaagtacaccgttcgatagagcttaaaaagctctacaattttgctctaaggcattttttggctaaaaccaatccctgacgagttatgggcccgggactcaaatgtcccgctgaggccaaaaattttttctatttccgggaaaaaatcgaaaattttccgaaaaaaataccagtcgatagagctcgaaaaactatgttttggaagtggtcttcgttttgccaggaaaattcgttaaaaattcttaaaattcaaaaacccaaaaaccgttttttaggcctagctcgaaaaattttgaaaattttcgaaatttttaaatttcagaaaatcgagcttccaaaactctacaataagtctgctgggcacctttccctcagataaaaccccgacgcggtattcgcctggtactgaagtgtactttttgagcacgcttcagttgccattttctgcaggccagggggtggctctattaaaaaaataaaaaataccagcatgtagaggacactttggcggggtgccctcgcagcgggcattttttgattcgagttttagaagggggagttacgggccttgaaataaaaacaaaagtgagaaatta

SEQ ID NO: 38529 - DNA, 1330 bp, Heterodera glycines
  unsure (1)..(1330): unsure at all n locations
ttttntaattagttggtcatttgcgtttaatttatagttttattaaaattntgttgataattacctaatgttgaattttatttaaaatgtaattggaatggaagttttaattccgaatgctacattaactttaaacattaaaattgattgagaaaattatgctttaaataatcaaaattgggggggggcggcgcaaatgtcggcggcgcaagtgtcattttggctggtcggcgcaagtgtctgcggcgcaaccgcggcgcaagtgtcggtggcgcaaatggcagcggcgcaaatgtcggcggcgcaagtgtcattttggctggtcggcgcaagtgtctgcggcgcaactgtcgcggcgcaagtgtcggtggcgcaaatggcagcggcgcaaatgtcggcggcgcaagtgtcattttggctgggcggcgcaagtgtctgcggcgcaactgtcgcggcgcaaatgtctgcggcgcaaatgtcggccaatccgaaaaattgattttttaatgctttccaatttccttctcctaaatcagattaacttaatattttaatgattaaatattttaatatgttattagaaatgttaaaatgtttattaaaaatttttttagttaaaaaatgtaaatgctattattaaatctcttttttacttttgaattattatcagggcttctttttttatgtaagaaaattcgctaaatatgtataaaaatgataaaatatatatgaaatatgtacaaaaatatgtaaataaaattttttaaatggttattttttggaaaaaattactcgcaaaggatgaaataggcacaaaataacataaaactcaaatatgtaaaaaagaaaatttatatgaaaattccaaaatatgtattgaaatatgtacatatgtaaatatgtaaaaatatgtaaataaaagtcccaacctttattagcaaacacaaaaaataatttactactatttagagcatggagaatccatgaaaaaaaacatatatttacataaaaatataagccctgattattatcaataaaattatgtatatttatatttctagaatttctctccttcattactttttcaaaaagacataatatatattaaatattatgtgcatatttcggttattatgcccgttaatttgaattatttaattggtattacaattaaaatagttatcgaaagaaaaaacattagaaattataattattattanaagtatttatttttanattccatttattattanaactagataatctttataanatcatacgaagaattctcatttttataatcttaataaaatccaaaaaaatttagtaa

SEQ ID NO: 38530 - DNA, 694 bp, Heterodera glycines
agatcggacgggtgggcatgatttctttgtttcacgcaccccaccaaaagcaaaacgatataacccaaatataaggaaaaattttttaaaaaattttttctccatcttcctttttgatactaaagcatcagagtgctaaaattaagttgtaaataaaatttggtgcgctttagagctctttctgaaaaaaatatttatgaaacaaaaaaatcgattttttcaagtgtccgtttggggtactcaatacatttatggggagcaaaaatccatcgcagaattaaagtacaggctatagggaagctattcccaaggattcggtctcaccataaatctggacccatcgtttaggggggtctcccccgaaaccaaaaaaattgattttttcaagtgtccgtttggggtactcaaacaattatggggaccaaaaatccaacgcagaattaaagttcagtttatagggaagctattccggaaggattcggtctcgccataaatctgggcgcatcggttcgggggggctgtcccgaaaacaaaaaaatcgcttttttcaagtgtccgtttggggtactcaagcaattatggggagcaaaaatccaacccagaattaaagtacagggtatagggaagctattccggaaggattcggtctccccataagtctgggcgcatcgtctcggggggactgccccgaaaa

SEQ ID NO: 38531 - DNA, 1544 bp, Heterodera glycines
ggcgagcatcatgcaggtggtgaaggctaatcaattccatgataagcatggatccgtcccgataaatttaatgatataatataaagaatgggattaatttttatattttttatttggtaaatttaaatcttcaaatatgtgtatatgtaagcattgttgttaagcatcatcgcgagtgtcgattcggcgtcgctatgggagtagtcgtcgggctcagcgtccgatcaagcctcagtcattcgtgcgaggcctcgccgtcgacaataagtgacggcgaaagcgcggcatctgcttcaacttctcggcactgtcgtcacaatgccgacccctatcggcactgccgccgtccgtactcaaagcggcggtcgctgccatgccgcgagtactgtaggaggcagcggtgatggaagcggtggcggtagatattcatcctacgccgcaccatcgccacggtcaatcagtgcgctccaactggcggctgtgcgctcccggacgccgtccccgttgtgccgtccgttcaacataacgccaatgttgtcgccaacgctatcggacgcggacgatccgcagccgcatcataatcatcaatctggaccaactgacaccatgtcgctggactcaaccattggcgccaccgcaacggccgcgccaaattcaaatgcacagccaaaggcgtcagtggcgtgcgcggcgcggtccaacgggccgacgccacgctacgcgcagttgcgctcaccgctgcaccgcttccgcatccgtcagcagccgaggccgcgcagcccgcaaatgtgtagggatcaacagaaaatgccacggcacggcaccctttgccgctttttctatctcttccttccattggggcaattggtcgagactcttcgcacttttttggggccaattttttgcattttccatttgaaaatgcgtcagtgaattattcgaatttcttcaaaactagctcgtccctgctgattaccaagaaatatttaaatccaaaaattatccaaaactactctgatcagatcaatcagttttactgggctccgttaaagcatcaagctcttgtgtggtccagggatggcacggaattccgacttccgacatttttggggtcggaattccgatttccgaaaaaattttggtcgccggaattccgacttccgatttccgaaatttttgataaaaaatcggaaatttttttttttaattttttttttcaaaaaatatttatttttgtacaatttctattctctaaaaaccttaattttcttgaaaaatttactcaaaatcgctaaatttggtcatttttggtcaaaatctcttaagaattcgtattaaaaatgcaaaatttttttcccgggcggcgccttatcggaaccgccggcccgccctgccccccttttttccaaaaattgttttaaaaaccgaacccgcaaaaaaacaatggaaaaatgacatgaaaaagattttgatgaaaaattattgaaaactttaacaaaaaattttttgaaatcaccctttcactttggttaaaaattaaaaaa

SEQ ID NO: 38532 - DNA, 1004 bp, Heterodera glycines
ttcgatatcaagaaaccaagtcaagtccagaaaggaatactttaaaacgatttcgttttgttttggcattatgataccgaataactttcggaaattatggaaacaaaattggagaaattcgaataattttttgactgcaaatttttttccttttttgaattgggttcaaaaaaattttaagagaatttttgattattaatttgaagtcttgaatttatttgacaaatccaagacttaaaactgggagaagcaaggggctgtggctgggggcctaaaatttgggccacattggagaattaattctgatttctgaaaaagtcccagaaataactattttttctttccataccttcttgtagagctcgagctgctctttccaatggtcttatcccggtctcgatccgtgccgaactcacaaagttatggagtgaaatgtgaaatattgttttcaccacaaggcattttttctgaaaaccggattcaaaaatctggggtttggtataaccgttttagaaatagcgtagaaaacagcttcgatatcaagaaaccaagtcaagtccagaaaggaatattttaaaacgatttcgttttgttttggcattatgataccgaataactttcggaaattatggaaacaaaattggagaaattcgaataattttttgactgcaaatttttttccttttttgaattgggttcaaaaaaattttaagagaatttttgattattaatttgaagtcttgaatttatttgacaaatccaagacttaaaactgggagaagcaaagggctgtggctgggggcctaaaatttgggccacattggagaattaattctgatttctgaaaaagtcccagaaataactattttttctttccataccttcttgtagagctcgagctgctctttccaatggtcttatcccggtctcgatccgtgccgaactcacaaagttatggagtgaaatgtgaaatattgttttcaccacaaggcattttttctgaa

SEQ ID NO: 38533 - DNA, 711 bp, Heterodera glycines
cgacatttttacacatttggatgtccaatgaggcggaaaaggagttcacatcgacgggcaacccgaaggcaccagcgcttcacgtggtacttgactggatccaccgatcatggcaggagatttccaaagaagtgatcatcaaatcatttgagggtcagttgaaaaggaaaaaagaaaaatgcctgaatttttagtctgtggattgacaacgccattggacggaacaggagacgaaaaaattgcttgcttcaagccgaacggagcaattggaccgatcgggatcaaatttttgcgcgaatttagagcaactgaaacagtgaaagatggacgaaatgatcaagaggaagccggcctttctgaagatgacggtgatgtagagctggatggagttggagatgacgatgaatttttgatttgttagcattttactgtttctttcgttgttattttaaaaaaattgctgtaataattttttaaataaattctatttaatcccccgggggataattggagatagggcctttaatagagacggggggattatttttcaacctcgtcagaaagggggacataattggagacagggcctttaaaggagacggggccttaattagagcaaatacggtattctgataattctgaaccaaattaccaaaatcaacttgagcaaaattcaagtttttagtcactaaaaatcacatccctagtaat

SEQ ID NO: 38534 - DNA, 1268 bp, Heterodera glycines
atttaaagacaaaaaaagtgattcattgatgcgcccctgctatttcacatttgactctttgtgcttgtgctgttgttgtttattgttgtgtgtctgtcatcgcagacatttgaaaaatttattcaaattttccaattttgatatttctgtttaataaatgtgtagaataacaaacacgtgtggtgggtacaccctcgggacgaatgaataaaagtccttggacagacgcgcccaggagcccaggacaccgtccttgaaaaagcgatttttgacaaaaaaaaaaattacattcaggtctctatcagcgatggcacggaattccgatttgcgaaaaaattttggtcgtcggaattacgacccgatttccgaaatttttgatgaaaagtcggaaatttaaaaaaaaaatttttttcaagcaattaatcaattcgaagcaaaattatccaaatgtcgttttaattttctgttaggagtttaaatggtctgaagctccctccgataaggcttaagcatccacagagcacggatccatatcatttttatttacgccatctataagtattaaatcgatgtttttaaaatactgctaaaataacgaaattatgatctcccaaaataaagagggtttcgagcgactcaaaaaaaagcgttggccaattactatgcataatataatttttatagagtacttttaaaaatataatggccgaatattgaccatatcctttttgttatatttattcatacagaaaataatattttattgagaaaaattccaattttacgcggcggtttctggacgttctgtcaaatattcattcatttccgaacctataatagtataccaattttggttatgctcagttaaaatatatgaaatatgatctcccaaaataatgagggtttgtatattgaccccccagacaatgtattcctgtatcagtgggcgctggtattgggcccttcgacgatgaactggcaccataaacgcccgctgcccgtttgtgccagctctattcctcaaaaaagccactcattcacatttcctctcaactgccctctgttatatgtcctgcgcagaatgcatgtctcgtcaatttcaacgatcaccctttaatatattctagagttgagcgggaccgggaattttgggcttaaccgggaccttttcgggttgaaaaaccgcgaatttttgctgggaaaaaaccgggacttcggtactcagctgtactcagttgtccgtgttcaggccccggtcccgctcaact

SEQ ID NO: 38535 - DNA, 337 bp, Heterodera glycines
gcaggtcttaaaaaatcaacaaaatgaaaggaattcattggccttgcagttaccataaaagcctccgaaaaaaattcaaaaaaattaaaacatatatatatagaattatttgtttttaaataaattttttgtggggatgacgatttttgttaataaaaatcacctcggaatatgcagcagatccatgtttgccaaatcaaagaaatgttttttcgaaaataaaattctcaaacgactaaaaataatatgaaaagcgaaacgaaaataaaagatttaagaaatgaaaaaatatacgaaattttttatcatgtatgaaacaagggcgtaggaagggggg

SEQ ID NO: 38536 - DNA, 1185 bp, Heterodera glycines
tagcatataactaaatttattaaaattctaagtctattgagctagaaattcggaatgtcgaatgataccaatatttctgagaacagttatgaatttgaaaattgtcgacatttttgtttacgtgaacatatacagcctttgtaaactgcaataaaactgccattttagatattgagaaggaagggaagaatggtgaatggccttaacccctcgtggtagaaggtcactgaaaaggggaaatgatgagggaaattgaagatgcaacggaagcggcgaaacaattgattttaaataattggaatgcatttgaaaaggtttttttagtcttttctaaatctaaaaaaactagtactttaattcgatttatttagctggccgacggtttccggtttttcctgtagaaactttttttggacacaattaattcaattggaaaaattttaaatgggaaaaaatttacgacgtaaattttccgctgtttcactactcacctttttatagacttttctggcaatcattttctgtgtggcactctccgagtacgacatggtgttggcggaggatgacgaaatggtagcaaatttttggaaaaattttttttttaatatttttttgtccaaccaagaaacggatgattgaaagcatgaagttgttcgactccatctgtaacaacaaatggtttctgaacacgtccatcattttgtttctgaacaagaaggacctttttgaggagaaaattcgcaggtcagcgccaaaaatggttttaaaaaattatagcccggtgagcaaaaaaaaaaaaaagtttacggactccccctccgaaatttttttttctgaacaggcctgtatcttgtcagcctccccaaaaatgtaaattttgtaattactggtggaccacctgaaccaaaggtaatttgcgttgatgtcattttatttgtcggcactttttgaactaatgaaaatgtgtggtaatccggagaaaatttggtgtcagaatttgttaataaccccaaaaacctcccaaagaatttttttttttgccaaccctaagggtcctttacccctatggtttctcggagtgcttaaacagcaagtgtcggactttattggagccgaattccgactttatgtcatccgccgttacagccctactggcccaaacccataaaccttaaaaattttgat

SEQ ID NO: 38537 - DNA, 1361 bp, Heterodera glycines
attagtgctttattcaacgctacaatagaagacaaaagttggtgtccaattctcggtagggatttaatagtgactttcagagatagccatatattgtcaagaaatatttttcgagcgttctcaaacacattattagtgttctattcagcgctacatcagaagacaaaagttgtgtccaattcccggtagggatttaatagtgactttcagagatagacattgttagtctataactatttttcgttcgttttcaagcactttattagtactttattctccactacaatagaagacataagttggtgtcctattcccggtaggaatttaattgtgactttcagagatagtcattttatgtcaataaatatgtttcagtgcggtttcatacacactaatagtgcccccccccccccatcactcccactcccgattcccctcggttctccccgattccccccccccccctcgtccattttctcactgccaccatttttaatttttaaatattaaaatcgccattctcacgcacatcgattgtcgtttctgctagtctatttataaatgtgtgatctgctgaaggattacagctttttatatataagaaaaccaaaaaataaactttttattcgcaaaacccctcctgcaaaaaatctaataattattttcagcatgaaatgagtcaactccacaaatacctagtcccttccattttttttactcttctaaatgcgcccgtctagcattgcccaaaattccttcacctccgaccatccctgatgcctttgcgaaccttccgatcactacacatgaaacactaaaagactagttttcactatcaaaaattaagctaccttggttgttatctgctcacgattcttccccaattaataaacagttgaactaatcccgacccgaatcgcactcagtatccctcgtacgttcttcgaattgcaagtgaaacgcaccaatgttggcaaatatctcaaccggattgccattccatttccaatttttaaattgccaggccggaccctaaagcagttttgcaaatcccctgaaatgaccatacgcccacctgcacaaacactgcgaccactcggtcccattcctcgtccttcaatcgtgttggattgtctacgactcggtacggaacagtgacgccattctttgggatttgcagtaacagctcattctctcgtttactgctaaattgctttttttcttctgtgcttacgtaaccgccaaatccttaacataaattaatttataataattcttaaatgaataaacctgcaaaattcctgcgcattgtaaatttgtgatgaccgaacttgccccccaaggataatcattattggaac

SEQ ID NO: 38538 - DNA, 846 bp, Heterodera glycines
  unsure (1)..(846): unsure at all n locations
tttttaataattattctaaacaactattatttttttttcacgaaacaaacagttcccgtcagctgtgacattaatttttttggctatctttatattgctcgttacattttcttcttgctaaaattttcaatttcaattattatttattaaatttgtattttcattttaattttttaattaagttttactaagccacctcattttattgttaaaaattttcaatttaaattattaaaaatttcttcaaatattttaaaattttttctaagccacttcatttgttggtgtcggtgtccggtccactggcaatgattttgaatgttggagacggtaaaaaggcaatatcgatgactcatcatccttaaaaattatttacaaatttcgtttgtttaaatttaaaaaaaaataataataatttttttattaaaaaggcaatatcgacgactcatcatccttaaaaaattatttacaaattttgtttgtttaaatttaaaaaaaaataataattttttattaaaaaggcaatatcgacgactcatcatcctttacttgtttaacaaataattaataaatttctttgtttattaaaatcaaaaaaaataataatttttattcaaaaggcaagatcatgacggagtgaatacttttcagttttgtgtacatagcccaaaaattttaaaaaatatgttgtacaaatgattcacggaccatggaatctttttgatggcacaaaaggaaaatttgccgttagaatgtcanaaaaaaacctcagatatgtcttttagggcaaatcattccttttgtgccaccaaaaaactccgcgcatccttttgtgacatatttttg

SEQ ID NO: 38539 - DNA, 342 bp, Heterodera glycines
ttcgccatattaacactttggctgtgcaaataatcgcaaggattggaaatccctcctttttggccaaatatccaatgccgaatttggacaaacattgggaagaagcggaagaatttgactgatgcgattttgcggtttgttcggctttttcatgtatttttttcatcgtttttaaagcattccgacgatggcccgccaaaataaaaacgatttggacaaaaacaataaaaaaaaaattctgcgaaggcatgaaaaattcggtaactttttatcaaagaaagaaaaatgatcggaccgtgtcaaatatcagaagccatttccccaatagttttgccacccaat

SEQ ID NO: 38540 - DNA, 1044 bp, Heterodera glycines
attccccccccccccccctttttctgtttgctcgtcgctctcccttcagtccgtccatcccaacccatcggcgggaatgaatttgtggccaattgatcggccaagcgacacgagcaatgaatgaaagcgccgccgtccgattttttcctttgccaataatttattcactttatgttttcctcgctaattgccttttgcttttccctttagaaattcgtttgattgccttttaatttgtcattttctctttgaccgttacggtcattttttgtgccatcgacggaatgccttcgctttcattaagcgaagggcggccaatgattggtttcgttcgcgcgatgactcattgttcggtgccgggcatttttctgatcgtagtcgtgccattcggtgatccctttggcttttccctttccccttttaattacccccccccccctctcttagtgtttttcgcttgtccaatttctggccaggctctgaacgacccgtccactcaatacattgagggtcggctggccaaccgacgtgtttggtggtgcccttccggttatggtaaatgtcaattaaaattgaaatataaattcagcaaaattatcgtttatggtcccataaaaaaggcgaaatattactttgggtagttttgcgttgttctcggggttttcgaggtaactcacgaaatctgacacaaattcgaccaattcgaacctatcaattttgtcacttatgcttccaaatatgcataataactacaaagtttggtcaagaaactccacggacacctgctgaccatccattattctaaaataagaaagaacaaattttgtttttttttcctgggtttttcgtaatcagtaattaataattatatatccttaattacccttaaacgattttaacttcaagcgatgccccccccccttttctcaggttacttggcgtactgtccccagcccaccgattgggacaattacaattggtgctgcactttcccttacttcggctcctggaagccctcctgctgcccttttgccattcccacgg

SEQ ID NO: 38541 - DNA, 1022 bp, Heterodera glycines
aaaatttagaattcattttccccactcctttttcccgaggggtattatttggtatttttttttccccaaataaccttgtcaaaccccatttttcgccccgtgaattttttttttttgaattctgaaccgttttgagtagattagactagaaaaaattgaaaatttgaaaatcatgtttcccgctcccttttcccaggggtattattttgtaaagtcttttttcccccaataaacttgtcaaaccgcatttttcgcaccgtgaatgttatttttattgaattctgaaccgttttgagtagattagactagaaaaaattaaaaattttgaaatcatgtttcccactcccttctcccaggggtattattttgtaaagtctttttttccccaataaacttttcaaaccccatttttcgcaccgtgaatgttatttttattgaattctgaaccgttttgagtagattagactagaaaaaattgaaaattttgaaatcatgtttcccactcccttctcccaggggtattattttgtaaagtctttttttccccaataaacttttcaaaccccatttttcgcaccgtgaatgttatttttatcgaattctgaaccgttttgagtagattagactagaaaaaattgaaaattttgaaatcatgtttcccactcccttctcccaggggtattattttgtaaagtctttttttcaaaataaacttttcaaaccccatttttcgcaccgtgaatgttatttttattgaattctgaaccggtttgagtagattagactagaaaaaattgaaaattttgaaatcatgtttcccactcccttctcccaggggtattattttgtagtcttttttccccaataaacttgtcaaaccccatttttcgcaccgtgaatgttatttttattgaattctgaaccgttttgagtagattaaactagaaaaaattgaaaattttgaaatcatgtttcccactccctttctcccgggggatgattttgtgaagttttttttcccc

SEQ ID NO: 38542 - DNA, 1346 bp, Heterodera glycines
  unsure (1)..(1346): unsure at all n locations
cttacattcgcccatccngggttgatcaccaatggcacttccatggcctcattcacttccaatttcttcccatttcgccagtttgtccatttcttcaccggctccgacaaattatcgacagcaaacgcactttcaacaacaggccccgagtggacaatggcatcagattttggcacaattttgtcggaagaaattgctaaaattaaattttcaaaaaattagcatttaggatataaaaatcatcattttgaagaatttattacagatgaaaataaagcaataaaatttaaatttagaaaattttagcggaatttttggggcaaacggttcaaaggaataaaaagtcatacacacaaaaaaatcagcatattgccataaattaaaaaatttgggagatatgaccagatgaattttttcaaaaaaagaactcagtgttcgaacatttttgccatatctttgttcaagctttccgaaacttttgaggctataacatttagggctatcgaatgataccaagcaagattggctggatttggttggcagagaaaaaaattatagccaaaaacatggtgggcccaaatgagataaaccgggacagtggggttcgattcccacccgatgcctaacatattttgcccatttcttattgtagtaatgagacacacaattggctgactaattaatattttttaatcacctttggtgacattgtcttcattgtttttgtccgtggcatttgctgctgaacattgctgcagaacaacaacaagcaatgacgaaaacaacaagaaaaaattgtaaattgacatataattagttctaaattaacatccaattcatattaagagaaaatttaaagaaaataaaaattttattttttaaattcttttgaactttccttaagatctcaaaacttacgaaaaaattatgaaattttctatttttatgcatttaagaaaaatttcattaaaaatcccaaaaaaaaataaataaaaagaaaaactgcaaaatttgtacgaaaaaatgtaaaaaaaaatatgtaaatcccaaaatatgtataaacataaaatcgctttttttttaattaatttttaaaaattaaagatgaaatcatcatcactttctgtgctttcgattaaaaatgaaaattgcacggaaatttttgtgatttatatttaataaaccaaaagcagtgaatgcaaaaataaataaaaatcagccaccacttttagttaatgtgaaacaaaaaacagaaattcctatgctaatcaaaatgtgtaatatgttgggacaaaatatctaaataaatgaagaaatatatatatatatatatatatatatatata

SEQ ID NO: 38543 - DNA, 988 bp, Heterodera glycines
cattccgaggccccaaaaattttcggaaatcggaattcttaggccccaaaaattttcggaaatcggaattccgggggtccaaaatttttcggaaatcggaattccgaggcccaaaaatttttcggaagtcgaaaatcggaattccgaccccaaaaacgtcggaaatcggaattcggaagtcggaaatcggaaatcggaattcggaaatcggaaatttttcaaaaaaaaaaaataataaaaaattttctaaatattttaataggctaaattttaaattcttaaccaagtaaaaggtgattcaaaaattttttgatctatttaaatacatatttggtttaaaaaattattcaatgattttcatcaaaaattttacctttttttttgcggcgcgttttttcaaaatttttgaaaacatggcgggggaggtccggcggtgccgataggcgccgccggggaaaatttttgaaaatttcagtgcaatttattaacaaaatttgtaaaaaattgttaatttttgaaaaaaaaatcaaaaaattttcgaaaatttccgactttttatcaaaaatttcggaaatcggaagtcggaattccgaccccaaaaatatcggaaatcggaattccgtgccatccctggtacgtacgggccattaattctcttgaaattttcattatggattgattaaaaaaaaattgttcacagtaaaaatgttttttgggggtgtcaatttcgtaaaaattttagacaaaatattttcaattgaaaaaatgttcttggatgtaaatcatgtgcatttgaatgtcgacaatcagtttggcaaacaatagaaaaagctgtacaaattcaacaaaaacttaaattttcaacatgatgttgaaaaatcgtgaccaaattttcatgttcatatatgttcatccaaggaattttttttgtttaaaattttgtttaaaggattttcatttttttcagttttggtaagcaaatttctgt

SEQ ID NO: 38544 - DNA, 1068 bp, Heterodera glycines
agccgacccgcgccggatgatggcgtcgcgtccgcctccatcaacacggaggaggatttgggaggactgaacaccgaatggctaactgacgatcagctgagcgaagtgatcggattggccacacggaaacttactttttattcagttggcctctgccgggagtaacgaagaacgaatgataaaaatgaggaccttttatgacaatttggaaggcgaagcgaagaaaggcgcaacgaagaaaatagtggaggaatgctacggatgggtggacgaagtggcgacggaggacgagcgaaacgcactgaagcaaatgcaccaccaaagccatgacgaatgcaaggccaaagtcagggaactgatgggacggctaagtgaggagagaagcgaacaagtggagaatcggatgggtttctgcgaacacgtctattacgggaagatggacggggaaggcgacggaggagcaggaacagctggagacgaacaccaccaccaccatcatcaccacaccaaaagacgggcaagcgatgggaaaagcggacaatgcccaaacaaaatagggaaaaagcggataaaggaaaaagcgaacaaacaaaaatatcggaaaagcggactaaagggaaaaagcggacaaaatgcccccacccccaatatagcacaataaacagcagtgaaaatggcagtttaaggctcacaggcaacgcagagaccaccaccaccaccaccatggcgaacatggacttgaggattatttcaaaacgcatttggcatggttaacggatgagcaaaaagcggaaataagcaggatgaaggagtcagggaaaagccgacaggaaataaagcagaaagtgatcgaattgtacgacgcaaccactggagaagcgcgagaaaaggcaaccgaactgctgaagggcgggtgccgagagctgattaaaattgtgctaggagaggaaaaggccggcaagatcaaagagatgaaggagtccggcacggatgttgccaagatttctgagcagatcaatgcgtggatcgaagagttagcggatgagaaaaagaaggaatggccaatga

SEQ ID NO: 38545 - DNA, 1079 bp, Heterodera glycines
cttccccggggggaaaaaagggggtttgaaaaattttattgggaaaaaaagtctttacaaaaaataatccccctgggagaaggggagggggaaacatgatttcaaaatttttcaattttttttagttttatttacccaaaccggttcagaattctataaaaaaaaacatttcggggtgggaaaaaagggggtttgaaaagtttatgggggaaaaaaaagactttacaaaataatacccctggaagaggggagtgggaaacatgatttcaaaattttcaattttttttagtctaatctactcaaaacggttcagaattcaataaaaataacattcacggtgcgaaaaatggggtttgacaagtttattggggaaaaaaagactttacaaaataatacccctgggagaagggagtgggaaacatgatttcaaaattttcaattttttctagtctaatctactcaaaacggttcagaattcaataaaaataacattcacggtgcgaaaaatggggtttgacaagtttattggggaaaaaagactttacaaaataatacccctgggagaagggagtgggaaacatgatttcaaaattttcaattttttctagtctaatctactcaaaccggttcagaattcaataaaaataacattcacggtgcgaaaaatggggtttgaaaagtttatttggaaaaaaagactttacaaaataatacccctgggagaagggagtgggaaacatgatttcaaaattttcaattttttctagtctaatctactcaaaacggctcagaattcaataaagatgctatgcacgcagcgatacgaaaatggcggtacgaaaacgtcctggcccgcaacattcactatgggtaccgaaacgggtcagttgcgtctggccagttgcgtctgggcattttcctagtgtaaattttgaattaacgcgcaaaaatttacgccaaatgcgctatttggcgttatgagcaattttgtctgacactggcgcgtgggacccacgcgtttcggcgctcgtgtttcggcgatcgcgtttcggcgctcccgtttcggcgccagctcgttt

SEQ ID NO: 38546 - DNA, 766 bp, Heterodera glycines
gtacacatgtggcctggttttttgaattcttctagtcataatttttttgagcattaacgaaattttttgaaacttagcaggctaatagagaacacttactttcgaatgataccaataatgttagatttggttgccaaagaaaaaagttatagtccaaaaactgggctggcgccgaaacgagcggcgccgaaacgagggtgtcccaattaaaaccccctaagaagtctagaaatttaattttcagtttaaaagtttttatggcggaggaaagtagcgatacggagaaatcttttggtcagaccatcaacagatttccattatgtcaaccatgtctgatcaaaagctttgtaacctgctgatcagtatcattgttgagctggcagcaatcatttcaatatttgaatgctttttaaaaaaataggcccagaattttgaaaaaccggtggattgagattccggccggaattcgagattaccgcgactcaaattccgattttgccgtgacgatcggcgattccggtcgggattcggaattttcacaaaaagaaaaacttaatagaaaaagttatttgccattttttaatttaaaccatgagaagattttaaatcccatgtcagggtcagattccatcttcaacttgccgagatccaattttgtcggaacctgacgacagattgtgacctgattccgggaaaaccccaaccgagtcccgaaccagttcagtctctatttaaagacacaaattttaattttaaacttaatctg

SEQ ID NO: 38547 - DNA, 981 bp, Heterodera glycines
atacaagggaattttttttagttcttttggatgtgtattttcgccacgttttgattcgatggtggacaaaaatttcaatgtagatagtgaattttttaaaaatttcggcaagttctttttttaatttgtttaattaaaaacttttctgcaaaagtcattaaaaatttttttgttaaaatgccgggtttttttaagggtttttgaatctttttaaagattttgtgccctaaaatgggcctcaaattatcaaaatggctctaaaattttttttctttttgtaaattcggcgttttttttaattaagatttttgtctttttggtacctcattttttaatttcaggacgacattcaaaataggcaaaaaaatttagtgtgtttaagatttgttaagacattttctaggatcggaaaaatgagctggtcacgaatctgagcactaatttagcaatatcaaaatttatgattttcgtcaagtcttgatatttacaatttttttttattttctaaaaattatttggcatacgcttgggctaaaccagcgttcttggtatttttagctttatctcactgaggcacatctaaagacaccaagaacgcttggtttcgccaagcctacgcgaaatggtgaacgtttgtctttagtagtcacaaaatttagaaaaaattttgaaatttattgtttttaacgtaggtacggggctgaaatttggcataggtatgtaacttgggatggcgcattcaggaaaactataggttttttggtccgaagtccaactgagtcccaccggcgctaaaactgactttgctggcagtctcagtgttacgaaaatttttcctttagctcagatcgaaaaacgcttgcaggtaggaaactaagttggactatgcctgacattattgccagcaacccctaacccctacctatacccccctggtctgtacgtttatacaactttttgaggtcagataatgtacacttc

SEQ ID NO: 38548 - DNA, 851 bp, Heterodera glycines
ttattttaaagaattttaaaaaaatgtttaaattggctcaaaaaattaccacaattgattattgagaaaaattattttatggatgtgtttttaattaatttttagttattttcgtaaaaattatttgtctctcgaaaattttttgtcgagttttgactaccttttgttggtaacatttctaaccaccaactcccgtcaaatgaccacggactaccttcttattctacgggtaaatggtggtcatttaaccatgaccatgactctcttttttacccgatagaataagattatagttcatggtcgcttgacgaaggttggcagtcaaaacggcacttcgtggtcattttcttattctacgggtttaccaccaatttcgtggtcatttgacccggtctttaaccaccttcttattctacgggcccagccgatttgtttcttcagctgattagtccagaagccatttattcgttgaagtacatacataggtaaaatatttaaatatatttttgactgagcggcgcaaaagtcgcaacacgctaccgcacacctggactaccaaactttatgacttttcaaaatttgacctaaaatactcaaaattgacacaccatttccttccccccccccacccacccaccttcgtacatcgattatgcaacgggggccctaacgaccccggggccctaaaacgggggccctaacgcgggggcccgaaaacgggggcccgaacgctctggtccctgcctattaacctgcgaagtttcgaaaaatttagctgagaaacgaaaaagttatggccgaaagaactcgaaaaaattgcgttttcctggccgttttggcgcggcgcgccg

SEQ ID NO: 38549 - DNA, 1043 bp, Heterodera glycines
tagtcatttttcttggatataagataaatttaaaaattctcttgagaaattaaatggcgattgcgcaccgccctccctctcacgctcgagcgcttttgtaacgtataaaatttctcaaaagaagagatagtcatttttcttggatataagataaatttaaaaattctctgagaaattaaatggcgattgcgcaccgccctccctctcacgctcgagcgcttttgtaacgtataaaatttctcaaaagaagagatagtcatttttcttggatataagataaatttaaaaattctctgtgaaattaaatggcgattgcgcaccgcacttcctatcatgctcgagagcatttgtaacgtataaaatttctcaaaataagagatagtcatttttcttggatataagataaatttaaaaattctctgtgaaattaaatggcgattgcgcaccgccctccctctcacgctcgagcgcttttgtaacgtataaaatttctcaaaataagagatagtcatttttcttggatataagataaatttaaaaattctctgagaaattaaatggcgattgcgcaccgccctccctctcacgctcgagcgcttttgtaacgtataaaatttctcaaaagaagagatagtcatttttcttggatataagataaatttaaaaattctctgagaaattaaatggcgattgcgcaccgccctccctctcacgctcgagcgcttttgtaacgtataaaatttctcaaaagaagagatactcatttttcttggatataagataaattttaaaattctctgagaattaaatggcgattgcgcaccgccctccctctcacgctcgagcgcttttgtaacgtataaaatttctcaaagaagaatagtcatttttctggaataagataaatttaaaattctctgagaattaaatggcgattgcgcaccgccctccctctcacgctcgagcgcttttgtagcgtataaaatttctcaaaagaagagatagtcatttttcttggatataagataaatttaaaattctct

SEQ ID NO: 38550 - DNA, 1168 bp, Heterodera glycines
  unsure (1)..(1168): unsure at all n locations
aatatattaatgagtatttaaaatacaaatattttttttatatccttatttagcatttcataaacttaaagtataatcaataaacgaggagatgcacaatttccgcaccgacttcaacatggaggcggtgcacaacgaaactccatctggaatgccgactcacaaactgaccatcaaagtgaacaaaattttatttgattattgtttaaccaataaatccagatgggtacgcaagtgatgctgtccgcaatctggacgtcacccagggactgtgcaacggcacacggctgcaggtcatgcgcacttcggagaacaaaatcttctgccgaatcctcaccggaccacgagcgggtgcgcagaacatcatcgccatcccccgcatccaattcgagtatggccgcgcccgtcatcaccgtgggctacgattccgccgtctgcagttccccgtccgactttgctttgccatgacgatcaacaaggtgaaataacagaaattatatgcgagtacatacatatgctacaaaattttaaggcacaaggacagatgctgcagcggatggcgctcgtgctcaacggcagacaatgcttctcccatggccaagtgtacgtcgccatgtccagggtgacgcagatggacagtatcagagtgtacgcgccgttctgccaaagtgggtacgggacgcacatcgagaacgtggtttaccacgagctgctggacatggacaatgccgcacaaatgccgcaactgacgaggactccgacctttgggcgaccggacgtggacagtgacccggacgtgacaataccggacgtggacaacgaccggaactttacaatacctgacgtggtccccagagaaccggacatggaaatggacacaaacgtggctgaaccggacgtggcgatggaaaatgaagttgaagcgggtgcgatggaagaagtctcacctgatacttcatttgatgattttttggattgattttgttatttattttgctgctttatttgattaaacttttttaaattgaataaaaaattttaattaattttgctaatttttaatgtacgagttgagcggaagtagggaaggagttgttatgaagttgttcaaaagctgtttggttttaacaagagttgtcgaccanaaacatataaatagtatctttgt

SEQ ID NO: 38551 - DNA, 985 bp, Heterodera glycines
tattagttatgggttgtaaatattcgttttttgcacgctatttgaggaaaaaaaacgaaaatggtcgaattttgcctttttatcgatcaaactgtgcggcgcattcaagctgcttcaggtaagctgaattccggaataaaaacaccagtttgctgtaaatttaggaaatggcagttcgatggaattcttctttgatcatgattaggcggctttctgagcaaagggctgctattgaccgaatcgcatttgaacagaggaaatttgaattgactttgcaagatggcgagtggcgactgcttaattcactggagatgctcttggcacctttggaagaagcatcactttacttttgcaaatcaccgctttcaacccaaataccattttcatgagcgttgctttcacaactaagacagttggaccttcgggtgttatgtgaaaatgggcatttacaaggaattacggaagttgaggaaatgcgttcaaaacttttggttggacttgaggaaagattcagtcacttggagaatgaaaagtttaatttttaaaatttttttttaaaatattttttaaggttgcatgccctttcaactttcttggacccgcggtacaaacacttttttgcaaaggacattgaccatttcaaattaaagtgcatatcttagggttttaagttatctaaaatgtgattaattaagggtgaaattctggctcacggacgaacaacaaaatggcaatgactctgcgctcgttacaactgaagacattgaaactgcgtcgctttttatagttcctcctcctcccaaacaacgccgtacattacttgattccttgtcagaaatggcctcaacaagcaaatcttttggtatttttaaaggatttttcttattacacatacaaaatttaaagtgcaaaccgaatcgacatttgacgaagaattcaaaaatattgttcgggcgatttgattgggccaggaattggacccttt

SEQ ID NO: 38552 - DNA, 811 bp, Heterodera glycines
ctatttgacggacaaagtcagcaagcaaatcttcgccacttcgtcagctgctgattttagtgcccacaacaaaaatcagaaactgttccacgaattgcatgttcaggtggatttaataaacaaaagatgattaacaattaaatattaaggcccacgaaaatgtgtccattcttttcgcggacattgtcaatttcacccaattggctgcacaactcaatgccaaagatttggtgaagacactgaacgaattgtacagcaaatttgacgaggacgcacaagtgggacaaacgaacaaaaaccgggaatttaatttcaattatgttgtcttaattatcctatactcccctcccccactcgcttggcttaattacccaattattataaatatcccgcccaccctcacagaagttgtcgtgcatgcgaataaaattcctcggcgactgttattactgcgtcagcggaatgccggtcaaccgtccctcccatgccgacatgtgcgttctgatgggtaagcttataaaaactggaaattcggatgatggagcaactcccgaaaggccataaaaatctcaggattggagatgattaaaacgattcgtcaagtgcgaatcgccaccggcgtcaacgtggacatgcgaatcggcgtacacacggggtccgtgctgtgtggcattttgggactgtaagagaataaatggttataaatcttaatttgtaaaaaattttttgcacaattaagcaaaaaatggcagtttgacatttggtctgatgacgtgtcctttgccaatcaaatggagtccacggggtgatc

SEQ ID NO: 38553 - DNA, 787 bp, Heterodera glycines
aaaaagggtgtgaaaaatatttttctgggctattttgaggtgctgagcacgaatatgatgtctattttaagtttcataatttttggaattttttaaaaattctttattttttggcaattttttggcctcgggattttggcctaatatttgaaaattcataacaaatcgaagggttgaccaattttgattaaataaagcattaaaaatggagaaaaatcaggagaattttatgggttttatttggcttttgtatcataaatatgaaaaaagttattccagaaattctggaaaaattcggattttcagaaaaaaatttataactcgcttctgaaaagatattcaggaaaagtaaaatgctacaaaaatccgcaatttttagctctattttataaattttatttggcatttttatcacttttttgaaaaaagttataaaaataaaagtgattttgggattcgggaccaaaggggtgagcataggatttttgagtgaaaaatttttttcaacaaaaatcttccaaaaacatgtcattaggggttatttgggccgctgatcacgaatacgtgatcagattttacttttgacatcgttaagccctcagaatccctgtgtgattggggattctgaggcatcattttgagggtggggggcgaagttcggatccgatcggtgtacattatttttctatgattttttaggttaaatttattaaatattcaattgttaattttcaacgttattttcaattaataaatggaggatttaaaaatactacaaaaatccgca

SEQ ID NO: 38554 - DNA, 940 bp, Heterodera glycines
ggtagtaagggtagaagagtaccaaaatgaggtgttttcttttcgcatcactttactgacataggtcttcgttttttgaatcgatgcgtgttaaggtaccatataccataatggataacttatctcattagagataattagggaccgtttataataccaaacattttaagttaaatgggaactaacgcggaaaaggtcaaaagcacagaaaagtagcaaacattgcgttttccgtaattcgcatatttttccaatgtaaacgagaacaaccttcacatttataccgaccaaaaaaaatgtcttccattaaagaataatatttggtgtatgaagaaaaagcggatgaagtcgctttgaaacagatgatgagttaataaaatacacaaacaaaatgattggtacacggtacacagaggtgagaacccatgaagaaataataatttaagggcatttatttgccactcattggacagcgacaaaagtaaaaaaaaaggaaatggaaagaaaaagtggccaaacaacaaacaaaaattaacacaagcaaaacaaaaaggagtggaactgaaggggatggaaggaatatcatgtcgaaagcggaggcgtacgaatgaatgtttaagggacggggagaagggcaaagtcaatttttagcccctccccccccccttttatttgaaaagtcattgtgaagacagacgaaaagctatttattggacattcgaccgacaaaaagaaatttcctttttttgtttgaggtgtcttgaaccatcacaaatccgcgaatgattttgggcgaggaattcggcgacgggtagcgtaatggtgaaaatgtgcacacgagttgaagagaccttttgctgggcaatggttaaaagcagcgccaaagacacgatgaaagagcataatctgttccgggaagggggggggggggtgactcagc

SEQ ID NO: 38555 - DNA, 1001 bp, Heterodera glycines
  unsure (1)..(1001): unsure at all n locations
cgaattttatagcgtgaaaagtactgatttcnactttctatctaatcggatacacccaaaatttgaaaagcatctgtaatttagcctcttntaaatcttaatnttctgaaacccgaatgtagaaagtatgaatgtatttctgcgacgccttctatacttaattcatccataatgggccaaaaatcataggttaagaccaaaagagggattttagtttcagccggaatttctataaaaatgttcgtgtgtaacctatctttgtctattcggataggtaagaaattgaaatattcgtattacttttcctcccttaaagctttataatgaaagcgtcgttgtctatttaggatttgccgtcgcaattctgtaattccactttggaatccaaaggaatttgattcgcttttacaaaatagacagtgccgaaatttgtagatcggctaaaccttaactgaaacataccatatcagcgagacgccatgctgatttgttgtaatcataataaaaaggcccctattgtataattctgcctttcctataagcacaatgtgtttgatgggctctacaaaatattgcttgtgcaaagcaattattttcttggaggctgtaattttctgtagtcatttgatatgcatctgctatttttctagtcacaaacaccaatatttttcggcccgaattttataggcgtgaaaagtactgatttccaacttctttctattcggatacacccaaaatttgaaaagcatctgtaatttagcctcttttaaatcttaattttctgaaacccgaatttagaaagtatgaatgtatttctgcgacgccttctatacttaattcatccataatgggccaaaaatcataggttaagaccaaaagagggattttagtttcagccggaatttctataaaaatgttcgtgtgtaaactatctttgtctattcggataggtaagaaattgaaatatacgcattacatttcctctcttatagctgtataat

SEQ ID NO: 38556 - DNA, 1194 bp, Heterodera glycines
aacttattggggatatccgccaccttactatccacatcccccaccacctatgggttacccaaatcagcaaatgtttggaaatgcgaacactaaggtgccgcaaccgacccaaattcgacagccatacaatcaccaaattccaactcaaataaatgcccagcaaacagctcttaacggcctcgaatgcgttttaattctggacaaattgccggacattaagggcaatgaaggaaatgacagcattaaatcttttttcaaaaaattttcacagtataccagcgattggccgaataaaaagcgcattgattccttggaatcgaaactcagtgggcgcgcagagcgagcatttaattcggctttggccaatgaaccgtttatatttgaaaacataaaaagacacattctccaacaacttgaggcgacggattgtcatgaaatggcagcatttgatgaattaatgcaaggcattcgccgaaacccaagagaaggactgaaagatttgtccaaccgattcgccattttggggaaaaagcgctagaaaaaaacatttttaaaagcaaaaaaatttgtcacttgccttaaaatcgcaaaaaatttggcaatttttggtaaaactctgttaacaaagtgcactcaaattttcaaaatttctccggcggtgccgataggcaacgccagacctcctagtccccaaaagttttttttaggaaaaagcgttccgcggaaaaagtttattgattttttcattcgaataaaaaaattttcttattgatttttgaacatttaaaaaattaattgacccaaatcccgaaatttttctcgtcccgaaacccgaatcccgaccctgatggtttttcggccgacccgacccgaatcccgattcgagaccgaaaatttcccgaaactcttgacagagaccgacttatttgaatctccaaataatcatttaatttcattttcaaaattcattttttcaaatttggcatccgccttctccgtccgtcacacagttgtagcatccgtcggggcaattctttgcgtatttctcctcacaacagtaaaagcagctgcacctcgttttcaatgcgcattgcttgtcgaacacaaattggcacaccacacagttgtgattgccggggctgcagttggcatctgcgaattagtatttgccaaataattttctggcattcccag

SEQ ID NO: 38557 - DNA, 648 bp, Heterodera glycines
agaacggctgcgccatcagcaccatgggcttcataacaccctcctacgccgtgcgggtggtatttacccagcacgtcgccccttttacgggcggatttcttgaatttggcgctgttgttcagccccagctcagacatggcgtagatgatgcggcgttgtaccggcttcaaaccgtcgccaatgtacggcaacgcccgatccatgatgacgtacatggaatagttcagataggcgttttcagtgaatgtgtgcagcggtaaacgctctacaccgtcatgagtcagatcactcattactcaattatcctcagaccgtggcttggcaatccctggacgacaataaggcatcgcttgtcgattctgcccgcgatagtaacccatctgcggggtggctgtcacagttggcgcaaggatcgccggccgaaggcgctgtcgccggagcgtttaggcaaaattccaccgtgattgttgattaagaatcaacactgttgtgcctgccgtcacgtttttacttgcctggccaacgattacactctcgttcagcaagctgtttttgcgcaccgcagcggaaaacggcatctatcttaactctgacgggagccgcaaaagatgagcaatatcctgattatcaacgctaaaaagcaattcg

SEQ ID NO: 38558 - DNA, 944 bp, Heterodera glycines
gttgtttgaaaaattattaaatggagataagcgaacccttattttttaacataattaatgtaaattaatgttttaatattttataatatttataaaaattatgaaatgtttatattttgaataagcatttttaatatattacattttttaggtttgtatcgtcaaatctcgtatacttataaattttttataatactcttttatttcttactatcatgtaggaaaaagatgaatttgttataatttttaaattttgaattatttttaaattttaatgttcttagactaaatttttatctataagcttattttatctatcatttaaagggattaattttttgacttttttaattgtcagatgtctttaattaccaaaatagatatttattttgtttttctttttattaaattttgtttttgtaaatttttcattattaatctgaactaacagtttaagtttattttttctttttaatatattatttatttacaatgaatttggtattttcttttttaatattcggattttaaagattagtttataatcattatacgcgtcaatcattttaatgtatttctttatttttcatttgagattaaagaataattgaacaaaaaataacgaaataaaaaacattattattaattttaatgaaagataaaataagcagaaaaataaatataaaacttaaaactatgaatataacaaaaaaattaatattgtttctttaattggtttttgtattacttttatcgtaaattagttcattcagaattaagaaaatgttgttatcaaactttgaaatgttgcacgtaatacattaatcttttgaacatttttatgaatgctactgttgttataaacgagtatgccttttgttctataatcatcgattaaattaaataattttaatattttttcgattcaacttttctttcgttta

SEQ ID NO: 38559 - DNA, 1729 bp, Heterodera glycines
gaacaattcaaattgaacgagggggtttgttcaacattttgtggatttgttttcgtccaatggccaaacgcggaagggtggacgatgttatcgtcgtccgctttcatcacccatttggcaccggcacagaacaattgttgccatttgaggccaccgtaccactaaaacaaaggcattaacaaatagaatacgtccttgactttttggttcatcctgaattagctcgtgtacaggcccccgtatccatgggagatgccctccctggccccatgcccactccgaaatgaaaattaaaatttcctagaaaaaagggtaaatttttaaaaattttacctaaacctttttatccaaaaatttttctcggcatcgactgaaagtttttgtcaaccaaaatggataatctttgtatcattggaaagccctggaatggacttggaaaataaaaacaaaaaagatatataccctccgactttttctggttacggtaaggctttcccgaaattttattattttgaattttgtttcatattttcttattcgaattacctttaagtgaatgtgcctgtaaatgtcgttgaagccgtgcaaaagcaccaaatcgcagtgctttctctgctcctcctccaacttttgctgtacattctccgcttcgccgggcgatgggtcggccaccaaaaagcgaatcacttctccggacacccaaattattattaaatatttttaatgattcatatattttgtcaaatggtactgagtcgtccatccatgtttgtctgatgctctttctcttctcaaacgcatccctccgcgacattgtcaaaatgatcagttgcgtttcttccggacacgaattggcgaactccgccggacatttgagacggatgttttgaattcaattaggaactcctaatgatcattttaaatcaattaattaattgtttgagtaacgtctctcatcatttcccaccgtctcgaatcccggcccgtccatccacaccggaatgggaccgatcagtcccggcgggtggtcagcgcacgcaggtggcaaatcggggacggaatgccgcgagggaaccgcgaaagtcgaggagacatttggcacattttcagttgcattttcggcactgaaaggacacaaaagaatttcaaaactattttccaaaaatgtgacccgccgctcattaaaactagggttaagccccgacccctcggggggcaaaatgtcgagggccggggactttcggggggcacatgtctggggtcgggtcggggtgagctaaatcgtcgggtcggggtgagctaaatcgtcgggggtcgggtcggggtgagctaaatcgtcgggggtcgggtcgaggtgagctaaatcgtcgggtcggggtgagctaaatcgtcgggtcggggtgagctaaatcgtcgggtcgaggtgagctaaatcgtcgggtcgaggtgagctaaatcgtcgggggctgaggggctcggggcttaactctaattaaaactgttaccgattcgtttttgccttttcagcagaaagtccctcctcttttccatttggttcttttgtcccttccgccgttgtcgttgatgttgtgttgttccatggtgctgaggctgattagtcaaaaatgaacggccaaaagccaaccaatcactgacctaactgctccaacttgtggtaaggaggcgagaagctaggccactcatccgattgaaagcccaaaagccgaag

SEQ ID NO: 38560 - DNA, 693 bp, Heterodera glycines
agggagggcgcccctacaaagtgtccaagcctcgaaatgtccaagcctcgaaatgtgcaagcctcgaaatgtccaagccacgaaatgtccaagcctcgaaatgtccataagggtaaaaaacacgaaatgtccaaaagtcgaaaaagcacataaaaacccggaaaacggatctaatttagggtttttggagtctctgagtacgaatatgacatttacctaacccatttcctaacccaggaccaaaatataaatataaaaaatgaatgaatttattaaacattcaataaaaaattcatcacggaatacgaacaatcgaatcatcaaaattcacgaaatctttcaattttgctgcatatccttcaattgcaattgggaaatggggcgcccgacagatttcttcctcccacacgggaactgattttttttattaaatatgaacaaaaaattcatgaaaaaaatatatgcctgaaatcgctgttgaagtcgatagcgtgctcaacgaatattgaacaatctgtacttgtggagtcacagtggttggccatgtaagagttgatggtgccggtgagccgatgccgaactgtaccggggtagccgcatagctatgttccgagttgatggtcgaaattgttgtcccgagtgcagctaaaaatttaaatgtttggaaacccaaatgcataaatttaaacaaac

SEQ ID NO: 38561 - DNA, 1004 bp, Heterodera glycines
attttgaaaattttcaaattttttcgagctaggcccccctcgaaaatttttcgttttttgaattttattattttttacagatttttctcggaaaacccaagaccactttcaagcaaccgtttttcacgctctatcgattggtggcattttcagaaaaatttttaaaaatttttttggaaatagaaaattttggttgctaggcctcaatttcagttctgacgcaataactcgtcaggagttgattttatcaaaaaatcgtctaagagcttttttgtagagaattttaagcccaatctaatgtgctttatctcatgtttttatcacgagtttaaaaaaagttatgaaattaattgtgattttgaaattcaaaaccataggggggaccccatggttttgcatttcatgaaaaatttttttgctcctaaattagccaaaatgcatttttatggcctaatttaaggtgctgaactcgaatatatactttatttttggtttcagactttttggaaggtggttataaatttttgaaaaatcgtcaaaatttgagccccggaaaatccagtgaaattttgaaaattcataactctcttcgtttttggtcaaatttagtggaataaagtttgaaaaatagcaaaaaattaggagaattttatgagatttatttggaatttctatcttccaaattaaaaaaattattctagaaaatctggaaattttcgatttttcagaaaaaaattcctaactcctttctgaaaaagtattttataaaaatgatatactcaaaaaatccgcaattttttgctctattttataaattttattttagctttttatcacttttttgaaaaaagttatagaaataaaagtgattttggggttcgggaccaaatgggtgtgaccatgatttttgagtgggaaatttttttcaccaaaaatcctccaaaaatatgtctttaggggttatttgggccgctgatcacgaatatgtaatcagattttacttt

SEQ ID NO: 38562 - DNA, 1008 bp, Heterodera glycines
aagggaaagggggagagagagtgggcggaaagagacattgaaacggatgactatagacgagagggatgacaaatttgcaagtgcatttcctcactttctttcgccttttcagtggcttatccaatccggacgcattatcatcgccgatttgcttcgccacgacaaaaaagagccggccgactttttcgctgtaatttcttttttttattcgataaataaacgatgaagggataaagcatttaagtttgcaaatatttactgttttaggtttatgatcgaatgattgcttttctgttggacgataaaaatttctcgataatttgcgaggagctaaaattgcgcaaaatcgacacgacaaatctatgggatgtgctgttcgacatgatcattttggacgcgttcgaaggtaaatttgccgaattgggattgtttttcatggaacatttcaagagcggcgatcttttggaaaaatcgctaggaaaattttccaaaatttttttgaatatttataaaaaatttctgggtttttcattgaaaattttctaattgataattcgttcctgctctaattcatttatttctgtctgtgcctttttagacgtgcaaaaaccgccgtccgcaatcgccgcactgctcagaaacgggttcatctccacgtcaatgaaacagtcgacgctgaacagtttgatttggtcgatgatcaaaacgaagcgacagcgactgcaagtgaccgaaatttgaaaccaaaagttgacacacttttgcaaaatgaatttctcatcacaggtcaaaaacggattcatcgcccatttctatgacatttcccaagtgatcaccggctcactgaccatgggactgatcggcggaagtgacaaagagttccaggaactctgtgtgtactttaaggtcacttattagtaaaaagacattttcaacgacttacccaaatttatttggattaataattaaaggagcaagtttgtggcttttgttgtcgacatttttaat

SEQ ID NO: 38563 - DNA, 398 bp, Heterodera glycines
tgagccatatgccgtggctaccgtttttgctgatcctgctgcccgccaacatcatgaccatggtgatgtatgcctttcgtgcggaacgcaaacacatttccgaaagcgaaacccactttcggaacgcgatggaatattccgctatcggtatggcgttagtgggcaccgagggacaatggctgcaaaccaacaaagcgctctgccagtttctcgggtacagtcaggaagagctgcgcggactcacctttcagcaactgacctggccggaggatctcaataaagatctccaacaggtggaaaagctgataagcggtgaaataaacacctattcaatggaaaaacgctactacaaccgcaatggcgatgttgtctgggcgttgcttgccgtctcactggtg

SEQ ID NO: 38564 - DNA, 832 bp, Heterodera glycines
ttcaatttccaatttgaaattggttaacggtgacggacactaaattggctgtgagacggtcggagaggaagaggcggcgaaattgctcgaaacattccctgccttggaagcgatgcccggcccttcgccattggcaccgaatttgccttccgatgccgacgatggctttggcatgcatcaaccagcgccgttgcagttgcccagccaatttccgctgcctccgcctttgctggtcgttccctcgcccaccttcccctcccaattcgttgtgcctcccctctcccctccgatgggccctccttccgctccgtttaaccccttttcggtgctttcaatttaaaaggccgttaccgctttcttaaaattcgcgcagccaatgtttgagggcattttgccgattgtgcccttacgagacaatccgccgcggcttactgcgctgatggattcgcccattcagcagagagagcgctttcgagagcaggtcacttggacttacaattagcattcaatggcacttttaacaataaataataataataaacagcagcttatggcgccgatgacaacaaaaggaatggcatttttggcagaagaagaggacagagtcacagcggcggaggagccgcagggattacttccgattggcacgaaaactgctgacgaaggcaccgcgcagaacccatcagacgaatcggttgaagacgatggaaaacgacggcatcagctgaaggtccaaatattacggcaccatctccgccatgtctctctttcagcgagtgattcggcctgaatcgcacgttagagaagtttcgacgaacaatgcgcttttatt

SEQ ID NO: 38565 - DNA, 1294 bp, Heterodera glycines
tgggtggggaggggtcgcattggttgggtcaatcgcaatcaaacaaattgatgaatggcacggcaaaaagaagggcatggaaagatggaggggggggggggggagaatcagaggggcaaacgataacgatggcataactaacaaaggagggaaagacaataaatcataattaaggatggcagtgtcgtggaatggcacggctaacaatgagggcatgggaaggcgaggggcaaatgatggcataattagagacgaacgaatgcggcacaattaaggcataattacgtaattaaggaaaataaatctacatgtttccaccaaatacaggtggcggggctaatttgttgattattgtgcgaatttaaaatctaagaggagaaatatataatattgaattgattctataaggttacctttctcctaatttctatcaataatttttcactgattttcccatttactatttttcgttacccctaaaaaattgttttttgtttttttataaaaagcttcgataaattatatactgaaaatcataaataaaagcataggttttcgcagttttgacgccagattttgcttatgcctaaaagtacaatcaaaatatgctttcctttgtcggggtcatccaattttaagaggggtgcgacaattagcaaaataaatgcaaataaattgcgaaatattttgaaaaaatcttgtcacaaaaatgaaaaactctttcatagttcactttaaaatgtgaaataattcatgctaaaataactagagaccggacagggccggattttgccgcgacccgcagcccgggcatggaaaaaggagcggaaaatggcctaattagggagccaaatgtggcaagacaattaaggcgcataattaagtaaggcagtgtcgtggaatgaaaggcatggaaaaactggaaaaatcccggcaggggcctaactctaataatttcactagctttttttcatcattttgatatcatttttccttttaacgtattttttgcataattaatttaaatttgttcaaaatcatttgccttttttctttttttatttacttttttttgtcattaatttttttttaaaattatttgtagattatttttcgttttttagattccaataaatggtcaaatattaattgtaaaattccctatattacagaaataataatttttaaatctgcgttatcatcgatcgcacatgatgtataaaatatagaaggtgtccaagatgtcagatcattgcccttttttggttttagcaacttcaatttgattacttta

SEQ ID NO: 38566 - DNA, 1474 bp, Heterodera glycines
ggaagaagcgaaagaaaaatcccagaaagaagcgggaggaagccaaaaggaaaagcggcaaaaggaaacccggaagaagcaaaagcgcagaaggaaaggggagggagaaagtcaaaagagaggaggaagaaaagggaaagaaagaaaaggaagcgaagacaaatccgaaaaaagaaggcagaaagagaagaaaatgacacaataatcgccaggggaataaagaaaaggcgcttaacagaagcagaaaaggaagagcgaagccagaaggatgccgaggaaaaagcgcgccgagagatcacggatattgtaaaagaagtcgaagaggaggccaagcaaaggcaaatccgaaaccaaaggggcgaacaatggcaagcaattattgatgagtaattaggcggtcaattacaaagaaaagatatttaaatattttgaaaatgtgtcgagatttcgcttaaggcaattttgtattttgtgttttttttgattgccttaggctttctactacataaaagaatgagaggggcccggtcctccccactgcgcctcttcgtcctcctttccttcatctttctctcgcgcttctccgtgcgggaacagttcgtcggcgagctctgaaagcgcgtccgcggcctggagcagtgacttgcggattttgtagatagcttcctccgcgcgttccagtggcatccctttccgaaacggcgcgtatgtcttcctcacggggctcctctccgcgctgcgtgtcgtaaactgcggcactggcgctggagtcggtcttcttttgagcatttcgcgatttaatccctcgggtggaatacagggacggtcatttactgtcccgacggccgatttgagcacgtttgtgaacaagcgcttcccgctcattcccaagttcctttctctgtcccctctttcttctcttcctcttagtttcgacgctgagtccaattcgctttggcactcaaagcgcgccacggcgctggaatagaaaggcctgcgctctcttggcggctccggggggttctcaaagcgctcgttctcctttcccaactcctttgcctcttcttgtcacatttcttctgtgggtttcctctgccagttcatccgtcaattcctcaattttgatttggatcttcctgtgccagacctcctattagagacaccggtcgtaaaaatgcgacaacaaattcaaatagcacatctttgcaaatagcgccggattttggctccattaaatttttataaaaaaatggacattttattcgaacgaacctgtaattgggtgaaccttgccaagtccggcacagcgtccactcgcatttggttgagttcaatgctctaaaatcagaccttgaaatgcttttcgttatccatactctccccattcctactttgtaaaactgacacaaatagcaaaaccatataaaaagtgagtccatagttcgtttttttttcaaaattacccaggcaaatg

SEQ ID NO: 38567 - DNA, 1026 bp, Heterodera glycines
catcggttcggggggactgccccgaaaacaaaaaaatcgattttttcaagtgtccgtttggggtactcaaacatttatggggagcaaaaatccaacgcagaattaaagtacaggctatagggaagctattcccgaaggattcggtctccccataaatctgggcgcatcggttcggggggactgccccgaaaacaaaaaaatcgattttttcaagtgtccgtttggggtactcaaacaattatggggagcaaaaatccaacgcagaattaaagtacaggctatagggaagctattcccgaaggattcggtctccccataaatctgggcgcatcggttcggggggactgccccgaaaacaaaaaaatcgattttttcaagtgtccgtttggggtactcaaacaattatggggagcaaaaatccaacgcagaattaaagtacaggctatagggaagctattcccgaaggattcggtctccccataaatctgggcgcatcggctcggggggactgccccgaaaacaaaaaaatcgattttttcaagtgtccgtttggggtactcaaacaattatggggagcaaaaatccaacgcagaattaaagtacaggctatagggaagctattcccgaaggattcggtctccccataaatctgggcgcatcggttcggggggactgccccgaaaacaaaaaaatcgattttttcaagtgtccgtttggggtactcaaacatttatggggagcaaaaatccaacgcagaattaaagtacaggctatagggaagctattcccgaaggattcggtctccccataaatctgggcgcatcggttcggggggactgccccgaaacaaaaaatcgatttttcagtgtccgtttggggactcaacattatggggagcaaaaatccacgcagaattaaagtacagggtatagggaagttattccccaaggtttcggactccccctaaatcttgggcgtttcggttcggggggactgcccccaaaaaaaaaaaacagaattttttca

SEQ ID NO: 38568 - DNA, 1162 bp, Heterodera glycines
gagtgggaaacatgatttcaaaattttcaatttttccttttataatctactcaaaacggctcagaattcaataaaaatcacattcacggtgcgaaaaatggggtttgaaaagtttattggggaaaaaagactttacaaaataatacccctgggagaagggagtgggaaacatgatttcaaaattttcaattttttctagtctaatctactcaaaacggctcagaattcaataaaaataacattcacggtgcgaaaaatggggtttgacaagtttattggggaaaaaagactttacaaaataatacccctgggagaagggagtgggaaacatgatttcaaaattttcaattttttctagtctaatctactcaaaccggttcagaattcaataaaaataacattcacggtgcgaaaaatggggtttgacaagtttattggggaaaaaagactttacaaaataatacccctgggagaagggagtgggaaacatgatttcaaaattttcaattttttatagtctaatctactcaaaacggttcagaattcaataaaaataacattcacggtgcgaaaaatggggtttgacaagtttattggggaaaaaaagactttacaaaataatacccctgggagaaaggagtgggaaacatgatttcaaaattttcaattttttctagtctaaactactccaaaacggttcagaattcaaaaaaaaaaaatttacggggggaaaaaagggggtttgaaaagtttatttgggaaaaaaaaatttcaaaaaaaaacccccgggagaaagggagagggaaaaatgatttttaaaatttttcttttttttcttgcttatcttccccaaaaacggttctaaaattcaataaaaaaaacattttccggggggagaaaaagggggtttgcaaaagttttttggggaaaaaaaaattttaccaaataatacccctgggaaaagggggggggaaattttttttaaatttttttttttttttttttttacttttccccaaaagggttcggaatttaaaaaaaaaaaaatttccgggggggaaaaaaggggggttaaaaaattttttggggaaaaaaaaattttaaaaaaaaaccccctggggaaaagagggggaaaaatatttttaaaatttttttttttttt

SEQ ID NO: 38569 - DNA, 884 bp, Heterodera glycines
ccggcgcattgcttcgctcccaaattggtccctctccattggtggctctctcccgtagcattcgtccactatcattagcccgcattgcaaattccggtcgatgatccaattcgtctcgaagtcgtcatcgtcctcacctaaacaattatttctttgccttccgaacattcagctgatttgcgtgcccattggattcagcaaaacttcggccacttttatccatcccatataaaaaaagaattgcaaaatggtcatcagcggcacaattatatcgactttctgtgaaattaagcaaaaagtgaaacaaaataatattcaattaccaagtgatggtctcccaaattccgtccaccgaaatctttgagaaattgtctggcaaaaagagcgatgacaaagtaaagacggacggccaaattgaccacttgggtgtacacctttttagaggagggggagggggggacaaatggacaaaatgatcagacgaaggcaattagcaatgctaacgagaacaagacagttcatcacgtacacatcatttagatacttaatatattttaccacaactcgccaaccaatgggacaaaagagcaacgacaattggtcacttggccttttacccgtaacccagtgatcaatgccaacaaaagagcaaatacaattgatcattggcattttgccaaaggcccaccaaccaatggaatgggcacccaatcgtacagtgtcagcgtcagcacattcacccgatattggcgtattttctgaaaacaattcaattgattcgcttttgccgcttctctttcctccagtaaatccacgtaaattatgtcactttcgatcatcccttgatcccgcgctcttctcgccaacagaaaggcccactgaat

SEQ ID NO: 38570 - DNA, 299 bp, Heterodera glycines
ggctcccggtaaattggacactatttgataaaaaataaatagttaaaaataaataaacaaaaattttaattgaaataaattatgttattattatttgtagcatcagcagcagaaagccatcatacattcataacgaaaaaagtttttatttttatggagttcccattttttgcgcattttttggtagaacaatcatcacgcaattttgcacatttttttgccacatttgatcaatcattgtgcatattgaatgtttaaattcctgggtttatattttaaaagaggaatttggtggccaa

SEQ ID NO: 38571 - DNA, 1368 bp, Heterodera glycines
agtcggtcagactatacaaattcttgaaaacatgtagcttcattgtttgtgaccagttccacaaatccgcaactatcaaaggagttcacacgagtataaacatctttaaatcgaaaaaattaatgaaacgggttttgaggaaaacattgataaaataaatgaatgtattaaaaataattaaaaaaaattatgaaatatattttgaaaaaagaaattaacttaaaaaaattattcaaaaaattgaaatgaattaaaaaaacttagaaaaatgagaataaaaattatgaaaaaattaaaaaattcaaacgatcaaaaagttatgactaaaaatatgcgaaaaacctgttttgtgatttcctttggccataacccctttgaaagttaacgaaatttttgaaattttacaagctaatcatgaactctcttagagttatcgaatgatatcaagaatataaatttgctatttttcagcaagtttatcagtaattttttgtcattttcaattttataaatatgaccatgcgccaagaatttatctgcaaaaacatagccaaaatttccaagccaaaattttattaaatagaaaaactagtatatgcaatcattaattatttggctgattcgtgctggaatggtatcataaacctgaccattaggtacatttcgattaaattaaaatcttttaaattgtaagaaaaaaattttcagttagtcataaatttttattcttaccttgcctaccaagaattttcatttaattgttcaaaaataaaaaaataagcaaatatcaccaggaacgtatttcctgtaggatcctgcttttgggtgatacgctgcaattacaatgccaattaaataatacaatccgtttcgttcaatcatcaaagggccgccacaatcgccctaaataattattacgcataatattattaaaattcacacatttttttgaatcaaaattgacagaaattttaaaagcaaaaaaggcattagtagtcaaacaatgccaaatgtaagctcgagaaaaatcacaaaatgaagaaaaatcacttacattttggcaaccttagtttcaagaaaacaatgagaaaatgaatgttatcaaataaaatttaaaaaatcacacctatacatttggaaacctaaaaaactcggacacttttcgacattaaatgtccagaggattatatgactaactgttgttcaaacaaataaatttacttacgcttgtaatgcccttatttctgctgcttgcgcatacaaatttgcttggattgtatttccaaggcaaaatgttgttgtaaattttgttgcaataaattgcggaccgtattggcactaaagttgctgtctggcttttgtttaagt

SEQ ID NO: 38572 - DNA, 996 bp, Heterodera glycines
acgaatcaattcaagacctgctgaaggagaagggtctctttattttgtgaatgtttcagcattcatttagttattgcagattcggagaaagggaaagtgcccgaaacgaccgacggagcagtgaatgtgccgatttcttctgaaggggaacaatcgccgaagcaacaggtgttgacagacattcttttttgtaatttaagcgaattattattgttgaaacagaaaacgagcgacgaggagggcagcgcaatggcagtcgaagagacagtggcggacgtaaaggtggggaagagaaacgaaagatggaaatagtgacaaaaaaagagggacacaaaaaggagacacaacaaataaataaccaacaaacaacccaacagagtgtggccactcctcagcagcaccaactgcacaaaacgtgttctgtccactttcgaactgtgccggcaaatgctccaatcgctgatttggaaaatgtaattgcgacaattcgtgagtgttattgcttttgccactttcagctgtgtaagcagcaccccggctttcttcggcttgccattggtgacccagtgactgactcgcgcggtgttcgccttcggcctgcctgggccacttaccgaagagatgtgaacatccgagagatttattgggcactccgaagagccaaagtaattttttaaaggcatttaatttgatttattatttctcaactttgagttgatgacttccgatttgggcacccaagtcaaccgtgacctaaagcgtcgaattcgcgtcagcggtgactttgtcccatccgtcgccactctctcagcgttcacttctcccattgactctcaccgtccaattgcgtccaatacgcttcgccaagctgctcggcttgtctttttgttggatgtgcgggagggactttaccgggaagaggcggaggatggtgaagacgaaggcggacggagcttcgacatgggcgaatattaacggagtctatggtaagttctg

SEQ ID NO: 38573 - DNA, 1139 bp, Heterodera glycines
  unsure (1)..(1139): unsure at all n locations
atttttcgacttttctgaaatcccggttatgaattccctttgaagaggggtcgaaaaacaaagtgcgacccttttaaggatgcattttaagcgatgcgtctcgtataaaaactgaggctattgtttacatatacataagaacttgaaattaagactttagggcatcagtttaagaatcctgcaccaaaatgaggggattttggatcggaattttgggatctttggagaggattcggatctacctaattcgacaattcaaatttttcggtagattaaatttttgcactttatttgcacattcataacatacacacatacgatcactgatcaggaggggaacaaaatatacattaatatgatcacataaaacaggggatttatgcgggctcggcgtcttcgtgaaggctgtccatcagttctggcttccagtcgttggcttcgtcgttttcgaagcatctccgcctgccgtgctcggcggctcttcgtagaccgtcgtctgtcctgccgtgctcggcggctcttcgtagaccgtcgtctgtcctgccgtgctcggcggctcttcgtagaccgtcgtctgtcctgccgtgctcggcggctcttcgtagaccgtgagaactcctgtgctcggcgtcgctccattcaccacttcaggggcctccgttctcggctgctggacttctgcatccgttctcggctgctggacttctgcatccgttctcggctgctctttgctggacttcttgcggtcgccgctcttgtcacgcttcttggatgatttcttctgcttctttttgtcgctcattgtcgcctgttgtttgctctggaacaaatcgaaataagtttaaacttaaacaaaaatgagaggngaggacggtgctcaccgcanagcagtgatgaagagagctgatgttgatgacgtggggtgctgacttgacgtgaaatagaaggtgaaagtgatgaactcaaccaaatttctccccttttaaggacccaaaaaaacagtgtgacgaatgtccgcaaaaactttcgcaacgactttcttagaatagttggcattatggtttattttaaaaaatttccattttcagtggaaatgacctcggacgaggttgaggacgcaattcgcaaaaacataatat

SEQ ID NO: 38574 - DNA, 1438 bp, Heterodera glycines
  unsure (1)..(1438): unsure at all n locations
tgaagttaaatttcagtaggttaagtcatctcgcctattcgncggtaaaagagancccgcctttttcggcggtatgaaagcggttcaaatcagttaatnttcgaaacctaaaaaagttttatattctttatgttatagttatataatttttaaattattttgtntaaataacagttatacatatatatttttttaattcttagctgttttgtttcaatcatttcattcttcgaactgcaccacaaaaatatcttaaatgagttattttatcctttattttttcttattagaatttaaaactgattaattcgtgataaagtaaatatttaatttttctattttgaactttttattattcttttaaaataagagatctttatcaacaatttcatatggtaacaatttataactattggctataacgcatatttagaatttaagtttctttttttttcttgtttttaaaactaaactcttcttctaatagctccaaggcgctatccatattttgagtgtcttaaaagtttagatttctggtcagagtacgttttatttaactacagaaatttattactttatttccaaatgtttgtggtttaatgtctttctttggtttttaatattgtattttttgctatttaaaaattattttttcttatttttatatttttactcatctgtgattatatgattttgatcttaattaattatctattttttaaatttgctctttttgtatttatatttttggattttatattgataccttgaaaggtgtaacaagcaatttcgtatggcgattattcattttttttattaatatattataaaatttttctattaacaaatctatcaattgaatattgtttagttcaaattcataaacttaaatactgaccttgcttaacttggtatttgttgaattaatttattcttaaggtattctgatttattcatttttgcaaatttattaattatccatagattattaaagtattttcatttttgaattaattattttaaattctttattaaataaaaaatctttctcttcatttcatatggtaaaagtggagcatctgttgtgatctctttattttaattttatatcatttattttaatttaatttattattattattatttcatttatcttattgttttgtaaattttgcagagtcgttcttattttttatatcacttgtgatcttgaatgaaaataccagtcttaactcggaaaggtcgcaaaaagattatggtttatattgcaaattttaacaacgcattctggaagactatttaaaatataatattttgtatttatatttggcgctttacttttttctaaaaacataaaattaaatttctgtgctttagttataatatctggtataggtgaaatgtgtgctgtggaacataatcatatgttctaattttt

SEQ ID NO: 38575 - DNA, 1109 bp, Heterodera glycines
  unsure (1)..(1109): unsure at all n locations
agcaaaaatccaacgcagaattaaagtacagnctatagggaagctactcccgaaggattcggtctccccataaatctgggcgcatcggttcggggggactgccccgaaaacaaaaaaatcgattttttcaagtgtccgtttggggtactcaaacaattatggggagcaaaaatccaacgcagaattaaagtacaggctatagggaagctattccggaaggattcggtctccccataaatctgggcgcatcggttcggggggactgccccgaaaacaaaaaaatcgattttttcaagtgtccgtttggggtactcaaacaattatggggagcaaaaatccaacgcagaattaaagtacaggctatagggaagctactcccgaaggattcggtctccccataaatctgggcacatcggttcggggggactgccccgaaaacaaaaaaatcgattttttcaagtgtccgtttggggtactcaaacaattatggggagcaaaaatccaacgcagaattaaagtacagactatagggaagctattcccgaaggattcggtctccccataaatctgggcgcatcggttcagggggactgccccgaaaacaaaaataaatcgattttttcaagtgtccgtttggggtactcaaacaattatggggagcaaaaatccaacgcagaattaaagtacaggctatagggaagctattcccgaaggattcggtctccccccccccnccgcccttcaaaattttgaaaaataaataaaataataggagactcagaattttgaaaattttttataaaaactgatgacaagctaatgtgataaaacaggttaattcttttcctttcagtatccctgcaaagtttggggcgcttctgataagtttctgaaaaaaaagataagcctaaactttttggcctgtttaaaaaggaattaaaaatttttaaaaatttattcattccctttttgatagaaaaagcatcagagtgcctaaactagcatgtaaataaaatttggtgcgtttcagagcattttctgaaaaaaatatttatgaattaattatgcaaagaacaaataaaaacgaaagactcagattttcgaaaatt

SEQ ID NO: 38576 - DNA, 1247 bp, Heterodera glycines
gatcccgaaaagttttttctttttgggggggggttttttcgtttttttttggaaaaagccaaaataaggattaaaatatggtataaaacctggaaatatggaattggaaaggcatcttaaaagcatcaagccaagctaaagacactatttaagtgatttttaggcctaaaaaaactgcaaaaattttttatggaaaccattcaaatccggtccctagtgatcataaaaaaggatatggtgaacaattagtatgtatgccatcatggtatacaacattgagttgtgcacaaaaccagtcattgcacatgccaaggcaagccacagagatggtgacatatcacggcgaaagcggcggcgaacatggcgactactgcttgagcttgttggtggaggggcaaaattttccgaaattttcttccccgaatttcctgaaaatttttcgacagttccaccatttttgttggtaaagctcgttatgattttgttgagcaaaaatgccacaaaatcgcttggcaccagcaaaagttggtgctgatttttcccatttgataacgcttcaactgtttgccggagggcatttggtgcccatttgtccttctcctcagtggacaattgtgccaaaaatgccgtgatcagtgtgctaaattcggacaacattttggcattttgttgcccaatttccttcgctttaatctgcgccaaagtttgtgggccactctcttggaaagtgtgaatcaattggtctgtgaagcttgccgcgcgatttaagcatgcttcattgttgactttttctgcaagccgaccaattaagccatgcttttcctcgttgattttccccaacaattcacatcctttggccaacaattccaagtgatcggcatttgataattcttcaaaaaaataaaaacaaataaaaacaaatatttcggtcacaaatttttttaaattaaacaaattgcctaattaaaaatttttaatttgtttttttttgcagtttttctctaaacaactacaataatatcaaataatgaaaaattcagtattaatcccaaaattttgcttttccaaaaagaattttgcctgtcaaccctaatgatatgtacatttatttgatagcccgaattaaattaattaattttatttccaattaatatgtatgggccgtaatttttgtattaaatttttgatttttttttgaataattgagatgaatatatttcaggatttctcaattaataagtgtttgt

SEQ ID NO: 38577 - DNA, 986 bp, Heterodera glycines
  unsure (1)..(986): unsure at all n locations
gctgccggttttgctggcgcgttcttcgtgaagatgtcggcgtccatgttcttgagggtcacgtagttcgaatcagtcgctgaaaaggggatgaaaaagaattaaaattttaaaatttcgccattttttcacttggtgtctgtgccggtccgcctcctccatgtggcgcctgtcccgcctttggtgccgctgccggttttgctggcgcgttcttcgtgaagatgtcggcgtccaagttcttgagggtcccgtagttcgaatcagtagctgaaaggggatgaagaattaaaattttaaaatttcggcattttttcacttggtgtctgtgccggtccgcctcctccatgtggtgcctgtcccgcctttggtgccgctgccggctttaccagccgtccgcctccccactgcgaactcatgttcaggtaatccagaggaaaatcatatgtcaaattttgcgatgcggtgcccagtgccgatgttcctccagccggtgccgctgcggtcttctgcgatgcggtgcccagtgccgatgttcctccagccggtgccgctgacttctgcgacatggctcctccggcggctgacttctgcgacgcggctcctccagctgccggttttgctggcgcgttcttcgtgaagatgtcggcgtccaagttcttgagggtcacgtagttcgaatcagtcgctgaaaaggggatgaaaaagaattaaaattttaaaatttcgccattttttcacttggtgtctgtgccggtccgcctcctccatgtggcgcctgtcccgcctttggtgccgctgccggttttgctggcgcgttcttcgtgaagatgtcggcgtccaagttcttgagggtcccgtagttcgaatcagtagctgaaaggggatgaagaattaaaattttaaaatttcggcattttttcncttggtgtctgtgccggtccgcctcctccaagaggtgcctgtcccgcctttggtgccgctgccgg

SEQ ID NO: 38578 - DNA, 771 bp, Heterodera glycines
ttgaacactcattccctccccccccccccccccaaatgtccgtcggttgtcccgcaaacttttgcatttcgtcctcaaagcaatcgaaaaataaatgcacacaaatgcattcttattactcctaataaattatagattaatccaataaagtggaagcatttagttttatttatttggaagggaattaaaattttagaaaaaagaaaaaaattgcagaaaactttttaaatggaccaatggacaggtgtattcggccggcgggaggggcgaacgagaatggcatttgtttgccaaggtttttcccatcccatccatcgcatcaacggcgaacggaagggtcagcaggtgccaaaacaatggacagacagagggaatacaaatgacaaattgggcacttattgggggggggggaggaaaagcaaagacaaacaaatggagaagaagcagaggatatgaacgacggacatggacgagaagaagcagcacactctgaagttgatgaggaagagagggagagaaaggagagagagagagagagagaggggagaaagacaagagagacaacggaggagaagagagacaatgggcgagaagaaaagggagagagaaaaagcggagggagggtacagatcggcacagaaaaccatgctaatagataaacgattaaatggtgctattttcctgtcattccttgcttttgtactcgccctaccaaaaattgttttgttcttcatgcaaaagcggtagccaaagagtggccccgtctcttat

SEQ ID NO: 38579 - DNA, 876 bp, Heterodera glycines
attcatcggagactcccatcaatcaaaacattgggaagcgattagttaatagcacaaatgaccgataagcgaataatatgcattttattatgataaagccggttaatggggggggggattaattaggcattcgaagcattcaccatttatgatggatttttgctgtcagttgatttccatgacaattttagtaatgaatgcgagaatttttttctaagccaacaaaatctccccactcattcctttttttattggggaatgtcacattgccaattagttaatttatttatttcgtttttttgtaactcacattccttgcgcgactgaatggctctgactgtgtatttgcccagcaaaaaggtggagaagcaaagggacagcgcgagagatccgtactgaagaagagaaagggaaaaacggacgagcagagaaagaagggacgaaagtgcggagaacagagaaccaattttgcccatttgggtgaagaagaaagtgtaaatcgtagtaacaaagcgaagaatggaaggaatgaattaatctgctgatttgaaaaagttgggtgaaattggtaataaaaaacagaagcaaaagagtcaacagagtaaatcaaaaagtggtaacattatattagcattcttttatcttttgtgtgatttatgccctttttattttattgtttttttcaaacgaaaattacaaattttgtggaaactgatacagatgcaaacaacggagtaagtaaaacacagatgtttgactctaaaatgttgtgaaatttggaactaaatatatgtaatggaaggagcgtaaacaacaaaagcgaaagtgaagtgaaaagagagtgccgggacgaaatgcggcggtccatcgctgacc

SEQ ID NO: 38580 - DNA, 846 bp, Heterodera glycines
atcatagaattattaaaacatgtacttcaactgaatttttttatttgacctaatccatatgagtattttttccccgagcatatgtcgggccgggagtttttaaaaaaccatgaccaaagatggaaagatggccgagagtgtcaagggccaaaattatcaaaaattcggttgtcaattctttgccacctcaaatatgcgaatgctacatatgttttgaatagaaaatattagagtgccacggaccgggaattttgggcaaaaccgggaccgggacctaatcgggttgaaaaaccgggaatttttggctgggaaaaccgggaagaaaccgggaatttcccggtcccggtcaaaactgttcaaaaccgggacctcggtactcagttgtccgtgttttggtcccggtcccgtggcactctagaaaatatgacatgactgttttatgtcagtgatttttgctttgttaaattaaactgttacaatatccctaatcctcctatttatgttaatttgaattgatcagaggtgtttaaaattcgagatggttcgtgaacaatgattaaaattattcaacaaaaacccaaaaattttacacaagggatgggaaaactgaaaatgtaccgacgagtcaaatccactccgattgatctgattgatgcacttgccaatcagtgccaggtcgcacataatgctggggctggctgactttgtcggtgcaccaaccacaacaccacaacacttgaacagtcagtgttgatgtgggtaaaagatgaaggccgtatttgcctccttttacgggacgtccgtctcccccgggggccgaagggcgcgagaagggggggggggggg

SEQ ID NO: 38581 - DNA, 1447 bp, Heterodera glycines
  unsure (1)..(1447): unsure at all n locations
tgttgctgctcctctttggcgtccgttggtcgtttggtttcgttggttcagctcagtcgtccattctcgccactcccttctcacaaatcagcaaattatcgtcggttttcgtctcccaatttgtgcggagactctcttcaaatggaaaattgggataggaagtgacagattgtgacaaattcaaaactgagccaaaaacgatcaatggctgtgaacagtaaattgaaattggaaaggaattggtcggacgaatggagggaaagagagagaagggaattgtaagaggaaagaaaagaaacaatgaaacgattattaattaattaattaatgggggggacggggattaattattgtttatggaaagagaagcgaaggccgaagaaaaattggaatggaccgcaaaagagcagcaccagcagcagtgggcccttctgctgctggacggacgaaattaatccaattttggggtgcgggaattgcatttggaggggcgagagaaggcgggcacagagtgtccgcgaggattatgcaaatttggcgaatttgagtcgagcagagacacttactctgcccacggcgaagaagcatcgattgagcggaaaatgagcacaaatttggaaaagaaataaggaggagacaaatgggggggggacagatggaggacacgcaattggatatggaaatggccggagggcaaaaccaaaagacgcacaattagagggaaaaagcgtccattaaaggggaagtcactctcttctgggacaagccaaatgggctgattctattgttttttaatatatttttaaaaagagaatattgttgatgttgaccgatggatgggcacagcaaaaggacacaacgaaaggcccgagaagccgaagaataaatacgaaagggaaacaataaagaaaagcatgggagagagagagggaggggaagaaagcgtgtggattaaggaggatgagaggaagaggaagaagcaacagcagaagaaggaagaggcgatgagttggggggggagagaatgggagaaggagtcccctctcttagcggtgcgaatctttccgagtaaacactcgtcactccccgggggagaaagtgtttgcctaaacataaatgagggcaacacagaagtgccaaaccgaagtccgctttattattattcggggtataatcaaacgaaatctcagtttcgtcgtctttggctaaaacattcgattaaatgtttaatattacaacgaaaagttaaaaaaggaaagcgatgggttaaaacaatcggagattagcaaaagcagcacaacgaatgaatgaacacattttggaccaacgaatgcgctttgatggtatttaaagtacgggcgaaaagagaagaaaatatttaactgccgacggtcagacggacggacggagggaaagggggaaaagaggggaggggangggggggggg

SEQ ID NO: 38582 - DNA, 897 bp, Heterodera glycines
  unsure (1)..(897): unsure at all n locations
tcaaagggtgtgcattaagcgactcgctgtgctgcccactgcatttcaaatagctggtaattntattctccggcctaatccagaaaaaatcactatctctttttttggaatattttacgtgtcaaagggtgtgcatttaagcgactcgctgtgcttgcccactgcatttcaaatagctggtaatttttatttctccggcctaatccagaaaaaatcactatctctttttttggaatattttacgtgtcaaagggtgtgcatttaagcgactcgctgtgcttgcccactgcatttcaaatagctggtaatttttatttctccggcctaatccagaaaaaatcactatctctttttttggaatattttacgtgtcaaagggtgtgcatttaagcgactcgctgtgcttgcccactgcatttcaaatagctggtaatttttatttctccggcctaatccagaaaaaatcactatctctttttttggaatattttacgtgtcaaagggtgtgcatttaagcgactcgctgtgcttgcccactgcatttcaaatagctggtaatttttatttctccggcctaatccagaaaaaatcactatctctttttttggaatattttacgtgtcaaagggtgtgcatttaagcgactcgctgtgcttgcccactgcatttcaaatagctggtaatttttatttctccggcctaatccagaaaaaatcactatctctttttttggaatattttacgtgtcaaagggtgtgcatttaagcgactcgctgtgcttgcccactgcatttcaaataggtggtaatttttatttctccggcctaatccagaaaaaatcactatctctttttttggaatattttacgtgtcaaangggtgtgcatttaagcgact

SEQ ID NO: 38583 - DNA, 1467 bp, Heterodera glycines
  unsure (1)..(1467): unsure at all n locations
attaaaaattttaattntggaaataaaaccaattaaaaatctttggcacctgccctcggaaatgttcaaattcactgcgggcaatgctgggtcgtcttccgatgacatgaacacaaatttgttgcaccgttttgcccatgttgccttcacgtgaatggcccgcttttggtggttctgtttgcccgtcaaaatccagcaataaattcggacccgttctgcaatctcttccgccacactgttttcgcctgaaacgcccgcacaaaaaaataataataaaatttttatataattaataaataaatttattaaaaatattatttaaaaaaaaacaaatttcaataaattatattttttattatttattttgaaaatttattatgctttttcaaagtgacagaattagcaaatcgaaatttatcctgcggcatacagagttttaattataaaaatagaaattttaatttaaaaatgtaccattttaacaaattaaattaattgtttaagaaaaaataaataaattttagcttaaattaaaatatttttaaaaacttaataattaaattgttcaaataaaaatataattaactttctaattaccttcattaacatgggaaccgtttgtgtggaaaaacaacggtatgccaggtgccgctccatgctcatcatcattatcatcgacctcctcctccgtgtgcggatcaaatcgacgacgatgctcatttctatgctcatcaacatgatcatgattatttaaaagctcatctcgttgctgttgctgcacattagcattgcgctgtttttgttggtcttcctttagaaaaataataaattaaataatattcttggtaaattttattttaattgaattaataaattaaatccgattttagaaaatgtaaatgaaattatgaaaaagtaataattcattcatttcaaatgaataacttaattttacttgcaaaatatgttttgcatagctttcatattcctatcattaattttttttttgttcattgctataatttcctattttttaaatgtttttttctatgtaaataaaaaaaagttaatagcccaaaaattaggtagaaacaagaaaacatatctctattagatacaaatataaatttctattttttataaattattttgtgttttttaaaattttatttataataaaaatattctttatccaccttaatcaacaccactggtctggaatatgtaggcaatttgacacttggaaaatcagtggatgggaaaagcgctaatgacaacacaaatccaattaacacaccgatcaacaaattaagcagtgctgatcggttgttagccaacattgttttaattaagcgggagaaaaagctttcaacaatgcaattaaggcgattttcatttgagcatcatattttgttggaattaattttatctannattagagaaataattttacattanaaattatta

SEQ ID NO: 38584 - DNA, 326 bp, Heterodera glycines
taaataaataaaaagggaaaatatagagagaaatagagcaatagagaaacagggtgaggagtgagtcaaggattataaaagaataagagagagaaggaaaaaatagagtcagagaaatagagggagagagagacaaagcacagagaacacaagaaagaacagagttctcgccgatctccgccctcatcggcgccgcctcattagcgacagccgaccgaatttagacagctgccgcgccccgccccgccgaggcgacaaaactctctcccccccccccccaggggccgccgccaccggcgcccctttttcgctgttcgtttggtggc

SEQ ID NO: 38585 - DNA, 462 bp, Heterodera glycines
aaccgaccatgaaggccattttaggatgtatcgcccatgaattgaataacacataaaattgcattgaacgattaagctgaccagcagacacattctaaaacggccttcatggtcggttttctgtttatatcgtacttgaattttggtgcaattttcggaatttcgaagccattttttcaaatagcgaaggcaaatttagccacataatagctcaaaatcggccacagatctcttggatttactattatcacccgttataacgagctatcagcgtgtatttaaggccttaatgctctcgaatgtctattttccgtgatgaagttatattcatagggtattagcgaaatatctgttgttttcaaattcacgtttaacataaaaggaaggtttaacagaatgggtttgtcggtatgatgctggtctggtttttcgtttaatgcaattttctgtgttatccaatta

SEQ ID NO: 38586 - DNA, 1013 bp, Heterodera glycines
cccagtgattgaaatgctgttgggttgagtcccagtgatggaaatgctggtgggttgagtcccagtgattgaaatgctgttgggttgagtcccagtgattgaaatgctggtgggttgagtcccagtgattgaaatgcaggagaattgagtgccagtgattggaatgctggtgggttgagtcccagtgattgaaatgctgttgggttgagtcccagtgattgaaatgttggtgggttgagtcccagtgattgaaatgcaggagaattgagtgccagtgattggaatgctgtgggttgagtccaagtgattgaaatgctgttgggttgagtcccagtgattgaaatgctggtgggctgagtcccagtgattgaaatgctgttgggttgagtcccagtgattggaatgctggtgggttgagtcccagtgattgaaatgcaggagaattgagtgccagtgattggaatgctgtgggttgagtccaagtgattgaaatgctgttgggttgagtcccagtgattgaaatgctggtgggctgagtcccagtgattgaaatgctgttgggttgagtcccagtgattgaaatgctggtgggttgagtcccagtgattgaaatgcaggagaattgagtgccagtgattggaatgctggtgggttgagtaccagtgattgaaatgctgttgggttgagtcccagtgattgaaatgttggtgggttgagtcccagtgattgaaatgctggtgggttgagtcccagtgattgaaatgctgttgggttgagtcccagtgattgaaatgttggtgggttgagtcccagtgattgaattttggtgggttgagtcccagtgattgaaatgcatgagaattgagtgccagtgattggaatgctgtgggttgagttccagtgattgaaatgctgttgggttgagtcccacagattgaaatgctgttggtttgagtcccactgattgaaatgctgttgggctgagtcccagtgattgaaatgctggtgggttg

SEQ ID NO: 38587 - DNA, 1424 bp, Heterodera glycines
cgaagttacgaatctaatttgccgacttcccttacctacattattctatcgactagaggctgttcaccttggagacctgctgcggatatcggtacgatcaggcaggagattcaaatagcttccctcgcattttcaagggccgtgtggagcgcacgagacaccacaggaaccgcggtgctttacgggcgcaacatccctatctcaggctgagccacttccaggcacgcacaccctaaaccagaaaagagaactctggctcggactccacacgacgtctgcgagttcatttgcgttaccgcgcaaaacagctcttgcgaaccgtcatttccctagcctggcgtgggaatgttaacccacttccctttcggcaaccggatggaccaactgcgcaagcacagaaaagtcgtcatccgtagtgtgttacggcgttagccggtgccttaggatcggctgacccacattcaactgctgttcacgtggaacccttctccacttcagtcttcaaggatctcacttgaatatttgctactaccaccaagatctgcactggtggaagctccggccgggcccacgcccaaagccttcaacgcaaccaccacgaccctcctacacgtcatggccagactacgcgacaagcacgtgtacaagccaatgacggtggagtataggtggcccgctccagcgccatccattttcagggctagttgattcggcaggtgagttgttacacactccttagcggattccgacttccatggccaccgtcctgctgtctatatcaaccaacaccttttatggggtctaatgagcgggcactttggcaccttaactccacgtttggttcatcccacatcgccagttctgcttaccaaaaatggcacacttggagctcaaacattcaacgcctgggttcagagtcaagcaaccctggcttcatacccatttagagtttgagaataggttaaggacatttcgtctccaagtcctctaatcattcgcttttccgagtatacctgcttaacgagctccagctatcctgggggaaacttcggagggaaccagatactagatggttcgattagtctttcgcccctatacccaagtcagacgatcgatttgcacgtcagaatcgcttcggacttccaccagagtttcctctggcttcatcctgctcaggaatagttcaccatctttcgggtctcagcgcatactctctgtctccgccccatcgcatgcgatcgagacgggactatcttgctccccaacaccgcagtgtccagggatcacacatcagctccgtaagaagccttcactttcattgcgcctttgggttttgaacacccaatgacttgcgcatacgctaaactcctaggtccgtgtttcaagacgggtcgaacagatgaccggctatacaccgagaagac

SEQ ID NO: 38588 - DNA, 944 bp, Heterodera glycines
  unsure (1)..(944): unsure at all n locations
tgccaaatgtggaaatcggtactatgaccaagcaacatactgtgccatggtgaagaaaattctctggaaaaaaattaatttaataaaattttcaggttcatttttacgacaatgaacccgaaaaggagccaaatggggacgaatcaaagcgtaaaatattaatgaacattaaacacataagtagagcaagcagtatggagatgaaaaccttcttgatttaaatgcagtaattcctgaacgaactttattaaaaatgggcatattgtaaaagaaaaagtaaattattagagacaggaaaattccaaatttgcgcatttcgctgcgaaaaattggagctcaaaaatttttgcaagacgtaactcccggagattaatcctgcaaaatcccgcgcgggatcccgtcccgcgccgctctcctctataaatgatgacaattcaaaaaagctacgaacggactccaaaattgtgaacctttgatttcatttgttcaaaaaagcaaagccaataataaaaaataataattaaaatccttaattgtcccgtactatcttgccaaaaaacccttttctttgtaggaactctcgtacttttggacggttgcatcaaaacagaaactgctcaaaattgtacagcaaatgtgcaaattgcatatgaacgtatcggcagctcgtttttctacggtaattgcgacgctgaaaagaaaacggtatttgagagcaggtgagcaatcagacgaaacatttaccataattgacttgttatttgctaattcacaaatgagaaagcttccctttttgttcagcacataagtagggatgtcaattttatgtaaaaaaaattgctttttctcaaaaaaaagaagtgaatatgaaaaaagaaattttggaatcataactctgaanngttaattaatgctctatgcattgatcaataattatgtactga

SEQ ID NO: 38589 - DNA, 1209 bp, Heterodera glycines
  unsure (1)..(1209): unsure at all n locations
tgtccgtttggtatgacacaatgccataaatgacttgcatacaccgtcaaccgctgtgcaattgtctgggttgcaattgtgatgatgaatcgtaagaaaatactcgtcaaaacgtgcggacatgactgattcgaagagcaacgaatcggaatgatagcgtggcagcagaggaaggacctgtaaggcataataaataaatcttttatatataataactgacacacccggaatgaagtcaatttcttaaaaaatagtgcatcgtcgactttctgaaacaaccaaattattttttggataaatttgatagggggtgaaactaatgaaaaaaactaaaaatggaagaatgaataggaagagatcatgatgtatttgattgatttgcgccagtctgacggcttcattttgtgattatggtgttatcatattaatgcggatagtaatggtgcgaggagacccgaaatcccatgccacttttctaccagaattggcactggctttcgccaattttgtgtttttttgctgctcgaaattagccggtaaatgagtgagcaggtgagcaacaattgccgtgcctccaattgggtgctcggcacacacaaaaccaactcaaaaatgatttcgtgtgggagccgtcgacgattttcgtgccattttgcgctcgccgttttgctgtccttttttggtgtttcgatggtgtttttgtacatatttgttggttggcaacgagttttcttctgttcgccttttattttgacgtcgtcgatggcaacggttggccaaccaaagttgttgatgacagtccagaaaactgataaacgtgcaatttagaattgactcaaaattcgattaattccgtctgattaattgcgtcatctgatcaatcagtatcacaaatcgattatcattgtcttcagtaagtcggcatgtcaaaagcgtgccgattgtgatgttttcgactgccgttgagcacatcttggtcttcttatgccgaaagcatccgttggccagaatttttgaaacacagactttttgtatgaacaacaggaaaaattgagcaacccaatcaaacttaagagaaaacgccattccccccagaagaaattgagagggttanaacgcaaaatttaataaattgaanattagaatgactaggaaaatttcacaggcgaccataattgattcatgnngaattacataaaaaaaacaggt

SEQ ID NO: 38590 - DNA, 587 bp, Heterodera glycines
tttccgatccgaacgcggttgctaatgacccctcccttctcctgcagcgtaaattgccctaacatcctctcactttctctctcatctatctctctcgctctgttccctcctctttttctctctctctttctctcccctcactctctcactttcgcagcatatttcttcgccttccacttttactatcattaataacacattgtcatcatattatcacatcatttcgatcatttcgctgtcatcctagaagaaagcattcccagcagcggcccccgtcatttagcgcttctttcattcaccgccgccatccgtcgctttgccacctcctcagcctcagttgtccccctccggggatgttggtgggaattgaatgatggatgcaatgaatcaatcagcccctcccgcccccccccgcccttccttccccgaggggttgataagtgaagcaatcccattggtcgatgagggagcatgactatctattgatggtcattaattcggaactaatgcgacattgtgactggggtacctgatagtattgtgtgagtagatgggaaccatttttgtaaagaccataaactgtaaaa

SEQ ID NO: 38591 - DNA, 1114 bp, Heterodera glycines
atgaagtgactaaaatttgagcactctaagtggacttgaaacaatataaattttttcgattttcattacattaactgcttaactccgaaaaatcacataaaaaactactttggagcatcaaattctcgaaaaaattattttcagacagttcattatagaaataatggtcggtaaatgtcggtccacaattttctgctaaccaaattaaaagcatataagaacagggagggcttccatcgaaaaatatcagaacatcaagtccaacaaatcaattttggggtcgaaaatcatgatttccatatttggccatattttggcgttatgtccatatttttgcatttttccataaaaactctattagaacggcccccagcagttaaagtagcttttttgaccggaaaaatttccgaaagaatcatttgcaaattgaatccgcgacttttcgttatgttttgaaaaattatgtcaaaatccattgtttatcctctggggatggaaagggacacgccgacacatttttttttactcattttttctaacccaactcccaatcacttctgatgtgtaaaagtcccaaaaatccaaacaattaaaatatattcaaacaaaaaagcaacaaataaatgtgaggtatgcaattttcagatcaatttccattcataatgatcgatttatctttcatttcccaataatcgttcattttttcttccgctgtccaccaggcccgggattcattttcagacgaccaccttttgccttcattttgtccgtctttggtggagagaatcgcctaaataaaaaattttaaaacctagaaattttttaaaattttatgatttgtcactcacccaatgcaatctccattaggatcgaaagcgattttgttcaaattgtccggctttttgtcctcccactgaaccgtccgcccaatttggcatcacttcaacagcaaatcgatgatattataatttttataatttgtttcttctttctccaataccagcttttcgttgggtcgttcgttcaacaattcaaatgggccaatttcccgtgattcaaaaagttcaagtcgaatttttgtagctggcccgaagaagtggtggcacggggaaat

SEQ ID NO: 38592 - DNA, 1525 bp, Heterodera glycines
ttttagagcatatttcgctcacttttggcaaattttcataagaaaaatgcaataaaaatgaaaaatacaccccctaaggatcgaccttttttagaattttttgagcgatcaaagcagcttatcgggattttttcggatgggtaaaagggaacggattaaaaatcaaagtaatttttttttgattaaaaaaaagtgtttaaaaatgtttttaggtaaattttgtaaatgagaaggaattcgatgttgaggaattgacgaaatttaacgagaaagcgcaagagctgaagtcgaaaaacggaagaagcaatgacaagccaaaagtgatcggaaatgaaaagactgtgcccaaaacggacaatggcggacagaaaagaggtcaaaatggaaaaagatgggcagaaaaaagttggcactggggcatcaacagtgaagaagactagaaaaggaaccgatggcaatagcaaagagtggactgatcacaaatcaaaatgatgctcagagtatattattgttcattttttgcaaattggtaccgtacaaaccagttacagtaggaaactaaatcaatttttactgattttgaatatgatgatgacgacagtgcattaatgatgcctcaactcaacatgctaattgttatcaaaaatgaggcggcgaaatattagctaaaaaatcgcccgatttcgatcagcgttttttcgcttccattttctgctggtccttctccgctattttggtgatgttcatctctattcggatcatcattttgatcagcagtagcagttgtacggctgatcaaacgccaatttgtttcactcagacggatcaatgcaagatgttggtcctcaaattccgccaaatataaatcctcaaaatcgcagagatccacaacaaattcgggcacaggcacaatgggttccttgaatataaaatgataaacgaaataaaaaatattaataaattttcgtcaaagatgattagaaaatacaaaatttcaatttcaaaataaattaaaaaacatgtaaaattattagcgaattttaattttcatttgaatttttaagcaaaaattcaatttaaaaaattattttaagaattaccccattatactagttgtagtcatcattacaacaattttctattttttattatttcattttttataaattaaaaataattttgcctggacccctctgtattcgctgatcagtgtggcgatcaccaaattgaccggttcagctgtgacggcatcacaataatacccatatacggtcaaggattttttcgctgaaaaattgtaaatctgtaaacttttggaagaggtggtaacccattgattttttacaaaaatttttaaaaaattatgagagattaaattttacaaaaaagaaaactttgtaaaacttgaacaaatacaagcaaaatcataaggcaataatttcgatgataagtttagtactttttctaagcacttccgataaaagatcctgaaaaaattttcattgaatttgcgatgattgggctg

SEQ ID NO: 38593 - DNA, 603 bp, Heterodera glycines
  unsure (1)..(603): unsure at all n locations
ccaaaaaatccttggcgtcgaancattggcttcattcagcaaattcgaattgaactcctttttccatttctgttccataaaatggacgccgcttctgcgattaaaaggcgcggaatggccaaagattggctcgacaattccgccgggggtgccaaactcggggaaattggaggcacaattcagcagaggcacctcgggaagctgagaagagtaaaagcacgcattaacaaatcaaatccgatcaataataattttgtttggttaaactgtaataatttgtaaaaatgcccaaattttgcaccttttccaccgcctccattttcctttccaatatttccattcgcttgtccaattgtttcattctccgcgtgcgtttttccatccaaagcgcagcttttttgaaaatttggtcggtctcattttgaaaagcactcagagaatgggccaattgaacgacgacttcctcttgggaacaatcgggcggaatcaaatgcattttcaagcaaaaacagccattaaaataataaaataagagttttaataaaattgttgaaaagtaaaaaattaaaataaattcttctttcttgtgaataacataaaatt

SEQ ID NO: 38594 - DNA, 1024 bp, Heterodera glycines
aggcaaattggacaattccgtccccccccccccttcatcttgccaatttcccaacttgacaggggtcagcagcatccttcttccaccgctagtctttgggccaaattttggccctctttcaaaatgcttttcccttattttgctttttgtcccgaagcattgactgtttgatccgatcgcattccctccccgccccctcccgcccttcttccgccttcccctttgctggtccgtttttcttaatcgccctttccctccagtgcatttccttttttgtttgtcctattatacgtccatttgggtttcgtcacctcccccccccctctctctccctctcccccctcttccttcccctcttttctctctccctttcttttccccctcttttctctctccctttcttttccccctcttttcccccctcttttctctctccctttcttttccccctcttttctctctcactttcttttccccctcttttctctctccctttcttttccccctcttttctctctccctttcttttccccctcttttccgtcctctttctctctccctttcttttccccctcttttcccccctcttttctctctccctttcttttccccctcttttctctctcactttcttttccccctcttttctctctccctttcttttccgtcctcttttctctctccctttcttttccgtcctcttttctctctccctttctttttcccctcttttcccccctcttttctctctccctttcttttccccctcttttctctctccctttcttttccccctcttttctctctccctttcttttccccctcttttctctctccctttcttttcccccctcttttctctctccctttcttttcccccctcgtttcctctctctccccctctttttcccccttctcccccccttttttctttttctcccctgcatcaatttgtttcttcgtccattcgctcctttctttgctcctttcccctcccttttcaaatggcaaaaattttatgctc

SEQ ID NO: 38595 - DNA, 958 bp, Heterodera glycines
agtgtcaaaagtatcgatgtggcgaagtgtaaaaagtatcgatgtgggtgatcagaagaggcgggtcatttcagtacggaacaaatgattttaattaattaataattattttaaatatattatttttaaatattatttggaggcaaaaaatccatcaatatattttacccattcaatgcattgcacttttataatcacaattgtatttttttatatattttataatttaagcatattattgatagaataagctttttgccatggcattacttgtgaggtggccaatttatctctctttaaatttaaatttaaaaaataattttgagttaaatgtaaagagtgaatccttaacagttttgatctgattttccttgtaacttttgatcagtttcattgcttctcgatttttaagaaagtcctcaaatttcgacttatggtttgacgttaagtcaataaagcaaaggatagtaaaaaaagttaaaagtaaaattttcatttctaaaatcgttttaaaattaaaaattgacaaaaaattaagagaaaattagaagtcaaatattttagaaaaatgaatttgctttattatgagaagacaaaaaatattattttgactaggttatgctacgtattttaatcgaatataaataaagtgcaataactcgctaaaaagtggtcgactgatatggcaaaaagcttattctatcaataatatgcttaaattataaaatatataaaaaaatacaattgtgattataaaagtgcaatgcattgaatgggtaaaatatattgatggattttttgcctccaaataatatttaaaaataatatatttaaaataattattaattaattaaaatcatttgttccgtactgaaatgacccgcctcttctgatcacccacatcgatacttttgacacttcgcgcacatcgatacttttgagacttcgactcaccacg

SEQ ID NO: 38596 - DNA, 951 bp, Heterodera glycines
  unsure (1)..(951): unsure at all n locations
ataattntcgggtcggaccctgtgtagatgagtgcccggaacgggatggacactttgtagttgccgccccgcgtctccgccaccaccgtgccgcgccgaaccgaaaccatcggtgccagctgagcaccaccaattgtttcagctttggcattgtgccgtccccgtcgttcaattcccatcccattgtcctcttcttcctccccctcttttgccactgtttcttcgccgcccttctgttgatcctccccgtcctctccatcatcattagcatcatcaaatttgccgtcgttctcccggttttcgtcgtcttttgaatgtttggcgtcggtgtgccgcgtgcgcagcaaagtgtccgtgtcaatgttcacacttgcaacagtcactggtgcgcctgaagggtaaaaaatcatggcgaaaaaacgaaaaataaataaataaaaatccaatgaaaatattttttttaattttccaaaaagagttcacagaatttttttttacttttttgttaaaatttagaaaactcagatttttcattaaaattttaaaaaatacattcatttttattgtgctatccttttccaattcaacatattttggtattcaaagtttgaaatgccatttctgggagaagagaaatgcccccatgccaccaaaattgtgtttgtctgtcgtccggcactcaccgggcattcctcgggcgtcgcttcggaccgaaatgggcggccgtgactcgaactgcaggtacacgccacggctctggccctccacataaaccgactcaatttccacgccacgctccagcgagctgaacacgctgaacgcgcgcggacgcaccggcccaccgcccgcccggacgaggccaaagtcgagcagatcgaagctgggaaataggccacgccgacgggtcacctgtgtttggggcaatctgtacataaagcagtgcccggtcgc

SEQ ID NO: 38597 - DNA, 1587 bp, Heterodera glycines
aaaataaacccataaaattacttaaacagcaaccaaatataattcttagttccattcgattagattaaaatattctataccagaaaatgattaaaaaagtttcaaaaataaaaaaaactaataattaaaaaattaatttttttgaagtttaattaaatgaaattctactaattgaaagtataagctttcgatacttagaatgttcaaatttttttactaaaaaaattaaagcaaaattaaaggaaatgtttttcccatttaataataataataataattaatctcatattaaataaatatttttgcttcaacactcgccagagtattaatgtgttaacacaatttgcttggtttaacagaaataaaatgaaaatgaatcatcgaactgtgatttttatttataattcctgcataattttgaatcaaatatttttgaattaacattaacagagaataaataaaataaaaataaaacaaatatttatagacaattaaaaataaaactaaaaatcgaaaaatactctaaattgtcctccaatgattgacatcaaataaaatagtcttttcaaaaaatatagtgtcaagactcttttttatgttctgtctaataatcgaaaatcgaatttttaaaaactgttagggaaaatgagcaatttttggtagtcgattttagccaaagtggagattgtagactcagcgttgaaacggtatttgctagtgatgttcgagagtctcgttcttgtgtcttgtctcgaaaaatgagtcttggcggtttttttcgtcttggtctctagtctagggttttaggtcttcgagactcgtatgcccctactgattggctttagttaaatttaattttaatatatttttgtttaattttttcttcgttttttttcttatttacgtggtccagttgattgtgctcttagttttattctttataattttgttggattaattctgcttcaaatagttttttttaattcaaacaatttttttttcatttgaaaattcaaaataaatttaatattcttttggatttattcaattaaattaaacaattaaactcattttttaactaatctgttgacaaatctcattaaaaattacaaaaattttgccgttgccgcctattggcacctccagacttcaaaatttcacttattgtttaaattgagtcaaaatccgcgaaagtacttagaattgacacatgcaaaacaaaaaattggtaaataataaagttaacgcgaagcaaaatttataaataggctttcaacctctgctaatagagaaaattttagcatttaatttgttcttaataaataaatatttcatccgacggtgccgaggcgcagcagaaaaaaagattttttttttataaaattatatcgcgttttaaaagatttttaaaatgcttagatttattttgaagaaattgatcaaggtttaaaaaattacaaaaaaccaaagtttaaaataataaaaataaaaaaatcatagaattctgatgtgacaaatctctcgaatgattacaaagaattgactgcatatgaacaattatatatatccaccaaagaaaaattcaca

SEQ ID NO: 38598 - DNA, 160 bp, Heterodera glycines
ataacaaagttaatttttgtgttgtcccattcattcgctgccaaatgagtcccctccccccccccccctccccgcccttcgtattactttttgctgcgcctgtgccacaaaatcggctgtgaggtgaaaatgccgattcgcatttgccgcaagtgaatca

SEQ ID NO: 38599 - DNA, 650 bp, Heterodera glycines
aatagaaccccgtgttggattggaattcaaaattgttttacagggatgctatcccacgggattaatcccgcaattaaaaaccttgcttgaaaaacggtgcgggatttttaaaatttcaaaaaatttagaataaaattttaaaattgtccaaaaaaattaaatattaaccaagtttgaaaaagattttaggcattcgcataggctaaattaattttttattccatttttgagaatataccgtagtacaattacataccttgataaaccatcggagaattatttggctgttgggcattaatttgttttttttcttgcaaaaggtttcgcgccctttggcaatccgtttgcggttcaaacgctgcaaaaacagggcgcttattaaacagagaatgccaaactgtagagagagaagatggcaaaatgacctttgtgtttccaatgaatcaatcaatcaaaagtagtgtgacgcatacaaacaaacttttaatcaaaaatggaataaaaaactgattatatctgtatgtgttaaatatcaggtatgtttccaatctgcacaaattaaaattctccaaaaaaaaatcgccggacataaacttgaaaataacattttaaacttactattagtgctgattttaaacttgaaaatattg

SEQ ID NO: 38600 - DNA, 1700 bp, Heterodera glycines
  unsure (1)..(1700): unsure at all n locations
ttttagcaatgcctatggaggtcataagctgagtgcagtancgatggcgagtgatcgcgttaagcatgtaatcaaattgatcgcgggatttgnctgcntgatggatggcccacagagtccagaaaaaatgggctgcctgtaaagtgatagaaaaagcattaaaagtaattaaaaaacagggggcgccatgagagaacacaagggccagacgttagagtgaatataatgcaacgagagagtacatgaccagacgttagatgggtatgccaatgagagagtatatgatcagatgtttggtaatgaaaagagtacaggatcagacgttaaagtaaacgatagacaccgagatagagagacagacagacagacagacacagacagacagacagacagacagacagacagacagacagagggagacagagagagacaaggcggagagagacagtgagagagagaaagggaaagggggaggagaggtcatggtcagacggttagagtgagtataatgcaacgagagagctaatgatcaaaccgttagagtaaatgggaaatatcggaggaaaaaaacaatgaacagttacactatttttgttgtgcttatgaatgtaccgcttcaaagtgccgaattttgcacaacattttgtccatttcacactcttccccaattggttggccaaaatggacaaaataacggcgcagaaaatgccgacgttcgtcttcactagccgaattcattccataatcgggacactcatcaacacctgaaaaccaattgtttaattcattaaaatgattaaaaaaaagtttattttatttattttttaatttttcgatttcaatttggcgttttgccctcgaattttgtggcatttcgtttccctcctcccccagcccctcaccgtaaaatatttctatgattaaaaaaaaattatatttcccccgggtcgtcccccccccctaaatataatttttttttaaatcttagaaatattttttataagaaaatttcaagaaaaaaattttaaaaaatttttcatgtgatttatcaaaatttacaatgaattagtaagttttttcaaaaaattttccaaaaaatcgtgataattttttcaaattttttttcttataaaaaactccaagtttttaaaaaaatttcaataattaagaattttttttttaatttcgggggtagtgcacccgattttgtgtgcacaacctgcgtactcgcaaaagtgatttgcaatgtcgaacagttggtagttttggcccgcatattcgtagtcaatgaaatgcacatcgccagtgccttcctcgtcgataaggactataaattgctgcaattaatttttgtctctaaaactcgagaaatcgatccttaactttttgggtaattaattaattgattaattaaggatcaaatttcattgagtttttgtttcagaatccatagattacccaattgatcaccaaaaaaaaatatcgaaaacagttaacctttgaattgtcactttgactagaccgaccgtaattaacctaattaagctttgttcaaatgttcccaaaagcctaatcacattttttatgtattgatcactaggcaaaaattgatcaaccgtaatttagctttattagatgacaaaaaaaattattcaatttatgtatattaataaaaaaatataatatgtttttgtcttact

SEQ ID NO: 38601 - DNA, 949 bp, Heterodera glycines
  unsure (1)..(949): unsure at all n locations
ttcgactgaaatgcacaaaaaacatttttagctcggaaattcttcgttttaacgccactattcatcactattttggatctttgccactaaaaagaatttttcgctaattttggcgtttcgccactatttttggcactattttggttttttttttaaatttcccaaaaaatgcaatgaaaactaaaaatacatccctaaacaacaaataagaatcacctaaaaatttcaaaaatacacacctaagatttttgcataatttttggctgaaaattatgtcgccactattcgttaccatttcgggcttttttgccacattttggcattttttttcaatattttgtttattttgggattttttgccactaaaaatccgatctctagtgattagctgattaggaaaacgccaaccaacacactcatttggccaaactttttttttccatgagagagatttctaaaaagaactgaatttttttgagttatctaaacacattaatggcttttttggcgccagagttgaaaaatctccaaaaattttcagaaaatttttagtttgtctttctttatggataattataagccattttctttaaaataaccatgttaatacaattgctagcaatggtgcagaattgtggtacctaatttgacttttatattttggtccaaaattactattcggtgggttttcgagggtgttgatcataatctgaccatagatttgactaattacgaaccccggactcaaattaaaatatgtatactggatttggactcgaaaattcgtaacacaacccaatattcgatggtacacaacacttcaaataaaaatttattttttaagcaaattacatcgantatgtagcgcacagcaggaaaaaatgattttgacagggttagttctaaatttttgaaattnntttaaaattcttttacngcgccaaaaaag

SEQ ID NO: 38602 - DNA, 1360 bp, Heterodera glycines
  unsure (1)..(1360): unsure at all n locations
tggtttttataaatgaccttactaatttaataccagctgcagtcggaattaaattgtatgcngatgatgttaaaattnacatttcgcatgatatgacacgaaaatgaatttactctctttagcgttggctaacttagccaaatggtctaaagacaatggcatagccattgcgcatgagaaatgcgcagcattatatttaggaaaaaataattctagacatgagtataaaattggcgagaaagtaattttaagcgtagattgtgtccgtgatctgggggttttggttgatcaaactcatttaacaatcatatttcaaaaattttaaatgcggcctattacaaggcatatcaaattttaaaaatattaaaaacaaggaatatcacaataccttaatcctagcatataaaagctatataaggcctcacctcgaatacgcaagcgaagtttggaatatctcctcaaaagaacagagtaaaagaatggaaacggttcaaaaatttttcacaagaattgtatacaaaaaatgtggcctcaaggctgcatcatatgaaaaaagacttgagatttgcaaattggagaaattaagtaatcgaaggtcgctcactgatatgaatatgactttcaaaataattagaggcttaactcatttagacccaaaaaatatttcgaattttcaacaagatcgcaacgaaaaacatttaggattcaaaataaaagattcagtaataaatctcggaataacttttttattcgtacaattaatccgtggaattgcttacccaaaacagctatggaaatcggaactttagctaaatttaaaaattttgtgaaagaattttatttagaaaataagtcctgagtggtgattcatccctttttattttttattttatgtatttttactgtattgaccatatcatatttttctaattgtattcattactttgttttctgctataagtgcaactatgttgccttgcggtttgttcaaataaataaataaataaataaatatttaaaatgattatataatagtaatatcatcaacaagactttgtgaatgtttaattattaaaaaaaatttaatttatataatatatcttaataaaaaaattaaaagaaaaaaattttcaattagttgtaaatagagagcaaacaaaaaattaaatataacaattaaaaaatattatagttctctttgtcattacgtttagtgcaataataaacagggtaatattgtttttgttttatttaaacccatcaaaatttattatttgtctcttcatttgaaatagggaaaaaatgtaaataaaattaattaacttcccccatagagtgcacattatcacttttctaaaat

SEQ ID NO: 38603 - DNA, 1261 bp, Heterodera glycines
  unsure (1)..(1261): unsure at all n locations
gaatggtacgttcgtcttgcagagtcgggatagatttctgcaaaataatagttcaccagaacagtttaagcaatttttatgtctgtgaatacactagctaaaaataatttactttttcgactccaattacaacacaattttttcctttcacggcaacctaaagcaatgcacattactatttttaaaaagcaataaaacgcaccgctgttgagcccttcttcactgcttcttgcgcatagtcaacttgaaaaagtctgccatccggagaaaaaatcgtaattgcacgatcataatgctccatagtttatttgctaaaatcaagcttacaaaaagcggttaggcatttaaaatttaagctccgtaaaaattcaattaaaaatcatcacatttatttttttaatttttcaatttttaaatttttcttttttggcgaactgtctacccttgtaacttctaaaaaaggagttgagaacttgagactgaaatcccgcgccagatcccgtcccgacctgtctctgttttccatagtgaacaaataattattgttgtatttttactctttcgctgctccatacacatctctttcatgaactttagacaaaaagtattttaatgcgtcttgagaagtgttggttttgttcatcaacaatttatccgggccacggaattcaattcgtacgtaacgacgcaacggtgaaaacaatttattgatatagtacataataaattaaaatttttgtttaggttttcaagttttgtaggtcaaaatgcaacaaattatttaaaaagaagaagaacccgcgcaaattgaaatggacgaaggcatcgcggcgaattcggggaaaagttagtgtttgacttttgtttttactcttttacatttattgtaaatttaaatttcttttactctttaggaattggtcaacgatgttactcaagcgatggaaattcgcagaaacgaaccgacaaaatatgatagaaacctttgggaaactgcaggtaaatcgtccatatataccaacagaccgtaacgacgaaaaaaagtaccggaagggagaatccgcaaattctttgctctcggacacttaaacatttttcccgttttaaatttttcattaattggacgaaaaaacatatacagcggttttcgccaaaaaaataataatttgggtagacaagtatgtctaatanatgaattttgatttgggtcaaagaagatttaagggagtgtctatcggtgccttcctattaattncccctg

SEQ ID NO: 38604 - DNA, 917 bp, Heterodera glycines
aatcttcgactttgaagcagtgatcggcccccaccggacagatcacttcctgcagaatcagaaggggattctctacgtggccagcagtggaacgggcagagggtgaaaagacgacgaatttggcactttgactgaggaaatgccaaaccaaaaactgaaagtgatcggaaaagtgatcagtagggaaggggacaaatgcaaccgaaatggcagagactgagacgagaaagaagaggagcagagagacggtgtggggacggaatcggcgggtgccgaacggacgtacgagggacgaagcgccaaaattcattgaaaactgcaaaaaggaaggaatataaaacagaaactcgattttcatcaccaaagttttccggttggacttttccaaatcaatccttgaaggtattaaatcctttgccccctttttcaattggtgtgttggaaatgggtatggttttgctttttggtttcgcttttcgattcgctgatccgtcaatctttccgtttcatcagtttgttctttgtttgttcagcttctccgattgtcccttcgatctcttataataaatatattttattaatagaatttaagatttatagaaaatatacaaaaatttttgagtaattttttttgtccttttggtatttttatccatattttagcgatttttcaatccatattctttgatttatgtgcatataattccgagccataatgataaattttttaattttttgtagaaacggcttttacctgttttctctatttaaaatttaaggaaaattatttaaaaaaaaattgtctctttatttgttgcaaatttattttatacgacttctggcaatttcagggagttgatttttcataacattcgtttacgtttggcaccgtccaaatgcgacaccaacgaatggat

SEQ ID NO: 38605 - DNA, 917 bp, Heterodera glycines
  unsure (1)..(917): unsure at all n locations
ttaatattctcaatatntggtgaggttaagaatttttcttttaattatacagaattttcgggtgccaatgccggcagaaagtgccgcgaaatatttgtttgcaatttttgattgaaaaaaattttgcgtaggaaactgatcgaaaaatgaaaatatgcaataagagaatccaaaaaataaggacactctgagagaaataaggacacctgaaactctttgaaatcctttaaaatttattcttttttgaaatagaaacaaaaaatataattaataatttcttttttaaaaataaatttgaattcaaataatttaaatttttcacctgtttcagttgaaattcaccatccttgttgatatgtacaaaatagtcctaaaaaataatttaatttttttttcaatattttaattctttttttttccaccgatcgctgaagataaattgccaatggctgtttatgaaatccttgcgcatgcatttcttcacaaaatcccatgaattgctcaattgatgaatttgaagcaatcacatccttatagaccattttcatgaagtccaggtctcgggaaatgcgaaaatagagcaaactcattgcctaaattaataataaaaaatgaatactaattaaaataaaaaattatagagaaaaaatgaaaaaattgtaaaaggaaatttctttaaaaattattattttattaataattataaaaaaatttgtttcaagggaattattttttatagcattttatattgaaataaatacaagaaaaaaacattaaaagaaataaatatttgctttttaaaaaaacaaataatttctttactggaaaaattttttatcattttatattttttgtacttatttaataaactattaaaaattatagagaaaaaatgaaaaacttgnannaaagcatgt

SEQ ID NO: 38606 - DNA, 643 bp, Heterodera glycines
ggaaaattttttgtaatttcgttctgatttgttaacagatttttgtccaaaaaatgaccaaattttgccataaattttatatttttttgttgtaaaatagtgacattaggccataaaattttaaaattatgagtttgtttaagaaatcagaacaaattttggtcgctaccccaaaatcagaacatttctgacaaatcagaacagatcgcatccctgatttaaactaagaagttttattaaaaatttacacaaacatgcacaaatgcatatgggcaatcacatgcacatacaatcggcggctcagcaagtcattttgcctttgtagatctctacattcgaccaataaattttcggcaaagacatgtcaggttttaaaatttgggtcttcctggcaatggtaaaggataataatcctgatttattttattttggctcaaaaatcagttttttgaggtgataattactaattcacactccggttatccaattacgaactccggacccgaattcgaacaaaaagttgagtttaaaaagctatgaattgctttacagcaattaatgatgtaacaatgctccaattattaattggataaaatgcgcatttttgcaaaatttgatttatctccacgataatttggaaaaa

SEQ ID NO: 38607 - DNA, 1503 bp, Heterodera glycines
attaatatatacaaatactattttcagaatttctaatatagtgaattatgaccatctttggcagtataagcagaacaacgatgacttcgtgcttgacgagcagtccggcgtcctgtacgccgtacaaccggtgatttttctgtctcaaaaattctaaaaccacttctctgatcacttaagcgaaaatatttgttcttgtattaatcgaactttcaaaaatccaaaaaatttcgcgcggaaccccgcggatttgaaaggcgggatttgttatatgattacgggactttgttggattaatcgcgcaaatccggtccggcaaaattggttccaatccagcagccaaaaagatttccactaaaaactgccaaatttttgcgatttttagccaggcgaccaatttttcgtttttaaaaaatgcttttttttgcagcgcgcttttttcggaaaatttaatttttaagattttggctaattttttaggaaccaaataggttcttggggggccggcggtgccgataggcgccaccagagaaaattttttaatgcattttgttaagagaataactcaattttctttgatcgactttctcgaatccatcaattttttatcccaaaagtcggtgtagccgtcactagagcccgaccggcgcgggacgggaccccgcgcgggattttgcggatcccatccgcaaaacccgaatttttggaaattatatctcttcccgcaaaaaaatgttgagttccaatcgcgcagcgggatccgcaaatttgataaaaggaagagagacccagttgtaacatgagggagttagttggcgcatcacatttttggcaaaatgttataaattctcaaaaatttgaattttttgaaccctcatcaaaatatcatagaggtgtgtgggtttggtgctaggtcgtttcgtaaaaagtgccaactttacatatttttcgataaccccatataatcttgtgatcatacgaaacctcttggcttgctctattagctggaaaatttgattgttttcaaaaagttagggcaattgttagaagattttgatcacaactttctggaaactgaatgaaattttctgatatttttatgctaatatgtagagcaatccaagagccttcgtatgatacaaatagcgagtttaacacccgagccgatgttgatgagagtcggggtcgcacgcacccttatttggtcatcgtgaaaattgtagaattacgggcgatcgaaaatttcgtatgcccggaggattttccggcgatcgttgatccaagaataatttgttgcatcatttttacggagaaattccttaacccgaactcgaaaacggcacacatacatacaattcgtttcgtcttctacctggcgtgtcacactgagcggccgctatgcacgcgtatccggtcactgttgcaccaggccgctcgccatttcccgtgagcaattgcccttgcgcgttgcaaataaacgtgacacgaccggacccgtaattt

SEQ ID NO: 38608 - DNA, 1079 bp, Heterodera glycines
tatcttatcattaaacaacatttcgtcacaaatacaattttcccccccaattccttcatgtattaccgttcaattttttattaatatatttagatttctttcattttatatgttatttttaattttaattattttatatggcatcggaattataataaacggcgttgtaattttggtcatattaacttttaacaaaatgagaaaatcctcgatgaatttgcttctgttaaatttggtaagagctctaaaaatatatcagtttttcaaatattgaaaaatctccgcatttatttggggtttttctcatatttttttttcttccacaaaatgccactgttgccaaaataatgacagtccctggactttgacttggaaattgtggcaccattcccttccccgccatccaacggtgctgcaatagacgtgccgaagaaaattttgaaattatagagatttgttaacagtttattacaataaaactggctaattttggagtttgaaaattacaaaagtttcctttttcccttaaaaactttctatctcccctatgggaccattagagagtgccaatcccaacaaaatgtttgaaataaatttcatacatatatttttaatttcaaggctttgtccgatctatgtctgctgtcaataaactcgctttatcttatgccaaaattgtttgaacgaccaattctgaagttttcactgatttattgccatttccatatttttatgaccggcgtttgtggcctggtctctattctgacttatatggccatctgtgtggaaaggtaagttcaattccatgtcaaaagtggggaaaattggctgggagggggggggggggaatcccgcatttttgacatgaaatgaaaatgcctagaaattagaattttaatgtggcatttttggttttggtggcgacgatgggggtgtttttctgtgctatatttcaatcttcaaaaaatttcccgtcattttttcgtctcgaatccctctttttttctgcccgtggtaactctgttcgacaatgccattacgtcaagaaaatgccatcaccaaagttctcgaaattataa

SEQ ID NO: 38609 - DNA, 1502 bp, Heterodera glycines
  unsure (1)..(1502): unsure at all n locations
atttaattatttttaaatttgccatgtaatattctgatcgccttgttcgctttcttctcctcatttttgctgatcggatattccgtcaaattcttcattttcctttttggcatcaattacatcacgcttcggtcttgctttttcatccaatttgtgcccatttttggcacttcatttgccgttattctgcaattatgcatcggattggaccgtttagttggcgtaatatgtccattatggtaattaattttaaatttaatatttatttttattatttaccgcaggtataattcccgaggccattggacccttttcaaaattttgattggcacttcatccttccgagcaactcttgacatgtttatcgtttactatggaagttatcagcactgggacaagtaatttttttgttgttgtttttatttcattgatcaaagatttacgaaattttactgcgattttgatcattgtacctttacaattttttaataaatggttttaaattgcctaattaagcaaccaattaacaaaaaaaaaacctaaaaactccgcctaccaaatgactttttatattacagtatttcctaaaatacagtctccggcgggcggtttattttccaaccccctcagcagaagggtggctttatttcagagggaaggctctaatttagtgggagattttttttcagcccccctaaaaaggacggttttattttacgggggggggggctctattttaaggatacggtatttaactttttttaattttaacgataaaaatgataatttttattaggccagtatgtgcacgcttagcgacccgacaaatcaaccagaaatttttttgctgctaagcaccgcttcgttggttttatattgtggcgaattcgagtgctatgcccttatttggctgctaacttggtggagaaattcgcagagtgagaaaattattatttaatttaatttttattttaaatttaaattttttcattagtttttgaaaaatataatttaatttaatttttattttaaattttaattagtttctgaaaatggccgacgattgatggtttcgttgagtgtgatcatgtcaatgggatttgtatgtgacattggagtaagcacatttgaataatttattcgggatttatacatcaaaaaaatttggaaacacatttttaattctggtttttttcgaatttcaattcatttttgagaaatcgcacagattcctacttttaaattttcgaatttgaacaaaatgaactttttcatttccgatgtcatttggtacaaatacgattcatgaaaaaaaaaatcttgcaaccctgtacaagatcttacaaaattttaaaaatctttataggacaggtcctgaataatatatatatatatatatatatantttttttttatagctgtaaaaaggtataaaattaaagtttttaactttcccttttttaatctttctattttataaagattttttaatagactaaatt

SEQ ID NO: 38610 - DNA, 954 bp, Heterodera glycines
  unsure (1)..(954): unsure at all n locations
actgattgcagttacaaatgaggtaaatttcctttctcttcctttcttaggcaaatattgacattttaaatcaaaaattttcaccattaccaattcggagactgcaaagaaattcaaatgattcacaaagacaccgatagatcgcattgagccaaaataaaaaattaaatcaaataaaaaaatatggcgaaaagtaatataatttgagaatttgaaagataatgacctaaaatttttttcaaaaaatcacaaatggaatgtaatttgtacaagaaacattaattaggctccattatcgacaattcttaagtcctgctgatagtttccagcagttttatggataagatgattatgaatagaacatttccagacaccacgctataaatcacccccccccccccctcacctccttacatctgtccctttatttgttgtttttatatattttattaattcgcaagggcgggattttgagtaacctacctaaatctgcggtcgctgatcgaattccagtcaattcttagcccagaattcggacaaaaacacagaaaatgacagttcgggcggcaaaaataattaggtatgtatgtatgtatgtatgtatgtatgtatgtatgtatgtaaattaaaaattaatgaatcgcggaaatcttgatggatttatttgggatcaccaaactgtgatgtttgtgaggtttcagttttgagggacccggacagttcggcacgaccgtttcggtatactataatagaggtttcaaaatgcctacttaatacataacaacaaaattaatttttttttttaaatttttggtcgcttaaaattcattctaacttatgtacatacctatttaactgtacaaaaaaagataaaaggtcttaaatttgctcggggccgatatgactgtgcccgaatatacatgacctaattcctttanaaaaacagtactcttt

SEQ ID NO: 38611 - DNA, 958 bp, Heterodera glycines
gagcaaaaatccaacgcagaattaaagtacaggctatctatgaagctattcccgaaggattcggtctccccataaatctgggcgcatcggttcggggggactgccccgaaaacaaaaaaatcgattttttcaagtgtccgtttggggtactcaaacaattatggggagcaaaaatccaacgcagaattaaagtacaggctatagggaagctattcccgaaggattcggtctccccataaatctgggcgcatcggttcggggggactgccccgaaaacaaaaataaatcgattttttcaagtgtccgtttggggtactcaaacaattatggggagcaaaaatccaacgcagaattaaagtacaggctatagtgaagctattccggaaggattcggtctccccataaatctgggcgcatcggttcagggggactgccccgaaaacccaaaaaaaaattttttggataaaaattatttaaatgaactgactagataatatttaaaataggttatttctcttcctttcagtatccctgcaaagtttggtgcgcttctgatcagtttctgaaaaaaaagttaagcctaaactttttggcctgtttaaaaaggaattaaaaatttttaaaaattttattcatctccctttttgatagaaaaagcatcagagtgcctaaactaacatgtaaataaaatttggtgcgtttcagaaccctttctgaaaaaatatttaagaattaattttgcaaaaaataaataaaaacgaaagactcagattttcgaaaatttttttgagccagctagctcggcgctcatttcagtgtaagttagtcctttaccggggagtatccctgcaaagtttggtacgcttctgctcaatagcaaaaatatgagtgatcgaattttcactaaaaaagttaagcctacattttttgcatatttaaaaagaaattaaaaaatttt

SEQ ID NO: 38612 - DNA, 926 bp, Heterodera glycines
cattctcagaataattacgccgatactaattagttctgccatcccgtttctcggcgcgtttgtttgggaaaaatttggaaaattggctatctctttttctgctcaacagtaataggaattccaaccgcattctcagaataattacgccgatactaattgttctggaatttgtttctcggcgcgtttgtttgggaaaaatttggaaaattggctatctctttttctgctcaacagtaataggaattccaaccgcattctcagaataattacgccgatactaattgttctggaatttgtttctctgcgcgtttgtttgggaaaaatttggaaaattggctatctctttttctgctcaacagtaataggaattccaaccgcattctcagaataattacgccgatactaattgttctggaatttgtttctcggcgcgtttgttttggaaaaatttggaaaattggctatctctttttctgctcaacagtaataggaattccaaccgcattctcagaataattacgccgatactaattgttctggaatttgtttctcggcgcgtttgttttggaaaaatttggaaaattggctatctctttttctgctcaacagtaataggaattccaaccgcattctcagaataattacgccgatactaattgttctggaatttgtttctctgcgcgtttgtttgggaaaaatttggaaaattggctatctctttttctgctcaacagtaataggaattccaaccgcattctcagaataattacgccgatactaattgttctggaatttgtttctctgcgcgtttgtttgggaaaaatttggaaaattggctatctctttttctgctcaacagtaataggaaattccactgcattctcagaatattacgccgatactaatttgttctggaatttgtttct

SEQ ID NO: 38613 - DNA, 1125 bp, Heterodera glycines
  unsure (1)..(1125): unsure at all n locations
aataggaattccaacggcattctcagaatattacgccgatactaatgtttctggtattgttttctctgcgcgtttgtttgggaaaaatttggaaaattggctatctcttttctgctcaacagtaataggaattccaaccgcattctcagaataattacgccgatactaattgttctggaatttgtttctcggcgcgtttgtttgggaaaaatttggaaaattggatatctctttttctgctcaacagtaataggaattccaaccgcattctcagaataattacgccgatactaattgttctggaatttgtttctcggcgcgtttgtttgagaaaaatttggaaaattggctattatctctttttctgctcaacagtaataggaattccaaccgcattctcagaataattacgccgatactaattgttctggaatttgtttctctgcgcgtttgtttgggaaaaatttggaaaattggctatctctttttctgctcaacagtaataggaattccaaccgcattctcagaataattacgccgatactaattgttctggaatttgtttctcggcgcgtttgtttgggaaaaatttggaaaattggctatctctttttctgctcaacagtaataggaattccaaccgcattctcagaataattacgccgatactaattgttctggaatttgtttctcggcgcgtttgtttgtgaaaaatttggaaaattggctatctctttttctgctcaacagtaataggaattccaaccgcattctcagaataattacgccgatactaattgttctggaatttgtttctctgcgcgtttgtttgggaaaaatttggaaaattggctatctctttttctgctcaacagtaataggaattccaaccgcattctcagaataattacgccgatactaattgttctggaatttgtttctcggcgcgtttgtttgggaaaaatttggaaaattggctatctctttttctgctncacagtaataggaattccaacccgcatctcagaataattacgccgatactaattgntctggaattnngttcnntcgcgcgttgtttgggaaaaattggaaaaatggctatctcttttctgctcatcagta

SEQ ID NO: 38614 - DNA, 1570 bp, Heterodera glycines
  unsure (1)..(1570): unsure at all n locations
gcagttgatgaccacatcctnccggctggacccgtttcttcagagaccccatcttnggatggtcacctgttcatcaacaagtctcgctttcctcttcgttctcttattcactcaaattacctctccncctgaatagtcccggcggttctattcggaagttgccaattttctgtttgtatccgtccaacatggcgaacccgtacacctttgcctcgccttccttctcctctttctccgcctttttctcctctttgctgcgcgctttgcgcttctccgactccgacacgtaaaaagcgtgcatttgcctttcaatggatgtaaagttacaaaatctctcgtctttttattttttgtttacctaaaatcgcatttggccaaatctttaatttcggctcgctccgcctttgtcatcactttgacccaatccttgaaaaagttctggttgaacaccggttttgacgtgtagtcgtggtcgagcattttcgcgtaaaaggaagccacttcttcggccggcaaagacaaatccatctccttaaaaaactcccatatcaatttttggttttaaaagttgtaattccaccatacctttccgtcgtatttgaacttgatgtgttttggcaatggcacataggccggtgcaaagacgggccctttgtggacaagcgtttgccatttgatggacccatcggaggcgcccgcgttcgactcgtcctcctcccaccagcgccacacttcctcttcttcctcctgtttcttcacacgtttcttggacggacttccctgggaagaggagggctggaaatgtccaaaaataccaaggttaaatatataatattccagggaaattagaatgctttttctcttccattttagtgtcccttccctcccattgtttcccttcgcttcttcttccgactgacctcttccttcacttcaactttcgttgtcttccgtttcttgtgctcaaccccagcgccgctctcttccttgacctccaccttggtaacttttgttgttttcgttgactttttgctgtcgcttttcttcgccggggatgggtccgacttttgtttctttttctgaagtatgtcatcctttttcatccgttttccttctcttcgccttacctttggctgatattcctcctcttccccgtcggagtcgtcgtcaaagtcttcttcctctccgctgctttcgttcttttttcgactttttgaggtcgattcctttgactttttcggcataacttcctcagcttttttcccctttttcttctcattgctggtttcttcttttcttaaattggtttgttttcaaatgatgttaccataaaaaggcatttcttctaatatataaaaaagcgctcaaaatgttcgttaccgttttccccgtgggtgtcgcgtatccgttcgccccatggaacattgtcccaagtcggtcccctcactttgtccctccttttggtgcaggaacattgttcccaccattttgctggtgctcattgttaataacagcaccttcagatgaggaattggacaactaaaaatacaataaaaatccggactcaaaa

SEQ ID NO: 38615 - DNA, 656 bp, Heterodera glycines
ttttgacaaattctagttatcaaatctagactcaaaatttctacacttttccggcggcgcctatcggcaccgccggaccctgctcgccccaatgttccaaaaaagttttttgaaaaagtaccacaaaaagagcgatttaaaaaaaaattaagagatttcaatataaaaataccattaaataaaaaaatactcaatcatttacatctatgcattttaataaaaatttttggattttttcaaaaaatttttctcttataaaattcctggttgtccggtttcccggctttttttttgcggtcccggtccctatatttcacgaaaatatttatataatatttttaaagtttaagcttttattttaatgaaaaaattttgaaaattttttttggattttttcaagacccggtttaaaaacaaggaccctgacccggcctttctggacccggtaatacctggacccggtttttgcccaaatacccggacccgtaaccctaatttaatataagattttgaagtaaaaaataaggctacagaaaatttgaaaaactctcgcctctcgtcctctcgccaactctcgtctttttggggactctcgcctctcgccaaactctcgctctcgtcttttctgagacaagtcacacccctggtacgtaccc

SEQ ID NO: 38616 - DNA, 255 bp, Heterodera glycines
atttaaaaaacgggcgcaaagcgcccgtccaaggccgcgaagcggcctaacaagctaaaaaacgggcgcgaagcgcccgtatgtgttcaacgaatttaaaaaacgggcgcgaagcgcccgtccaaggccaacaaaaattgaaaaaccggcgcgaagcgcccgactgaggccgcgaaacggcctaacaagctaaaaacgggcgcgaagcgcccgtatgagttcaacgaatttaaaaaacgggcgcgaagcgcccgt

SEQ ID NO: 38617 - DNA, 96 bp, Heterodera glycines
tgatcttgtcgccggacacgtgcgcgtccaccgccagggtcatctccggcttgatgtgctcgtgccacggcagcgcacgcacgccgtcgtacaggg

SEQ ID NO: 38618 - DNA, 1511 bp, Heterodera glycines
attgtcccccgctttaccgtactctctccccgtaggacggttgcactggtgcgctgtatagtgcccagaacaaaagttgcattttgggctacgaggacaaacaccactgctccccggggcccatcatcagccgatttcggcatttggccccgctgagaaatgtcactccgttgtggattcattgcgtcaattgtcgtaagggacatactttgaaattaaaaaacactaatacaaaccaggtccggaagtgaatcgccaaacgggcgaattggagcgaaagaaagcgggcatagccgcgggggttggcacgtccagccaaggcacagccgcgggggttggcacgtccagccaaggcacagccgcgggggttggcacgtccagccaaggcacagccgcgggggttggcacgtccagccaaggcacagccgcgggggttggcacgtccagccaaggcacagccgcgggggttggcacgtccagccaaggcacagccgcgggggttggcacgtccagccaaggcacagccgcaggggttggcccgtccagccaaagcatagccgcgggggttggcccgtccagccaaggcacagccgcgggagccagccaaggcacagccgcgggggttggcacgtccagccaaggcacagccgcaggggttggtccgtccagccaaagcatagccgcgagggctgtcccacccagcttcaactcggtcccatcggtgccacagcccaacccgggcccaattaagcagcagatgtccaaccaaggaggtaaaaaacaaccaacggattcgttaattagggcgaagtaccgtaagcctatcgtaggccatttccagcggatgcatttctgttccttcaattctaagcttaccaatccgttaatcgttcttcagctgatcccattgtcgtagctttgctggccaattcatcttcatcccctcccactgagtcgccttcatctgctgacattcgtccgacttcgcttggtcaattgcttctcccctcctcttcccctcccccttcgtcctctgttgctccaatcactgatcagtcgcccactgtccctggcaaaggcactcctccgaccattcgagtggacaacggtttgtccacttaattgggcgtcattcatcctaattcgttccctccccccccccaggctgcttcatcactttccaagcggaatcccttgcgcaacggccctcccatttcaaggctccgttcgagctgaaattggatgtcgagtcggtcgaagtgtgtgccatccgctgcttccaggcactgtccatggctttcccgttaattgctgttaatgaatgcccctttttccaggacgggtgcacaagtgcgctgttccatcgcgagtcgcgcagctgcgagttgagctacgacgacaaacacttctgctccaatgcgccgatcataagcaaattcgcccacttggccaatctgagcgacgtgaatccctggtggattcactgcgtcaattgtcggcccgaagtgaac

SEQ ID NO: 38619 - DNA, 1038 bp, Heterodera glycines
tcctttttgtagtgctcaaacagatagtcgagcagttcgcgctggtggcgactgcacagcaccagcacagcctggaccaggggtgttttccgggttaagacaatgtccaaaaagtaggggttttggattcggggcccgagcgtaacttggaccgtcccggcttctgtgtatcaaccaatgatcgatgagtgatcaacaaattaggcaaaactctcagcgaccaatctattttgatcatttgatcggaaattaagcttatgaaaaggttggaaccgaagcaaaggactaaactaacaataacaatttggaacacacaccttttggcagaagaggaacagaagaagcgtaaagcttagcaacagcaccggcggaggggcgaaacaaagcgtttttttggaagtgctaaagccgcgacagcttttcatttccaattcactttttcacaaataattttttgaaatgagaaagggaataatggaaaatggaggcattaaattgtgcaatggacggaattttgaattttgagagtgcttaaacgctttctgaagagggcttattgggcaaaagcggaggaggggggggggacgaaggggcaaagataaaatggggccaaagggacggaagacggaccaacggccgaaaagcagcgaaataggaggaaaatgaagggagacaggcgcaaaaaatggggtgggggtaatgggataattagccaataaaaaaatggaaaatgcaccggaagtgaaaagccaaacgacggagacagaaaagggaacgggtaagtgtgaagagaaagaaaaccttttaagtagaatgaaattccaaaaaaaaaccgaaggatcttcgagagtatcggcactctttggggtcaaggtcctaatgaaaaattaagaaacttgggaataagcggaaaagaagcgatgaagcgaagaaggggcaagcagaagatgaatgaatgggatgagtgatgactcatccattcattggccataaccccgggggcgggggggggggacacggtacccattgaaaatgcaa

SEQ ID NO: 38620 - DNA, 1028 bp, Heterodera glycines
caaagagagcccaatttcttaccacattcatttggtacagatacgtctcgacccccgaaggcgacgtggtaatgatgtcggacgaaagtgaaatttcgtcgctgaacgaagcggacgttaccgatttgagggaacgttacgaaaatgtgtgtttcgtgtggtacgttttaaaatttcatccacactattacagacacaaagacaagaagtacccaaagaagtgatggtacagcgcgaaatgcaaatccgcgagttggagtcaatccttcggttggaggaggccaagctgatgatgttgaagaagttgcagcagagtcagcagaaggctgcgcagaaaacggtgagttaaagccgaacaacgaaaaaattcggcggagtcgggggcatggactaattgcaacaattgtttcaccgacttccgccgcttaatgcgctttttatgaccgagtcattttcattaattaagaaacatttacatttagcagcaacaacagaatcagcagcaacaacaacaacaggaaaatgtgcgaaggttagccccaggcgttgtgcagaattcaacgggacaagcgtataagccgaaagtggccgtggtaaacccatcgcaacatcagacgggaaacaccagcaaaacgaacggcacgacgccgcagcacgggaagaagggtaagggaagaacacggagagagaacgggaaacagagagagtgagagaaagagaggaaaataagggcacagtttggtaaatatccatcataggttccaaactccaaattgcataaaaatacttttatgggttttcttaggtgctgaatacgcctaaaccatcaaaaaaactgcgcggcaaagcatttaaaccggtttttgaacggtttaaatcacgaaattttgagtgaaaagggaggcacctgacctttttaatacggtcaaaatcgcacaaatttggtatcattcgaaaactcttgatgagctaagtctaaaaaacaaggtataaatttgaaccaacgccatcagatcacttggactact

SEQ ID NO: 38621 - DNA, 787 bp, Heterodera glycines
  unsure (1)..(787): unsure at all n locations
tttatgggttgctcgagaaccttgggcaaaaaanagactcttcttgccttcggaatatacataaaactttataaaatattttactgctcgaaatcaatcagtgctgaaaacggttaccccaatttgcgccccagacattagcacctatactcaaaatcgggttcaaacttaagtttttcaatctctgatagtctaaaaagcattataaacgtgttgcgctgcttacatttatttaagaaccaattcattaaaaatgctttttcgtttttccgtttggcaaattccatgacaaccattgctaatgcctagaatacctaatgaggaaaatgtcttttcagtcaatttataacagcctttattttcgataatattttgtgcctttcacttagcgtttttcctaatatatattttttcttttaaagaaaaatttcaatgataaattcaagttaaagccaaattctggcacagcacatccaggcccagggccaagcataatgtgttagcattacttatcaaaaatgaatgtttttattttttatttttcctttatatttctattttttctaacaataattttcatattttttccagggaaaatttatcataaaaagaaagcgtcgtttgcggtgccaaatgaagcaaactaaaaagccggtaaataaaattttgaattttttatgaccgattatgggggggggggggggggtggaaaactaaatttcaaaaattaatagatttatctcaacgatttaagacatgattgaataatatgcttgacatatgggaa

SEQ ID NO: 38622 - DNA, 1134 bp, Heterodera glycines
gggcaaacgccaacccaccccccgctcctccccccccaccgttaaacccttacttttgcgccggcatttccattctcttcgggtttacttttttcggccgacagtgaattcacctgaacattcattccgtgccaatccttccccctctctccccgcccactttctgctcggatggccctggttcagctgctgacacagcactcccttcgccgcttttctgttgtcgttcgcctttctcttcgctgtgcccaacggcggggggaggcgaaggcgaagaagtggtcggagattcggcgggagttgtgccttcaatgggtgaaaatgaaaggggaacacagagaagagaaataaggaaggaaagtgcgaatttggcatactttctgtcgattgatcagcagcaaaagcaaatgccaacagagagaagaaaaggaaaagattggcattcattgtgaagaacaaatgaattgaattggcaaatgaacagtgattaaaaggggggaggaaaatgaaaaatgaatggggagagatgggcgaaaaggggcggagaggagggggaaattgagtggaggtgcaaagtgaatgttggcattgcgcaatcgctgctctcgtcggtgccccccccaccccacgcgtccgccttttcctccaatgctttttaataggagagaagattgaaggactggagattaaattggccatccatcctttcatccgccccctctctctcactctctctcactctctctcactgtctctctttatctctccctctctctcttcgtccccctatctctcgcctaatccaacaaatgatggattacaataaaaaaaaaagtatcagagaaaggaaaatccgacgacagaccaatcatccaacaatcagtctttcgtctctccgtttgccccccttttgtcatttcctttgctttgccatttgaccccctctctcccctccctccctccctcccccctttcattcgctcccttttttcgctttccctcccttttccattgtccgtgaacaacggaagaactgcgcatttgttggttggttggaaaggtctctatgattttttgttttactgcttttacttttaccgatcattgaattgagtgggggcgtcggcgagtgat

SEQ ID NO: 38623 - DNA, 943 bp, Heterodera glycines
gccaaaaatgtaggcttaacttttttagtgaaacctctatcactcatattttttgctaattgagcagaagcgtaccaaactatgcagggatactccccggtaaaggactaacttacactgaaatgagcgccgagctagctggctcaaaaaaaattttcgaaaatctgagtctttcgtttttatttattttttgcaaaattaattcataaatattttttcagaaagggttctgaaacgcaccaaattttatttacaagttaataaggctctctgatgctttttctatcaataatggaggtgaataaaattttaaaaattttttaattgctttttaaatatgccaaaaaatttaggcttaactttttagtgaaagtttgatcactcatattttttgctaattgagcagaagcataccaaactttgcagggatactccccggtaaaggactaacttacactgaaatgagcgccgagctagcttgctctaaaaaatttttcgaaaatctgagtctttcgtttttatttattttttgcaaaattaattcttaaatattttttcagaaagggttctgaaacgcaccaaattttatttacatgttagtttaggcactctgatgctttttctatcaaaaagggagatgaataaaatttttaaaaatttttaattcctttttaaacaggccaaaaagtttaggcttaacttttttttcagaaactgatcagaagcgcaccaaactttgcagggatactgaaaggaagagaaaaacctattttaaatattatctagtcagttcatttaaataatttttatccaaaaaatttttttttgggttttcggggcagtccccctgaaccgatgcgcccagatttatggggagaccgaatccttccgaaaagcttcactatagcctgtactttaattctgcgttggatttttgctcccc

SEQ ID NO: 38624 - DNA, 504 bp, Heterodera glycines
acttccgcagcttatcggctgcaaaaggctgctaactccggactaaaagaaagggaagagcaccaacaaaagtgaaaaattcaaaggcagatctcggcatcctgattttatatgcagtgagaattattcagttgtccttgaaaacttgacagaattttctcccgttggcccttaggaaatgcgttttctttttttataataaaataaaatttacatttattattttttattgtatgtcctcaaatatccggtcctctaatgtcaagtctttaaatccttaaatgtcgaccacgggcaagaagaacggcaaatttggtcgttgagattgcaggacgaattttgggcaccagaaatttgggcaacgggaagtttgggcacttctatattaatttaaaaatcagaaaactaaaaaattcgaatatactcgatttcatcaataaatattcaaaattatctttaaaaaaattgtttttgcttgaaaattaaaaagaaaaatctgttaaa

SEQ ID NO: 38625 - DNA, 643 bp, Heterodera glycines
ttcatttatttggaacgatggtccttgaaatttggccaatttttgcgccaaacatttgccgtttgagtttagcctcaaggtcgcaggttctttcctgaacggacgattcgaattttgagaaagatcatacataactttatcagagcaagctaattttgtgttattcaatagcgctaattattctctattggcctacagtttaggggtttcaggtcggaaaacggattatttaagtcttcttgatacagataatcagggacggatttttaggtggctaaaaaccactaacttgttgctaaaatagttgccaaaaatatttgaaaaaacagtttttaaaatttcacaagccaaaataattgttaaaaaaggtactttgctgtcatgtaggcgcaccccattttaaaaaaaaaagcaacagaaagcgtcaaatcagacttattttggaggcataaagccaatattcggggtcgctgatcaatgatcgtggtatgacatccagcccgtaaatccctattttccattccattcggtgtatttgaatcggttatggacagtaaaggcggattttggtgaaaaatgaattttggatttttgttcgagttcgggtccggggttcgaatatttgccgaaatggatgacatat

SEQ ID NO: 38626 - DNA, 515 bp, Heterodera glycines
ggggtcgctttgcgcggggaatatggagtctgtcacaaagtgcctcccttcacttctcggcatctgtcattggcatgttcaaacaaatccaactcagtaaaaaataacaaattctgtgcccaatgtgacggacatccgcttgaccttcatttatttatttgacaccttatttttgtaaatatatttaaattatctaattattatggtaattcaaattccgtagctttgcctcaaattccaatttttattttctttttttcccttaataaatatgaaatttcatgtatttatttacacataacaaagaaataaatcttctcaaataaattggagatgattaattttccgtcgctatcatttttctgtccatccacgcgaatcgctttcgtctctttttgcaatcattgccattgccattgttcgattgcaacacacaacaaagttgagtgagcaaatcgcaagcgaacggcaaaggacaagtgttggccaaacaagcctaaaaaagtgggaatgat

SEQ ID NO: 38627 - DNA, 626 bp, Heterodera glycines
tggcattttcgtgagagaaaaggcaaaaaaattacaaaaatttgaatttttttaaccattttgccaaatttttattaaataaagtaatttgcttttgctgtcaaatgtagtggtggtgtagtggttagtgcttaacactaacactacttttgtcacgagttcaatcccctggttgactttttctttttaatttatttttttgtgattaatagggttttttaaataaacataactataaaaatggtcatcattggcataatttaaattaaacccaattttcctttcgttgaattaaaaaatttaattttccttgactaaaatcatgaaaagtaaatatttttcaaaatatttttgacaaaatataaaaaaataaataaaaatttcacggaaattcataaattttttgatgaaaatctgttagaaaataaagcttaaattttaaaattcgcccggcgctgcctatcggcatcgccggcaccccaaaaaccctaaaaatattgctcaaaatcgaattataatttttagacaaaatctgttacatatctatccaaattttcaaaaaaaatttcccggcggagcctatcggcaccgccggacccctttctcctaaaagactttagaaaaag

SEQ ID NO: 38628 - DNA, 1435 bp, Heterodera glycines
  unsure (1)..(1435): unsure at all n locations
gggggggggggggtggggggggccccccccccccccccccccccccccccccccccggctggtatccgtcctccgccccattttcccccgctttcctaaacttttcatattcgaatattcctcaaaaaacacctttgaatggctnggataactaataaaaaatatggactattttcatttgttttgtttcttctccgtattttttcattgtgcttttttcgaattcatttgtatacatttccaaaatgtcagaatgttgtcaatgtttcttcatatatccctcctccgttcacaagtgctaaattgaccgcgttcaccaatgatcggccgacctcaaaaaattcggacgggcatttgtgggggattggcggtgacaaggcctcggcatccgcaacaaggaggacgaaggcattttgtaatggacggaagagagtccgttcagcagagtactgaaacggggggaaggggatttagcagaggaattcatttccgatgcgggcaaacaaacacctctcggctgaattctgtccaagtgatgcaatcgacgagagtcgctttggcaagaattacgtttctccgttggcatgaaacgccgtccccttcccccgttgctgcaattatttcccatgcgtttggccaccccttcggacacaccttcgctcttttgtgtgtcctctccattaaaatattcaatgggcgcgtcgtcttccaatgcggcgatgagaagcggccctttgtgttgcacactttgaagccaaggaattgcactgcaataaaacccattatttggtttatgaagagagaatcccacgaccaaagggagtcttttgaggacaaagccaacgacaacaaacgcccagcgaaaggctgtttcagtgccacacacaagagtttttgtcgcgacggtttgcccaattgttctgctgccacccccgacacttcagtactgcccttactgtcctcgtactgttggggggggggggggggggtgagatgcaatttctgattctcaagtcaattttacgccctgggtaaaaagttgtcaatcagtgaagcgtgctcctcccctttctgctctttgctgtcctcatcagtgttttggtgtaaattccgcgccgccgaattgaggagaatcgcctggaggatggggtcgtccaccgtttcgatgggtttttgctaaataaatgccgttcaaccaaaacagacaatggcattgccttttgctgatgcattgctccggtagaaatgtccaaatcgacgagaatattccttttgacactcaaactgagctgtctcaattcctccttccgattgccaattgcctctctttcggctgctgtcaagtacggattatgctccaaactgaagtagtccgcttgcaagtcgttcacccgcgtgacttccctatgtaacaattcttaccattcatggcacg

SEQ ID NO: 38629 - DNA, 1157 bp, Heterodera glycines
ttattccaatttactcataaaatgaaggcaattaaaagccaaaaattaatcgtcctttttaatttatttgaataaaaattctttcgacttcttttaattggtgggtaaattcaactcatattttaatcattttttggtcaaaaatgtataaaaataaatatacaaaaatataataaaaaggctcaaaaatcggactccaactcgcgcacttccatgtaagagaactcagcggcaccccaatctttgatgaacaaattgctgacacaattttttgcgtattttaccgccgtcagaacggagaaggactgaaggtaaagcataagactgttcagcaactggagaatggtcgaattagggggaaattaaagggggagagaccgcgaagagaaggccgggcaattgggcatcgacgatgtaaaagtgggaagagaagagcagggagaggaaggagaagccgaggctggccaaggacaggcaaatgtcctgaaaagcacaaaaggacaatcaaagcattgaggagaagcttcgcaaaaagagcaccaatttggcccagaagaacttttgcagcataaaccaagcggcgattgcggtgaaaagaagggacagcaaattgcaaatgggggcccatcgggcggaagttgaagccgaagatgaaagcttaaggggggggatggatattgagaggggaaggaacggaccgaaggaaacgaattaatggttgaggaaagtggcggaggggacgaggggagagacgaagcgacggaagaggcgggagacagcgactggcgatgatcccaccacaaaatgcactgaaacacggcacagagctgaacatggacgaagccattagggaacaattatgaagaaacgcacaatgagcatgcatttgacgatgatcagctgtcggtaggggaagtggtggatgtaattgggaattggcacaatttgaaacagtgccattctcagccgtcgtgccttaagggcacattgggaattggaattgcttaaacaacgtaaaatctgtcaaaatggacatttttcgctttacatttaagcattgagcgaggccaaagcattgcttcgcattgattgcgccttttgtcagccaacgaattgaataatttcagcccatcccttcacttctccccccattatta

SEQ ID NO: 38630 - DNA, 956 bp, Heterodera glycines
  unsure (1)..(956): unsure at all n locations
ctggcctcaaatggcatgactcatggcaattaacccaaactaaggtaaagacaacgtgtcataattaacagagagctaaacacacaaatagttggtttatctttctttataattggccatttaatcttagtcaatatcactacaaccgagagcaaagaagtgccgagttttcggtaaaatgtcttgcgcggaaagtggtataagatattcaagtaaaagaataattgtaatgaaattatttatgcaagtcggtcgaggtttaccagttactttagtaaatggaacattttcttaaattgctttggcagaacgcatcaaatatactaatatttgaattgaagaatgaattattagtgaatgcatattatttttaaaaggtgtcggaggttcataaaagaatgctggcctcaaaatggcatgactcatggcaattaacccaaactaaggtaaagacaacgtgccataattaacagagagctaaacacacaaatagttggtttatctttctttataattggccatttaatcttagtcaatatcactccaaccgagagcaaagtagtgccgagttttcggtaaaatgtcttgcgcggaaagtggtataagatattcaagtaaacgaataattgcaatgaaattatttatgcaagtcggtcgaggtttaccagttactttaggaaatggaacattttcttaaattgctttggcagaacgcatcaaatatactaatatttgaattgaagaatgaattattagtgaatgcatattattttaaaaaggtgtcggaggttcataanagaatgctggcctcaaaatggcatgactcatgacaattaacccanactaaggtanagacaacgtgtcataattaacagagagctaacacacaaatagttggtttatctttctttnatantggccattntatcttagtcatatcactccaccgagagcaa

SEQ ID NO: 38631 - DNA, 1132 bp, Heterodera glycines
  unsure (1)..(1132): unsure at all n locations
ggtgtgtgaatttcaatgtattttctgaaattcgtttcgactgtagacgatgaaaatactcggtgctatatatactttcactaatcgatcctgggtcatcgacgacgttaactattcttaagagtggggccatctggttgccgataattgtgttttcgattaaatntggtgcataaatgtatagctgccttacgccgccagtcaaatctggcatataattcgcttcttccgcatgaaatagccttgtgttcttaaaaccgagcacataggcgaggtgttttgacaaatctatgtgggagacagcagcggaaagatagacaataaatttttgatcaatgctgtcatattgaaattgaacatcctcattggctagtctttctcttttttgtggtcctttctcagcttcagatacttgtatattttcaatatctttacgtttaatatgctcaccgagcgcctcattaagcctattcactatcccgctaaaacccttttccgatttatcattatatccctcgagagttgatgtatatttggtctttgcctgtctggcgattccctttgcgacgtcggctgatttctttgcttttttcaagtcattcttttccacatgctccaatgttatgtttttggctttatctacttcttcttgaaaagccttaagttcatttcgtgatgtttgaatttcggttcccatctcaaccattttgtcaaaccaaatttttatatcaggctcttctaaaatttgaggatttgtttctcttagtgtgtttagttgggtttggatggaattcgagatattgttgatctgattaaaatgtctttctacgtctctcccggcgcgttctgcggccctctttgcgacatcaatttttgagtctttggtatcttcagccttggcttctctccttccacgttgttttttgattttgtaatgatggctgaatgcctcgttaattttatttcccaggcccccggcggttttaaaattcatgtccggtaaataaacttgagtcgggacactgctgtcgttttcccatactttaataaactcttgaccgtttatatcgagtgcggtgaatgagcaggggtaaataattgatgagagagctactgaccaattctgtgccca

SEQ ID NO: 38632 - DNA, 985 bp, Heterodera glycines
agtggaagaggatcagtcagtggaagagaaagtggaagaggatcatcaaagtgtaagtgatactgcaagtggaagagagactggaagaggttcagaaagtggaagaagaagcggcagtggaagagaaagtggaagaggaatagaaagtggaagagaaagtggatgtggaagagaaagtggaagagaaatagaaagtggaagagaaagtggaagagaaagtggaagaggaacagaaagcggaagtggaagagaaagtgaaagaggaagagaaagtggaagagaaagtggaagaggaacagaaagtggaagagaaagtggaagagaaagtggaagaggaacagaaagtggaagagaaagtggaagaggaacagaaagtggaagaggaatagaaagtggaacagaaagtggaagagaaagtggaagaggaacagaaagtggaagagaaagtggaagaggaacagaaagtggaagagaaagtggaagaggaacagaaagtggaagaggaatagaagaggaacagaaagtggaagagaaagtgaaagaggaacagaaagtggaagagaaagtggaagaggaacagaaagtggaagagaaagtggaagaggatcagaaagtggaagagaaacagaaagtggaagagaaactggaagaggaacagaaagtggaagaagaagtggaagaggaacagaaagtggaagaggaatagaaagtggaagagaaagtggatgaggaacagaaagtggaagagaaatagaaagtggaacagaaagtggaagagaaattggaagaggaacagaaagcggaagtggaacagaaattgtaagaggaacagaaagtggaagagaaagtggaagaggaacagaaagtggaagagaaagtggaagaggatcagaaagtggaagagaaaaagaaagtgaaagggaaagtggaagaggaacagcaaggaaggagaaatagaaagtggaacagaaaatgaagagaaagt

SEQ ID NO: 38633 - DNA, 1334 bp, Heterodera glycines
gcgtcaatgcaaagtgaaaatggttgtgggcccaactcattttttcagagttccatgaaaacgggctcagaactcctttgttggaattcaatgaaaattttgattttcaaaacctttaataatttgtgcagtttcatctttgccgacccatatcgtttcgcaatctcagaatcagagaaaacttcttttattaacacgttgatgaacaatcagttgacgcaaacgattgatgatgattacacacatggtaagcaaaagtgcctaaaaacaaatttttacacttaaaaaagattaaaaatgaccctcagccgttgcaacttgaaggtcaattgaattaagcgtcgatttggatcgaacaaaattctcaattgttgtgcttttacgccgttcctctttaatttgcttatgttctttgttttccgtgtgcgactttatggccgaaactcccatcgactcgacattgatgtctttttggcaaaaagcacaataaaaaaatccattcccttttcggcttcttttgacaaaagtatattgcttttcccaatcgggattgaaagaacatttgcgcttatttgggaacattctaaaatataatatgtcgcaaacgcgaaaaattgcgtaacaaattcattcacaagcatgagaaaatttgaaaatttgcattttatttacataatgccataatataatcaaaatatcgttgaaaattacaaagatttctcaaatttctttgaatttttttaaaacttttctaaatgttcattttcaaggacgtccttggcatccaaggacattttttattttcaagaaagagggcccaatttcaaggacgtccttgccattcaaggacggatggcagccctgagttaaatctttgacaaattaattaagctactgcgcaaatcatatgtgcagtcctattttaccatgactaatttacccaaaggctttgattcatctaatttcgttcaaaatttcttgagttctgacttgacattctttgagaaaaaaaattggcggattaagggatatttttccaatttattaaacaatttctcaactttggttcattgccttgctgttcagaagcataaaaattctttaaatgattatcttcgtttcaatacattgcctaagtgtgtctccaagtcttggttaaattaaaaaaaaatcttcgtatgtgacattgacaaaaacccattgtaggaaatgcccataagacttgtaaaagtttcaatggaaattttgaaattgtctttttggaattcaattaaagttgcaattgcctgctttatatgttggtccttctcttgactaatggccctaaaagcctt

SEQ ID NO: 38634 - DNA, 1031 bp, Heterodera glycines
tctttttcccctcttttccccctctttttgcacttttgcctccccgttttgccattttattaattcttcggattgtgtgcacattgacttatctgataatcatgtgcaattcattctcttctctctctctctctctttcattttccttttcctctctttttctcttttccctccccacttctttctttttttgattcgtttcgccgttgggcgtttgttttggtggaaatgtaaaataatgcaaattgtttcggatcactaaatgcatccgatcgttgttttgtgacgtatttaattttggtctaaaatttgttttcgcgtcaaaacagaaaacactttttataaatacaaagtgcataaaattggtagagagatcaaattaacacaaaagggtcaattaattgtccttttttgtccttagtattttttaaaattttattttcatgctttgcattatatttttccctttccttttccctttccgctttttgttgcttttggcgatacaaaaataactgttttttatcgcaaagcaaaaatggacagtgaaaaagcgtcggaaatgcgaccaataaacaaaaatggaactgatggcaaatgaatttcacaagtttctctcgcccatcattctttcccacacattcctttatgttttttatataaaaaataaaaggcaaaggaataaagtgcggtgaatgtcaaaatgcactcatttgtccgttatttatcctttaatttgtccgtttatttatccgttttatttgtccgtcggtgtctttttcactttttttacaattaaaattcggtgactcatttctccgccattttttaatttccttcaaaacaaaatgaattaaaggagaggaacaaaagcttttctttttttccttccttaatgatgtgagaagctctgaagcaacgaaagaaattcattaaatcacaaaacttttctaaagtacacacgaaattcattgctttccaactaaatccattttattttttaatttataaatttaaatcctttgccactt

SEQ ID NO: 38635 - DNA, 1243 bp, Heterodera glycines
tggccatcatttgctgagtttgctgctgatgactctgtccggtgccgttgttgtgcgggtgctggtgacggatctgcacaatttgctggtgttggtgaagagtctgccggtggaaatcacaaaaattgaaaagccaataaggggggggggagtggaaactcaatcgaattcaaatcatttccaaatgacccaaattcaattggccatgccattcatttccctccccccttctccataaccctaccgtgtgctgctgctgctgctgattgggcggactgccaatgttcacaatgtgttgctgttgctgctgttggtggtggaattgggcagcggcgcccaccgcttgttgcgggtgccgttgcgggacgaaaccgccggcggatgggaagtgttgttgcagcacatctgcggaaaggcaaagaaatcagcaggaaagcgtttggaatggtcaaatttcccctctgactttgttgccgctggccaagtgccgaagttggcggcgtcgccgaccgaatttggtgatgcatttgctgctgctgattgtgagcggcggccgccatgaaattggcttgctgctgctgatgctaaattggtaataacaaaaaattttgcttttacttcaactccctctttttctgaatgtatataaatagggctaggatttttatgttttaacatattttttttgcggcttagttatggcgagagaagcccaaaaatagcattttctccgaacaatttttggtttagagcgacttataaaaacataaaaacacatattttggcgttttggcacataaaatatgttagcacatattttggggtttggcacatattttgcacatattttggcatttttgagaaaaattgcaataaaaatacaagaaaattgaaaaatacacccctaaaaatcgacttttttcctaattattaacataattttcaaattaaaaaattttttcttcgattgtagaaactaatgaaatctcgaattcattaattcgtcattggatttcgaagttctctgctggaactttcaatttatagaaatgatttatcaaaaaaagacaattttaccccaaacacttcgaaatgtatttgatttgcgttgtatgggctaaaaatgataaagaatgagatttttgggaatttttatgcaaaaacacacttattttttcaatttttaacacatattttagctaaatgttttggcatttttgggggtttttagcaccatatttca

SEQ ID NO: 38636 - DNA, 1640 bp, Heterodera glycines
  unsure (1)..(1640): unsure at all n locations
tataaaaaattatgattagaaaaattcgaataaaataatgaagtaaaattataattaaatatattaactccgaaacccgggcccgatttcgatcaaaagtcgaaatttcctttttatgcaaatttatataatgcacaaattactaaaatgttttttagaaaagtttgacggaatgtatttgaaaaactgaagtgtgtgtataaaatttgaattttgtcaaaaattatttttaataaaagcaaatggattatactaaactcgattcgattttccaatagcgtttaaagagttcatgtttaaataaattataccatcaaatctatcaattacacattaataagtaataaaaaccaacttaattaaacataaatattttgataaaaattattgattgttaaggtcacaaaacatttaataattttatccaagaaataataatcgttttaacaaactcttaaaagacaactgaattttttcaattatcaatattattgttaatactttacgcaaaattagcagatatttgttgacaacagaaaggaaacagtgtttttagtacagcacatattttaaaacatagaacatctttttattatttaatttctcaaagttataaaaagatttatctttttatatttttatactatgaaaagtttattttaatttaacttagtattttaataaatattgtaaacaacttgttaataaattatagcgccttctattaatttcagctacgttttttaccatgttcatgcaaatataattataaacatttttaatttcacgtcattaaaatgatttaagtcaaaataaatttatattcgatagctctaagaattctatatttatggttaaaaaatcaaaaaattcattgatttctggtaaaataattttgatataatatttaaaaaagaaaaactttcttaataaaatattgtaaacaacttgttaataaattatagcgccttctattaatttcagctacgttttttaccatgttcatgcaaatataattataaacattttaaatttcacgtcattaaaatgatttaagtcaaaataaatttatattcgatagctctaagaattctatatttatggttaaaaattcaaaaaattcattgatttctggtaaaataattttgatataatatttaaaaaagaaacactttcttaataaaaatttttctttgttaatcaaattaatacttcgtatttacattcctttgaatcattttatttatttgaatacaaaatcgtatatttaaatatttacattgaatgttctttattttcgtaatttaatcaagtcaccaacagactcattgttttaaattttttatcacttttagttatatgtaaattataatttctctattatcattatagtaccttataaattatgtaataaattatattctttttttaaatcctattaaaagcactatcatatcttttctagtttcaataaattanagtttaaaagattaatgtattattanataattttgaaagaatgcattattttgaaaatacaaatttagagttttcttcagtaatttcacataatattttgttgaattgatgagttatttttttatttttaagcataatatgcatgcaaaaatttactaatt

SEQ ID NO: 38637 - DNA, 969 bp, Heterodera glycines
agctttaaatctgcaagaaattagattggcaatatgtggttgtaaaaaacttttgggtatggaattatttttgaagtgagtcaaacaccgtattagtgctttgctgtgccgagaaccggcaggcaatggatagctttcaatctgcaagaaattagattggcaatatgtggttgtaaaaaacttttgggtatggaattattttttgaagtgagtcaaacaccgtattagtgcattagtgctttgctgtgccgagaaccggcaggcaatggatagctttaaatctacaagaaattagattggcaataagtggttgtaaaaaacttttgggtaatgaattattttttgaagaaagtcaaacaccctattagtgctttgctgtgccgagaccggcaggcaatggatagctttcaatctgcaagaaattagattggcaataagtggttgtaaaaaacttttgggtaatgaattattttttgaagtgagtcaaacaccctattagtgctttgctgtgccgagaaccggcaggcaatggatggctttaaatctgcaagaaattaaattggcaataagtggttgtaaaaaacttgtgtaaggaattattttttgaagtgaatcaaacaccctattagtgctttgctgtgccgagaaccggcaggcaatggatagctttcaatctgcaagaaattagattggcaatatgtggttgtaaaaaacttttgggtatggaattattttttgaagtgagtcaaacaccctattagtgctttgctgtgccgagaaccggcaggcaatggatggctttaaatctgcaagaaattaaattggcaatatgtggttgtaaaaaacttgggtaaggaattattttttgaagtgaatcaaacaccctattagtgctttgctgtgccgagaaccggcaggcaatggatggctttaaatctgcaagaaattagattggcaatatgtggttgt

SEQ ID NO: 38638 - DNA, 308 bp, Heterodera glycines
agcagtacaaggagtgtttgcaacacaaagttcgaataacgtggcccaatcggggaataatccatcattcgctcgatgttgtcgatgatcacacagctaaggggcgatttgtacgcgtcttcgaaaacctgacactggttatttagttctctatgctaattgtcacactcaccttccgaattttggcacattttgccgtctcgctgtacccaaccatttcttcgggagtacaaactttgatgaatggaaattccgagtccttggcaatttgtgcagccaaataagacttgccagtatttgggggacct

SEQ ID NO: 38639 - DNA, 703 bp, Heterodera glycines
agaaaaaacggtactcaggacggggaatgatcatttggaaggcgaattccatcgatacccccgaccttagcaagcaacggaatgccaaaagaaggaaaaaatgacgaaaacttcaaattttcgccccgaagcaaagagtactgtccgccctctttgagttcgttgacagccaaaaaaaggtcatcggcacaattggagaagaagatgagcaatcctatgcagcagagagagggttttgaggaaaggaaaggcaaagaatggcaccggtgcgaacgatgtccgaattggttttgaccaaagttcgaatgtcgagtgcctgggtcagtccctggaggcatcggacggtgattttggcaacactgccgaaggcgtggtttttgatgcgaagaagggcagccaaacgacagaacagactgaaattgatggagagggaaatgccaaaacagaggaagcagcgggggacaatcgggcggaaagagtcatttgcccgggggcaaaagttagccaaaaaatgatttgcccatttgccccctctcacctggccaccatttccttttctttgtttgaggctgtccccgtctgaacgatggaactgctggccatgaaatactgcttgtgtgcgttgaaataagcaaacatcagcggaagaacctttagagattcaattataggagcagctctctccccccccccccgcatcgtt

SEQ ID NO: 38640 - DNA, 1251 bp, Heterodera glycines
  unsure (1)..(1251): unsure at all n locations
acattgtgccacactcacatggggcaacgcggcacgcacatcgtccgacgcacccgcgaggcattcgtcgatcactgctcggggaggcaaacatccgcctgcagccagtgctgtctggcgaatgtgacgcgtcagtcgctgtgccgcacaacgggctgggcacggcgcgtggttgtgcggtttgcccagctccaccttttgacgggagacatatatagcattttttggtttcataaatttttggaatggggggttggaatagcacaaaaaatttatggaggggagtgccaagttgttgctttgcggatttgtgccaacctcggtgccctccgcttcgcccactgtccgcgccgaaccggcacagcggtagcgccggttttggtcacagcgccaataaatgctgtcgccccggtgccgactccgtcgatacaaatggccaccgcactccaacttttttccaccaagttgggacctgaaaattgaccaaatcactcggtaattgtcggctaattcggtgtaaaacgaattgcaaaaaaaaattaactcgaaaaatgaggcaaatagcactggttgatgagcatcggacgcaagaggagagagcccagatgaaaaagaagcatctgaacacataaacttaggcaagccgaccaaccaaattctattttttaaaaactatttcaattgacaccattttggtgaacaaactctgaccatccatcgctgtcccattggtctgttgctgctccatggcttggctttgctcgtcgttctcttccgctgctgggaacggtccgcccgacaacaatgccgtcacaatttccttcacaatagcgtcgtccgcctcttcttcatttgccattccgtcggtgtccccacaaatgtcgtttaaatcggcactgacagtggacgggtcaacggcatggccactgttctgtgccgatgccatcggcgaattcggcgcttccactggaatgaatggaaaatattcaaattagcaaaaatagataaaaaaaaataaacaaaaattaaatggcaagaaaagcccgaaagaacataggaataatgtgtaaaatcagtgactattcattcataaaaaacaacgaaaatacacaaaatnttcgggtcggtcattcattcttcgctgatcagtttanatgtgttggacatccgtcgtggtatcacgtttgaggtcagcttgtaatggtctcaaaagtcgcggtacgcgtactgcgcgtacatcactcgttcttc

SEQ ID NO: 38641 - DNA, 1305 bp, Heterodera glycines
tccggcaactctcattttagccttcccttagcttctctctcctcgtttatcacatcggcagcaggtctaacccgtcaatgccttcgggttttttctcagcgaataagtcgtccctttcgcccgtccttagaatctattcgttgtttagaaacctgaactgcgcaacgggtcacatccatcaattaattaattaattgcttaattttggcttcaatttgttttttttaattcaaattccatcagcagaagaaggggacaaaatctgttcattctgtgaaatatttctctttttttaaatttatttccgtctttttttacgaatttttcctttgtttgttttcatataaatttttttgatccaaaacaatacaaaaataaactcaatttttcgcccaaatgactcattacggaataaaacgtttttctttcacaattcccttaatcatcgcacagcttttcttttacatttttccgctaattattcctgtgtttgttgggaatgataatttggcgatttcggcgtctgcgaatgatttgaggagattatttccgctgtttgatcattttgtgttgtgatctgttaaaaatcccttgtaaatctgttggctaattagtaaatgaaattattcattcattgtccattattttaagacctaaaatatttctccaatttaaaaaatgcgtaaaatcaaattaaactacttttcggctctgtgagtcaagactctcgcgcttgcgcacctttggtaatgccaatgaatggctctgcgcctcccctcgtcccatttcccccccccccccccattccatggcccacctgctgcttctgttcctcctcctcctccttgtgctccttgtcaccgttctgctgctgctgcttgtccttcccctccccgacttggcccctctctttgcccagccttctgtccagcccctgctccatgaccatcagcagttcctcctcctcccgttcgttcagatacacttccccccccgaggatgagtaagtgccacttcgtctctcttcctcctcctcctcctcctccgttccctttgccattttaaactcctcttcttttctgccttcgttttcttcttttctgccttcgttctctcctttttgtccatttgccactcttttctccaactccttttccgagtgatgcttctttttctgcttctttcgccttttcttttgcatttctttcttttgttttttggcggaaggtgaatgagaggaagaagaagaggacgaaaatgaagaagagaaagaggcggaggaggaggagcgcgaggaacgccgcg

SEQ ID NO: 38642 - DNA, 855 bp, Heterodera glycines
  unsure (1)..(855): unsure at all n locations
cttcaatgttatgatacaccttttctccgcgtcagcatgatgatctgatgttcctccaattccgttggaagtctacagggatgatcgtgtcttcacatatgacaggaggccccaatgttttcgtgaactcattgatgcctatggtcggaacttggataaatatgacaagtcgcacatactgttcaattatttggatgcgatcccattgcgtttgtttgagtagatggaagatgcaatgacacagcggtttgttttttctaaagccactcttcatgttgacgctgtgctccgctcagtccgagactatatcaagccatcacacgttcacatttcgcccataagactgcacctacggtgaagtgattttctaatcacttgttgtgggtctccaattgagatgtcatctcattctccctctattccgtctttgcagaacgctaaacattacccccccccccccntggatacgcccttgctttattatgaggggaatcaaaatcagaattattttgagttggaataaaacataggcatagaaaaggcgtataaaacgttgatatttttagggtcttaaaagagaattagaagtgttttttcggtgctgtaaaaatttttccttatcctttttcaaaaaaaaaaaattcttttaaatgcccatttttgtcgaaaaaattggcactttggagatttcagggccaaattttggccgccaaagttcaatttttccacacagaacccagcagtttagtggtactaatataatccatcaccctttacattgggtttgtaatgcttcttacataatggcactcgcgtccggcaccgtgccaatgaaatatccgcccggattcagtc

SEQ ID NO: 38643 - DNA, 983 bp, Heterodera glycines
  unsure (1)..(983): unsure at all n locations
ttttaccaagccaatgatattttaaagactctttttaaaaaataacaggaaaaagcaagacnatagcaaaaggcctagagaaattcctcttgtaagttgtactgagtttgtgcaattcccatntaatggaatttttaccaagccaatgatattttaaaggactctttttaaaaaataacaggaaaaagcaagaaaatagcaaaaggcctagagaaattcctcttgtaagttgtactgagtttgtggcaattcccatttaatggaatttttaccaagccaatgatattttaaaggcctctttttaaaaaataacaggaaaaagcaagaaaatagcaaaaggcctagagaaattccacttgtaagttgtactgagtttgtggcaattcccatttaatggaatttttaccaagccaatgatattttaaaggactctttttaaaaaataacaggaaaaagcaagaacatagcaaaaggcctagagaaattcctcttgtaagttgtactgagtttgtggcaattcccattttatggaatttttaccaagccaatgatattttaaaggactctttttaaaaaataacaggaaaaagcaagaaaatagcaaaaggactaaagaaattccacttgtaagttgtactgagtttgtggcaattcccatttaatggaatttttaccaagccaatgatattttaaaggactctttttaaaaaataacaggaaaaagcaagaacatagcaaaaggcctagagaaattcctcttgtaagttgtactgagtttgtggcaattcccatttaatggaatttttaccaagccaatgatattttaaaggactctttttaaaaaataacgggaaaaagcgagaaaatagcaaaaggcctagagaaattcctcttgtaagttgtactgagtttgtggcaattcccatttaatggaatttttaccaagccaatgatattttaaaggactctttttaaaaaataac

SEQ ID NO: 38644 - DNA, 1101 bp, Heterodera glycines
aataaaaattttcagtaaatttttttgaaattttaagcaattttcttatcaaaattgattaaaatactcaaaaattttcccggcggcgcctatcggcaccgccggacgacccccattttaccatatttgtaaaaaatggagaacaaaatggcaaaaaattgtaattttttggcgaaaaacgactagaatttttgtaaaacacaccccataattcaggatttcaaaaaacgaaaaatacacccctaaaaatcgagtttttgacttgccccttccgaagccaagggtctggctacgcccttggctcctaagcctggccttggaaaattttaaataccaaatcaataggacccggaaattcgaattcgaaaccaccgggctccattttcaaaaaagttgaaatttaaatgaactacggtaatgggaattacagttgttttttttccattgcctaccaattttcacgcttacattccgcagagaaaaatcatacgtctaccgtaccccaatagtttttgaaatactgtatcagtcactgatagaattttcaaattttcattttaattttttgaaaatttccaacaataggcgagaatatataaaagaaattgtgattaatgtccatgccaaccgcgcggcactgcgcggcacaacaattttggcacttttatttcaaaaaggtgtgacaggcaacggcggaacactaattagtgccattagctgccggggtgggcggcggagaagcagctaattagtgcgccattagagaaaagtgcaaagagaatgcgcgaaaacggcaaaaaagtgcggcggcgatggcttcattttgtggcacatttgccccccgattttctgttgcaattttttgctctcaatttttctcattttgccctcccccgggcccattttttcccatcggcggaagggaaaaagtgcaaaaaagtggcacttaaaaatgaggcaaaaagaacaaatttgatttttctcctcctttttgtgtaaaaattttattttttccaccaaaatcattttgttatgttttgctaattgttttattttaaattgctttaattacaaaaattaaaatttccaatttttccattt

SEQ ID NO: 38645 - DNA, 1802 bp, Heterodera glycines
  unsure (1)..(1802): unsure at all n locations
aacgacctgtgcccatcagcggacgggggcatttggtggtgccaacgctagcccacagtancagcaggtaggtggtgaataggaatcactggagtaatgatccagcagcaggttcacctacagctaccttgttacgacttttgcccggttcaagccactgcgattaaatcggttccagtctgcataccgaccgaagccggaacactaaccgtccccgaatttctcgaaatggctcagtcccgggcagcgacgggcggtgtgtacaaagggcagggacgtattcagagcgagttgatgactcgcccctacaaggaattcctcgttcacggacaataattgcaatgtccgatcccaatcacggcaaattttcaccggtttaccaacccctttcggggaaggacaagcacgctgattttgccagtgtagcgcgcgtgcagccccggacatctaagggcatcacagacctgttattgctcaatttcgtgcggctgaacaccgaaaatccctctaagaagttgtgcccacagaagcaatgagccaactatttagtaggctagagtctcgctcgttatcggaataaaccagacaaatcgctccacgaactaagaacggccatgcaccaccatccaccgaatcatgaaaaagctatcaatctgtcaatccttacggtgtccgggccgggtgagtttccccgtgttgagtcaaattaagccgcaggctccactcctggtggtgcccttccgtcaattcctttaagtttcagctttgcaaccatacttcccccggaaccggaagactttcgtttccgggaagctccccaccagggcgaataaatccgccggcggatcgctagttggcatcgtttacggtcagaactagggcggtatctgatcgcattcgaacctctgactttcgttcttgattaatgaagacattcttgcccaaatgctttcgctgtagtccgtcttgctacggtccaagaatttcacctctcacgtagcaatacgaatggccccgtttgtctctgttaaccattatctcggtcagcaaaaccaataaaatcggaccgaaatcctcttctattattccatgcacgaacattcaagcgaaacgcctgtttgaagcactctgatttgttcaaagtaaactcgccagcccaccgacgccgaccggtaaaggccaacgccggggagagaccggcagaaaagccaaccaaaccagtaacacacaaagtgtgcaccggacggctagcacagatccaactacgagctttttaaccgcagcaataattctatgcattttgagagctggaattaccgcggctgctggcaccagacttgccctctcatagatactcgttaaagggtttaaattgtacccattccgatgaccggcctcataagagatcggtctcgttatttctcgtcactacctcctcgcgttgagagtgggtaatttgcgcgcctgctgccatccttagacgtagtggccatttctcaggccccttctccggagtcgaacccttatcctccgttacccgtcatcaccatggtagtcagatacactaccatcgaaagttgataaggcagacacttgaaagacacgtcgccggtacaagaccgtgcgatcagcttagttgttctgagtcaacactggacgcccggagggcgcttggttttgtggcgaacaaatgcgctccgctctggggagattggagctttggtgcatgtattagctctagaattaccacagttatccaagtaagaagtcaaggtcaagtaaattatagctggtgtaatgag

SEQ ID NO: 38646 - DNA, 1744 bp, Heterodera glycines
tgtataaatggtcattttccgttcaaaaactgcattatgattattgttattattggcattgtgcagctgctggttaccatccattttcggacgtaaaaacttgaagacgaaaagtgaagccaaattaagcaaaaggcaaatgatgccaaatgcgagggcggaagaagcggcccttagactgtaactcggattctaaatatccaaaataataaaaaattatataaaatttctcatttttattttatttctcacatcattggcagtgcgttcgttgttgtcaagagtgaatgtgacattatccttttgaacatgaataagcatgtccaagttcaaaatttggaaagtgaatgccaatgggaggacaaatgtgataaacagaattgggaccagaacataacgccataactaaaaagcaaatttaaatacatatttaaataaaaaatgtgcccttaagagacttaaaggttaatttatccataaataaaaaaaattcaacgaaagtattgtagaaatggcctcttttactaaattgtgggcctaattaaacttattgtattttcccatttttgatttatcccgagcaggattgttccgagtcaccctgataccgaaaccttaatccagaaacccgacatgtttctcgtccggaagtccgaaacccgacacgatgattttgggtcgtgtttcgcggcaaaaaaaattaggtaaattaggtaaatagtaaggctgctgccccccccccttttcgaaattttttttgtgttttcaatggtcatgaaaacatgtttccaaggcttttcggggtcgctgatcacgaatccagcatccatttcgaacaattccgaatcccaggatcccaaaaagttggaaattcaaattttttgatttccttgaaaaatttgaattcgactttttttttgccggattcgtgatcactgatcaacgaccccgaaagcacttggaaacgtgttttcatgacttttgttaacaaaaaaaaaaatttcgttcacctccaaaagctcggcaatttgttcaatccgggtccgaacatactcctccgtgtccaccgtgcggggcctctgcggaatttgctcagtgtccatcactgttcgtttaattataaatcaatcaaaacgggacttccaaataaaaaaaaaaccctaaaaaaaattgcatccaaaatatgtaaaaagttcacgacggcgactgttggcaccgacgaattcccctgcatcattaactctctaaaaacaataatctatttctgcacacttgtatagttttgtgaaactacttccttaatatagaagtatttcattaaaagaagaaaagatctgaaacatacttatgaataacaataattacatattcctatttatgtaaaaccaaaaataaaaaacagatttgtcgtttgacactgagaatatctataaggacgaatcaatatggattataaaaattataaatattttaaaaatcaatatgtgttacttgccacttccgctttgttatgcgctcaaaaacacccattttcgaaattttatttaaaattacatttatcaacagaaaaaacaattttgcttgccaacaaagtagaaggcgggtttccggttcctcggagtaattttcggatgggctgatgatcggctcaatttcaatggaaccttgatcggttgagttactgaattttgaaatttaaaagtattttaaaaaaaaatcttttaaaaaatgaatttgacatttt

SEQ ID NO: 38647 - DNA, 1016 bp, Heterodera glycines
ttttatttggcttagcatattaattttaaattttctataaataattttgaattttaaaagtttaaattaaaattaattattattctctctccatttctcgtttcatagatatttatctcagtgtttttttcagcgagaaaaaatactccaaataatatgtcattatattagtcatgataatacttcaattttaaaatcaattttataaaatgtctaaatcgcttttccaatttatcaatttccctaaaggtagaaactaaatatatgaatatatattttaatgtatattaggattgaagttcgaattccttcccacccacaaatcataatagaacacataatatgtcatccaaaatacttaacttttattcaacagatatagtatagaaatactagaataataactaattacaaatcgtatcaatcattcaaaaaccgtaaaaaaataccattagagtcactttataaataattaattcactgttctgatcgaaaagagcaaaaaaaagaaactgaaaaactgaggggggggggggggagggaagaaaggtgtgatgttgggaagaatggcatctgtgacggatgaaaacgccttctttggacgaacggagcgatcgatcggtgccacagaaaagcgatcaatggcaaacaaaacgcaaaaccgaactgagcaaagtgcactttgaaattggctggtgctgttcccagtgtgcttctgttcgccctttctcaccatctgctgccaattggcttttgtcgcgtgtcccttcggcacttttcctttcggcactttgcccttggcgttgtccctctctcttcggcacaaaagagttggcccagtggcgttggtcgttctcccgatccgagtcttctccaagacgccattttcgaccactctttgcccctgattatttaagaaaatcgtcaatgggtggggcattttaacgaaaatgcctttttcgtttggaatttattgcgaattttgcgcaattgctaggagttttcggcggaatttg

SEQ ID NO: 38648 - DNA, 884 bp, Heterodera glycines
  unsure (1)..(884): unsure at all n locations
atggaatatggagtcgcacagaatggtaataatttgaaagatacgccaaatatttgccaagtgaatttccgtgccctgacggagaaattcggcaaaaaccccgggcgttttggctcctttttcgaactcgggaaaagaccttttcgtttaaattttcctaattatttattttcccatacttttaatttgcggccaaatgttatttgtgcgcttaatggagcagagaaatgattttccatttcttagcagttccggcggatggaattagcaaattacgttaacttaaataaatttgcattacaattttttggtctttaattttacccatgtccgttattcggtattggtcttgggaattgcccggtcatttgcaactttcttgtgacgggagcaaatataaaaaacattcgacagaaagctaatgccaatgccaacgaacaatttaagagagacaattaaagtcatgtggattgtagaatggactggcaattaggttttaaattgtttttgcttttttgttttaaattgggaggaaaaaactccggcacaaaaattgtcattttattaataagggctttattagctatttattatgaatttcttattgttaattaaattttttattttatgatgtaaacttaacgtcaaaagtacatatttttaaaataatttgactcaaaaaataataattaataattatcagatacaaagttatttaaaaaagaaatgatgaccagaatcattanataattatagtggcaggcaaaaaaagaagaggaagaaagtgttcagatttcactcggaaaccattcatcattaattctantagctntctgtaattcaaaagatagcgaaaagtttgaaaaacccatcccttttaaaaa

SEQ ID NO: 38649 - DNA, 1434 bp, Heterodera glycines
aagcatatcagtaagcggaggaaaagaaactaacgaggattcccgtagtaacggcgagtgaactggaaagagtccagcgctgaatcgcagctcctctggggttgcgaggtgtagcgtatagaccgtgagcttgggttggcccgcttgttcaagtttcccttgaccggggctccagagaaggtgcaagacctgtccaactggcggtgcctacccatctttacgtgtcttggagtcgggttgtttgggatcgcagcccaaatcaggtggtaaacttcatctaagactaaatacggccacgagtccgatagcgaacaagtaccgtgagggaaagttgcaaagcactttgaagagagagttaaagaggacgtgaaaccgatgaggtggaaacggacagagctggcgtatctggtctgcattcacccgtttgttgctgtacgttgggctgctagcctccagactggggtttgctgtccttctttctgttcagtggcgaatggggcatttgcaggcggagtgcgctgagatgctcggagtagctgcgtgagctcggtcttgaggccagcctttcggggtctggtacccggatcgggggagtgctgtttactctgggtgaattgtgcaatggtttcgggtccgtgttgactcgagctgggggtcggtggcggtcgcgtgcgacacgtaccagcaaccagttcggtccagctcgggctctcagttgtgcgttctcggtgtaaaagccggtcatctgttcgacccgtcttgaaacacggaccaaggagtttagcgtatgcgcaagtcattgggtgttcaaaacccaaaggcgcaatgaaagtgaaggcttcttacggagctgatgtgtgatccctggcactgcggtgttggggcgcaacatagtcccgtctcgatcgcatgcgatggggcggagacagagcgtatgcgctgagacccgaaagatggtgaactattcctgagcaggatgaagccagaggaaactctggtggaagtccgaagcgattctgacgtgcaaatcgatcgtctgacttgggtataggggcgaaagactaatcgaaccatctagtagctggttccctccgaagtttcccccaggatagctggagctcgttaagcagttatactcggtaaagcgaatgattagaggacttggggacgaaatgtccttaacctattctcaaactctaaatgggtatgaagccagggttgctttactctgaacccaggcgttgaatgtttgagctccaagtgggccatttttggtacttgcgctgaacggagttgtttctgctgaaactatccgtctttacaagacggctgtaatagcggcgcttggcaacgctcgctagcagctatctggttgatcctgcctgaactgatgtgaaaatttcaaagattaagccatgcatgtgtaagttaacc

SEQ ID NO: 38650 - DNA, 981 bp, Heterodera glycines
  unsure (1)..(981): unsure at all n locations
tcatcagttgttatgctctaaaaatgattttcgggccgtttgagtatatgtgaggtatggacggtccaaaaaaatggctatctctttttttggcaatctggtaatagaaatctctttggaaacaatgacagtggctgtcatcagttgttatgctctaaaaatgattttcgggccgtttgagtatatgtgaggtatggaaggtccaaaaaaatggctatctctttttttggcaatctggtaatagaaatctctttggaaacaatgacagtggctgtcatcagttgttatgctctaaaaatgattttcgggccgtttgagtatatgtgaggtatggacggtccaaaaaaatggctatctctttttttggcaatctggtaatagaaatctctttggaaacaatgacagtggctgtcatcagttgttatgctctaaaaatgattttcgggccgtttgagtatatgtgaggtatggaaggtccaaaaaaatggctatctctttttttggcaatctggtaatagaaatctctttggaaacaatgacagtgcctgtcatcagttgttatgctctaaaaatgattttcgggccgtttgagtatatgtgaggtatggacggtccaaaaaaatggctctctttttttggcaatctggtaatagaaatctctttggaaacaatgacagtggctgtcatcagttgttatgctctaaaaatgattttcgggccgtttgagtatatgtgaggtatggacggtccaaaaaaatggctatctctttttttggcaatctggtaatagaaatctctttggaaacaatgacagtggctgtcatcagttgttatgctctanaaatgattttcggnccgtttgagtatatgtgaggtatggaaggtccaaaaaatggctatctcttnttttggcatctggtaatagaatctcttngnaaacatgacagtcctgtcatcagttgtatgctctaaaaatgattt

SEQ ID NO: 38651 - DNA, 1092 bp, Heterodera glycines
  unsure (1)..(1092): unsure at all n locations
tatttttaaagctttaattcacttaaattgaccagccctcactggagttatgaattttcaaatatttggccaaaatcccctagggacaaaaaattgncaaaaaataaagaatttttaaaaaattccaaaaatcatgaaacgaaaaacaaaggtcaaattcgagctcagcacctcaaaataccccagaaaaaatttttcaccacccttttcaagcctaaaaaaattttcgaaaatttctagggggcctagctcgaaaatttttgaaattttccgggcatatagcacaccgttcgatagagcttaaaattctctacaaaaatgttctaagacgatttttggctaaaaccaatccctgacgagttatgggcccaggactcaaatgtcccgctgaggccaaaatttttttctatttccgggaaaaaatcgaaaattttccgaaaaaaataccagtcgatagagctcgaaaaactatgttttggaagtggtcttcgtttttctgggaaaattcgttaaaaaatcctaaaattcaaaaacccgaaaaccgttttttaggcctagctcgaaaatttttgaaaattttcgaaatttttaaaattcagaaaatcgagcttccaaaactctacaataagtctgctgggcacctttccctcagatcaaaccccaactcggtattcgcctggtactgaagtgtactttttgagcacgcttcagttgccattttctgcaggccagggggtggctctattaaaaaaataaaaaataccagcatgtagaggacactttggcggggtgccctcgcagcggacattttttgattcgagttttagaaaaaaagttacgggccatcaaacgcaagcaaaagtgagaaattagccgccgggactcagttggccaccggagagaaaaacccgtatttttcccagatgcgcctcaaaatgttgtaagacccttccactactttcagggagctcccggccttcggccgggagattttgttttttaagacgagtccccctttttctctatatatatataaactagcgtgtgtgaattgacgggggcgcggtgcaggcagttgacttgcacgcgcag

SEQ ID NO: 38652 - DNA, 994 bp, Heterodera glycines
tttttaatatgcgaaaaattttaggcttaacttttctttttataaactgatcagaagcgaaccagattttgcgagggcatcaaaaagacaaggaaaagcactgctatgatgcttactccagtaattctgaatttaaaattttttattaatttttaaagcttcactattttatttttttagcaaaattaattcataaatattttttcacaaactgctctgaaacgcaccaaattttatttacaagttattttaggcactcagatgctttcactatcaaaaagggagatgaataaaaatctaaaaatttttaattgctttttaaatatgcgaaaaattttaggcttaactttttttttataaactggtcagaagcgaaccagattttgcgagagcatcaaaaagacaaggaaaagcactgctatgatgctaactccagtaattctgaatttaaaattttttattaatttttaaagcttcactattttatatttttagcaaaatcaattcataaatattttttcagaaactgctctgaaacacacaaaatgttaattaaaagttaaataaggctctctgatgttttttctatcaaaagggagatgaataaaatttttaaaaatttttaattcctttttaaacaggccaaaaagtttaggcttatattttaaaaagtttcatcgaacctagcgcactaaaatcgatataatctctccaaatgttgcaggccttctccattgtaaaggactaacttaacctgaaaaaatgccaacgcttgttgtttttaaaatttttcgaaattctgactttttcattaattatttattttttgcaaaattaattcataagtattttttcagaaagtgctctgaaacgcaccaaatgttaattaaaagttaaataaggctctctgatgctttttctatcaaaagggagatgaataaaatttttaaaaatttttaattcctttttaaacaggccaaaaagtttaggctta

SEQ ID NO: 38653 - DNA, 1169 bp, Heterodera glycines
agaagtgtcattagacaaactcccaagcattccgctggagagcttctttgcccgtcggattcgggaggcccaactcatcatcattgatgagatcaccatgcttcacaacacggtgattgaggtcatcgaccgagtgtgcaaagagatggcaattcgccagcacaaggatctcctcttcggaggaaaaacggtcattttcagcggtgacttcaaacagtcgctgccggtcgtgcctcatgaaggcttaaccgctcaggtgacagcctgttttcaaacgtctccgttgtttggtcaattcaccacgatgaaattgaccatcaaccagagactgggccaaggtcagcaagcgtacttgcaaatgtgccgccaaatcgggctcggagaaaccggagagcacttctggattcctccgcagttcctcgttaagagcaaggaagagctgatagattatgtctatcctaacttccaacaactccttggcaatgacaaagagctgctcaatcgtttgattctcgctccgcacattgacacgtgtgatgaagtcaacgagatcatgatggcgaatgtgccaggtcaagtgcgggaatacttgtccacggataagccccttgacgaccgcccactggacatcgatgagatcgagtccgaagtggctgcgttgaaccggcgcacagactcgggcatgcccccgcacagtctccggcttaaagtcggatgcgtcgtcgtccttcttatcaataaaagtgataaggaaggactgatcaatggcacacgcatagttctggaagaacttggcgatgatcgcctcattggtcgtgttatcaatagcaatgctattggcggccaagtgagattctttcttgaaagaacacgaaatgtctatgaagacaaatcgcctggcggcataaaatatgagcgtttgcagttcccaataaagcctgcattcgctatgaccattcaaaaaggtcagggccaaacaatccgcactgtcggcattgatctggaaagggaagtattttcccacggtcaattgtatacggccttctctcgggcaaccgacggaaacaatgtccgtgttcatgctcccaaccgggaaattgatgcccaaggccgagccaaagtgctgaatattgtagctactaatatgctcaagttacaataaatggctt

SEQ ID NO: 38654 - DNA, 891 bp, Heterodera glycines
attgaattctgaaccggtttgagtagattagactaaaaaccttttgagtgatcaaactttcactaaaaagttaagcctaaactttttggcatagttaaaaagcaattaaaaaatttttaaaattttattcacctccattattgaaagaaaaagcatcagagagcctaaactaacatgtaaataaaatttggtgcgtttcagaaccctttctgaaaaaatatttatgaattaattttgcaaaaataaataaaaacgaaagactcagattttcgaaaaatttttttgagccagctagctcggcgctcatttcagtgtaagttagtcctttaccggggagtatccctgcaaagtttggtacgcttctgctcaattagcaaaaaatatgagtgatcgaattttcactaaaaaagttaagcctacattttttggcatatttaaaaagcaattaaaaaattttaaaatttaataattttcctgcaccgaaggtactcactcggcctcttcgcggcctcgtggtgggccttcgccccccccccctcccacgcccttcagagcacgacaaatatttcaacaaaaattttgaaatcatgtttcgcaatccaacgctaacggaggtattattttgtaaagtctttttttcccgaaggagaaacttaattaaactccatttttcgggggaccgtgaatgttatttttattgaattctgaactggtttgagttcatcacggctaaaaaaattttgagtgatcaaactttccttaacttgttaatcggacgggtgcgcatgactttttcccaaaaatagttatgaaacaataaaatcgtttattcaagtgtccgttattgaaagaaaaagcatcagagtgcctaaactaacatgtaaataaaat

SEQ ID NO: 38655 - DNA, 1166 bp, Heterodera glycines
  unsure (1)..(1166): unsure at all n locations
atgcctgcannggtcccttgccccaacaaataaaaaaacaaattccgatcatttttacattttttttggcacattttactttatattattaagaaaatttgaggaaatgttatttaaatcattattatttcaaaatttattattttttatttttgttgtgaatttgattatacgaattttcgacttttttgaagaaatgaaatttttagggataaaataaattttgtcggatttctatttaatatttgcgacaatccaaacaaaaagcattatttaagccattctatcattttggcatttttgttggctgttttttgcgcatcaattttttgtttccattccattgtttggcattctgtcgcaagcgcaacattttatagtttttgagcttttcacaattccttcgtcaaaatagcgctgattttcaatgtctacaatcacctccattctatgtatttttgcttttttgtggacacaaaaagcataaaatacacacgcacaatcacaaaaattgctttcttttgctttcccccgcttttcctttggcctttgtccgtccaccgattgccggcgcaaatcggtcaaaaatagcaaaaacaaaaaaaaacataaagcagtgtgatcattactgacgaatgttgtattagggctgaattggcttcttgcgatttgacgtcgtccgtctgacggcggccgaccatcgcttccccccaaattcacctccaaattgagcatccactcaatgatttaacaacagcaagaaagtaaagcatgaggaggaagaagaagcttccccgagaggaagagacaaaaagcattgacaaacggaagaaagaagcgcaatacgaagagaaaaagacaaaaaggagtgacaaaaggagcaaaaagagcgacaaagctcttcaaaatttgtctgtcggacatgtacgatgacaaaaatcattccgcttcaccagtcatcagcagcagcagcaacgaaaacaaaatgggccgaggggagggggacggaggcggcgagtcaaaatctcgagggtgtcctcggccccgcccccgaaaatcttctggactttgtgtccgtccgtccgtcgatgcccccgccgcgctccggaaacacccttccggaccggtcacgcctctcacctcatcaaccgcagcagcacatcctt

SEQ ID NO: 38656 - DNA, 784 bp, Heterodera glycines
gactcaacccaacagcatttcaatcacttgaactctccccccctaattccaatcactggcactcaattctcctgcattcctatcactagggactcaacccaccaaaattcaatcactgggactcaacccaccaacatttcaatcactgggactcaattctcctgcatttcaatcactgggactcaacccaacagcatttcaatcactgggactcaacccaccagcatttcaatcactgggactcaacccaacagcatttcaatcactgggactcaacccaccagcattccaatcactgggactcaacccaacagcatttcaatcactgggactcagcccaccagcattccaatcactgggactcaacccaacagcatttcaatcactgggactcaacccaacagcatttcaatcacttgaactcaacccacagcattccaatcactggcactcaattctcctgcatttcaatcactgggactcaacccaccaaaattcaatcactgggactcaacccaccaacatttcaatcactgggactcaacccaacagcatttcaatcactgggactcaacccaccagcatttcaatcactgggactcaacccaccaacattccaatcactgggactcaacccaacagcatttcaatcactggtactcaacccaccagcattccaatcactggcactcaactcacctgcatttcaatcactgggactcaacccaacagcatttcaatcactgggactcaacccaccagcatttcaatcactgggactcaa

SEQ ID NO: 38657 - DNA, 1497 bp, Heterodera glycines
  unsure (1)..(1497): unsure at all n locations
agaaaaaggaaatacaaaagcaaaattggctatctcttccttgtgaacgaatttttcgtcaatacaataaaatttgaccaaaagaatttgctatttatttactgctcattggtcatttttatgtatttttacaatatgaatatttttaaattagactttctcaaataaggctttttgcaagcaaaagagattttcgactttgtattctttaatcaaactaacaattccaattcgatacaaatttttttggaaaacaattagctattgaatgataccacaaaatattaatttgatttaatttccatctcttttctctttttttccttttcacgctgttttttttttgggggggggggggggtgcgctttgaactaaaaattgacaattttggaaaaaaaaatccaaaatttgtacaaaaatttttcctgctgttctttggtgtgaccacgactcggagtgttgttggggtctaccctaccccaatttgtagatacattttcggcaaaattaatcacttttaattcgcaaagtaaacgagtcgacggcaaaaaaggaaccggccaaaaacaatcatgagattattatttttgttcatttatctattcattattaggtcacaattttgctgaaattattgggaaattcaaatatgaatgatctctatgggtcatcattttgccgcaatttattcttaattgaccctaaaaatatgtaagcaaaatcaggcagaagaatgaatgctcatttatttattcgatccctttttaacgaaataataattatctataaaaaaattaaaatctgaaaatgatttaaggaatttgcattttcttaacttattaaatgtcaatctcaaccaattctacaaatggcgattttacaccaacaganaggaggtaatgagaaaaagagaaaccgtaggaagttaaattgagttttggaaatgttaagataaatattaatttatgtttgcgaattaaattttataagattttcagaagttaattgtgaatcaattagtttggacaacgatggacaatctgatggaaaagcgactgatccgcagcagcagaaagtgagcaattaatagcatttgtacgagaaagatttgaaatattttgacataatatttttaaaggaatttgttgaaaagtgtgccaagatggaaatggacttcaaaattagcacattggaacttgagaaagttggttttcatagataattaatttatattcttgtcctgacctatgcacaaaatcgataaattagagaaatttcgtttaaatgttagaaaatggaaaaactaatttactattttgtgtttgcgaaaaaaaatgggcgtttctttacgatatttttacgtttttcgagaatattctgcgtataaatatgtagaaaagatttattatacacatttggacattttgtaaagattttgaggtttttgagaaattaaatgagggaaaatcgaaaatttttgaaaaaagcgcccccccc

SEQ ID NO: 38658 - DNA, 989 bp, Heterodera glycines
  unsure (1)..(989): unsure at all n locations
ccgtaggcggaaaagtcgcgcaattggtggatgaaatctttggagattgcctaattcaaaacgggattttcaagattgaaacgcaaattttaagtaataatttaatttgggaatccgacaagcgcaccggaatgccaaatgaatgcgcggattatggcaagtggaaaaaataacaatttagtgccacccaatttccttcttgttcaccttcaacgccgtattcgaagcgttgcaatttgcacattttgggcataagtccgagcagtgaccgaaagtgcgtctttatctgatcgttcaatagccgttgggccaggcccaacaaatcgaacagaatggcagaaatgccctggaaattgtaataaactaaatgttaaattcattggccttcgttaatattttatttattttcttagtttttatgttttaaacacctgatagccaaccaatttggccaccacacgaaaatggggcacaccaacgaaaccgccgtacatcatcgacaagttggagaaggaggagttcaacgatttggaaccgaattcatactgggccgcaacagcgggcggacgaccacgggacggcttacgatagttcaactgaacagggaacattaaaaaaacaatggctaatttaaaaatgattaaccggatcagaacttcttagaggtttaattcgacatggtgcatttccgtacaggtctgcatttatcatcatttccggttaaatttttaaaaacacgggacgtggcgggaagcgatccaacgccataataagcgaatggacagcaaataaccaactgagccaccaaaacgaaattaacaagcgaatttgcaatgtaatatgacaatcgtttattaagctcaatcacctttccgcgaacaaatcggcgcgtggccgtgttgaagcagaagttgaccaacacgtcgtccgtcagctgggcaacgcgtgcaagtgatgcgtccgttgngggcggacacttggcgatttgc

SEQ ID NO: 38659 - DNA, 1921 bp, Heterodera glycines
  unsure (1)..(1921): unsure at all n locations
tattcgatcacttgtgaagtggtgtccccgggtgtcttcctagtcgccgcaaagaatgtgaccgatgaaatgtgaacacttcggtgaatcagcacaaatttgggattccatctaaacaaaacaaacaatgtaaatgtgtttcataaggtcatgattctcgaccatgcaattgaatgccttacttgatgcatggagccaagcagataggccatctgtgccagtttaatgtgcccgtgcttcatgttgaagtaaatgtgagtgtttgaaatgcaaatggcacttcgagtgccaacaattgaaaatgccaaaacttgtccttaggatgggaagtgtggtgcttaatttttcaatagataattaccgaccaacattgtccttttccattcccgtaactcccaaattgtaatagaccgaatttgatttgatcagtgctaattgcgttgatcgccaaaaagcggcacacccatccggcatatcgatgcctttccgcggtgtgaacaacgcgttgtaacctcctaaagtatcaaatttaaacagttaatccatttaaagattcgaacacacgggctgtaaaaaagggaagaaaatactgcttaaaatgaatgtcttgcacttcttgcaaacagaagacatcggcgtcgaggcggtcgaattcgatggacaaacttttcttaaaaatcgaaactaatgaatatctacatgaaaaaattgggaccgatttccccgccccctccctcaagcctcaaattggtgagcacagaaacgaggtgggaaggggacggggagaggggaaattttttttaaatctaacaataaaccatttattttttaaaaagcattanaatttgttgaaattttcacggcggtttgtataaacctttgattttattattgattttgaacatcctagatctccaaaattctgatncaatgtgaccaaatgatgcacccttttcgaatgaggcacccatatatgagcagcactattattagtcatgaaatgatcataaaacaatcgcaacaaaacataacagaaaaatatttttttgggtggagcccagcttctccttacccatgaccagatacaccttcgcaaaaatttcagttgactcttccacccttttttcttcatgtatgaataaatataaaatcgaatcgctaatttaaggagatttaactaaaattcatcgcattttgattaaaataccaatttttttcttttaaaaaaaagacttatagtgaccaatcttgacactgacctttctctgctcccattctctacagcagtggttgcgtcgcaaatgcatataaaggtgtggcattttgtccattgttcgctggcacagcacattaaacgagacaattttcagtggctttttttcatattcgaacgtcggatcggtaccgctcccgcgaaggtctttgccctgaatttttgaatctttccactttgggcacggaaagggaccgcaatgtcctgaaaatagcgaagtccgttcaatttatagcgcattcgcagatcaatggctggtgcccgagcatcgaaacgggcacggctaattagtgaatgttcgctgtgattgggcggttgaacattgacgggaacggaagaggaggcgccggaactggacgggagacagtgctgaaaatgggggacaaaagtcaaaaacagcgtgaatgggaaaagccaaaaacatataaattttcaatctaaataagaaactttctggaaaatggagcatcgtccgagacaaaaataagagataccatttaagcattaaaaaacctgcggatcgtcaaccattcgcaaatccaagtctgtcaaatctgtcttattggccaaagaattcgacaaatccatgttcataaccgatccgttttgtttgggagtggtacgtttggacatttcttttggctaata

SEQ ID NO: 38660 - DNA, 971 bp, Heterodera glycines
  unsure (1)..(971): unsure at all n locations
tacaaccacttccaagtacgatacaaccacttcccctaccagactaccacttccaagtacgacacgacaacttcaaagtacggtacgactactcaaaagtaccgtggcaaacgctttgcggtaaaacttaattttgttttataaaaaaaatatttcttataaacaggatgccgtgctcgttcgggctgctcgcgctgagtacgacgccgattgcccggccggtcccccgggagatgccggcattgccggaccgcccggcccccccggcgagccgggcaaatgctatggcagcgggtccaaagagtccaaagaaaaggagtacaaacccagcaagcgcagcattgacaacttcgagcatggcttgcgcgtcgccagggggtaaatttaaaaattgaatttgaattggataagccggcattttaaaaaaccaaaagactgattttttgaaatgaacaaatctccgtattttctaagttagtcccccacttttgagagtttaattataagcctcctccgtggctttatcaaatgccaaatgtttcccatttgtagctacaagcaagaagtcggaccccctggccccgcgggaccgcccggccctcccggaccggacggaccgcccggagaatgtgaatgcaaatactgaggatgatgctgaagatggtccacgatgtgagctcaaccgttttgttcctttgcctgattatccatcgatgtgtgaaactgtagcattagtagtactgtattgtcgatggaataaaaattttattaaagaatatttttcaatgtttttttttgcgaaattaatgttaagtctcgaagcgtaaataaagcaaaagctcaaaattatttcaaacatcttcatcattcatggccttgataaatcatgtcatcatcatcaacatcttaatggaaacttgctganaagtaaaagtcatgacataccgtaatcatgagtccataccgtacca

SEQ ID NO: 38661 - DNA, 799 bp, Heterodera glycines
tttaaaaacaattcaaaaggacaaatgaacaattaaatctttataattaatgggttagatcgttcattcagaccgaagaaggaaaaggtgttgaccgtgtgccgtttgagctcaaccctttgctttcgttttctctatcggccaaagaaagggtattttttccttttacgctaattgcccgttaattgaccttggttattttgtgtttccgttcgccaatttgccccctgttccggattggcactcgcttgaggcaaaatatgtgtacgcttttcggttggagcgtgagctgacttcgccacgaaattgaagagaaatttggcacagaatcctatcgactgttttgattgtctttcgttacaataggctttttctaccaaatattttgtcggttgccatcttcgttagctttcttttcttttgcacatttatccctcttgaattcgacttacccattttttaaaaatatcttcgaatattatacatttatttcgctgacaaatcatttctgctaatttgttggcaccaatcattccttttttcgccctttcctttcccattttctcccccaatttgttccatccattgacaatggatgaggttaaaaaagggcacttcaatgactgttttttgcaccttttggttggggaatgccgacacaaataggcggcacaaagcaatggttttgttgattgaactgtttggggtgggcgattagtgggggagggaaagggaaagagggggacaaattgacccgcagggaccattttgggcaaagggatttggaagaggagcaaaa

SEQ ID NO: 38662 - DNA, 983 bp, Heterodera glycines
ggtttgaaaagctcaggtcccggtcccggtcccggtagggcaaccgggaaccgggaaaaacaagcactggtaagaatggggtctgagtgaaaaattagtgaagaaaattggagtcaaagggaaaaataaaaaataataattaatatattctttaaaagtaacactgctcaagtgtgcaaatggcctaatggctagtctccttgactttcccttctttcccctggttcaatccctctacagaaattagattattttcaattttttttttttttttgtatactcgtgggtttcctataaagaaaatatgattcctcatagtttttttttaaattgatacatattttatcattttttaaatgaaaatcctaccaattgagcttaataatcgcaaaaaccaaccttttttgttgaaaatctgttaacaaattgcacccaaatttttaaaatttcccccggcggcgcctatcggcaccgccggaccccttctttcccaaaagttttttgaaaaagcgctccgaaaaaaagtgatgtgaaaatcaaatctgaatttctattaatattcgatgatttagtccaaaaatgattaattgtttgaaataattgaagaaaatttgtttgaaaattttcattaatttaatttattaaataaaaaaccaaataattttgtattattttcacttgatataaattaaaatttgaatttgtttttaaatttttaaaatttttttgaatttttaaaattaacaaatactgttcataataaatttatctttaataaaaatacaaaataattagataaacaagtctactaaaaaaatattatttgataattgaaaaaacaaaagacattaaaaaggaaataatatacatgaagaaagaaaattaatataattatttaatacacctaaataaaatataaaactgaaaatttttggtaaaatctcgattatttcattatagaatgaactttatttgctaataag

SEQ ID NO: 38663 - DNA, 840 bp, Heterodera glycines
ttcataattattcaagtaagaccacaaaaattagtttacttctaaaaaaaattgtttcaccgatttaaaaaaaatatacttttcttcagaaaaaaaaaaaattaattttcccaaatgtattctgtaaaaaaaattttaatttcgtcatttgtagcacaaaaaataaaaaatgaacgtggtcaattttcatattcattttaaaatgacataaataatttaattgtcataaatcatttgattatacacatatcaattacataaataatttgatttttaccaattatcaatttaccattcgtgctcctattaaatctgacctttattaaattatttttgagacagaagataaaaataatttatatattttattagcgtttgtgaaggaaagaccaataaaattagcttaattgacagtttgactttaaattaaattcataattatcaaattatttctttttttatatgtctaattcagaaaaccaaagctcgtcgaatggcaataatttcattctattttatattaccattccttagtgtttgaattttcctttaaacaatcatttaaatctgtctttctctaaaaaacataaacaaatctttactaatttttaaattactttgttcaatccttttaaatacttttctagctaaatatcaaaagttttaaaatttcccgacaagaaaattcaaattttcttaaaaatatctaaaacatcttcaaatatcaccaaaatcaacaacactgtcattttcactgcttatgccatggcatttttggaacttggcacactcattccgacaattccagtcctggcattctgctcttcaattgttacaaaa

SEQ ID NO: 38664 - DNA, 767 bp, Heterodera glycines
ttttacagctgattgcatgcggtttggcgaagctggcgaactttggggcagtttttggggttgccagacattcacttgcaaagacggtcagcaaattgaatttgtattaaatttgtggcatttgctcatgaaataaggcataaaatcatttagtataaaaagttacaaacaaattataaccacgattttttttattaaataaacgtgaagaaatttattatagcgtaatagattaaagttttcttaaaattttgatttttatttttgtcaaattttcagtttttaaaaattttcgatccaatttgtaataaaaattaatcacaaaaatatctttagttttttttttcttttgctgaattataaaatttaaaatttaaatgcccgttcttttccaattgctttgcggtgtttgttacgatgctaaaataatgttatttattattatttatagagcatggtaaagacattttccgcatcaatggatgcgctgaaagaaaggacagaaaatgctcgaaagtgtactacacacactgtatgaaaattggtggcctttcgtactgtagtcattgtgatgatttggtcgatggcaaagtgtgcaacagctttgatcagttgatcaaccttgatcagtccgatgatcagctgaacagcattttgaaatcgaacactaacagcaccagcaaagccgagaaacttggcccggcttccgccttcacttggatcagcagcaatttgttgctgatttttggtaatggggaaaaatgaaa

SEQ ID NO: 38665 - DNA, 751 bp, Heterodera glycines
gtttatcaattgattggactcaaaaaatgcgattggacacatagtgctatagagtcaaaaataatttataaaacgctaaacttatgcagttcaattgtttgcatttagttggtcaggaaagaaagattggggcgtgggagaggcgtcaaaaaggccattaaaatggtcatcgacgaagccaccaacagcgcaacggaattcttggaggcgaattggccggcttttgaaaaggttaataatttgttagctgtgctttaaatctaaaaaggtaatgcaaaaaagcgccaatgtgacactttcaattctgaaatttaatgaaccaaatgcactaaaaaggtggcatcataaaaaatgatgaccataattaatgattaattgtgtgcgttcctttttttcaattcaaaaaaatattctcacattaattgaattacctattttagttggcaattgaactgcttgacagtttctgtaggcgagccgggtccgtataggaattttttgttgtgtgaaggcatttctcaaccaacaaccaatggtgcaaaaccttctttcaaaaaagacaaaggcccatttgctgctgcaccattttgttcaattttcgcgccaacaccaatttttggggcttttggatgagcagggttgggccataacattttgggggttcaattttaaatgttgtgattttcaggagatgaggcactgcactcctggtggcggcgacttgagcaactgtggaagacaatgccggacg

SEQ ID NO: 38666 - DNA, 878 bp, Heterodera glycines
cctaattggttttgttgtcgcagcggtccccctccctaatgatgatgattatgctgatgatggccacatgtcacatgcattcattcatcactcactcatcccgaacaccttatggtgttgtttacaaacaaacattttttcttttgccttaagcggcgcgaagaacagattttggcagcagcaggtggttgttgtggtgttagtgattagcactaattaatgcgcgtccgtctaattgatgggggaagggagtgctaattgctttttatcggcgccgccaccaccgccaacgccgccccacgcaatttttttttttgtttggcacaccggcgggcgcgcggggggcggcatgggcacacgcataaacaccatcgcgattatctcattaaaattttcaatcgccgccgggaatgccgtggtggtgttttgttattaaggcggcgacgccaagaaaaaaaaaactaaaaggattaattaatagtaaaatacataaatgagacactcactgtgtaccatgtgccctcggggataaagatccttttttcgccccgggggcgcgggagggatttaatattttctttttctgttaattcgtttatgtaatggcatttgccaccgcgacacaacaactttttttgcccccctctcttttggcttccgacgggcgcggcattttcgtcaattttcaaatgcttaatgtttaaatgatttgtttaattgtctttagattatataaaaaatcaaaattttcatattaaaatcaaattatgaaattattaaaatatttatctgtttaagtttaatataagaaaacaaataaatttaatccttaatttttaatatatgaattattatatatatatatatataaataatta

SEQ ID NO: 38667 - DNA, 1333 bp, Heterodera glycines
aaaaacatttcataacaccacacaaattcaaaccatggacacataatacaaacactcaactttattatataggattatcgatcacttcggtctctcttcactttctaatttacttggttcgttttttcctccccgtgttataaattaataaatccttctctcttttgtcgtcttcatttgcatcgatttattctacaagtcttcgactttggcacaattcgacaacttttggactacgaattctcctcgccattcttcggctcttctcactttgttgaatccctacttgtgtattcccgattatttcccctaattgtatttccgacaatctcaaatttcccaaagccccataaagctgcaattcggtcggaattaccctgttggaccccaacaaatattcttgttttcctttacgatgataggcaccgaagaaattttgaattgcgatctgttaacagatttcaccaaaatagtcaattttatgtcgattttaaattcaaattttaagggatatttggggcaggcggtgccgataggcacgacgggaattcgagaatttcgaaagatttggtaacggattttatactaaaatacaaatttttggattttgatgaaaaatttaaaatttttttaacattggaaatggtaagtttttgtgtttttaggatatttttaatgttttaaatcaaaaaacaataagttttcaaggcatttacatttcaactcggctggcccaattcgaacgcaaaatttaaacagtccgaagtaatttaatattttcatttttaaaccgtatttattcctttttaattttcgaaaaatatcttccaaaattgttttgttttgaccgaaaaatgaattaaaacaaaattatttttaataaattactctgaaaatttttgtgccaaaaaagatcagtgacatgaaatggaaaaagagaattgccaaataattaaagaatgaaaaggaatgggttatgaaatgaccaatttggtaatttgttcacatgtcagtttttgcctttttccttccgcccgttcattcctctaaactaattgggtcattagaggtgccctcgcggccatcgctttttgttttgccgccaccaaaattgcccttactcagttcattaaacatttgcaattccttctggacacattgacaatattctatgtttttttcatccaacatttttatgcatttttccaaaaatgccaatccgtcctccttttcttttgctaattttgtcttttcttccgacaattttggcaccgaaatttctgcaaagtcggcactctccaattcctctttaatttgcttgaaaatcgcggaa

SEQ ID NO: 38668 - DNA, 1101 bp, Heterodera glycines
cggtgtcggattttccagtgtcggattttccgcttgtgtcggatttccatcggtgtcggattttccgcttgtgtcggattttcctagagccgcgttagccaagttcccatcagagcacagttggtgctataacgttactcaaaaacaatcaaatggaaaatttttgacagaaaattattcgtaacttcgcccaaaatgaataaaatttaaaaaattaggtaatatttcgatagtccgaagtgtcttctatacaattgcaaagtttcaaaaaaattcattaagtttcaataaagttatgactagggctgcaaaaaatatgcacgaaaactgaccaaaatccaaaatttcgcaaaactctcttttttaggtatgttttttaaaaatttccaaaaaaggtgatctatgtgtgtatttttcgctttttttgcatttttattgtgaaaaaatgccaaaaatggccaaaatatgtatgaaatatacagcagttttttgtcggaaattaagtcagttttatcacgccatttttatcaacgattattcacaatgaattaattaaatgtacatacacataaaatacaatgaaaatggacgaatttacggcaagcaagcaaaggtcaaatacatacaaataaattagctatacacaataaaaatattgaaatggcacagtgccagcatcaattttcatgggaccaaatggcattttatgagtagggatcggatttttagtgataaaaaatcccaaaataattaactaaatagtgagaaaaaaattccaaaatagtggcaaaaatagtggcgaaaaagttccaaatttaggggtgtaattttttaaatagctgttttttaaatttgaaaataatttaaaattaaggaaaaagattttattcactgattgcagttacaaaatattttcttagaaaatattgaacaagaaaaaaaatttgggggaagaatttttgtgaaattttccaattcttagggatgtatttttgaaaattttaggccgattcttaggggggatttttgaaaaattttagggcgattcttggggggtatttttttcgttttaattgcattttttgggaaattttccaaaaa

SEQ ID NO: 38669 - DNA, 1131 bp, Heterodera glycines
acctaaatttcctcctttttaatgtctcatttcgccaaataaatttttgggaaatttttatgcgcttatttgttaatccttttaattttgccagccatgttgttgttgctgtttttatggtcttgacaaaaatgcaatttttgttttcaagggggtttacgagttttctcacaggaaaaataaaaatagagtagcttactctgcgcctaaatttttcatacaaaaacaaaaaattgtgtctcatctttattgacattccgtttatttttattttttcgtttttatttgattttttcacaattttttcttgtaaaacaaaattgatcctctaaattttttgctaaaaattgaaaattttgaatgctttttgaataccaaaaatttttgctgtggacgaaaaatgcataaaaatgctgaattttctgtgccataaaaatgcaaatttatttagcattttgctcgataaataaaggaaattaaatatgcacgatttgctatgtgttttttgcctgccgtcccttcccagtttttttacatatcagccaaagctaacgctttttttctgccaatttccgacttttcggctcggaattccgattggcgaaatttaggaataggtcggaatgccgattttcaacatttttagccgtcggaattccgatttccggaattttttgacggcatccgcacatatccctggtatacctatatatacattgaatatttcagaaaattttccagtcaaattcaattaattttggcccaatctttgaagacaaagcttttcatgcggcggagattcgtccttgaaaggcaaccggggtgtccttgaaaattggattttgtgataaattaacccaaatgtacaattgatgttgattcaatcaattaattttttcaatattttgctttgactctgattttatggaatttcttcaaaaaaaacatactctgccgtgattttcaaatattgaaattattggtattttgcgggttttctttcatcccttatcccctcggcctgtaaatgaatgtgattgatagggcttaaagaccgaaaaaattcccgaaaatttttttttttagcaaaaatgttctcgagagtattgaatatatttaaatttcttaaaa

SEQ ID NO: 38670 - DNA, 738 bp, Heterodera glycines
  unsure (1)..(738): unsure at all n locations
cgttntggggtactcaaacatttantggggagcaaaaatctttcggagaattaaagtacagactatagggaagctattcccttaggattcggtctccccataaatctgggcgcatcggttcagggggactgccccgaaaacccaaaaaaaaattttttggataaaaattatttaaatgaactgactagataatatttaaaataggttatttctcttcctttcagtatccctgcaaagtttggtgcgcttctgatcagtttctgaaaaaaaagttaagcctaaactttttggcctgtttaaaaaggaattaaaaatttttaaaaattttattcatctccctttttgatagaaaaagcatcagagtgcctaaactaacatgtaaataaaatttggtgcgtttcagaaccctttctgaaaaaatatttaagaattaattttgcaaaaaataaataaaaacgaaagactcagattttcgaaaatttttttgagccagctagctcggcgctcatttcagtgtaagttagtcctttaccggggagtatccctgcaaagtttgttacgcttctgctcaattagcaaaaaatatgagtgatcgaattttcactaaaaaagttaagcctacattttttggcatatttaaaaagcaattaaaaaatttttaaaatttaataattttcctgcaccgaaggtactcactcggcctcttcgcggccttcgtggtgggccttcccccccccc

SEQ ID NO: 38671 - DNA, 1281 bp, Heterodera glycines
  unsure (1)..(1281): unsure at all n locations
ctatagtagtaactcaattttatgtagagctataatctacactaggtttctactaattataagttaatttttaagatgcttaaaaaaatctttaacatcagncggactgatcagattacttactccttggaggtgatcgtgacaccccaaaatacactgaaaatcaggaaatttcgagaaaaattctaaggggttggaaaatttttctggaaaattgagtaggcatatcagaaaaaggacagaattctctacaatatacaaaagaccgaaagtctctacgactaatatccgcatagagtcatagggtgtcaacattgcgtgctttaaatagatcaatttttctatcattttcccttgaaatacggtagaaatctgtcattgttgaattgtcctatatatcacaaactgttcctctgttaacccttcatttaaaagtctattcggtagagaattttgtcaactctgataggcccactcactttttcggaagtttttccagtttcaactaattttaggggtgatgaaggagtgatctgaccaagttagtgttaaaaacttttgattagctttaaaagttagctttcgccgcaaattagattcaaatagtggttgtaaatatatgactaggattatggtaacaaaaataaaattttggagtgatttgggaaataatggcgccatttgtgctgttttgtgtatcactttgagtgccgtttgaagaagcattttgtgccgtaggagaaaaatgccttggggaaaagcaaatttcaaatggtttaatttgataggaaataaatcccgagtcgagagaaccactaattagttggtgccaatttgtacgtacttatcgcctaactgtaattgttggcatccgccgcaccccgcgcaaccacaaccgccgcaacattcgcatccgccgttgcattgcgcaacaacgcgtggcatcgatgggaaaagcaacgccggcaaaaacaaaggcaaaagaacggcgagaggcagcgtggaaagcagctgctgatggaatggggaaagtgccaacattttgcagagagatgagagacaaagtgcaggagaagagaagtgacggagaatggcaaaggcagaggcaatcgctgctgatcaaaatgacgatcaaaacggacaatttaggcccaatgtttcctaattacctaaaaatcgctttggggaagagaacccgtcgcgtgaccgggcataatgctgctgttcttcagtttctgcttatggttgtcctcccattgtttgcttggtttttaatccggt

SEQ ID NO: 38672 - DNA, 1233 bp, Heterodera glycines
  unsure (1)..(1233): unsure at all n locations
gcacattttgggtaaaaaataataaaaataaaaataattaattaaaatntaagtgaaattgaatacagtaggacagattttgatgaaaaactggagagattgtggaaattatttgggggaattctgtccaatgcgacggagggatttttggacaatgaaaaaagcgaaaatgaggcgaatttggcgaaggcattggccgatttgagcggttatttggagagggaatttggcaaaattggcgaaagtgccaaaaattacactgtcaattttacagtgaccacaattaacagctttttactgttttgcttaaatgaaaataatttggaaaaagtgcaaaaaatggcgcaaaaccggcaaattttgaaggaaattttccaagaagtaggggaagggattgaaaattttgaaagaattttcggacgcttttggcagtggctagaagagaaagcggccgcggaaaatactgggggtaattaattaattactatttattaattgattttataaattgagttgaacgaaacagtttaaattttacatttaaaaatttctctttttctcaatttttatgcttttttgtcatttgatacattttgccatttttaaaataaataatttaaataaataatttttatatattctttttaattagaaaatgacagcaaaaaaataccaatagaatttgtaattgaacaaaaagccaaagagaaaaaattagaaaatgcaaaaattataaaaacttacgaacaatgcccaagggcaaaaatgggaatcgaagaaacaattaaaatggacagaatagaaatagtgaaaggtgagaagagaaacgaacgatgggaataacaaaagcaaaagcaaacattaaaataatttaattaatttgaaaaaataaaaaataaattaaaataattaatattattttctttctcacaataagatttggctgcgtatgaattgaccattggatacagccgaatattaacttccgacgatgaattgtaagtttaaaatttaaaaggatggtcagggaatggccaaaagaaaaataaatcaaaagacaaaaaattaaaattgaatttaaatctgaagaatatgagtgttttggggtctcgagacagaaaatgactcataattaagcgaatgaataggaaaaagcaaagccaaaataatcatttctcattttcgatagaaacattaaaaaagtgatggccattntaatatttatttgcttaa

SEQ ID NO: 38673 - DNA, 1214 bp, Heterodera glycines
  unsure (1)..(1214): unsure at all n locations
caaaaatcacgcgcatcncatgctgagacccnttctgtgataaatgaaataacgaatattttaaaatgatccgaccagaaaacatgtaaagaactcgatcattatcgacaatgaacactttggcatcgatgtgattgttgtggaagttcgacagccataacgaagaaattttgtcggtgaagtctttgcttgttttacccgcagatttttgatccttcaccgacacaaacatcatcacagtttgaccacttttcgttaattttaataactcatccggagaatcagtcttcatgaaatttacgtcttatttattaaatccaaagattatattgtaagaattactctttgctgaagcgattcgaggtcaatttggggcctttttcgttggcagggaggtttctcatcttctgggagttcgtcttcatcattttcttcccattgatcatataatttttcgatgtcagcgtccgtataatcgcgaatgtctttgtgtttatttggacaaatatattttgttgatgacaaaattaaaaatagaaaaacgaatggcttcaacattattaagaccaaaaaatacaaaaatttaattattttaattttgtcatattttatttaatatttttttaaatttcccttgttattttttattacattctttgattcattgttttcgaatatttgcagacattgcaaattaaaataaggaaaaggctaatatgacgaacccctctactcactccaatgaaatcgacacaacaattagcagaaacaacaatgattttgtagtggatgattgcttcgcggacgacgatttgcttacaccgacagagggtcttttacaattagtcttaatgacggaatttacttttacaattttcatttttaaattaagctgatggttctttttccttcaaaaatattccttctactgaaatgacaaaatcatttcttgagagggacaattttgagagcgaattgggtgcaacgcagcaggatgacccttttggcgaggatttttgcgatatttcaagtaacgaaataattgacgtgttcgctgatggggatttggccggaaggtggtaataaaaattacaaattagaattgcaataaattttagacctgtcatcgtattttacgctcatcgattgccttctaataaaaatttccaccattacaaatttcttcggtttggttttacactgtatttttaaca

SEQ ID NO: 38674 - DNA, 905 bp, Heterodera glycines
ttagcataaaattaacgacacataaagtgttggccccagtgccgtacagaggctgcaaaggcgagcataatacttccttgcttttatatttccgcacgagttcttagaaaagagccagaattagcataaaattaacgacacataaagtgttggccccagtgccgtacagaggctgcaaaggcgagcataatacttccttgcttttatatttccgcacgggttcttagaaaagagccagaattagcataaaattaacgacacataaagtgttggccccagtgccgtacagaggctgcaaaggcgtgcagaagacttccttgcttttattttccgcacgggttcttagaaaagagccagaattagcataaaattaacgacacataaagtgttggccccagtgccgtacagaggctgcaaaggcgagcataatacttccttgcttttatatttccgcacgggttcttagaaaagagccagaattagcataaaattaacgacacataaagtgttggccccagtgccgtacagaggcttcaatggcgagcagaagacttccttgcttttatatttccgcacgggttcttagaaaagagccagaattagcataaaattaacgacacataaagtgttggccccagtgccgtacagaggctgcaaaggcgagcacaatacttccttgcttttatatttccgcacgggttcttagaaaagagccagaattagcataaaattaacgacacataaagtgttggccccagtgccgtacagaggcttcaatggcgagcagaagacttccttgcttttatatttccgcacgggttcttagaaaagagccagaattagcataaaattaacgacacataaagggttggccccagtgccgtacagaggcttctatggcgagc

SEQ ID NO: 38675 - DNA, 1429 bp, Heterodera glycines
cttctaaatttgaggatttgtttctcgtactgtgtcttcttgggtttggatggaattcgatatattgttgatctgattaaaatgtctttctacgtctctcccggcgcgttctgcggccctctttgcgacatcaatttttgaatctttggtatcttcagccttggcttctctctttccacgttgttttttgattttgtaatgatgtgtgaatgcctcattaattttatttcccaggcccccggcggttttaaaattcatgtccggtaaataaacttgagtagggacacagatgtcgttttcccatactttaataaactcttgaccgtttataccgagtgcggtgaatgagtaggggtaaataattgatgagagagctactgaccaatttgtgcccaattccaaagtctcggggagtcgaactgtgaattttgacgtagtgttctcctgccctgatgtgttcgaaggtagtacaatgtaaaaatcatccatctgttttcactaattcctggttataaaatatgccttttattaaatttccttccaaatcttcgatcctgtatgaatcgggtgtcgtcgaattggcaacaacgattttaaacaattcttcggtaaagtttgggaggtatccctttgaaaattttcccttttccttggtaattcgaacgatatcgccaattttaaatttgttctttttcgaaattttaaattccttctccttatataatttttcccagagcgcacgggcattttcaaaattaattgaagacggtttggctcccagtgttctattcacactgttgttaatgtttgttattattttgtctattacgtcgacccatcgaagagtgtctttctttgtaaaatatctgtacaagcgctcctttattgtccgatttgccctttcaacgactccggcgtgcagatcaggactatacattacatttttgatgatgaatttttcctcaaaatattttttcatttttcctgcttggaattcaagcccactgtcactatatattttcatcgggataattttagacttttcgaacacatgatcaaaagcttcgatcatgtcctcactcttctttgacttggccggtgcactgaagatcattcgactcagcacgtcgatgcagaccaataaatatttataaccgtcgttatgctttttcaactggtcaaatatgcacaaatcgcactgccaatcggtatggaagccgctcggtaccgtctttagtctcaggaatcttttcctgatgggcttgtgaatcgtgtatgttttctgcttttctaggaatttattaacctcatcggtcgtaatttccgggtcaatcttttttggcctcatttaaaaattttttgaattccagcaaaaactttgccggggattttaaattaaaaaaaattttttggaaaaaattttctctac

SEQ ID NO: 38676 - DNA, 972 bp, Heterodera glycines
  unsure (1)..(972): unsure at all n locations
tataaataaatttttgtttaaagaattaaataataaggnaaaaataatttaaattgagttttatttttaatttagttccaagaaactttttgtaagttgaatttgaaaagaacaggagagctcccttttctctctttcaatttaaacttatttaagtatttattttatttttaaatattttaaatataaataattgctaggttaattcgtgagttattcaagactataataatagttaatagtcatttacataacttctcaaaaaatatttaaataaatttaattgtccgtaattttttatttaagtaaaaaaaattgcttcaatgttagtgaatattcattttttaattttttgactaattgaatatttactttataaattaatataaaagtaataataaaatttaaaaaataaaaaataaaataaaatcagtaacaattaagttattcatatttgttatttagagaagttaatcatttttaatcattgattttgtagcttttagatgcttttggtctttatcatttaaaataatcctatcaattagaataaatatctcatacttttaatgaaaattcttaaattcaaataaaattattaattttctcgtttgatgataaatatgcgtattataatattattcaaggcttcacttttaaaattaaaatattttctttcaatctcaacattttcttttttatatttattttttatttagatatttcttcatttgaatttcaaaataacattcttaaaataaaaacaaacaaattattttcctcgttaatttaaaaattattgacggcgattaaaaatttttatgaggttaattctcatgggctgcaatattctaataatataaatttaattacgactgataaaacggtcatttaaagaaaaaaacgtcaaattaaagttgaaattatcgagatagataaattttattatattgtgttgtcattagctcttta

SEQ ID NO: 38677 - DNA, 654 bp, Heterodera glycines
  unsure (1)..(654): unsure at all n locations
tgaatttttcacaatttatttaaaaaagccaaaaaacctcacaggggttnnaaaaangaaaanagggnanaaaaagaagcgcctcacggtggggcttaaaagtattgtacatcataattaaaagcgaaaaataattttttcgtatattttttcacaatttatttcaaaagacaacaaaaaattgataaaatgttgaaacgaaatagtgcacaaaaagggagggatggttagacgaaaagaggaatttttaggatgggacgcaccccatctgatattcacccttttctgctccataagaggtcagaggcgactgtgttcattgacgcgtagttgtccaattaaggtacttggactttccacagtaaaatgtggtgcaaattttggaactgtcccgcctcacggcggggcttaaaagcatttgtagcgcaataaaaaagtttattgttttgaatttttcacaaatttatttaaaaaagccaaaaaattgggatgaaattttaaaaaagaaaatagtgtataaaaaggaggtgttttanggtggggtttaaaagtattgtagatgataattaaaagngaaaataatttttgtatattttttaanaatttatttgaaaagagaanaaaaaattgataaaatgttgaaatgaaatagtg

SEQ ID NO: 38678 - DNA, 1179 bp, Heterodera glycines
ctccaatatttaactaggctgttgctcatccagtctcacctgagcagcaacagttacaagtcttcctgcacaacttgtgtctcaagtagtcaccagcagcattactcaaccgtcacagaaacgaaaacagtataaaattctgaaatttttttgaattaaaaaatgattatatttaattgaaggtgtaccctgtgaagacgtactcatggtgcacgggtactgcttgcggtgctcaggcaagagaccacacatttaattaattagtttcttcaaataattgtaaacggatttaaccgatggattaattaattaattaaagtattttctaaagcaattaatgaaggaaattccaaaaatcaatagggtatatcgtttttatcatattcagcccaatatattaattaagatttaatcttttccagccaaacacagtatttttttggttattagactccattagatttgaagacgcccacccatttgcgaggggttgaacaatagaagacccggacctaataataaaaaaaatcatgcattacttactgtacgatagtacaaaaatggtgcaatttgtgatactgtatttgtccattttcatacggcaaaaaatcgttaggctcaacccgttcaacccgttgccccggcagcaagtggtggtggcaccagtattagcaccggcagttcgtgcagcagcggaacatgcggacaacaaaaacaacaggttggatagaaattatattaatcataaatttaaaaaaaaaattggcattatgcaaaaaacaggttcaacctgttgcccctgtccaaccggctgccccggctagcaccagctcgtgcagtggtggcagttcatgcggtgccacggcacaagaggtgttcaaattcgctttgccaacaaaaaaaaattggttttccagagttatttttaaaaatacagcttcatgggggaaaaccaaaacattttaaacaaatttattaacaattaaaaatgtcaaaatcggaattccgtgccatccatgttgcatgggtgtgccatttgggcacatttcaagataaacattttatttatttcgctaattacttccttagccaattgcacgtcgaccagctcagtctcatcacgagaatgtctgagcaaagggagcaacaaattttgaaatgggccgcttgtttttgctt

SEQ ID NO: 38679 - DNA, 1076 bp, Heterodera glycines
acaaaattacaaaaatgcctttttcgattgcccccctcccccattatttgcctctttccccttccaattaatccttgcaacttttgttcactttttagcgtttgtccttcaacgatgcctaaattggcactttcgtctcccctttaattgcttccgttcgtcgcaatttttcccttataaaaattcaattaaaaattgtcccttttaattcattggtcggcttccaaaaggattaataaaattcacttcccgcgcaattttttacgaccttttcctttgtctttgtcttctatgtgattcgttgttcacttctcttacatttttttgttggctcatttttctgccatttctccgatcggccggcccatctcccccccccccccctccgtcgatcaatgcgatcgttttaaatcactccgtccgatcggccaactgttggtccaattaagtgaaaaaacattttatttcctttgctaaccgactaatgctttcatttccttcacttttcatctgttggccgattggagcaaaatgggaccattggtcaaaaaaagaggggagagaataaacaaaaaatcatggccaaaaagaaagggggggggggggcatgggggagggaggattaattgtgttgaaaaaggattttgacgacagaaagaggcgcatattttgaggcaaagtgataattaaaatatacatttgttttccctaaaatacttacattaaacattttaattaattaaaaaaaagctaagaataacaaaatttaactttaaaattgacagtgatatttttccacaaaaaaagaagttttcatttaaaggttattatcccattcttctgctcactacgccaattcgctgtgttttctattccggccgagataagaatcttcttccatttctccgcatcatattggtccgaccatttctcttccccccccccgccccttttgttgtgtcattccattcccgcaatttgcatcctctggcaattgattgaattgaattgtatcctaaaatcgagaataataccatttcagacaacggaatgacttcacacctttatcatgcttt

SEQ ID NO: 38680 - DNA, 971 bp, Heterodera glycines
cttattagattttgcaggcttattgctgcatgttctttgacacttcttcaaaataacctatgccctttattcgttcaaaacagcatctttgttgtttcgctttggattgacaagcccgatgataaatagctcgagcgcaaaacgcgtgcatgtttggaaagtatcgttcataccaataattgagtgtttatttttaaatgaaattttatgataaaccttattatctcagaagctatttaattgattcgaatgtttttatcgcggttaattagagcaccgaaaactggtttgaatcgtgaagtttatcatttctaactcacttctcaaaattgttgataaattgcaaataaatttttccaaaagtctgtagacactttctgaaaataaattctatactcatgtattttccacttattagattttgcaggcttattgctgcatgttctttgacacttcttcaaaataacctatgccctttattcgttcaaaacagcatctttgttgtttcgctttggattgacaagcccgatgataaatagctcgagcgcaaaacgcgtgcatgtttggaaagtatcgttcataccaataattgagtgtttatttttaaatgaaattttatgataaaccttattatctcagaagctatttaattgattcggatgtttttatcgcggttaattagagcaccgaaaactggtttgaatcgtgaagtttatcatttctaactcacttctcaaaattgttgataaattgcaaatatatttttccaaaagtctgttgacactttttgaaaataaattctatactcatgtattttccacttattagattttgcaggcttattgctgcatgttctttgacacttcttcaaaataacctatgccctttattcgttcaaaacagcatctttgttgtttcgctttggattgaaagcccgatgataaatagctcgagcgcaaaacgcgtgcatg

SEQ ID NO: 38681 - DNA, 1220 bp, Heterodera glycines
  unsure (1)..(1220): unsure at all n locations
aggaacanngacgcaggtacaaattggtcctcaaataatttatggtaatcaaactcaaattttgttgttttaaacaaatgggggccaaaaacattaacaatttatatggaatttttttttaaaatatggataaaacccatataaaactttcggtacttgttaagtttacagggccaattctacatacatttttagaagccaataaattattcattttacattgtttttttaagcatggaaattttaaaagaatttaatattcatgatttatttactcttctgcaaaaatcagacgctgaatttgaagaatggctccgagaatgcaaattacttcacacaaaaagaatttgtgaatgcgggaaagacatgcaactatattacaacaaaaaagaagctaaatgtcctctatggcagtgcaattctcgaaaaaccatggaggaaaaaggaaaccagggatgcggtcgaaaatttttcaaaatcagaacatcgggctcaaaaaatcagattttggggtcaaaaatcagaacatttttattttatcagatttggaccctcaaatcagaacatttctgataaatcagaacagatcgcatccctgctgtaaacttaacaagtaccaaactttcaattcaatttttttttaatatactaaatttgccaaattaaatttttatttaaaacttggttaattttttaattttaaattttataaagcgacccttagggtgatttatttgttgagtaaattttgtataaaagtgtaaaaagaaagtcaaaaaaaatggcgacatggactttttcccgaaatccaaaaactatgaattggtaattagttaagaatgttccccacctttttgtgaaaaaaattttcaaattttttttttcgagaaaatggcgtttttagggttttcagggtcgaggaatccgattctgacactcaattcgacccattccgaactctcgaacccggattcgaacaaaaatcgaaaattcgatttttcaaaaaattaccatttactcaacaaaatcgaatgaatgtgtgaatgaatcaattattggcacggataaaattgggaaacatgcaacctaaaaattataaaacacattttcacgttcccgcgaatcgaactcattgtcttctagcgccaacttttcatgcaattttttaatattgaaattttgaagctcttcacaatgcatgcctatactacacataataa

SEQ ID NO: 38682 - DNA, 906 bp, Heterodera glycines
ccaactcgtactggtaccccgactcgtactaatttttctcaactcgtactgccccaactcgtaatggtaccccgactcgtactaagtttcccaactcgtactggtaccccgactcgtactaagtttcccaactcgtactgccccaactcgtactggtaccccgactcgtactaagtttcccaactcgtactggtaccccgactcgtactaagtttcccaactcgtactggtaccccgactcgtactaatttttcccaactcgtactgccccaactcgtaatggtaccccgacccgtactaagtttcccaactcgtactgccccaactcgtactggtaacccgactcgtactaagtttcccaactcgtactggtaccccgactcgtactaagtttcccaactcgtactggtaccccgactcgtactaatttttcccaactcgtactgccccaactcgtaatggtaccccgacccgtactaagtttcccaactcgtactgccccaactcgtactggtaacccgactcgtactaagtttcccaactcgtactgccccaactcgtactggtaccccgaatcgtactaagtttcccaactcgtactggtaccccgactcgtactaatttttcccaactcgtactgccccaactcgtaatggtaccccgactcgtactaagtttcccaactcgtactgataccccgactcgtactaagtttcccaactcgtactgccccaactcgtactggtaccccgactcgtactaagtttcccaactcgtaatggtaccccgactcgtactaagtttcccaactcgtactggtaccccgactcgtactaagtttcccaactcgtactgccccaactcgtactggtaccccgaatcgtactaagtttcccaactcgtact

SEQ ID NO: 38683 - DNA, 924 bp, Heterodera glycines
  unsure (1)..(924): unsure at all n locations
tttcgagaaaagctgaaaaattttgcacttgcatctgaagcagactcaaattcttcaacacacaatataaaaatattacgcaagaacttatttttacatcctttttagaaatgctacataaatttttattgtaaatagttacaaacaaactttttttcacttccaatttctaccagttgccaaacaaaaaggcgatagttaagcattgagatataaaaaaatcgtctagaataattatctcaacaatttgtcgggaaagctgaataaatttctgttgcaataggcatattggcacaagacataaatgtagagcaggcacaaaatagaggaaataccaaagattaaaaaattcttgtttatgccccactctgctttggctggccatacctcgccagagagtggagatagaccctttgttgatacatttggaaatgtcgagcccgcatagcgcattcgaataacacaaaatttgtttgtatttgccaccaaacaatccgcttatgacgcgccgaataaaaattcacaaaaatttggcaccggaaaaactgcattttttcatgggccagcataataaagtaaacccaaaatgtaaggaaatttaaattggtcatgagagatgtttagttttttatttgtcccatcctttttctgggaaaaaacttttcgagaaaagctgaaaaattttccacttgcatcagaaccagactcaaattcttcaacacacaatataaaaatattacgcaagaacttatttttacatcctttttagaaatgctacataaatttttattgtaaatagttacaaacaaactttttttcactgccaatttttaccagttgccaaacaaaaaggcgataattaagcattgagatataaaaaaatcgtctagaataattatctncacaatttgtcgggaaagctga

SEQ ID NO: 38684 - DNA, 1020 bp, Heterodera glycines
  unsure (1)..(1020): unsure at all n locations
atcactgatgaaaagctgatgcaatgcgcgaattggtgtgctttcattatggaccaaaattgctccatttggcgcttgagtaaaaaaataataatattaaaaacctaaaaatcgcattcttaattatgaaacaaagtttttagtccatattcggacatttccgggctttttagtcagtattttgggcttttttattccatataatttacaaccctaatgatcaattaattctgagctgggatgatcacatggtcatcaagatcaagatgctgctgctgctgctaatttgatgataacaaaatgaaggaacactggtgatcaaaaaaacaaaaagcacaaagcctgttcaatttcccatatttgttttttttaatttgcttcgccaaccgccgccgtcgccgccgcaatttttgcgataatccgccgccggcgccgcgccacacacgcggaagtaaaaagcgtttaacacaaacgcatatgttgtgtgtgtgtgatgcgcagttaatatgtatatactattaaatcaacgcgctaattagccattcattaattgaaaaaaataataattatggaatgcggcggcgaaaacagttagaaaaaggggtaatttttggcgcgtcaggaccagtcagcttgggataagtcagttgatggatagataactaagccttacgataaattacaaaaattacaaaaataattaaataaataaaacattttaccattttttaacagattttcattaaaaatagtaattttatgatttctgggaaaatttagcaattttttttttcaaaattgaatgaggggggaggtcttggacgtgcggtgctaataaggaaaatcgaaaacagtttcaacagcatttttcccttaaaattacgctgcccgcgcacgccgtgaatttttcttttttgttggcaaataaaatcattttggcttaattaatacctaattaaattaattcatccattctttnaatatcatacacacagtttataaaaaatggtgctgctgcat

SEQ ID NO: 38685 - DNA, 969 bp, Heterodera glycines
aaataattaataatttccttaattaattcgttttccctttcttctcctccctttttacgcgtcattttccgtttgttttttacattacaaaatcaaattgttctttccctttgaatctttgatcgtttgtccgatcatttggccatatgttttccattttttgcttgcctttatttccctccattttccttttctttttcagaccatccaacaagaattgatggacacaaatggccaactccaacttcttcaattatccgctgaagaattgtgcacaaatttgccgccgtctctgtgtgatcagcgaattggtgacgatgtgctggacgagttaaatcggcaattgaatgaaatcgaatcgcgcgttcattccgcgctgatttttgcactccgagaccaaaaagcggaaaggggagaaagtgcggcaaaacggggcagggagggggtgggcggcagaagggttgaaacaggacgagaaaaataccgggattcgggttcaggatgccaaattcggtcggaatttgggattcggacgagaaaaaaggccgggattcaggcagcaaccctggagggcaggggacgaggaggggtgggattttgatggaaggaagcccaagggaaggcacaggcgtaaaataaagggaaattttaatggtcgccaaatattctgaataaacatgattcagaatcagttatcaaaaaatttgttattacatttgtctttgaagatgagaattccatgtgatttatgactaattccccccaaaggcgaacgacggacagacgaagaaacaccggcggagatagcaaaagggaacgacggagagggcaatttgttggcattggacgcgtacggaacggaggacgaaaagggcaaagggacggagcagcaaaaggagggagaggaggaggaggaactgttgatgagcacattcagcacgagggtgacaatgcaaagtcggcctttgc

SEQ ID NO: 38686 - DNA, 1257 bp, Heterodera glycines
  unsure (1)..(1257): unsure at all n locations
tccaaaaaaaaaaataattggaaaaaaatttatctgctcagaatcacctgatctcgagccttggcaacttcatcttccttattttgtttctttggattgccatcctttgcttttgccgacgagatactaattgttgcattcagttcaaatggtctggaagtataaatttggcaaattttaaaaatttgcactaatttaaagaaaatttatttaattctaaaaatcgatattttaaacaaaatttgtcaaaatatttataaattttctgcaaattttgaatggatttccttaggtttcaaaaactgtgaaaaataaaaatttttttaaaagataaattcgatagtcctaaatgttttatttttcctggaagttttcaatgaatttcattagtttcaaaaaagatatgaaaaatttttttttcgaaaaatagcctttttagaacttgacgaatttttttgcgaattattacttacgaataaagaattcttcaaataccgaaaaatactaaaaatattaatatttgattgcataattttccccaaccgcgaaccccccgacatttcaatcacagaattgtcgggtgattgatatcaaattaaagcgaatataaaaataatattttttacgtcggcgtgacggatgcttcaacgtccggcacaggtgtcacatgaacaaaaccgacccgttgcccacccggacatcggctaatcgaattgcccacttcctacaaaaaattgttacaaaaaattattaattaaaaaaagattttaatttggacctgaataaattggtcaatacgggcatttgtgtacaaattgttctcgctgccggtgtactcgcgaagctcttcgactgagtacttctcggacaatgtcacagcataaaccttaaatttaattaaaaatttataaagtttttattataataaatattaaaacaaaataattaagcgatttatattttgcataaaaaagtcacaaaaaggcataaattccctaatattcctttatctttttatgatagactaaatttcctttatggtaagcacaaccacttctttttttttggaggccgggcttgttctattagaggaattgaaaatcataaaattatgtacataaaagattcaaaaatatgtgctgcatataatatgtaaattgatccataaaacttgttaaattgggttattaccatcattatctattagagatcatgtgataagtagccanaaaaataccgaaattcatgaaattctgc

SEQ ID NO: 38687 - DNA, 983 bp, Heterodera glycines
  unsure (1)..(983): unsure at all n locations
tagcaaagagatggtgatcattatagtttcgaaaattggatacggtacatgcagtggattggtagctcaagaaagctacagtattgnaaaatatttggaaaattcgtttttctttttcggaaccnaaaagttttcgaaagtttgctggcaaantatagaancgattnaggattatcgaantgatattaaattcanttcaattagggncaactatgangctatattccaaaaactgggnnctgggcccagtttgagggtgccccagtttggaccccccccccccccccccattcgactcatttccgggaaaaactcaaaaatagagggtcagtcattaatttttgcatgaatttttcagttatagctaagaatttcgaaattcccgacgacacggcacttcgcaattggcttgcgcaccacaacattgacgagtatggcattgtgcagttccgggcccaggtgcatgccgtgtatttggagctggtcggcacggggaacgacgaattgatcattgaggcggcggaatgtacgtttatctgttgcgggaatagagcatgggataagcggggatttccgtgtttgtccttcattgacggattgtccttcatgaaggattgtccaatgtaattcattgacggtttgtccagtgaaggattgtcattcattgaatgtccaatatcctcatacggattgtccagtgaatgactgtcctccattgacggattgcctagtgatggattgtccttcactgaaggattttcaaacgaccgatagttgaccgattgaccgtgctcatttgtcagagaatcgtcttttgaatttttttaaaatttataattcataaaatgtttagattttcgttcaattgaagacttgatttcgcgtaattaccactgaacatgccaatggatcatcggggaaagcgagaatttaaaaatgaatcattattttccatgttgaaacgcagttgcatgaatttcttt

SEQ ID NO: 38688 - DNA, 1049 bp, Heterodera glycines
aggcgaagaaattcaacgaaatttttattaggattttgactttaatgttgagaggtttaacaaatttgtacactgaatgttggatcgtcaacaccaatgagaaatgactaacagaaaagagggagaaaagggcgttggcttaggaaaatagcttataataaaggagagacgagcagacgatgagtgagagaaaaatagtggtaaaaatggtcaactgctgcattggcagagtcagagaggggtcacaaagagttcgcacagcatcgaatatttccttcattttgggcgtcattcttccccactgcacttctttcttcggtttaattacccaagtttgaggtacttggcgtgtcctgcccataatatctgtggcatggaataaattttggaactgcgctgcctaacggcggtgcttaaagtgcgctaaaaatgatcaaatgattatcaatttttatttttcttaattccaaaatgaattcgaaacgcaaaaatttaatcataattcatgtggtaaaaaatgcatttaaaaataaaaaaaattattgaatttgcttctgaattttttaattttaaatagaaaattactttttcgaaaattttgcacaaataagaggcgaagaaattcaacgaaatttttattaggattttgatttaaaatgttgagaggtttaacaaatttgtacactgaatgttggatcgtcaacaccaatgagaaatgactaacagaaaagagggagaaaagggcgttgttggctttggaaaaatagcttataataaaggagagacgagcagacgatgagtgagagaaaatagtggtaaaaatggtcaactgctgcattggcagagtcagagaggggtcacaaagagttcgcacagcatcgaatatttccttcattttaggcgtcattcttccccactgcacttctttcttcggtttaattacccaagtttgaggtacttggcgtgtcctgcccataatatctgtggcatggaataaattttggaacagagaggcctaacggcggtgcttaaagtgcgctaaaaatgat

SEQ ID NO: 38689 - DNA, 1451 bp, Heterodera glycines
  unsure (1)..(1451): unsure at all n locations
tcctcctcgttgggcagtgccggcgggtccagcgagtacaccatccgggaggagatcgaacggcgcgtgatcaccgtaagtgaacggtgggaatgggctgacgtccctatcgacaattgcacactctgtgccgatcggtttggtgccgagcggctgtaaactttttagtgtactttagaaatggccacgcctcaaattgaactcattctaatcatgggcttagacccgatcagatcacttgtctgatcagagttatttctttacggacaacacacaaatttttttttgtctaatcttagcgaatcactgatcagttttggttttgtcagacaggtcaaagaacacttgctcaatttaaatcacactcactgatccgtggctaaagcacgtgccgcaggattttagtattaactcagaaaacgaattaaggacgtcactcgtacggaagagattgtgacggatgtcgacgtgcacgacgaatcgggcggtggtggcggcgccggcgggcacaccgccgctgccaccccccanccgtcagtttcagtccagcggcggcggcggtgccaaagcgagcacttccgtgaacatcaatcgaagcggcgatgtcgtcggaggcgaacgacgacgcgtagatgagcgggagcgagacgaaagtgtcgcggagtttgccaactcgcgcggcgctggcgcatggggtggcacgtcgacggcaacaaacgctggtggtggcactcaactggacgacctccatcatccccagcaccaccaacgacggcacggcggacgaaacggtgcgaacggaggcgaaaggcataaccgcgcatttgccatggtcggagaggtgggaggggaagggacctggggagaggggcaaattgcgattgggtgactgactgatcagtttttgacgcaggaggagcgatcattgggcggcgaattgtcggcggatgacttgagcatctacgacaagaacaccatggtgggtgtagcgggtggtgaacttttcattcattccacccctcccaagccatttctcctcgtatttaaaattttatttaaaaaacaatttgggaaaattttgggcttggcgttatttgttgaaagaatcattaactgaccggggattcccggctttcagtttaatctcaaaaaaacttttttctgtattactccaatacaaaaaatccgagacagttcctgaattaacccattttcattatttaaattatcgataattggctggccaagagggatcactcactactgatcagttatcatatcataaaattatcattttcagtcaaaaatggctaattgataattaattaaataattaacaacattgaccatccgtcacgctagccgcgatcattagactgatcacttgacacataaaaatgatcagaatgccttctctttcgcagatgtcgcgtcatcgcgaattccatccg

SEQ ID NO: 38690 - DNA, 885 bp, Heterodera glycines
agcggttacagaaaatagtgggaaggattaataggctaacaaataagcttcaggctttcttcagctttcgctttgattcaatcaatcactcttcaagaataaaagatattttcatttttttttaaatatgacaaattgttaaaaattttaaatttcaacactaaattttatgcacgagaaaagtttttggaaatttaaaaactttattccgatttcctagtcccaaaattattttgcgtctcggaattgcattgataatataactacaatttttttctcccctgttaacaattctttaaaataaaaattcggtcaatttgtaaaagaaaattaaatataaattgatttttcttattttaattgctttttttctgagttgattattatagtttatctttttattgtttggaaaaaaatcttaaattcggtttttatctttaatttgtactatctataaactaaagaatccgttttattgctgcttaattgtcattttgaagtccatttttgaattctctataaaaattgattaaatttcgcattaatttaaacagaatttaaaataagaattcttcccaaaaccattttccaatgttcattaattgaatgaaaaaaaaacaatttttaggctgcaaacagttcttccgccgttctgttgctaagcaaattcgcttcacttgtttcggagaccaaaaatgtcaaattaacgaaggtgagaaaattttaatttctcaattttaaaatttaataaaataatactcttaataaatgaaataaattaaatgtttcagaagggatccgatgccgcgggtgtcgcctggaaaaatgtcttatggccggcatggacccgaagatggtcaacgcggaacagaacgaagccactca

SEQ ID NO: 38691 - DNA, 1232 bp, Heterodera glycines
tattcgtaaggcagttgtagtgaatttatacgatgaaaattgaacaaaacaagacatgtaataaaaacaaaaattaaattaaaaaaaagaaacataaaaattttaaataaacatgttatatacattttaaattaattttaatttttacatttcgttaatcataattacaaaaagcataattaaaattcaatataatactttaaacaaaaggataaaatgtttttaatatttttgttattgttaaataatttataacagaaaactttttattagcgttttaatatgaattaaaatatataaattttctaatttaacactaattgaaatagagtatttatgaaaaaatgatattaaatttttatttttaaattacaatcaaaaatttatcgttaaaatgaatacatacttttatgttaaattatagtagtaaaaggaagacgagataaagaaatatttaaacagatccatttcattaatatttatattgaaatttttaacttttatttcttacagataaaagcataataaattaaggtcacgatttttgatgaaaaatatagctttatacacttttgaaaaaatactgtcaaatacaagtatatttgcaaatatttaaaataattagatttttttaaataaacatgtagaatcaaaaaatttgatttcatttaaatatataaaacataataattttaacgtaatcatttattaaaattaattcatgaaagcattatttaaatcttaagattacaataatttatagttataattataaaaataaatctcttaaaattcaaagtgagacaatatctaagatgctccgaaaatgtaggggtgaaacaattaaagattttttaaagtttgtgatttttaggccgcttcgcggcctcgaacgggcgcttcgcgcccgtttctaatttttgttgagctcggacggacgcttcgcgcccttttctaaattttaatgggctcagacgagagctttgcgcccttttctaaattttagtgagctcagacgggcgcttcgcgcccgtttttcaaattttgtttgactaagacgggcgcttcgcgcccgtttttaaaatttgttgggcgggcgcttcgcgcacgtttttcaaattttgttggactcagacgggagcttcgcgcccgtttttaaaattttgttgggcttggacgggcgcctcgcgccagtttttcaaattttattgcgctcggacggcgcttcgcgc

SEQ ID NO: 38692 - DNA, 963 bp, Heterodera glycines
  unsure (1)..(963): unsure at all n locations
tagcatcggggttacgagatagaaaattgtcctactttgagatagccatttttctgagaattaattcacaatttccgcagctcttagggtaaggaaaaaattttgaagaggctctccggaacggattagcatcggggttacgagatagaaaattgtcctaaaaagagatagccatttttctgagaattaattcacaatttccgcagctcttagggtaatagaaaaaattttgaagaggctctccggaacggattagcatcggggttacgagatagaaaattgtcctaaaaagagagccatttttctgagaattaattcacaatttccgcagctcttacggtaatggaaaaaattttgaagaggctctccggaacggattagcatcggggttacgagatagaaaattgtcctaaaaagagatagccatttttctgagaattaattcacaatttccgcagctcttagggtaatggaaaaaattttgaagaggctctccggaacggattagcatcggggttacgagatagaaaattgtcctaaaaagagagccatttttctgagaattaattcacaatttccgcagctcttacggtaatggaaaaaattttgaagaggctctccggaacggattagcatcggggttacgagatagaaaattgtcctaaaaagagatagccatttttctgagaattaattcacaatttccgcagctcttatggtaatggaaaaaattttgaagaggctctccggaacggattagcatcggggttacgagatagaaaattgtcctaaaaagagatagccatttttctgagaattaattcacaatttccgcagctcttanggtaaggaaaaaattttgaagaggctctccggaacggattagcatcggggttacgagatagaaaatgtcctanaaagagatagccatttttctgagaataatttcacatttccgcagct

SEQ ID NO: 38693 - DNA, 1288 bp, Heterodera glycines
atatttggccatttttgcgtttttagagcatatttcggttattgtttgaaaattttcataagaaaaatgcgaaaaatacaccctaaggatcgactttttggaattttttaaaaatacacccttaaaatcgaaaaaaaattaaatttttgtcagaacttttggaaaaaaatttatgtatataaaaatgtaatttgttttagcatataataaaaatttataaatttggaaattcaatatttttgcaattgtctaaaaaatgctccttagccattcgtgtgcgaggaatggcatgaaaaatgcttatgaacaaattccatgtgttttttattagaaataattttcggatgatataataacttactaacatgaattaaaaaagactaactaatagaagctatttttatatatgtaatagttaattgacagtcatttttaatttctttttaaagtttcattttttagtaagttaggaattgtcatttcttacattattaattaaaatgtattttataaatatcttatattttatggtcatgatctcaaaattgtattcaataatgaagttttttcatcttacaatgtgtacaattattatcaaactcttttcactgtcgagaatataagaattattaaaattaagaaatatattgaattataaatttttaattttgtttaatatgttaaaaactgagcaaaaattactgcacaatttttgttcgcatcatattagggctttataagaaaaagaaatatttataaaggtacaaagtttcaaaaatcatctaattttgcataaggttggaatttaaagtttgtggaaaaaattattatttttgtataccgtatatactctttttgtatgccagtctccattaatctgccggtctccaattatttacccccttctgagaaggttgaaaaataatataccagtctccatttatgtgctagggggggggataaatagaattttttaataatttatttggcaccttttccaaaaaaattaaaataaattcaacagtaaaacgggctcaaaaatgaacaattcgtcgtcatctccgactccatccagccctcatcatcgtcatcagataagccgtcttcttcgtgatcgtttcgtccatctttccccgtttcatttggccttaactttgcgaaaaaatttgatccctatcggtccaattgctcctttcggcttggagccaagcaatttttttggcctcctgttccggccaaatggccgttggcaggcccacaaacttaaaaataaaagccatttttcctg

SEQ ID NO: 38694 - DNA, 1236 bp, Heterodera glycines
  unsure (1)..(1236): unsure at all n locations
atggcattttccccttggaattttaccgttgccacccccttttaaggtttggctgaagtgatgtgtaccgcggttcgtttgtccttttcattacctctgcctatccttcgcttttccctttcgatctttgatcaattcccccgtgtccgtccccaccgtgccaaattgaccgtcgccgtatgtaccgtactctttttggccggtctgtgcatgtgcactcgagtacggtagcgcttttatgggaagcgatttcgaagtgtttgccatctttttaccgtggccttttcagtcgggcattttttatttcactattttcaacgattactcggccagcttctcgctcattttaatgcttttgctcgaaattgttctggtcatttatgtttacggtaactcatggtttactgtaacaacttttccgtcgttccttttattactgtatttccctattctctcccaaaggcgttcgaaattatttggcggaccttcggctcatgttcggcacaagtcggcatttgctcggcaaaatctttgggcccaccggctattgcattcgcttcgtttggatgtttttggccccgttccaaactttggtaagtgggcaattaccccccccccccggcaaattaataccactaattagtgccaaattgccctcccctgccaaggtgatcttcttcttcgtgttactcactcaaattggacacaatttgacctacggaaaagagaaaaggctttacgcttttccgaattgggcaattggcgttggatgggtaaaaaaaacggacaaatgaaaaaagggcatttattttgtggtcgattttggcacttttcgtcccttcttctctgcagcttatctcgtctttgccgcttcttttgcttccgctttttgtccttttcaatctttggaaattcgcgcggaaaggaaaggtaaaaaataggaaagaaaccaaaaccaacacaaaagtggcgaaaagggaaaataaaagtgccaccaattccttacaccccggagggtttcgactcgtcccaaagtccgacttttgtgtcggccattcattcgacgggcaatgcctttcccaactccgtttcccattctcttaagagttggcgtgagctgttccggctacaaccgaaatggccatcctacggccgacatagggaggaaaatgcagtnggaaagctgaaaatggacgatggcaccaccgaaagacggccctcgtgccatcacaggcc

SEQ ID NO: 38695 - DNA, 537 bp, Heterodera glycines
gggatgttgatgatgatgatgatgctttatttaagatgcctttaaacatcccatgggcaacatccatgagggatgttgatgatgatgatgatgctttatttaagatgcctttaaacatcccatgggcaacatccatgagggatgttgatgatgatgctttatttaagatgcctttaaacatcccatgggcaacatccatgagggatgttgatgatgatgctttatttaagatgcctttaaacatcccatgggcaacatccatgagggatgttgatgatgatgatgatgctttatttaagatgcctttaaacatcccatgggcaacatccatgagggatgttgatgatgatgatgatgctttatttaagatgcctttaaacatcccatgggcaacatccatgagggatgttgatgatgatgatgatgctttatttaagatgcctttaaacatcccatgggcaacatccatgagggatgttgatgatgatgatgatgctttatttaagatgcctttaaacatcccatgggcaacatcca

SEQ ID NO: 38696 - DNA, 998 bp, Heterodera glycines
  unsure (1)..(998): unsure at all n locations
aaaaacatttgaatcaattaataagttctgagataataaggtttatcataaaatttcatttaaaactaaccctcaattattggtatgaacgatactttccaaatatgcacgcgttttgcgctcgagctatttatcatcgggcttgtcaatccaaagcgaaacaacaaagatgctgttttaaacgaataaagggcataggttattttgaagaagtgtcaaagaacatgcagcaataagcctgcaaaatctaataagtggaaaatacatgagtatagaatttattttcagaaagtgtcaacagacttttggaaaaatatatttgcaatttatcaacaattttgagaagtgagttagaaatgataaacttcacgattcaaaccaattttcggtgctctaattaaccgcgataaaaacatccgaatcaattaaatagcttctgagataataaggtttatcataaaatttcatttaaaaataaaccctcaattattggtatgaacgatactttccaaacatgcacgcgttttgctttagctatttatcatcgggcttgtcaatccaaagcgaaacaacaaagatgctgttttaaacgaataaagggcataggttattttgaagaagtgtcaaagaacatgcagcaataagcctgcaaaatctaataagtggaaaatacatgagtatagaatttattttcagaaagtgtcaacagacttttggaaaatatatttgcaatttatcaacaattttgagaagtgagttagaaatgataaacttcacgattcaaaccaattttcgttgctctaattaaccgcgataaaaacatccgaatcaataaaatagcttctgagataataaggtttatcataaaatttcatttaaaaataaaccctcaattattggtatgaacgatactttccaaacatgcacgcgttttgcgctcgagctatttatcatcgggcttggtcatccnaagcgaaaacacaaagatgctgttttga

SEQ ID NO: 38697 - DNA, 903 bp, Heterodera glycines
tcttaaaacaaatggaataaaaacgaaaaaatacctctaagaattgaactttcaaacaaaaaacagttccaaatcgcactttcctataactttataaaagtatttttaattgcatttgcagtcagtaaacaatgtttgcaccgatttcattatttatttgctttcaatatgttaacagtttcaattaaacaaaaaattttgtcattgtccaattttactcgtaaatgccacgagcctattcaaacactcaaagatataattcgtcagcttttgtcttcatcagaagacgcatcccaaagctcgtccatttgttgcccaaagttggatgggccagatctttggctttcaaggagctgattaatttcttctaaaaatggaaataattcgatggcatattgcgagcatctgttataaaaattatgtagtttttgttacgaaaaagccaaaatattaactaaaaagcagaaaaagccattctcaaattgaatttttaaaaattttttaagacaaaaaagaacatttttgtatatttaatgatagcaggaatgatacgtcatgtttgagttcgggtttcgagggatatattatcaaaaatttgtgattttttttcgtgatttatttttttagtaatttttatctcttaatctcacctctttgtttgggacgatgctgaatttcagccaataaatcctggcctgaatttgcctgatcttccgcaatcagttcggccaccgtctttccacgtcccacgtgttgtggtgtcatatcataaattggcattttgccatacccctgcccaattactgtatttgttgatcttggttttaggatgctactttcgtaaacagttttaatagaattttctgttgctttttgatcttgatgataaactgaaatcaaacc

SEQ ID NO: 38698 - DNA, 1006 bp, Heterodera glycines
  unsure (1)..(1006): unsure at all n locations
ttctttaaagaatcattaatagggaacggatttttagatgctaaaaatcctgaaataggtactaaaacaggtgccaaaaaagtgcaaaataagtggtaaaaacaccaaaaataccaaaagtgctaaaaatgcccaaaatagctgcgaaaatgggtgttaaaaattggaaaaacccagtgtctttatgcatcgaaattccaaaagtgtctaatttttatcaatttcgcccgcacaattgcaactggccaagaaagtaaacaaatacattttggagacgaatttttgtgaaaatttttcatttcttggaatatttactgaaatcttggtcaatttttaggggtattttttaaaattttctgtgatcgattcttaggggtgtattttccgtttttattgcattttactatgaaattccgttcaggacgatttcaaaatcgctttctcagtacctaaaccaattgtttcacctttatttgttttattttttaaatttattctgcattattttcacggtttcagtctttattttttgcttataggtaggaatgagatttttaggcataacaatcgcagagaaggtactcaatcagcaaatggccgaagtttttgaaattttggtaattggtcgaaaagtgttagtatgttaaaaaaatttttgattggtcgatgccacgataaatttggtgaatgaataaagaaagtccaaccgaatgaaaatccgctacattagtcaacaaggtaacaaccaatcctggagacggcgcatcatacatgccacggctcccggacttttcgacagcaaaggacttttcgacagtaaaaaaaataatggactgttcaatagtanacataaaaacaaataatttttattanaataaattatattgcttgtcagttttagtaanatttatttaattaacataaaaaatgtattgctaaatcttattactagagatacgatttttacattttttactagaaaatttncgaaaacataccttaaaaa

SEQ ID NO: 38699 - DNA, 942 bp, Heterodera glycines
  unsure (1)..(942): unsure at all n locations
ttaattttatgctaattctggctcttttctaagaaccncgtgcggaaatataaaagcaaggaagtcttctgctcgccattgaagcctctgtacggcactggggccaaccctttatgtgtcgttaattttatgctaattctggctcttttctaataacccgtgcggaaatataaaagcaaggaagtattatgctcgcctttgcagcctctgtacggcactggggccaacactttatgtgtcgttaattttatgctaattctggctcttttctaagaacccgtgcggaaaataaaagcaaggaagtcttctgcacgcctttgcagcctctgtacggcactggggccaacactttatgtgtcgttaattttatgctaattctggctcttttctaagaacccgtgcggaaatataaaagcaaggaagtattatgctcgcctttgcagcctctgtacggcactggggccaacactttatgtgtcgttaattttatgctaattctggctcttttctaagaacccgtgcggaaaataaaagcaaggaagtcttctgcacgcctttgcagcctctgtacggcactggggccaacactttatgtgtcgttaattttatgctaattctggctcttttctaagaacccgtgcggaaatataaaagcaaggaagtattatgctcgcctttgcagcctctgtacggcactggggccaacactttatgtgtcgttaattttatgctaattctggctcttttctaagaactcgtgcggaaatataaaagcaaggaagtcttctgctcgcctttgcagcctctgtacggcactggggccaacactttatgtgtcgttaattttatgctaattctggctcttttctaaaaacccgtgcggaaatataaaagcaagggaagtcttctgctccccattgaagcctctgtacggcactgggg

SEQ ID NO: 38700 - DNA, 994 bp, Heterodera glycines
  unsure (1)..(994): unsure at all n locations
acaaatatttcaacaaaaatttttaaaaattgactagacctattgaacgctaacggacgacctaatggaaaaaaatccccgaaggagagaatttaattaaatccattccttcgggggaccgtgccgggtgccgcggggtaagcagtgctggttcgtttcatcacggcaccgaaccttttggctagtcagcaatcgttgcttaacttgccagatcggacgggtgcgcatgattccactgttccaagcaccccaccaaaagcaaaacgatataaccaaaatataaggaaaaattttttaaaaaattttttctccatcttcctttttgatactaaagcatcagagtgctaaaattaagttgtaaataaaatttggtgcgctttagagcactttctgaaaaaaatatttatgaaacaaaaaaatcgattttttcaagtgtccgtttggggtactcaaacatttatggggagcaaaaatccaacgcagaattaaagtacaggctatagggaagctattcccgaaggattcggtctccccataaatctgggcgcatcggttcggggggactgccccgaaaacaaaaaaatcgattttttcaagtgtccgtttggggtactcaaacaattatggggagcaaaaatccaacgcagaattaaagtacaggctatagggaagctattcccgaaggattcggtctccccataaatctgggcgcatcggttcggggggactgccccgaaaacaaaaaaatcgattttttcaagtgtccgtttggggtactcaaacaattatggggagcaaaaatccaacgcagaattaaagtacaggctatagggaagctattccggaaggattcggtctccccataaatctgggcgcatcggctcggggggactgcccccgaaacaaaaatcgattntttcagtgtccgtttggggtactcaaacaattatggggagcaaaaatccacgcagaattaaagtacaggctataggga

SEQ ID NO: 38701 - DNA, 1188 bp, Heterodera glycines
aaaatgaatcaaaattaattttttatgatatttttttaaagttgaattaattaagaatgccacaaagtcagccgagtggaatgtgaccgaaagtcaaaaatcactccgacaaattcaaattggcgcaagtcgcagattggtcatgttgagggatgatgttggcgaagcgccaaaacggaggaaaaatgacaaaaaacgtcggggacggaagaaaaacaaagtgtgaattagaaaaaaaacaattaaacgaaaactgaaacaaagagtcaaattatcgattgaaatctggtagaggtaccgtatacatacatcctgtaagagttttgacgccggttacagtaactggttttaccgttattcttttcggacatttgtcattttaccgaactgggaatttgtatttcggtacataccgtatgtatgtatcgtatgcctgaaatatagttccccccccctggggttctctatctatcaaatgcaggggggtgtattataggaaatgacggtaaataatgcaaataaatatttcagaaaaatgatggcacacaaaatcatcaaccgcttacaacagacgacattttcggcacaggagcagtgaatttgccgaaaactgaacattcccagcctgcaaaagagctgtcggaagaaacaattcttgacgaggaagtaaaaatcaataatttttaaatatttaaaattatttttcaattttaagttacccccggccccagccgatttgccaccatttgatgctttcccatcgccaccaccttcatcatccaaacgacggaacacaacaattggcacccaattaccacaattgcctgattatggaaaacgtaacttaataattattcgggattttctcgatgcccagtccccgaatccccgattttggtgccgctggagagattgattatattttcaaagtttcgagaaccgtatgcctagaaataatatccgcaccaaaaacaaggaaaatttatcgactcgagaaccgtttccgagaatcacgagctgccctagaaaattaaacatactttatttgaaaaattctcatttacctttctcgaatagtcaaaaaatttctaagtaacggaaaaattcctgtctttccaccctgacaattaggccttgcgattgtcgggaaaagatgtgattcagggttacccagtgtcgataatattg

SEQ ID NO: 38702 - DNA, 501 bp, Heterodera glycines
agatgagagggcaatgctgtagacgagttgactgatgtaaatgcctatccatgtgcagacgtagcgcgcctccatggcgctaagctgaatgaatatattaaattcaaaaattagaggacaaaaaatggatcaaaaacactaactggcacattgctatatagaaatacaatctttttcataaatattctttggcacggattgtatcataaccattttctcatctccaaaaccgtataagaaacaaaccatgaataaacgcgacgaaagaaagaaaagggtaaagaatttctgcgcaaagaaaattcgtatgattcaaataaaatttccatatgtcttgagttttacagaaccaatcggcaatctgaataaatttattaacaggaaaaattggaattaaaatctggtacttttccgacagatatgtgggaagaccacaatccttccactaatatctaccctatagcgctgccactttaattcagctacctattattgatcccc

SEQ ID NO: 38703 - DNA, 852 bp, Heterodera glycines
aaaaattgttcaaaatttcaaaaatttcaatattccccccttggtggatgaattaagtcttaaatttttacaacgctcggggtccccggcgccccgaatatgtgtcggggggtcggggggcaaaatgtcgggggtcgggaaccgtcgggggacgacatgtcgggggtcggggaataggcccaaaaatgtcggcggtcggggaccgtcgggggacgacatgtcgggggtcggggaataggcccaaaaatgtcggcggtcggggaccgttgggggacaacatgtcgggggtcggggaccgtcgggggacgacatgtcgggggtcggggaataggcccaaaaatgtcgggggtcggggaccgtcgggggacgacatgtcgggggtcggggaccgtcgggggacgacatgtcgggggtcggggaataggcccaaaaatgtcggcggtcggggtcgcgggccggggggttcggggtcggggcttcatatatttttttaaagacacaaaaaatgacaaatttataattattcaaatattatagaaatactatgaatgtaatggataaattttcttataaaattatttatgttttaaaaactggttaattcttatattttataaatcattgtattgtatttggcttggcatgttttttttaaaataaagaaaagtaaacaaaattttttccattgattttattatgtgaaaatttgatttatcgaaaatatcaaaatgtcatgaattttaactatgttctcattcgcaatccaaatctttgtaagacggtgaaaatatacttatttttaaatgcataaatgagttaaaagagggttgcatgatcagctgagttttgtaa

SEQ ID NO: 38704 - DNA, 963 bp, Heterodera glycines
agcttttgtagagctgcattgaatgctgcagtcgccgctgctgtacgcccacccgttgctgagttagggccgagagcggcatgaaaaaagacaaaaaggaggaaaatgaaacaaattcgcggctttgccctcgcgttggagaaagcaatgcgcagaataactggggagacttagggttagcgcatcaattatttttttcagaatgtgatcggggtacaaaaatacgggtccaaaagtgggtgtaactccgcttggagatgcgttagaaaagaaagaaaaatatgttcggacagcttttgaagagctgcattgaatgctgcagtcgccgctgctgtacgcccacccgttgctgagttagggtcgagagcggcatgaaaaaagacaaaaaggaggaaaatgaaacaaattcgcggctttgccctcgcgttggagaaagcaatgcgcagaataactggggagacttagggttagcgcatcaattatttttttcagaaagtgatcggggtacaaaaatacgggtccaaaagtgggtttaactccgcttggagatgcgttagaaaagaaagaaaaatatgttcggacagcttttgaagagctgcattgaatgctgcagtcgccgctgctgtacgcccacgcgttgctgagttagggtcgagagcggcatgaaaaaagacaaaaaggaggaaaatgaaacaaattcgcggctttgctctcgcgttggagaaagcaatgcgcagaataactggggagacttagggttagcgcatcaattatttttttcagaatgtgatcggggtacaaaaaatacgggtccaaaagtgggtgtaactccgcttggagatgcgttagaaaagaaagaaaaatatgttcggacagcttttgaagagctgcattgaatgctgcagtcgccgctgctgtacgcccacgcgttgctgagttagggtcgagagcggcatgaaaaaa

SEQ ID NO: 38705 - DNA, 1481 bp, Heterodera glycines
  unsure (1)..(1481): unsure at all n locations
ctcgtttagtcaatcggtgatttaattcattggaaaataaatnttgtttggtggttttgggtgtagttagccncagtaaatatcgtcactaactttgattaactaatattttcactattntaaaatcagtacgtaaaagggatctgaataaaaagtcatntaattttgtaaaataaaatacaggcagtgagtgcacatttgttttgaaattacaggcagtgagtgcgcaatttgtttgaaataggtccgagaataataaggcactgagggtgcgcgaccaagaagtgatcagattttgttaccaaggcacaaatagacagagagtgttgtgaaaattgaacagaattgtggcaattgagacaattggtcagagtgatcagacaattgatcagagagtgatcagacaattgatcagagagtggtcagtgagtttatcagtgatcagtgaattaatcagagtgatcagacaatcgatcggagtggttagacaattgatcaaaagcgatcagatatttgatcagaaagtgatcacagtaaaaaacgaaccaattgatcagagattaattagggtaaaataaattaataaatttcctaaaagttgtcaaacgagtggaaatttaaaatttctcatattgcccaaatttacgtcatttttgccggtcaataaatttgattacggaaatcaaaataaaccaccctaacacccctgagtatctgggactaagcgatcttgagcgagaaagaaggaaacttgaaggagaacgaaaaaggaaaagtaaagaaaagttaggagctaacagaaatatggctgatgatgatttagaagataaatatgtggcattaaaggcaaaagtccaagacttagaggatcgcttgtccaatcgggtcccgaattatctcccccctggagttaaagtcccaaaatatgatgccagaggcgacttttttaaatttttaaaggaattcaatgttttggcgacagcaagcaactggcacccgccggattgtgtccgattcttacctttgttcttagaaggggaggccaaagaaatttaccaaaatattccggcggacaaaaaaacaaattggagaaccctaactagtgaaatcgcggagctcactaagaaacttgacggacccatgtgggcgaggaaaatgctaaataagacaaaaatgggagtaaatggttcagttacggaattcgcgaacaaaattcgtgaattagtagagcaggcaagcccggatccacattatacagacgaagcaagagaaggtgagagcatccattactttttaaatggattaccaacaaaactaaaacggaaattgttttttatggaaaaaccggatagtttagttgaggcaattgcgcaggcaaaaaaagttatccaagtgaatgaggaaattgagaaagatgaaaaaggggatgaaatgaaacaacaaatagctgagctaacggaacaagtcaatgcaatttcgtt

SEQ ID NO: 38706 - DNA, 1512 bp, Heterodera glycines
  unsure (1)..(1512): unsure at all n locations
ttcatctccgccgactgtgggcnttgtgtgttcgatctgcttccggcttcacaacttggccttgaattgcgctgatcagccaccgttttgacttttacgtggacgaacacttcaaaactcgcaaatgggcgctgaaacctattcaaattggaaacaatgtcatcaaggaaatggaaattgtcaattcccatggaaaatcattgccaatttcgcgaaaaccgttgccaaagaaaatcatcggattcaaacggatcaacatcttgtgagatatggccaaatgaaaatttttaggcaacacttcccattcatttttcagtttcatcgacaaaaatgtcatcacttttctccgccgttttcgccaacttttcgccgtctgtccaatccatttgaccatcattacgcacaatgatcgcattatgcagttccttttgcgcaacatttggccaatgctaacgaaaacattcatggcttgcgattgtacgccgtaattttctatcgtttgcgtcaattcgtcccgtcaattctcaacgattgtccatcacttcgctttgtctctttcaattttgccgatctcttcgccgaatttccatgtgatgacagtgccgcggcatcggatggacaagcattggccaaatggctgttcactccacttcaaaacaatgtgccaaagatgctcaactgctcgttgaatacggatgatggaattttgccgtcgaatattgaaccgttcaaagcggtgctttcatttatctttggtttttcttaaccaaatttcccatattttaggcttttgcctcggcttcttcccccgccaatttcatcatttacatttcgtttgcgtcgtcttttgctgcttccgttgtgccatttgaactgaccaacgaaaagactcgggaacaattggctttgaaaagggctaacgatagcgatcattttctgttgatccgttgtccaattgcgcgagaggcgagcaaatggacaaaatgggaggaggaagcgattggctgggaaattcatgatcagtggaatcgaattagcattcaagtgtatcacaaggaggaaatcggggacgggtcagcgaatattactcaaaaattatttatgtttaaatttttaggcttctcgacgaaattcccggcccaagtgaccagcagaaatgaatgaatgaattgtggaaaaatgaccgatcaatataattttttgagttgaaaaatgaatttgttgctttttgatgtgctctcataaatgctttttttttgttataatgatcaacatggattttgttttttttaaatcattttaatttggacaccccaaaaatcacagagaaataaagcccaaaaattttgaatgttcagaggtcatcaaaactctcttactcacttctcttcacatatcatttagggtttttctaaaattctttaaatgaataaaaaaatgattaacaccgtcgaaaaatgcggtcgctacttgcaaatttgcctttttaatgaagaaaggggctcaaaaata

SEQ ID NO: 38707 - DNA, 1193 bp, Heterodera glycines
  unsure (1)..(1193): unsure at all n locations
aaactcacatttcattttcattccatttttngctgtataaaattgctactttttgagcctgttttttccattgnaataaatgtgcataaaattctgaaaacatttgcatntcatttgaaagtccattaaagaattagttaaaaaatttcgaaaaacaaataagccaatgttccatcactttaaaataaatgaaaaactatttaatattacagtcagcgggtcaaagtgaaaaatgatttataaataaatgccatagatttcataaattagcaattgaaaagtgaataatttaaatgctaggccatttattatcgccagaagagtgaggtcatccgatgttttttgtccgcatttcgcctcttacgaaaagctgtccgccctcggcgcaatcactcggcggagtgcaattcgttgccccggcatcagtgccgtgtataccccggccaatgggcatttggcggggatcagtgccgactcggcgccgcgcggactgtccacgaacagtcgcaattcggagatggcatccaggccaagctgctggcggtactgcgcttttgagggtgacgagggggcgtcacgcgcgggccgaaggcggcagtcggcggagacaaacgacggacgactcatttggcacagcatttggagcacttcggcacagtacgtccgccgagaaatcagcaccgatttgtagttgctctaaagggaaagacaattatgaacgatcatccggcactaattactaataaaattgctgatcatttatcaactcactgctgatcacattgactcagctcattactctgatcagagtcactcactgctgaccacactgatattaatcactctgctgattactcgggtcaaaacactcgcttttggtcacattgatcagtcacttactgccaattactctgatcaaaataccaagtactgatcattgggatcataaagcttactgctaatcatgatcaatatttattgttgatcactctgatcaaataatcaatgttggtcactctaattaatattcttgctagtcaatctgatcaaatactcgctgctcatcactctgaacagagccactcactgaccacagccgatcactttgactgacggcttanaactatgactattattctttttgattnnnagtgatngagctgtgttcattttgttttctcttttttgcatta

SEQ ID NO: 38708 - DNA, 1062 bp, Heterodera glycines
  unsure (1)..(1062): unsure at all n locations
cctttgttcagtttcggcaaattttcaaatactgatgcaaatccaacggngtcgacaaaaagcacggacagtccggcactcgacgctcgcgccgttcgcccgctgcgatggatgtaactctaacagaaaaggaaatgaacccggaagaacaacacatccaactctttctcacttccgtcgttttcgggcattggtaatgaacgatattttgcactccataaaagtccaggccccgggcggcgacatcggtggcgaggagaacggaatcatccgatgctgaaaggcatggaaatttaagggaaaatatatataggaaatacgacgcccttttctgaatgatttgttagtttcgaaatggttttgtctctttgttttttaattcgtctttccctctgtcccgtgtttgtttgcctttgaatttgtccacactcttcaaccgttccttttccttcatccgtccgtgcagcagtgccgtgttcggaaatgccaattttttcagcagcgaatgcattcgtcgaatggccgaaatcgaattggcaaataccaaagtgcgcccgccgtgccgcttaagcaaatacatcaaattcaaatcctgaaaatataagcaaaatgaactttttgtaatgagattgggaaatataaatgtttttgtgccttttggagtaaatcggcacaattcatgcgacattcggtccgagtctgtggcgttttctgcggtggcgtcagatcaatcactgaaagattcgcagcgccctttcgcattgacatcgaaagggcaatccgacgcacctcaaaagagagaccaaacaaattaatcaaattgaattggtttaaaatgccaaaacaaaatgcatataattatcagatcgctaataatgaataaaatgagaagatttttaacaattaaaataaataaattttaaatttctttttcttgaaattctcaaaatggccttgctccaacatccgatcaatttcatcaacaaccaaaaatcgaagtgcggacaaatccgccaaatgttcgttgccctaaaaggcattttgggactaaaataaagcgaa

SEQ ID NO: 38709 - DNA, 892 bp, Heterodera glycines
  unsure (1)..(892): unsure at all n locations
ctttatgaatttattttcactgacgaatggtccaatactgtatatatntgagcaaaatttttatttggcgaaaatatttcattttattgagaaaatgaaaggtagcgccgatgagcgcccccgggggaaaattgtgaactttggcccattttttaaaaagattttcaccaatatttttttagtttttttctttacggaataatgctttatcatagaaaaattttttggaaaaagaagcataggcctagtataaacttgtcttacctaagatcaacgtaaaccgaattcttcataggtaataaaaaaaattctaaatctatttttctcctccaaaattttttattaggacaagagggttcaagagaccaaacgctcacttacttaactggaaaatttaatgaaacgaatttaaatgtatttgtaagatcaaaaaattaaaaaaggtagctaaaactgattttgcgtaggagtctcaacattaaagtgaccgctttttttgttttttaaaacgcttttttcttcactttttctaaaaaatttttggggaacatcggagtccggtggtgccggtagggcagggtttggatcaaaatttatcaaaataagaacaccaaacaaaaaataagaatttagggttaaaaataagaacatttcgcaaaattgatttaaatcggttatttttacaatttattgttattcgattaaaaattgataacagattttcaaaaaggccaatttttgcatggcaaattttatgtcaacttttggcatcttaggggaattttgtgacacgtccgcgccgaaaatggatttacaaaattattcttaataagatgagattagtaaaataatttatcttccttttgcaattgcttttttttgttttcccacc

SEQ ID NO: 38710 - DNA, 838 bp, Heterodera glycines
gtgcttttaaggcagcgcatgcgcactttcggacactctttcccccgtctttttcgccctttcgccccctcaaaaattcccccggcgcagcctccccaaaaaatcactcaccgcaataaaaaaaaccttcaattttctttctccagccaaattttccctgtgccccttctgaccgccgtgcgacgacgacaaagtccgagcaaaatccatcatcataaaattaaacgaaaatgaaagaaaatggctcaaatgagtccaatcggcgcgaaactctgttactttttctgaaagggacgtccttcgaaaaggcatcatttgacgcaaaacccaaaaatatttttaaattattccgttcgtttttgacgattacttaaaccattaaaatgccttttattgcgtttcccaaaattcgtccgcgcgcgcttcagctgctgggcagtgggcagttcggttgatggctcatcggcaaattttttcttgtgggcgtgcttttgggcggagtcgtttataagcatcgggcgaaagcgattgggggacattcgacgggggggagacaaatctctcccttccctttccttggtcgcccaccttcgagtatccttttcccccttgtgactgtcgtcaccacttcattcgggaggggggacaagccaaatacggacgacgtattgtgacgaagatgaagcggatgacggacagacatttgggcggatggtaagggataggttcttcaaactctccccccaccgcgccccttcccgtgggcggagtaacggaaaatagaaggggacggggatgagaggtgacggcagcgatcgaagcgagggggcaaggtgga

SEQ ID NO: 38711 - DNA, 889 bp, Heterodera glycines
attcgaaaaatttgaattttcgactttttgttcgaattcgggtccagggttcggaattggacgaaatggatatcggattcgtggttagcgacctcgaaaactccaggaaacttgttttcatgtcttttgaaaacaaaaattttttttcaaaaaagggtggagggcaccagctttactattaccaaaaaaatgtgctaaaattgaaaaaatttttttgttgttgctattattaacaaaaattgtggatatacgagcaggatatttatgaaaatgctaataaaaaaataaaatttgccctccctctaaactttatgagtttttttttgaagtttttttcgggggaaaatgtcggggcggggatgaaatacacccccaaaattttacccccaagcggctgttcttgtcctgcgtccgtgccatttgctgcccccccagaaacgccttgcagttgtccaccgactgaaattaaaaggaaatgattttgggaacatcatttttccataattaacccccccccccctcaaaaccaaaaaaaaaatttttttttgaaggtgtgaattaaagtttctatgaaaaaaatctgctaaaattgaaaatcttatatattttttgctattattatgaaaagagttgttttaacaacaacaaatatcaatcttatacaccagaaaatgtacctcctccatctgtttgttccgtgccgaccactgcgggcattgtcccctccgccgtctgctgctgctgttgctaaatgagacaacgaatgtctttttgacggaaacattgattgatgtttaagagcaaaaaattggaggatgggactgaatttgtaaatacaatacccttgggactgaagaggccaaagcccagttaatcagccaaaatacaa

SEQ ID NO: 38712 - DNA, 1053 bp, Heterodera glycines
tagactcacaattggcaaaatatttcttggccaaatataaatttgtcaactgttcgatttcaggtcattttctcgaacgaaacgattcaatttgtacgtccctgacggttacgcctactattggcgtgatttgcaggaggagcagcgcttttccggcactcgttggtggatgatcagtgatagtgtgtgccggacctacggatttggaaagacgcctcttgtgtttatcgatggtggaactactccaaaggctaccaaaaagttttggaagatgagttgctgccgtacgtgggcccgttttcccgccatccatttcacatttcaacaaaacaatgcctcaattcacgtcagccgcaacaccaccagtggctcgagtccattgaacccagttattttacaatttattcggtcaaaaatgtatcaattattatatttttcacctcccattatggatttgaactattttgtagagtgaattagcaaaacgtattccagtgcaatcggaccaaaaaaatatatcagattttttaacaattttttgcggcgcatttttccaaaaaaagtttagggaaccgtagggggggggcaaaatttttgaaaatttgagtgcaatttgttaacagattttgtcaaaaaattgccctattccaaatatcaaaaacaaacgaccaacataaatattgatattttatctttttacatccaatggccgaaaaattttcaaaaaattaattttttggggtatttcttgaaaatattaaaaaatgtgactttcaaataaaattaatttgtgccaaaacaattccaaatataaaaaaaaatgtggctaaaaacttatggggtaatctctagttaaaaatttcattttatggttttttaaaggtcctttttgatgcctttttaataatgatatcggaccctcaatttttcttcaaaattaatatttttgtatttttgtttctaaaatgatttatattcgagatttttggcaaatcattttaacgaattcgaagaaattttgagaaatttaaacctcaatttaagcctcgtcaa

SEQ ID NO: 38713 - DNA, 1807 bp, Heterodera glycines
  unsure (1)..(1807): unsure at all n locations
attttttcatccaagaggtcataaacagcattaaagaagtgatagaaagtgactgtattcgatagtttgattgtcagtaaatttttgaaaataaaacaattacaaaaaattaatgccgctaaaaaactagaaaaaacatagtttttcttatctctaattctgcttatgacctctaggattgaaaaaactaaaaacccgtttggacataggcgcaaatgtctggagtgaatttgtccgcaaatatggggtaactgaaataagtggtttttggaataaattgccattaattccgattttctaggtagagcaaagataaggcacaaagatttcaaaataaaacggtcattctatacaaatccaaaaaatgtttgaataacttgaatttccaaaaaatttactcatttttggtctctgttcataattattcacctgaaagcctttgcgttcacgtggactagtcgcccatttgaatattccgcccttagcactggcgtcgcgttccttcccggcacaacgtaaatggcacagtatgggttctccgtcgcaaatttagtcaacgaatgttcgatgtaattgcgcatgccaacacttgtctcgctttgcttgcaaaatctgtggaaaaagaaacggaaattgcaagtcaaacatcccttgggatgggtgttcgtccctcactttattgtaatccgttgcagttgcggttggtaggcggacaccccattgaatgctggtgcgattggatttgtggccgacagtcgaaaagcaaaattcagtgccttcgctgaggaataaatggttttcaggcgatccgcgcggngaatagctggcatttcttttttgattaccaaacgagaataaaataaaaatataatgcaaaacaaacggaaagatacaaaacgaatggaacttcgtttactaaaaatgaatgcatttgctttagtttttctgattgtgatcgcaaatgtaatatatgatacagtagtatttttccttccttctcatttggtccaagacacctaaagattgatatgcctcattaaaaattaatgggtttttcggccaaccaacctttgggatgtcgttgaattccgtcagttcctccatttgcttgttgaacttctccactttctcccggtgactgatttgggccctctttgacaaacggtcgaacgccgtctcctcctgccgtttgagaaatgccaattcggccttcgtcttccgcgggccctcttgttccttctttatggtcagatctattgttttcgggtcaacatttcgcttcttcttgaagagagtgccacgcttcagtttcagtccggtcctcaccagcaacatttgctcatttgtctgcaattattcaaaaagcatttaaataaaatgaagcgaaattaacccaactttatgatcagtcttgtcctctttggcgctttgagtttcctccgcctcattgttatgatttgggcttttgctccgtcctttgtccattatcagagctatttgtggctaaaacaaaataaatttgtaatgtaaaaatagagagaggcgggctaggtttttaatgggcccggtgatttttgggaaaacccaatttgaccggttgggaaaaggcggacaaaggaattgtctgctttcgaagatccaaccccaccctgcccgggaagatttgaaatcatggtctcttaaaatggataaaaatagaaaatgaaactaaaacattaaaggctggaagaattttttcaaacaaatcaaaatttaatatttaggaaataaaaaattaaaatggaggcagaaatcgttaaataaaaca

SEQ ID NO: 38714 - DNA, 997 bp, Heterodera glycines
  unsure (1)..(997): unsure at all n locations
tgccactcggggcggaatagtcgacgattgagaaagccgacaagatgacaagcgaacggactgtagaccaattaattaaaattgacgaataaataaatgcacacaaaatatttagagagaacagtgtccttagtaaaatgtaccatgaaaaaagaaatcctcctggagacatgcggggaaatctagcaaaggaaatatctattgaaaataacaacataattagcgaaaacaacaaaaagaaaggaaaacataattataggtaggtcagaggtcggagagaaaaataacacaatttatagaaataaattaagcagagagaggtcaaaatattcaatttaacacatcacaacccctaaaaaaggcgtccctgccgttaattcggcatccgttatgtggtggcccgagtaagctaatgtcggctgcctcttgtcagattgttttggttaaattttttgaagagtatcgacgggcattgttctcacggcgatgaaaaggcgatcgggaacgagaatacgggcggcggtcgcatagacccaaccccccacgagccgaagtagatgacgaagtccctgggcggtcgaatagacccaacccatggacgttgttcacggaagaaacgctggagcggagactgcggatcccaagctggagattgtttggccactgcgggatttgggtgttgatccattccgacagtgtcttaatgccgttttccgtcagccatccgtccgaattgattcgacttcgatcgaatgactctccgtatctccaaatctcgacaagacttcgtcctgaaggagtcacacaaacgaaccaattgcccaacagctccgccagccgagtgttcaattcttggcaggccaactcgcatttgcggacataaggcggcggcaaccaatgaacgacacggatgagaaacgtgagcaaagctggtggattcgctggcattgctcgancatttggtcaaccgtttcgtcctttgacagtgagtcacgcc

SEQ ID NO: 38715 - DNA, 1450 bp, Heterodera glycines
aaacacgttatccatatccagttcaaatgggtaattgggccaagcaactgggccttgagatgcatcaagtcaatgtaattagggaaatgaatatttaaatgaatcaaatatttgaatatatattttaattatttaaaaataattaattagttctggttcctaaatcgacaagcacaacacagacaagaagaaaaaaaagccaaggaaaaatggttggaaggtcgacgcgaccaatggaaactgcaaataccaacagaaggaacatattagttaattagcttatacaaaaataaaataaattttcaatttacacagtgtccatcataaaaagcaacaattagtggacaaaacggagccaattggacaaaaagcggaacaaaaggattatgttaggtaattaatgagagttgccccttaaaaatcgctaattaaatttatctaaaaattcagtgacatgagcgagcaaaaaccatcacaaaatgtgggaaaaacggagtcaattggacaaaaagacaccatggatgggaaacaacaaaaggcacaacaaaaaaacactttggaggacattggcacgacggcgctggagtcggagccgacgagtgaggagctgaagaactttgccaagatgttcaaacagcggcgggttcagctcggcttcacccaggcggaagtgggacaacaactgtacgaacttcgtggccaagtgttctcccaaacgacaatttgccgtttcgaagcattgtatcaaagggcggggggggggggggggagaagctcccggacaatctgtcagtggacaatccgtcagcaaaatttattttaaaacaccatattttatttaaaatcagtttgaaaataaatttaaattgctaaaaaagagaaataataatttgtattactttataaaaaattatgaaataagatattaaattatattgaagtattaagtaaatagaaatactgacggattgtccttcactaacggattatccactgatggattgtccgtccgtgccccgggggagggacgcggaacaacggccaaaaggttttatgggtggggagggagacggatagaattgacagaatttgctgataaaaattgtgagtctgtctctttgaaggcaattgtccttcaaaaacatgtgcaaaatgaagctgctgctatccagatggctcgaacaacacactgacaacgagaaggtcatccagcaaacggtgagacaaaccgcaaaaaaatgggggaagaaaacgcaaaatgggagaaagtggggggggggggggaatgggtgcaaagcaatgggcgacaaaatggttttgggagaaatattaaaaatattcgtttacacagtaatagaagcaaaattttatcttttttgtttgcttttttataaaaaaatttatttacctatttttctacctatttcaggatttttgtacctatttaata

SEQ ID NO: 38716 - DNA, 1495 bp, Heterodera glycines
tttgaataaaaatttgtcacgcttaaaaatcttttcaaatattggcatgcagcttctatttcttccaaggcaattaatcgaggatgtcggcacttctcactgaggaagcgcggtcgtttaggctcgtctgcacaatctgttgccgctcgtttggttttttttgcatgtttggcttcacttcatcagcatggtttggcttcacatcatttgacgacattttttaaattgaaattaagaaacggttgggaaaacaaaaagatggctttctgaagggtagagctagagctttaaggcaacggtgataacatgtcctgataaaggttctccaggttgcactggtaattgaaaattgtgtgccaaatagggttttgccatcaaaaaaaaaactgtcaatttggaaacattttgaaaaatgaccaaaaattcacgaaggtttttgttccaaacatccaaaagcaggaatagattccaaatatattattgattaacctcaggttatcatttgggaaaagtttgtttaagacaaagttggaaaaaagacaagggtcggatatttttcactgttaatggaaaatctgaaaaacggcaataaattcaattttggaagcttattcaaaactgccattatttttaaattttatttgccaaaagatcctactaacagggaggagatttattttaaattttcaatgaatttgagtttggcaaaaggcacctgaaatttgtccatcaaagtctggcctgaaatctcaagattttgaattaaaaatttctctttttgcttaatcagaaagaacatattgaattttacaaactggccaagtttaatgttatttcactagacattcattacgttatggtcattggtgtaaaggggtagtcaaattttctcaaccttatcataatattcgtacaagttttaaaaagtatcctagaaacgagaaaaataatcattttgaagtggaaggttagggctttcaaaaaaaaaaaaaaaaaagtttttaatgtaagtaaaaatgctttttttgtgctgtctggtaataggcctacgacgggagagagagagagagagagagagaggagagagagagaggatagagagagaaagagagaagcaacagaggaaggttggacggggggagggggtttgagtttagggtggaaatttgaaaaattttatgttaggggagtcctacattttaaatttaatttattttttttaataatgaatcaaaatttgaaataattatttcaacatttaaatgaggacaaattaatggcttatgacgggaaagagagagagagagagaggtaggccatgtgaatgttcagcaggggcaccggacgggtgggattgtcttggatggagtgatgtgtgaatggattttggggcgccttatatacggcaatatcgttgccgtgtatccagttttttggcataaaaatgcatacggcaaggcaaattacccaatgacagcctcgacaattgtgccat

SEQ ID NO: 38717 - DNA, 1520 bp, Heterodera glycines
tgagttgagaagcactgatcaaaaaatagaaacgatatttgagagagattcgagaaagtagggggggggggggaaatttccaataattttctacaagattatacaaattgatattttcatttttgttttgtctgagaaattagaattgttttcaccccccccccttttacctgcgtggtttttccacaccccgtcccgcctgtgataagtgtcaccggactgctctcaatggtgtttaaaattttgtcacgaagtgcccaggtgggcaattggcgtcgaaaagcgtccatttgctcggagaggcgtggcaatggcggaatatgaccaacggaacgggaaaaaacagtggacgaatggtgggaggaggaaggggacggagacgacgaatggagaagagacgaaggggagccatgggaactaagggaacaacagattctcgtgtaaaataaaagagaacgcccgaaaaacagtcagacccgtactcagaaaattccggtgggggaaactcaaaaacaattcgtgttagctctaaatttctaaaaaatttgcaaaacttaacgaaattattaataaaaaagtgacccctgtttaaaaaataattttaatttatgaggtagggagggaattacatccctctggcaaggtacacgagagtagtttaacccaaaaatgagcaagaaaaattaggtctaaacgaaaagaattttgttcgaacataaagatgatatgtaatatatagacgactttatagacgtattacctcgtcgtcgtcacgtgtctttgccattgtccctcgccctctttgctgttcagtagctgtctcaactgcgttgggttgtaacttcggttgataaaagtccgtggtgccccgcttcgtttcgttgtcccaccgcccctcgttgctgcggcggtgcttttcccatttgcgctgctcaaatttgggtgctcgctgcaattggccaacgcattggtaaactgttcttcgatttgctttgttggacaacggaaaatgaaactgagcggcgaaggcggcgattgtttgtcagttttgttgcccgattcgacggcatctgacaatatgaagaaaatgtcaatggcaaaataaatccaaaaatctatggaagttaggacatttttgatgaaaattaacaaaggaaagtcgtatttagtcaaaatgtaaggctataaattccaacaccattggttccaggcactttcagatgcttttccacttcttcttgagtaatgggcgcggactcaacaaaggcagaaataatccggcgtatttcatcagatacagaaagagagtccgtctcgtttacagaatattgggtcaattgggaattcatatgtcgtacagataataaacaatcagttaaaaagaatattcttgaaaatgagtaaatatgtaaatgtacacataatgtactttttcaaaacatttatttttttaaatttccttcattttttgccttcactagttaggcaaataaggttggtctccaatatgtgaattcaat

SEQ ID NO: 38718 - DNA, 692 bp, Heterodera glycines
aatttcgagtcttagcttaaaaatattcgctctatttctttttgtcccatttgccattcaatgctgtggaaaagattccaaaaatttctccgccacgcctaccgacatgattcaacaatttaatgagtttgatgtaaaactatttgctttttgaaataaattgaatgtaatataaattgaagttatcaatacaagaaaaagtcaatttcgctggtgatcaatcattaccgtactgttccggctggtgttcgttgctgtggaccaattattctgttattggcattgttcacggcataatttggtgtcatccatgccatggcagttggcccatttgtcaccgaattgttgttgcaattgcgcaaaaaacggaaaatggcacggccaaagttggcacaatcatttcgaattcgtttgttcagcagcaaatacaccacgggaggacaacctattgaaaaagcaataaaaattagtttattttaattttatttcatttaaagaaatacgcaaaccattgctaaaaacccatgcgtaagtgccaacgatgatgtaaatttcaccgattctgacatattgcattaaggtgtaaattacggcggtaattgaatgtatcaaacttatgataatcacttggagaaatgtctgaatatttattttaaaaatatttggaattactcaaaattaatgttattttt

SEQ ID NO: 38719 - DNA, 904 bp, Heterodera glycines
gcccgaaaatcatttttagagcataacaactgatgacgtcactgtcattgtttccaaagagatttctattaccagattgccaaaaaaagagatagccatttttttggaccgtccatacctcacatatactcaaacggcccgaaaatcatttttagagcataacaactgatgacagccactgtcattgtttccaaagagatttctattaccagattgccaaaaaaagagatagccatttttttggaccgtccatacctcacatatactcaaacggcccgaaaatcatttttagagcataacaactgatgacagccactgtcattgtttccaaagagatttctattaccagattgccaaaaaaagagatagccatttttttggaccgtccatacctcacatatactcaaacggcccgaaaatcatttttagagcataacaactgatgacagccactgtcattgtttccaaagagatttctattaccagattgccaaaaaaagagatagccatttttttggaccgtccatacctcacatatactcaaacggcccgaaaatcatttttagagcataacaactgatgacagccactgtcattgtttccaaagagatttctattaccagattgccaaaaaaagagatagccatttttttggaccgtccatacctcacatatactcaaacggcccgaaaatcatttttagagcataacaactgatgacagccactgtcattgtttccaaagagatttctattaccagattgccaaaaaagagatagccatttttttggaccgtccatacctcacatatactcaaacggccccgaaatcatttttagagcataacaactgatgacagccactgtcattgttccaaagagtttctattacagattgcaaaaaa

SEQ ID NO: 38720 - DNA, 812 bp, Heterodera glycines
caaaccacatctccgcgaatatcaaaaaaaaaatttaacgccaataatatttaaaataaatattacaaattttcatgaatagttacgggagggttaatgggcggaaatttatcttgtttaaaaattaaataattgcgctgcccttgtttagtacacgaaatttagtacattactgtaaaagcaaatgaaagaatcgattaaagtaatgaggcaatggaaaaaaataaaatgaaaaaattctgaaagtgcttttgggtgacgaaatttattgaaaaaagtccattcatagctaattcgtaaaatttaatgtttcgttggggttttgagtggaagattcgttttgtagtcacaatttttgtaaaaagtgattagggtttcttttccatgtttttttaattcaggacaaaaaacatgccgataggcgccagcgggaaaaattttcaaaattttaaattgttactaaaaatttttggctaattttttaagaaaaatagtagtcttggtgggccggcggtgctgttggtatatacacaaaggctccttcctaatgggcatatacccaatgactcccccgttgggcatatacccaatgactccctcccaatgggcatatacccaatgactccccccattgtgcatatacacaatgactccccccattgggcatatacccaatgactccttcccagtgggcatatacccaatgactccccccattgggcatatacccaatgactccttcccagtgggcatataccaatgactccccccattgggcatataccccaatgactccccccccattgtgcata

SEQ ID NO: 38721 - DNA, 296 bp, Heterodera glycines
ttttggggtcattttcccgaataaattcttacgccaaaaattgctcatttgtcagggcaaaacattcccaacaaatttggccaaataaataaaacactgaaaaaatatttgtctttttcatttcattggccctttgttaaaatgccaaattcaaaaggaccgtcggacgaccatattttggctgatgaactgtttatggtcagcaaagtcggcggaaggatttacacactgccgaaaaaaagtgtccgaagatcagtcgcatattttgacggatttataacactcagaaaagggca

SEQ ID NO: 38722 - DNA, 67 bp, Heterodera glycines
ccgtaagtgtcctctttgcccgtcgccgtcgtccttcctgagctactcgcagccttagaacatgcgc

SEQ ID NO: 38723 - DNA, 1054 bp, Heterodera glycines
  unsure (1)..(1054): unsure at all n locations
ggggaaaaaagacttacaaaaataataccctggggagaagggagtgggaaccatgatttcaaaaattttcaattttttgtactctaagctactcaaaccggttcacattccaataaaaataacattcacggtgcgaaaaatggggtatgaaaagtttatggggggaaaaaaagactttttacaaaataatacccctgggagaagggagtgggaaacatgatttcgaaattttaaattttttgtagtctaatctactcaaaacggttcagaattcaataaaaataacattcacggtgcgaaaaatggggtatgaaaagtttattggggaaaaaaagactttacaaaataatacccctgggagaagggagtgggaaacatgatttcgaaattttcaatttttttgtagtctaatctactcaaaccggttcagaattcaataaaaataacattcacggtgcgaaaaatggggtatgaaaagtttattggggaaaaaaagactttttacaaaataatacccctgggagaagggagtgggaaacatgatttcgaaattttaaattttttgtagtctaatctactcaaaccggttcagaattcaataaaaataacattcacggtgcgaaaaatggggtatgaaaagtttattggggaaaaaaagactttttacaaaataatacccctgggagaagggagtgggaaacatgatttcaaaattttcaattttttgtactctaagctactcaaaccggttcagaattcaataaaaataacattcacggtgcgaaaaatggggtatgaaaagtttattggggaaaaaaagactttttacaaaataatacccctgggagaagggagtgggaaacatgatttcgaaatttaaattttttgtagtctaatctactcaaaacggttcagaattcataaaaataacattcacggtgcgaaaatggggtatgaaaagttattgnngaaaaaagacttttacaaataatacccctgggagaaggnnagtggaacatgatttcgaaatttaaattttttgtagtctaatcta

SEQ ID NO: 38724 - DNA, 1287 bp, Heterodera glycines
  unsure (1)..(1287): unsure at all n locations
taatttacttttccccgtgctagaaatgaaaaaaacttaaatgtttatttgtaatatttataaaaaaaacaattattagaagagtaaaaaatccaaaagcaacgtatcaacaattcaataaattgcacttttatttttattattgttatttttaaaatttagcaaaaatttattaaaagaggaaaaaatttactgttagtgattttatggttatttattttaaaaaacattttcacataaatataaataatcctaaagatagttttttaatattttttattttataataataattttatttgttaaattatttttgggactgaaatggcccatcctcggccttatccaaaacctcaatttgtcacttcggctcaacacgaaagaaaaaggcaaaaagtgtgggaagaaataatggcaccttcctgttctgtgaacacagaattaattatttttttttaaatccccctctttttaaataaatggctcttaacttcataagcctttagcaaaatccaaaatgaatcccaagctgatttattggttcaagaaaggggcataattcataaagattttgcaaaactgcgcgtaattaaattctgtagtcaagaacagaaagtaccgaaataatttaaaaggatttgtaagagattgtgccgtgctgtcgtgtcttatgttggttttgtcaaatgatttaattttatgtgttttattgaagcctatgaaaaaataatttaaaaatatattttggccatttgccactttttaccggatgccgtgcagaacattagcatttggtgggtgcttcccgtgccgctggccgtcccgtgctgctggtgacgcccgtggtggtcgcggctggtgccgcccgaacagattgcgctccgccgttccgagtggtaaccgcttgccgccgccagctctccgccgttcgtcggtccacccccgccttcgttgatgctgccgcttctgccgccgcttgcgcatgccgccgcttcgtccgcgccgatgtgtccgcacgagttggacagtgcgcaggcggtgtccgacgcggagacgcgcatgtcgatggacttgngcaggaaaatgaccgattggtgatgggaaggggaggaaggcacaaaaaagtcggatttgccggtaatttgccaatcggcggaaaaggcgccgaaagtttcaatttcaaaattaaatgcacagacntcataaatcaaacgacaaatgttttgtccattangtatcccccgggggggaaagcaaaaaaaggctttgaggaaaatgccggggggg

SEQ ID NO: 38725 - DNA, 962 bp, Heterodera glycines
  unsure (1)..(962): unsure at all n locations
ttaattatttgttgacctgctgaaaaatgggaattattcgttggcacataaaaagttgtgtgtagcttcttacaattctctcgtgtaatttgatgttaattcgtcgagattaattttaattcaaatgagcgtgagaaaagggttgcaagacaccgggaacgagccgggaatttccggtcccccacaggcactggtagggcaaccagggctggaaaaacagtagcgatttgttagaaaattttgaaaattccccgttccccactttacgaatttccatttctgggaggtcatcctcgctctcctcgttcctcggattgactgtagatcccccaccggccgcggccctaattaaaaagcttatttaaaaaatatagaaaattccttagaccaaaaagaagaatttatcaataactcttaggttggcaaactgtatgaaatattattgacattcagtggaaaaatggtggttgaatgaaacaaataaatttttataaattttatttggtaaatcttaatttttagcttttatttgaaaagaaaaattaattaattttacttttaaatgattattttgaaaaattaagtaaattacatgaaaaatttaacatttgttttgtaagtagtgtcgcttagtccagtaattgtaccgttacaaaatttccgattttatccaagctcaaaaaggtcccagaaatatattaaacttacaaaactatttaattttaacaaaagcaaatcattaggggtgtaaaaatgtctcggtctcgagtctcggaaatcgagaccgagacttaaaaacacgagagcaagaccaaaaaacgccgagacttttctcgagtcgagactctcgaacaacactactaattattcgattggttannaacatttcttatatcctttacatgatcgttttaatanacatcagacatatccccaaagttggtttcgtctttagaaaataa

SEQ ID NO: 38726 - DNA, 1620 bp, Heterodera glycines
  unsure (1)..(1620): unsure at all n locations
ccccccatagggggggggggtgcaagaccactgaacgccacccatttgagcgccgccaagtgagcgcgggccatttgagcgccagacttttcagtactgaagccaaaacttattacgcgacttttttttgaaacccaaacctattgcgggttgcgcgactttttttgactgcgcgactttatgcaaattattttattaatttaaattaattttaaattaaattttaaacatcttaaaggtcaaaacatcttaagaacatgaatttaaattcatttaaaattcatcaaaaattccccgcaccaagcggatccgaaccccagggggggcggccagactgacgcactaaccactcggccacattggcaatggatgataaacattaatttgctctcataaagggaaaatttgacgtcaccagcgggggcagggggggggcgagagcgagcagcgagagaggggaggggggtcaaataaacaaatcaattattgaattcacaattttctcttttaaaagcaaaaagaaatgggggaccgtataataaaatataatttagaaattaaaataatttaaaggttaattaattaattattttcctaaaataaattttttttattacttctaaaataatataaatatttttcagtgaattaacaaatacatttaagtttaattattgatttgtctgttaattttttatctcctcaaaaataattacagcaccctttcaggtgttgggcgtttgtttatttgaccaataatttttaatttcacatctttacgttgcccctccctcacacctgctcatttgtgtaatttgacaccgtttcttttatcttttcgttaaaaattaaaaagattgtctggaatttgtcttgcgccacaccgctgtgccattcatttatgtaatttgacaccagtctgataataatttcgccaaaatttatttattatttgtccatttattacgaattattttgcatctatcactccaaattttgttaaaaaaaattttttattgtcccaattttgaccattttgtgttttttcaacaaaataaatatttgttcaaatttaaagaattaatttttaaaattttagacacaaaaacaaatcatgagccaaaaccgtgacgaaaactcgcagccacctgtacccgatggaccgtacccgctggcacaagagcgcaatgagtttgtggaagatgaagcaccggtgctgcttgagatgttggatcgtctgtcacaaggagtgggttttgttttgaattatttaaattttttaatttttccattatggcttatgctaattgttgattttgtttagggaatttgccaagccatgggcctgttttcgtttgcacttgccgactgtttggccacatttcatacatttgccatactgttcgactgtgagacacctgtgccatttgacgagcagcacaagcgatacgtgttcgaacacagggacaaaccgcggctaatctacgtttcggaagatggtagcgttatacaggnttgacnngtgtggtgaagcaaggggaaatttgtgatgagcatcgagacgatgtatctcgataagcgaaaacgagttgatcacttttgcacattcctgcgcacttt

SEQ ID NO: 38727 - DNA, 906 bp, Heterodera glycines
caaaaatcccatttctgcgttaaaatttttttatttggtgaaagtttttaatccatacaaatacatatttagggggttttcgggaataaatccatatttcgccatttttgcctttttagtccatatttcggccatttttggcaaattttcacaagaaaaatgcaaaaaagcgaaaagtacacccctaaagatagactttttggaaattttaaaaaattacacccccaaaaatacaaaaaatttgagttttcgtcggtcattttggcatttttaataaatattttttccattttttgcggttttcttttttttaaatgagaatttttttcgaaattttggcaaacttggacaataaaaatttacattttaagttttaaatccatttttttcttgtttattgcactttttaagtttatttaagcaaatattgaatatacacaccttttttggaatttttgaaggtttaaaacaaacattttggcagtttttagtccatatttggcatttttgagctttttagtccatatttcgggcatttttatatgtccatatttgacgttttttatccatataatttcgagccctagtaaaattgtttattgttttagaatactttttatttttaaacttctttaaaataaaaataaaaacattacgtcgttggcatataattaaaaaacaaaatttaagaaaaaaaaaagtaaatatattttgcacttttatattaagcaagaggttatttttggttagcaactaactgataaataaaattatataaatttattagttgtttatgatttaaaatgttttaacacgttcgcttgtaccattattatttttattaagggaatttattgcactttttgggatgagtcaaatcattcaaatttaaaaatcttttatttt

SEQ ID NO: 38728 - DNA, 1283 bp, Heterodera glycines
  unsure (1)..(1283): unsure at all n locations
atcatcagcagacacagcgaagtgaggggggggggagaatgtgggnaatggaanaccaaggggatatggaaatggagatcgggggaaatgtggaaaatcagagggtgaggaatgtgaaanatagggggtacaatcataactaacttatgttttccagggatggctttctcaggatgaactggtgatgcgaagctcgtcagacgagttggacaagctgagcacgtgccttagtgaggtgggctttcaattgcttattgattgatcagtccgtcctatcaaatagtgattattcacgtcatattaaatattgactgaccagtctatcctgtcaatattgatccatcagtctgtcctattgaacaattattgatcatccgtcttattaatattattgatcaacctctttgatcagtccatccatcaaatagtcaccttttaatattgattagttaatttgattgatcagtccgtctttgattgatcagttcattctattaaatattggttgatggtacgttctatattgatttattagtccgtcccattaaatattgaccagtccgttctaatgattaatcaatccgttacattattgattaatcagtccgttctgttattgattgataaacaaacaaatcgttttgcaaaattggcttctcttatcgaattgtcttgtcaaatatcaaacaatcagtgccttttctccgttcgttttggtttttcatgtgaattcactcgtccgtcccttcgttgagtctgtcaaaatggcattggcatttattcattcttttggcattttgttttcctttttccctcccttttaggcttcctccgaaactcaggagcgtcgtcgtccctctctgatcagtgacattgtgcaggcgcagctcgccctttggactttggtgctcaccgttttctattcctacgcttggcagcagcaccgcaaaaagtttctcctttctctggtgagaatcgacagcagaaaagggtcagcggagcgatcattttcaaatacattaaaagggtcaacgatttttgacaaatctaattctggtctttggtgttgacaaatcccgaaaatgattcgatcagtcagtcagtgttgtctgtgtctgtctgtctgtgtctctcgcgttgatcagtccctttcacctgctatttcgctgattctccttctcttcccctcagtttgtcgttgtgcctcccgtgttcctgctgatctgcactctttcctcccctctgactgccattgtcattttgggccgaatcttctcttctcc

SEQ ID NO: 38729 - DNA, 824 bp, Heterodera glycines
  unsure (1)..(824): unsure at all n locations
tgttcagtttcacatctaatagaatcagcacgttcaatcagtggctaaaaaaaattaaaaaaacaaaaaaattaattaataaaaaaatagctcacaaattttctcttcccgactccgcttaatctttgccaacaattcggttgtgcgcttgcgcaactcttccgcccgctgtttccgctcctcatttccgccttctttctcttccaataaagctagaactttgtcgtaagtggactgaaattaaaaaattaattatagtaggcattattaggtgtttcataaaaatgatcctctctgaaccacatttaaaaataaacaaaaaatttaatttgggaaagaatttgataaattaattttcggaaatccgaaaacccatgccaaatgcataaaactaaacagcagactgatctattttttcattgttacctcccgcccccttaaaacccaagtagaaaatcttggggaccgtcccctgatttacacaattaaataattttctatacatatcattttaaattgtttctcaccttcatcgcattgtgtttttgttcaacttggtccgcaatttctgatgcaccggcggcgctttggccggccgcctttgtgttggacataattttaatgtattccgctttgagatggtcttaaaatgaaaaaagaaaaattgaattttttgtttttcgcttgatttttcaccagtcatgttgatcaatttccgagttcgatcggttgcttcgtcaacacgcgactccaatgatttgatctcatcttctgtcaatganagggtggacctanagaaacataaattttcaattatatatata

SEQ ID NO: 38730 - DNA, 895 bp, Heterodera glycines
cagctttgaatgaaacttggccattcacgccgacaaaacattaaattaggccatcaaaacaaccaacagaattaaatgagtgccgcaaatgagaaggggtgaaaaaacggaggggaaaacgggagcagatagcccccaccacccgtcatatagcttaccctcaaaactcaaaaaaaaaaaaaattttcaaatagaaaatttttaaaaatcttataaaataaaaataattttggaaaaactagaaatattttggattttttctctttttttaatgtttttataggaggacaattaaggaagaattaagagaattttgcattcttttatgcctgtaaataaatgcgtaacctgatacttttttttaaatttcttgccatttgcccaatattttttgcaaatgcgcagccatcaatcaataaaataattaaaccaaaaaattttttgtcgacaccccccccccccttattaatgtatgtaagcgttaaaaaattcaagtctaacaactgctagttaatgatagaattgttttatttttttaagttattgggtaaatgctttaaattttaatccccaaaactgtgcccaaatgtgcacaataagcctagatggtctcaccggaatcggatgaaagttttggccttttatgcaaacgaatcatttaatcggaccatcagagacaattaaggaagtaattagttaaaacaaattaatgtcatggaatgagaatttttatggctgtagataaatgcgttttttttttgttaaccattttgccgattattttttgcgaatacgcagccattaatcaaaaattgaaagtaatcagaattttaataattgtacaaattgataagagacaaaaaaaagaagaaatgaatttgtcaacaacagaatg

SEQ ID NO: 38731 - DNA, 1005 bp, Heterodera glycines
tccaagtccatcgccaattgactaagtgaaccgaaccctgcaaaaacccaaacccgagccccaacggccctccctcgttttcctgacttggcgctcctggccgacaccgaactgcaccgccttttggaagactccgaattgctctcgccgattgcacacaagaagcaaagcgtggaaaagccgtgctgttcgccgtctctcttcaattcgccgaaaatggaagaaaattttggtcagccaagtgtgagaagcagaatgttggcacaaggccgtgcactgcgagaaagagttggccgtgaaggcaaccaaaatcagattttggctgaaaaggcattccgttttgaatttgaaaggcagtcagcgcactcaagttcggatgagaaaagtttgggaagatccgggtatgaaggccgagcagagcaagagcaaactttggttgaagggctaaaagctgaattgctgagagtgaaggacgaacgagacgtggcagaggcaaaagtcgaaattttgctacaaaaattgtcggacaaagaacaaatcttcaatttcctaaagaccaacaacgttaaactgctggtggaaagagagcaaattcgttgtgaattcttgtcaatggaagatgagttgaagacggtaaaagaaaaattggaaatggcagaacaggaaaatggacatttttcaattctttctgtccaacaaaatttgatggcgcaggagcagagtcgaaaaataatggctttgatggaagaggttgaagaaatgaaggctaaaaacagcggtgaacaggaggaatttcttaaaaattccgaaaaccgaattgctgaacccaaaaaatccgtctccaaattgccactcaaactaaacattgtcaagaaaaggaaccccaaaatcgccaaaccaaagaaaatttcccaaaaaccggaggctggaaaatgcaattttcttccactgaattcaatcattttccggaaacctcctccgcaattcaaaccaaattaccgtccg

SEQ ID NO: 38732 - DNA, 1130 bp, Heterodera glycines
  unsure (1)..(1130): unsure at all n locations
caaatttttttccttttttggattgggttcaaaaaaaatttaaagggaatttttgattattaatttgaagtctgaatttatttgacaaatccaagacttaaaactgggagagcaaggggctgtgctgggggcntaaattggggccacatnggagaattaattctgatttctgaaaagtcccagaaatacttatttttctttccataccttcttgtagagctcgagctgctctttccaatggtcttatcccggtctcgatccgtgccgaactcacaaagttatggagtgaaatgtgaaatattgttttcaccacaaggcattttttctgaaaaccggattcaaaaatctggggtttggtataaccgttttagaaatagcgtaaaaaacagcttcgatatcaagaaaccaagtcaagtccagaaaggaatattttaaaacgatttcgttttgttttggcattatgataccgaataactttcggaaattatggaaacaaaattggagaaattcgaataattttttgactgcaaatttttttccttttttgaattgggttcaaaaaattttaagagaatttttgattattaatttgaagtcttgaatttatttgacaaatccaagacttaaaactgggagaagcaaggggctgtggctgggggcctaaaatttgggccacattggagaattaattctgatttctgaaaaagtcccagaaataactatttttctttccataccttcttgtagagctcgagctgctctttccaatggtcttatcccggtctcgatccgtgccgaactcacaaagttatggagtgaaatgtgaaatattgttttcaccacaaggcattttttctgaaaaccggattcaaaaatctggggtttggtataaccgttttagaaatagcgtagaaaacagcttcgatatcaagaaaccaagtcaagtccagaaaggaatattttaaaacgatttcgttttgttttggcattatgataccgaataactttcggaaattatggaaacaaaattggagaaattcgaataattttttgactgcaaatttttttccttttttgaattgggttcaaaaaaattttaagagaatttttgattattaatttgaagtctt

SEQ ID NO: 38733 - DNA, 914 bp, Heterodera glycines
attagaagcgcctgagtgtcgacatttatcctccaaaacatcgctaagccggtttcggcactccccgccaagatacagccctttttctgagagccgttcaaaaaatttccgaaaattttcaaaaattttctgaagaaacttttttttgtttggttttttcaaaaaatggttttcaccattcgatagagaatccttaaaaaatagttgtactcttttgttcggagccgatccgaccaacttgaagagagttattaaaaaaattgccggaaaacctacattttcctcttatatagagaaccagggccccaaggggccctgtgaaagcgccacgggcgctttcaacaccggggccagccggggccattgggttttccccgcgcttaaggtactcgctcggccgcttcgcggcctcgtacgggcacggtaagcgtttgaataatagcaaaaaggtggtgtgacttaaaactaaaggttaactaagaattacacataaaatttttcagacaaaaatttattaataataaagcaaaaaagcaaaaatcagcaaaataaattacaaaataatcaatcaaaaaaatcatcaaaagaactatcaaaatcatttggttcttgatcgtttgcacccgctgcgtttccattatctcgttccacgtccgggtcattgtccacgtccggtactcttgggcccacgtccggtattgctgcgtccgggtcattgtccacgtccatcagtccacgattcggtgtcctcggctgctgcgtctccaagtccaacagctcgaggtaaacgacgttctcgatgtgcgtcccggacccactttggctgaacggcgcgtacaccctgatgcaatccatctgcgtgactctggacatggagacgtaacacctgggccatgcgaaaagcactggcgccc

SEQ ID NO: 38734 - DNA, 843 bp, Heterodera glycines
cgtaattacgatttttacttagaccattttttctaggcttatatcacatgcgattttcggcactctgataattttagcgctcataatgggatgtataaaggcgattgtagaaggaattggaagcgctaaaattgtttgagaagctttttgagcgtaattacgatttttacttagaccattttttctaggcttagatcacatgcgattttcggcactctgataattttagcgctcataatgggatgtataaaggcgattgtataaggaattggaagcgctaaaattgtttgaaaagctttttgagcgtaattacgatttttacttacaccattttttctaggcttagatcacatgcgattttcggcactctgataattttagcgctcataatgggatgtataaaggcgattgtagaaaggaattggaagcgctaaaattgtttgagaagctttttgagcgtaattacgatttttacttacaccatttttttctaggcttagattacagcgattttcggcactctgataattttagcgctcataatgggatgtataaaggcgattgtagaaggaattggaagcgctaaaattggttgagaagctttttgagcgtagttacgatttttacttacaccattttttctaggcttagatcacatgcgattttcggcactctgataattttagcgctcataatgcgaatgtatagaggcgatttgtaaaaggaattggaagcgctaaaattgttttgagaagcttttttgagcgtaatttacaatttttacttatacccatttttttctaggcttaaaacacatgccactttcggcaccctgataatttt

SEQ ID NO: 38735 - DNA, 1551 bp, Heterodera glycines
  unsure (1)..(1551): unsure at all n locations
gagtacttttggcgcagaaattgttgttcccgtacgaggccgcgaacatcccaagtcacacaaaaagaaaaggagatttgagtcccagagattggaatgccggagaattgagtcccagagattggaaagcttgagaattgagtcccagtgattggaaagcctgagaattgagtcccagagattgaaatgctggtgggttgagtcctagagattggaatgtcattgaaagttggtgggttgagtcccagtgtttagaatgccgcagatttgagtcccagtgtttggaatgccggagatttgagtcccagtgtttggaatgccggagaattgagtcccagagattggaaagcttgagaattgagtcccagtgattggaaagcctgagaattgagtcccagagattgaaatgctggtgggttgagtcctagagattggaatgtcattgaaagttggtgggttgagtcccagtgtttagaatgccgcagatttgagtcccagtgtttggaatgccggagatttgagtcccagtgtttggaatgccggagatttgagtcccagtgattggaatgccggagatttgagtcccagtgtttggaatgccggagaattgagtcccagagattgaaatgctggtgggttgagtcccaatgtttagaatgccgcagatttgagtcccagtgtttggaatgccggagatttgagtcccagtgtttggaatgccgcagatttgagtcccagtgcttagaatgccgcagatttgagtcccagtgtttggaatgccggagatttgagtcccagtgtttggaatgccggagatttgagtcccagtgtttggaatgccggagaattgagtcccaaagattgaattgcttgtgggttgagtcccagagattggagaaaaagccaagaaaatgatgcgaggccgcgaagcggccgagccagtcgattttatcattcataattctataacacaatcgtactacctagcgggggatgcgccgaaggcgctgaccccgctagtattaggaaacttctgcatcaatttcttcgtcgctttttatggataattttataatatttatttgttattttaaatacctacttttaaaacacaaaaattttctgaaaaaaatagtatttttttaaaattcataaaatattttagaaagactgtacaaacgggacccacgcgtttcggcgctcgcgtttcggcgccagctctttttccacgatagcttttttctttgacatccaaatacaacattgttggtatcactcgaaagctcttaacatgctctattagccttaccaaaagcgaaaagattttcaagcctggaaaaaattttattttattacaaaaaacttcaaaaatttcgacttttcacaattttcatgtataacttttttggaaattgtctaatagcgaagcaatagcttagaaaaaatttctggtaataaattgcactggaaaagattnntgatgaaatcactaaaaaattttcaaatcaatatagaaatattatacccaatatatttttttgttgtaaaaaa

SEQ ID NO: 38736 - DNA, 966 bp, Heterodera glycines
tttttgatcgaatggtaggggacgattgagtgcaggcactctcgactgccaataaaattgattttgccttctcattttttaaattatttttttttactttttctaatatttattcccatttcagtgcagaaatcgtacgtggcaacaaaagcgggacagtaaacaaagaaaagaggaaagattgaacgcagcacgtgcgcaaattgatgctgatgtttataatggaaaatttttttttcgcagataacttttttgattttttcgcattattgatcaatttaaaaaataaattcattttaaattatgagttggataataaaattaattttttcaaaaaatttaattcttttaatttaggagttggataataaatttaattttaaaaaaaaaataaattgctattattatcaaacagaaattattgtatatttttattatcaaacaatattagagcccaagtttaaatatgaaaaaaattcgtagaataggatcaaataaattataacaaaatgtcaggagaattaaatgaaatattatgagtataaataaattacagtactattatcaatcagaacttactgtattcttattatcaaacagtgtcatagtcaaagttttaaatatgcaaaatttgtattaaattgcaacaaaaatgtaagacattaaatgcaaaggcaaaagagtagaaaaagcgaaaaaatgatcgtaaattcttttctttttgatccaatttctactctttcaatttttcatatattccaattcggaaatattttgaaaacaaatcaagcacttgggttcatcgcttgcaatgattgggatcgagcactttggacaagaaaaaacatgtaaacactccttagccccaaatgtcaccatattttcattccctaaacaccacagacaccgttcactgacgatcagatttttccccttttgcttgttttccttcccttctttttcacc

SEQ ID NO: 38737 - DNA, 757 bp, Heterodera glycines
gagccagctagctcggcgctcatttcattgtaagttagtcctttaccggggagtatccctgcaaagtttggtacgcttctgctcaattagcaaaaaatatgagtgatcgaattttcactaaaaaagttaagcctacattttttggcatatttaaaaagcaattaaaaaattttaaaatttaataattttcctgcaccgaaggtactcactcggcctcttcgcggcctcgtggtgggccttcgccccccccccccccctcccacgcccttcagagcacgacaaatatttcaacaaaaattttgaaaaattgactagagcaatcgaacgctaacggacgacctaatggaaaaaaatccccgaaggagagaatttaattaaatccattccttcgggggaccgtgccgggtgccgcggggtaagcagtgctggttcgtttcatcacggcaccgaaccttttggctagtcagcaatcgttgcttaacttgccagatcggacgggtgcgcatgactttctgaaaaaaatatttatgaaacaaaaaaatcgattttttcaagtgtccgtttggggtactcaaacatttatggggagcaaaaatccaacgcagaattaaagtacaggctatagggaagctattcccgaaggattcggtctccccataaatctgggcgcatcggttcggggggactgccccgaaaacaaaaaaatcgattttttcaagtgtccgtttggggtactcaaacaattatggggagcaaa

SEQ ID NO: 38738 - DNA, 1634 bp, Heterodera glycines
attttatcagaattttacggaatgtgatacgcatgttatacaaaaatgatgccgttaggaatgtttaatttaagcggatttttgtatacatatatttcgagaattatcagtttttttttaatttccgcgcgttgtatgccgatttttgatccaacaaaaattgatttttctaattgcaaattatgttccgtttcgacaatttatctagaaatcaaataaaaccgtactcaaattaaaaaaaatgtccaattacttatacataattagaacttcaaataaatttataagtggaaataatgaaataaaagatggaataataaagaaaatagaaagccctttaagaaaaacaaaatgaaagaattcccaaagaaaaatatatcctaacaacttgatcaaaatatatcttaacaatgtgatcaaaataacttcaaccaacagataaattatgagtgcacacatctcatcaattttcatgtgttctcattactccgcctggttaagaaatgtttatttaaacattaaattgtttgaattttaacaaaaccttaaatgcttctttaatagcccataaatgtttgttcatctcatcaacccacaacaaatcacataaaagggtaaaatttatatgcacatcaatcgtcagcaaatggttcagctccgtttcgtaaaatgtttggacaaattccgaagtgtgttctggcatttgtttcctaatgatttggtcgacttcttaaaaatagaagaaaaaatagaggattatgtatttatgatattgtttttggaaaacttttaaaatctaaactcgaaaaatgaataaaggtataaaaatttaatatttgccagtcagactcggcctttttaccaagagaaaacccacttggaattttaatttaatttagaaaacaatcataaattttagaatattttttttaaatatgaattccttaatgaagttgataaaaaggttagtattttatgcaaaattaaagaaaaagttttaatatttgaagacttcttaaatgatttaattattttaatcacaaatcatttaaaaatttaattactattttcttaaaaaaataaactttttaacgtttttaatcaattagaaattaaggcagcaatttgcttaacttactttttcttatttgagtccgatattcgatgatttgatatgcatttctttttaaataattttcagcgcgaacttttcggcttcccttttcaatttgtcaaattctttgaccatcattaattggcccatttttttaaagagttttgtgtttaattacttccaaaatgtgattttttgttttcttaaaacaatcaattagacaaaacataaatcatttataaaaaaatttcaccttgtccacattgaaatggtcagaattgactaattgcttaaatttcgcataatttggtcgaaatattttgcctatggcaattgtctcatccatatccatttcattaataaattcaataatggcattcaaatccctttcgtaaaagccttttttcaccatgaggagcgcatcaacaaaagctggattgaactcagcacgttttaaatcattgccatcctttagggggcgggggccatttttcctcagctttatgaacaacgataatcc

SEQ ID NO: 38739 - DNA, 1019 bp, Heterodera glycines
  unsure (1)..(1019): unsure at all n locations
cggcactgaatgggccggctccgattttattcactgatgcatttttgttaataatttttggacaaaacgccaaattaagggcaaaaaacttattttaagggcgaacaactaaaatatggattttttaagggcgaacaccaaaaataaggatttctaaggtcgaataagggcgataaaatgcaaaattttcgaacaaaaaatgtgtttttcgtgcatttctcgtcgagttaaagccgaagaaaaaataagtaaaaacttagaaatcctcgccctagtaatagctgaccgaatcagaaactcattgaatggggggcatttttatttgtctgtttgtttgtttattttgtgcccttaaatgcgccgaaaactcagattgatcaaaaatggaggagcagagctggggaggagggatgtgttaaattgatcaaaatttggtgggagaaggacggagtgtttgatcaacgatcaaagaattttgggtaatcatataaaaagattagaaattgagaatttcatcaaaatttgtgggagggattgtttgatcaatgatcaaagagttctgagtaataatgatcagagaattttgtttgtcaatcgaaccaaactgaaaaattgaaattgatcaaaatttgagggagggactgtttgatcagagagtcttgagttcatcagataaagtttagaaattgcttaattggttgtcaaaacaattttaagaccaagtatagaaagtaatgatcaaataaagtgatgtaaattttagcattcaaacttttttagagattctttaatcagtaatcaaagttttgtatcgtatgtttcttttttaattttgaaaaactttttgatcaccgatcatagaaagtgccgcctacttgagcaacatattattctgctgattanataatggtgaattgtttttccgtatttattttgttcaaggcttgncgattgtttggccaatgcaaaagttttgtatgtttttctgatttaatcttatgtgtcaatttgtaaaggga

SEQ ID NO: 38740 - DNA, 1164 bp, Heterodera glycines
  unsure (1)..(1164): unsure at all n locations
ttaaaatttaaaggtgctttttaacaacaaaaagtacttttgtttaaaatttacattaaaacacggcaaaagattccatattatttaagtataataaaatttacataaaaacaacatgatgatagttggtcaaaataatcatatcacaagtcaaagaacttctccaattcttttcgggcgactaacgaccgcaattctaataggtcaaaaaggtcgcgtcggggctcaaattcctctaacccgttcaatgtgttgttattggtcgatttttgcaacatatttccatctaaaatagtcaattcaaaagaacaaaatactaaaagattatcaaaaaaggaaaaaggccgaataattcgtgtgaaatgactggtgaaaaacttactttgagttgatgcgatgccaacgtgcaaagaattggacgaactcttcgacattgggactggctttagaagtgacgaagaggcaaaatgtggcggttggttgggctttgaaacattggaagagggcaaggagtgcgattcaattttgaaacattctccgtttcgatactcagggttattcaatgtgttatctgaaatgaattgggtagaattgacggtaatagtgacgatgttagtctccttttttcgaaaaaaatctaattttttcattttcacatttagcattttttatctaaaaaatggtttaaaagtcttctttattgaaacttagatgattttgtttgtttccttacatttaaaccattttaagagcaaaactgcgaaactcaaaaaatttgaagtttcgacttctttaaatttttcgaaaaatattttcagggttaatccgaggcacttagcacgaatctgactttttcggctcaatttcgaaccatgtacccaaattcggacatttttcgaaaattctaattgctcatattattgtacgattctgtcaatgccttagcaataattacaatcggcactattaccgaattgacttgtgttcatggcctaccccttcgcctttctgtccgtctctgtccctcatccgctctttccctctccccgtcctttttcgtccctttctcttccatgggccttttgcccgttgttttctcatctngctgagttttgctctgtctcttcttcgacccgttcgcttcgtctttcttttcccatctga

SEQ ID NO: 38741 - DNA, 1031 bp, Heterodera glycines
aattcataaatatttttttcagaaagggttctgaaacgcaccaaattttatttacatgttagtttaggcactctgatgcttttactatcaaaaagggcgatgaatacaaattctaaaaatttttaattgctttttaaacgagcgaaaaactttaggcttaactttttttttataaactgatcagaagcgaaccagattttgcgagggcatcaaaaagacaaggaaaagcactgctatgatgctaactccagtaattctgaatttaaaattttttattaatttttaaagcttcactattttatttttttagcaaaattaattcataaatattttttcacaaactgctctgaaacgcaccaaattttatttacaagttattttaggcactcagatgctttcactatcaaaaagggagatgaataaaaatctaaaaatttttaattgctttttaaatatgcgaaaaattttaggcttaactttttttttataaactgatcagaagcgaaccagattttgcgagagcatcaaaaagacaaggaaaagcactgctatgatgctaactccagtaattctgaatttaaaattttttattaatttttaaagcttcactattttatttttttagcaaaattaattcataaatattttttcagaaactgctctgaaacgcaccaaatgttaattaaaagttaaataaggctctctgatgctttttctatcaaaaccgacggtgcaggaaaatattaaggaagagagttcattatttatttgttttttgcataattaattcaaaaagattatttttcagaaagggttctgaaacgcaccaaattttatttacatgttagtttaggcactctgatgcttttactatcaaaaagggcgatgaatacaaattctaaaaatttttaattgctttttaaacgagcgaaaaactttaggcttaactttttttttataaactgatcagaagcgaaccagattttgcgagggcatcaaaaagacaaggaaaagcactgctatgatgctaa

SEQ ID NO: 38742 - DNA, 948 bp, Heterodera glycines
  unsure (1)..(948): unsure at all n locations
ctgtatctttttcgttgcttataatttaaaatatttttaaacagcattttttatggatgaaaaaaaattactgcaaagtctaaacggcagaaaggcgtcacaaaagcggcaggagaagcgggagaaaaagcgtttgtgcgctcagtatgccggcaaatttcgatgggcgaagcgaagtgaatgaaccgttttcaatgccaaaattcccttttggaaattgccgttttagaggctttggaagtgtcagggggagagcagccgaccgccgtggccattggccatccaacgccggcggcatttgcctcgacgccgttgaagcgggaagtgccacagtctgcgaagccggcggaatttaagtggccggacgccatgttgtcatcctcacccgcagatacccctttggagctgaacattgtgaagacagaggaggaggacctgtcgtgttcttcctccgccgctgtgccaatgccttccgcagcagtgccgaacccaccagcggcttcatcattgtcatcgttaccgtcatcatcgttagcattgttagccgccatcgacgaccaacaacagcagcgcattgaacacctcgagaaacagttgcaccagcgggatgccaccatcagtgtccttcagcagcagctgcatagtcgagaagcagtgattgccgaattgcagcgacatttggcggcacagaggggggaagggcaccactaattaagtgatggagagcaattggcacgcaatgttttgttgagtgatgtgtcaagttgattggattcaatattccggtgctgttagttttcgacagtggtgatctcgaccagggctgggcgaaacttcgagcttcgaaaacttcgcggtttttgggcttcgagcttcgggtaattacccgaagttcgagaaaatacacccctatgattagcttatagtgaatttnnaattaatctcatt

SEQ ID NO: 38743 - DNA, 1456 bp, Heterodera glycines
catcagtatcaataaagtaggtcaaccttcaccaatttattcaccagtggcgcctgcttacttatattaattaacattttattctttttttttatcatcgcaattgctatctttccacatatcttttaatattatttcttttgataatatataatttttattattctctcaaactgcacgatagtcattctttagtttatttttgtttgagctatttattaccatctaaagaatttctaaattcctttgtttggttgaatgttttattacttaaattataattaacagggttttcatttttatattttttacaatatttatttttattactttcaatggatttaattttaatattttatgcatctgagcgaaaatacaaactagtgttgacgagtcattcaattttccacgctttagcttttcttttatttattttttgtttaagtattctcattagtgtgatattcttattctctgcaggttatttgaatttttacaaaatgtttattaatttacgaagatacaattttattaattcataatgttattagctttttttaataaaaatttatagtataaaataaaaattagtcctttttttaattctgtgtgttttttttaaatttatttaatatcatgactatagcattccgttggcctggggccaatacccaagcagaagatgcatgccactcggttgcggccaccaggcccggcattcttgtatgacgggaattcattctttttcttatattattgttttattaataaaaaaattagttagcttaccactttttttattttaaattttcttttctcttaattgcataaaattttattattattattattagagtgcgccgggaccgggaattttgggttaacatttattatttgatttatttttagcagagataattgtttaaaatattattttcatgatcaaaataaaaaataagtgtcaaattataaatgttttcttttaatttaagtttagtaagatatataatttatttaattgtttagatgggaagaatttttttagataatagtatatatcataaaagtttataactttgaaaatgtattttttatggtttcatatcgattaaggcatttatttttttgaaaaatttattcataattttaaaaacggtgggaataaacgtactgagaagaacttaagatagtctcagttataataagaatggtcaaagttagatgttataaagtgagttgatttaataaaattatggtgagtaagaagtcatatttaggtccatactcagattatgtcacataaatagattatgattaaggaagttgggagaggaattaaagtgatttgtggtaggaagattcgtcgatgataatatttaaaataataagcactcgtttattattttttttgcatatattcattcaatttttaagtttgtagggagataatactttc

SEQ ID NO: 38744 - DNA, 1342 bp, Heterodera glycines
  unsure (1)..(1342): unsure at all n locations
actagagcccggaaattcaattnttgcggatcncgctgcgggattggtactgaaaattctttgcgggacgggatcccgcgggattaatcccgcaaatcccgcatttaaaatttgcgggatcccgtgcgggattgcgggattttggaaaattcgaaaaaatttcaattaaattcaaaaaatttccaaaaatcaaaaaatgctgaaaaataaatttttaggggctgtcgggatgcattaaaaggggctgatgggtcgactaagatttttcgattggatccgacggtaaaaagttgatcggaaatcaaattattaacggttcataaattgactatttttttcttttcaaacccacttttttgcggtgcaatttttcaaaaaactaggaacagagggtccggcggtccttatcagggatggcattccgaggccccaaaaattttcggaagtcggaaatcggaattccgaccccaaaaacgtcggaaatcggaaatttttcaaaaaatatacaatataataaaaaatttctaaatattttaattggctaaattttttaattcttaaccaagtaaaaggtatttcacaaatgtttttagtatattcgcttgaaaaaattattcaatattttatcaaatttttttttgtcatttttcattattttagaacatttttgggaaaaggagtgactatttttacacgttttatacagcgcgattttttcaaaaactttttgggaacttggaggagggtacggcggtgccgataggcgccgccgggaaaattttgttaacagattttgtccaaaaattacaaaattttgcgattttgagcaaattttgcaagaaaaatagggatttttagggtccggcggtgccgataggcgccgccggggaaaattttaaaaatttcagttcaatttattaacagaaattgtacaaaacttgctagttttttgaaaagaaaaatttaaaaaatttccgacttttcatcaaaaatttcggaagtcggaattcctaccccaaaaatgtcggaaatcggaagtctttccgcgccatacctggtgcctatcgacatctgcgagaaattttatgaaatttaatgcgatttggtaacagatttgtctaaaattgaccaaatgacgcagtttttgactcaatttctacaggattattaagaaaagcctatcaggcggtgccgataggcgccgccgggaaaatttcacaaattttaaatgaaatttgcgatgaaaaatgagttaactttaattaaatttattatttaatttatttaaaaatatttggcattctgtcttagaaaaattttcaaaaaaatcaataaaatcccg

SEQ ID NO: 38745 - DNA, 1047 bp, Heterodera glycines
aaaaaaatgaaaaatcgcagaaagacactaataaaatggaaaatttcaactcctatgaacatgcaaatttacttttctttcttattttaagaattaaataatattcatttaaataagttttataaggatcaataatgaaaatagccaaaaaagcgcgcaaatcgctgaccgcggtcacatcacaccgttagcacttaactgctaatataaaaattacccatactttccgctgagattttggacaattttcgctcatgtcgttgatgcatttgggtggcttaaagcgaaaatttttaaaatatgcaaattttcacttttttttaaatttacctcttctcaacaccatttttcgtgctcgaggataatccgcaaaaacaacactgaccgcgtcacggctcagcgtataaaccgtggaaaagccaacggaacggagctgaagagttaattagggaaagaacaaattaattgttcaattaatttattgattaaaataaggtaatttaatttcttaaataggatcttatttttatgttttacatgtttttatctataattattgcatgagaagcccaagcaataattcttataaattttatgaaaaatatttctgtttttagtaaatttcggcgtgcccgaattgttagtgacaaatgcaaaactttagtaacgttttttgatatgcaagaattgtttgaggtttagaatatcagttcgaatttttttaagattactgtgtacggatggatatcctgcgccgctgaccaaagcccaatcgccgtacaaataatccacggataattggcaaaaaaaaaatttttttaagtaataaaataatttatttattaaaaaaactatttatatacatcaaataaattattaataatttaatgatgaatttttctctttaaattataattatattttcaaaataaaattaaattacaaaaaagttatttttaaccgtatttataagttaatttattaaattattatttgtaattagaaagataaaaaaaattttgggatatattttctgctttacctttc

SEQ ID NO: 38746 - DNA, 71 bp, Heterodera glycines
tgcctttgttatttattagggcgtttattctttggtaaatattgttttaacaggcaaaactcggtcatttt

SEQ ID NO: 38747 - DNA, 960 bp, Heterodera glycines
ttttgtttaagtcgcgttgaattcgtttccgcgttaattatcccttcatccgtccgttcagtaatggtgccttcctccgtaaatggcgtgttggtgtgccggcgacgggggcggcaacatttgcatttgcttcatgtgaggagcaccacgaaaatgtggctgaaaaacatcgaaaaaagggggtgaaaaaagctaataggctgtccaaccggcggtgatggcataattgggggcaaagggagcacccccggagggggaggagggggcgccatccaaccgggcggcacaaagggcgacgggggcgtcggcgagggaacgccgccctgaaaagttgcgaaaaattgggaattttttaatttaaataccgccaagaatcgttgaagttcctgttccgtgtccacaattagcacgaagaaaggagaacctatgagaaacaaataaagttttgtagaaatggaaaaaaatgacagaagggaggatgccgaagacctaataaattttaccgaggtcccagcccggtccgtttttttaggggggggggggaatacaaggacttggagttcccgtaaatgggtctattgtcactaatttgcacccggaggcaaataattgtaaatgtaaaaaatgccaaaaaaaaaaatcctacccggcacgtgatgtccatgccatttgacctcaacttggtaatcgccaggctcacgaggttcataccttagaaagaacagcagagtaatataatttatatttttaattggaaatgccaaaattgcccacttgcaatggatggtccgttcctgtgccgagtcccgctgcatttccacattaaatgcccccttagggcccctcactcgcacagtcagttggccggcacccgcgcctgaaaattcagaaatttgcaaaaaagaaaaaactgagtttttctaaccctttgtgtcaacaacaaaatttgatttgaatgtg

SEQ ID NO: 38748 - DNA, 961 bp, Heterodera glycines
tgctgcccttctccgctggcgcataatcccttcctcccctttcggcttcttcatcaaatgcttttcttccctttccttcaacttttttacatttacagcattgcgcacataaataaaatcccaataatcgctgtactatttttatcttggctaattcccatttcgaaatcccaaactaatttgtgtcctccccgtcgcttcgctgtcccctgcggtcaatccccgaaatccttccctccctcctccgctttggcttttacactttcgcttttcctccttccctttattctccccctccccgtaaccacagctcatatcacaaaaattgacgttgacacctgctactgcttctgctgctgctttttctgctcgtggcattgcgatggaaaggtaaaaaaaagtcagtcgaattgcggcggagtgagtgaattggatgggttgggcttgggcttgggtttggctgagttgtggtcagtcccccctttgcccctcccttcgcttttcattttcaacaaaaacaacggaaatggccttctgctgctcctctgtctctctcaaaaacatatttataagctaagacttttcgcttttcattttcgggaagcgtaaaatttgattgggaagagaaagcccttcaatttatgctgtccatccctttcccgcaatcccttcaaattgctttaaatgagaagctttgagggtgcgataggcgtcgcattggccatgccctccggctttgccgtccattccatcgctttcccacggctatcgttcctcgagaagtgccaaaggaatgagaaaatgtgtggctgccttaccttatttaattaggttatttagcacccaattagaccaatttatctgttgaattattttcgagatttccgttgggctttccgtggctttgctaatgcaaaattcttatgggcaattgcctatcaatggcacacttccgttttaa

SEQ ID NO: 38749 - DNA, 731 bp, Heterodera glycines
gccgccgggggcaacggtggctcaagaatgtcccggtaacggctgaccatcaaaacggacagaaagtaaacgacggccaacgcgaggaattgggcctgtttagtctcctccttgaaaatggaattattgaaatatttatttgtttttccctggattaccatgtccctgtaaatgacacctttcagcctttgcaagtcaacattttgtaacagtcggtcaaagtcggagattggcttcgacgactcgcactaaatgagcaagagttttaaacccttaatctctttaacggggacgggacaaaacgacgccattaaagaaattttcaaactatcttggaaagtttttttgatttcaagaataattttaagaaaaaacgctagaaaaatttttcattttttcttgaagaatctctacataaaattttaattttttttaagatttcggctagaagttttgccttggcgagattacgggtggtgagattttggggtgcaaccccctaaacttacaaattttcgaattgcaacaaattttggcgaattgtcggtgttgtacagtccatctttgtgcattgaacacgccaaaatgttacgaacggttacagtggaaactgcgtgaaagaaattggagtaaaaacattaaaaaatcagtaccaagtctcagcgattggcgcaaatgccacccgatggcatgtttttctcctgctccactgaaaatggaagggttttttt

SEQ ID NO: 38750 - DNA, 1088 bp, Heterodera glycines
  unsure (1)..(1088): unsure at all n locations
cacttcaaaaaatcatttccttacacaaaagttttttcaaacacttattgccgatctaatttcttgcagatttaaagccatccattgcctgccggttctcggcacagcaaagcactaatagggtgtttgacccacttcaaaaaataattccatacccaaaagttttttacaaccacatattgccaatctaatttcttgcagattgaaagccatccattgcctgccggttctcggcacagcaaagcactaatagggtgtttgactcacttcaaaaaataattccttacacaaaagttttttacaaccacttattgccaatctaatttcttgcagattgaaagccatccattgcctgccggttctcggcacagcaaagcactaatagggtgtttgactcacttcaaaaaataattccatacccaaaagttttttacaaccacttattgccaatctaatttcttgcagattgaaagtatccattgcctgccggttctcggcacagcaaagcactaatagggtgtttgacacacttcaaaaaataattccatacacaaaagttttttacaaccacatattgccaatctaatttcttgcagattgaaagccatccattgcctgccagttctcggcacagcaaagcactaatagggtgtttgactcacttcaaaaaataattccttacacaaaagttttttacaacaatttattgccaatctaatttcttgcagatttaaagccatccattgcctgccggttctcggcacagcaaagcactaatagggtgtttgattcacttcaaaaaataattccttacacaaaagttttttacaaccacttattgccaatctaatttcttgcagattggaagccatccattgcctgccggttctcggcacagcaaagcactaatagggtgtttgactcacttcaaaaaataattccatacccaaaagtttttacaaccacatattgccaatctaatttcttgcagattgaaagccatccattgcctgccnngttctcgcacagcaaagcactaatangggtgttgactcacttcaaaaaataattccttacacaaaagtttt

SEQ ID NO: 38751 - DNA, 1022 bp, Heterodera glycines
tgctacgtgagaggtgaaattcttggaccgtagcaagacggactacagcgaaagcatttggcaagaatgtcttcattaatcaagaacgaaagtcagaggttcgaaggcgatcagataccgccctagttctgaccgtaaacgatgccaactagcgatccgccggcggatttattcgccctggtggggagcttcccggaaacgaaagtcttccggttccgggggaagtatggttgcaaagctgaaacttaaaggaattgacggaagggcaccaccaggagtggagcctgcggcttaatttgactcaacacggggaaactcacccggcccggacaccgtaaggattgacagattgatagctttttcatgattcggtggatggtggtgcatggccgttcttagttcgtggagcgatttgtctggtttattccgataacgagcgagactctagcctactaaatagttggctcattgcttctgtgggcacaacttcttagagggattttcggtgttcagccgcacgaaattgagcaataacaggtctgtgatgcccttagatgtccggggctgcacgcgcgctacactggcaaaatcagcgtgcttgtccttccccgaaaggggttggtaaaccggtgaaaatttgccgtgattgggatcggacattgcaattattgtccgtgaacgaggaattccttgtaggggcgagtcatcaactcgctctgaatacgtccctgccctttgtacacaccgcccgtcgctgcccgggactgagccatttcgagaaattcggggacggttagtgttccggcttcggtcggtatgcagactggaaccgatttaatcgcagtggcttgaaccgggcaaagtcgtaacaggtagctgtaggtgaacctgctgctggatcattacccagtgatcctattcacacctacctgctgtccctgtgggctagcgttggcaccacaaatgccccgtccgctgatgggcacaggtcgttcgagatgacttgtggacgctgcccaaca

SEQ ID NO: 38752 - DNA, 1022 bp, Heterodera glycines
  unsure (1)..(1022): unsure at all n locations
ttacgaatactttcccattagcttatatntcatttgtcctttcaatgaatttttgatttgtactatttgcgtttttgaattccaagttctttaatcatttctaatataaatgagattcgtctctaagtttttgttattttactatcaattttatcccattcttttgttgaatgtttttttctttttgctttattttctcttttattttaaaaatttttcaaatatatagataattatttcttttttttcttatcatttcgtagtttttcttcattttcttcccatttttctccaaatatttcttcaaatgttttttgctctaattttttcttttctgatgatccaattttttcaatttgcgcgataatatacaaaaataaaaataataatggatataataatataataatttactaaactaaaataatgaaatttaatgaaaaaacataattttaaatatataaaataaattttttgttttcataaaaaatcattatttttcaattttaaatgccaaaatatttccaaagttcatcctttgccgatcagatcgatcaaactctgaccacagtaccttttttggcattcatttgctgatcagagccgatcagatcacatacatcgccgccattgcttgcgctgttcgtaggcaaacaatgggctgtaaaagctttctcttcctaatggctcgttattggaaaggaacaaaaaatatataaaaagcgtgttcaaatattgcgtttaaaatttataatttatcaacctttcatattttaaaaagtgtttccttaattaagaaagcaaaaaaaaaacaatcaaaattttttattttgtggcaaattttttaatttattgcaaaaaataatttttaacttccaaacctattaataaatgtatcacaccacggaattaatatttttaaaaatattattgaaaaatttaggtaataactatgttccttgtccagcataaataaaaacatatacatatttacacattcatttaataaaaatattttaaat

SEQ ID NO: 38753 - DNA, 1032 bp, Heterodera glycines
  unsure (1)..(1032): unsure at all n locations
gcataattttgcttaaatatacaaaaggaattttcattggtactttcgattttttctctattagcatgcaaaaaatcaataattggtntaaagcaatgttatgccatattttgttgagaaaaaagtgccaaatggcgtatttttgacgaaacgactcagtagggaatcgttctaaaaaataaattttttgattttgtaataataaattattgaaaaaatatgatgatagcaaaacaaattgcaaattttatacataattaaattgaattaaattgatgaattttatttttaaaagccatttaagtaagcacctgagtgaataacaacgggaatagcagtgagccaaattcaaccgagatcagtaagccaacaagtgaagaaaattgttcattttttctgcctccaaataaaatttttcatttaattttgaataataaaatgccaaaaattcggtattacaattttcgccgcctgtcatactgtcatggaaattgcaccattgtgccaacactgtgggccaaaacagtgctaatgatgcgccaaataatgtgacagcaacggtacgcaaggacggcacattcagcgcgcaaaaagcaagtccggagccgaacttaattggaattttaattttaatttaattataaaaagatttgatttatacaaaaaatagaaaaaattccaaaaatgtaagtgaaaaaaaaaagttttccataaaaccataaattcaagtctttatttttacatctatttagagcatttccgcttttttgttgttcgcttattaacgcactaaaaattgagtaaagttccgatgatggaaataaaattttaataaaatataagcgaaaaataattatgtaataaaaataaataaataaatttatattgaatcaatccaaaattttgtatttagttatatgaaaatttaaatataatgagcaccaaaatgaaatgaagcataaaaattccgaataatttaactaaaattttaaaatggaataaatttaggacgatttaaattcatttttaatt

SEQ ID NO: 38754 - DNA, 433 bp, Heterodera glycines
ctctggaaattgtgcggatggcctagtggctagtctccttgctttcccttctttcccctggttcaatccctctacagaaactaacatattttgaattttctttttgtatattcatggctttcctatcgtcaaaatatgattactcataattttattttaattaacacatttttatcattttttgaggaaaattcgaacaaattgagcatagtaatcccaaaaatcagcattttttgtagaaaatctgttaataaattacactcaaattttcaaaatttcccccggcggcgcctatcggcaccgccggacccccttcttccccaaaagttttttggaaaaagcgcgccgaaaaaaattatgtaaacgttctgaatttctataatattcgatcatttagtccaaaaatgattaattgtttgaaataattaaagaa

SEQ ID NO: 38755 - DNA, 307 bp, Heterodera glycines
tttggttatatcgttttgcttttggtggggtgcttggcactgtggaatcatgcgcacccgtccgatctggcaagttaagctcgattgctgactagccaaaaggttcggtgccgtgatgaaacgaaccagcactgcttaccccgcggcacccggcacggtcccccgaaggaatggatttaattaaattctctccttcggggatttttttccattaggtcgtccgttagcgttcgattgctccagtcaatttttaaaaatttttgttgaaatatttgtcgtgctctgaagggcgggggagggggggggg

SEQ ID NO: 38756 - DNA, 733 bp, Heterodera glycines
tacatataatgttttttaaaaataggcacaaacccatttattggcattcacagttgccactttatgccgtttcggttacagtatccccttctcccatttagtggacatcaaaagcaccacaatacggtattcaccaaacatgggcacagcgaagaagatggtggtgatcaacagcagctggaggacggcgaaattacgctacacaacgaatgctattttcgttatgccgaaacggatcaccactacgcattcttgcgttggttacaccacaaaaatgtgtcccattacacacccatttcgccgtcatatgagcaaattttgcgcagagttcaagtacagcaatttaatttgattagtggttttgccaccattttttttattaacttgtcaatagtcctcttgacaatttcgattaatgagattttgtgcagatgattttacacacacacttttcagcccgatgacataaagaacggactacagataaccatgggaacacagcacggacaacagccaagctgtgacatcagacatcggagaatgaaggtgcagaatattaattaaagtttttgtataattttaagaatttattttcaaatgttatgagagggactcattattttataagaagggtaaaaaataaaactaaatttttgggcccattggtggcaggccagcattaagcttgggaagggcgccgaaaatccaccccacccccaaataaaaaggtaat

SEQ ID NO: 38757 - DNA, 839 bp, Heterodera glycines
tccaatcgcttccttttcccattttgtccatttgctttcgtctcgcgcaattggacaacggaccaacagaaaacggcagctgaagtcaatccttttcaacgtcaattgttcccgagtcgattcattggtcagatcaaagggcacaacggaagcaaaaggcgaaggaaacgaaaggtaaacgatggaattggcgggagaagaagcattggcaaatgcctaaagcatggagaaattggttgagaaatacgaaatgataaaagagccaaataaatcgattcgaccgaactcaccgctttgaaggcttcaatctttgacgccaaatccccgtcatccttgttcaaccagcatcgcaacacttttggcacatcgtccatgcggggagtgaaaagccatttggccatcgcttgtccatccgacgccatggcattgtcatcggccggaaattcggcgaaaagatcgtcaacataggagacaatgcgaagagatggacattcgttgagaattgacggcacgaattggcgcaaacggtggaaaatttagcttcgttagactttgtgctttcgaatgataccaaaaagatagagtttgttcgaatatgaacaaagcgtgcgggggttcgaaggacaaaaagagcaaaatttgctaagtttttgactaaatccactcataactttttctcagacgcaaccaaattgtacaatcttggtatcatacgatagccctaagagttctctattaacttgccaaatttcaaaaaattttattaagtttttcaaagttatgacaattttttcatttttttggatagaactttggaaaatcttaaaaaaaatttttga

SEQ ID NO: 38758 - DNA, 1075 bp, Heterodera glycines
gtaacaaatagaagaagataagttctgatcaagcacacacctttcattatttccggttaaatatgtgttcatattttaacaaaaagcagtcttgaatgtcgtcgaaatttgtggtaattccatggctatagccccgaccaattgcgctggaattttgccatgaggcttattttttgtgctggtttcgaatttacaggcgcccatgcaattggagctcattaaattttttgtcgatttttcttcaatacccactttaaacgataagcatttcctcgcacaccgctctatttgctctgttttaaacaacaaaattttcccaagcattcatacctactttcttaattgcactgggatcacatctaaacgactatgctaaaaacggggaactaaactgtattaatatttttaacaaattgcagtccttttcgcctaccctgttaagagaaatcttaatttcactaataatttctcaattttcttctataacagattatctcttctatggtcagtttttcaatttctatgtactttattaagtaaacaataattatcaaacatttttctatgattgcaaagcatttaaaaaatcataggcttgtttattttcattatgttttggaaaaggtcaattaaataaacaatttttttttgtaattttattaattgtataaatcttatgcaattttctataagcaatcgatagtgtaacaaatagagaagataagttctgatcaagcacacacctttcattatttccggttaaatgtgttcatattttaacaaaaagcagtcttgaatgtcgtcgaaatttgtggtaattccatggctatagccccgaccaattgcgctggaattttgccatgaggcttattttttgtgctggtttcgaatttacaggcgcccatgcaattggagcgcattaaattttttgtcgatttttcttcaatacccactttaaacgataagcatttcctcgcacaccgctctatttgctctgttttaaacaacaaaattttcccaagcattcatacctgagagcttaattgcactgggatcacatctaaacgactatgct

SEQ ID NO: 38759 - DNA, 948 bp, Heterodera glycines
acaacagcgatttgtttttttaatattatatttaattattttcatttttttaattaagatctcccgagaatggatgcgaatgaacggcgcaatcgctccgttccgcaacattctccagcaggcgtcgtccgtgacaagcactccgtgcgtttgttcatatttctataattaaagtaattagccaattaattagataatcagttaattgtctctttgctcagtttgccaaaccatcggccaatggctcagtcgccggccgcgcccgccgcagcggcagccgccagcacagcgagcgcaattctcagcgcaaaagcggccgccgccgctgctgtggacgacgaattgggcagcagcggcggaagcggcagtcaaacgctggtggaagccattcaggtgaagcaaaatgggagaattaattagtcattttatttatttatgcaaaagagaaaaaagtccacaaaagggagtaatccacttactctgcggacatgtcatagattaatgtcgtcctcgagtaatatggatcaacaattaaacaaaattaaggaatcacaacaaaattaaataaaagaatgaggtcaatcaatcaataaaaccaaatcacatataaaattataaatagctttaattaattaatcaaaagagacaattcacttttccggtcattttattcgttaaggagtttaattttagttttaaattgatttaaagaatttattttaatgatttctttatcaagttgattccacaattttgtagccctccccgcaaagggaataaattttttgcctaatttatattttgtgttaaacctataaaaggggacattaaagcgtttagaaggtttgaaaattttaaataaatctagatctgttcggccataaacaaatttatgcgccatgaacagatcaaatagctttcgcctattctcaagtgctggtagttgta

SEQ ID NO: 38760 - DNA, 1073 bp, Heterodera glycines
tttcccctccttttccgagtgaaaataaattttgcccattttgcgccaatttgaaaagaatccaagcgaatgttccctatactgccgctgtgaacagaattacatcgatggagtagtatgccaaaatgccaagctcctcttcccatggcaaattcaattcgttcagattggggaattcggccgcgaattccgtccatcggattaatttttctttggccccaaatgggctcaaaccgaactttcgcttcaacaatttggcattttggctgtaagaggggtcatttagcacctgaaaagcatttcatttaatccattagatccgtcccgattaattaggtaattgccctgtcaagtccttcaatgatcagttgctcggccccctccccattgagttggccaacgtccaattggatggcaattcctttcactcgtgccaaaatcgcattgtacagttggtcggcaaacagcggaatggccaatattggcaccccaaatcgcgctgcctcactgacactgttcaaaccgcaatgggagacgaaggcgcgcattttggggtgcactttaatttaaaatatgaaatttaattaaaaagaaaaaatacagtcaaagacaaaatggcaaaaacctaaaataccttactacccctgaattagaagctctctctcaactcttttgtgcttttcgactcactcactcagcaacgatttttggtccatccatttcaccgggtgcacatttttatatttggcaaacattttggcttcttcttcggataattcaattttccaaataaattcatagtccggaaagcgggcaaatgcttcaaaaaatgccaatttcatttcgcttttcattgttttgatgtcgaccatagtgccgaaggaaataatcactgcgccggcctgcgaattgtccacgacggcttttatttcctaaacattttcttatttccttttaattgtcatttaggtagacgattttaccggctccaattctttcgctttcatttccacgagtccgccaatgtttatgattttgttcgaaattggtctcggcatttcgaagaactaaaa

SEQ ID NO: 38761 - DNA, 369 bp, Heterodera glycines
tcgccatttaatttcacagagaatttttaaatttatcttatatccaagaaaaatgactatctcttattttgagaaattttatacgttacaaaagcgctcgagcatgataggaagggcggtgcgcaatcgccatttaatttcacagagaatttttaaatttatcttatatccaagaaaaatgactatctctcattttgagaaaaattatatacgtcaaaaaagcgcctcgagcgtgagagggagggcggtgcgcaatcgccatttaattactcagcagatatatttatttaatctttatcttatatcacaagaaaaatgactaactcttattttgagaaatttttatacgttacaaatgctctcgagcat

SEQ ID NO: 38762 - DNA, 562 bp, Heterodera glycines
caaaaaaatcaaatcattccccccccccctctcccatcggccaattaatcacttcccttcccgagtcagctgcacatgtgtgtcatcttcaacaaaagcgtttgtcattcatcaattagtgccatttgcttgtcctttgcctccctcctcagacaatgtaccgttacgcagtgcgccactggagtaagccggcgcacagttacttagtgaacaacgcgggccaaactccgctcactttggccacaaaacttggccggagggaaattttcgacgaaatgctcgaattgatgaaggcaagcgaaccaagtctgaattggtaaaatgatcatttgtcaggtggaattttggcgcttctctgacatgacatgcagtgcttaccctttggaagcattggacaccatccgattggacgggaccaccagtcattgacaccctttgaagtgccattaacgaacggaccaccctttgacacagattttgactcggcacttacgacggtggtcaacggagacagctcagatcacttggaaatgatcggcaacgaagtgatccaacgactgct

SEQ ID NO: 38763 - DNA, 1027 bp, Heterodera glycines
  unsure (1)..(1027): unsure at all n locations
ttttattttacttacatttattactgtttttcttttnttctttaattatatatattctttctactgtttttctcatgcccattcaaccatgtatataaactagcattttcatttttcgctaacatttattgattgcgtttttcttaagaaaaatgatttgatttaatatttttctatagagttatgatttaaatttgagtttttttccactttaatatgagaaaattacgttcaaaattgaagaacttgctagttctcgaaactaaacgtttctcgatgtcttgctgtcccttgtgagtgttttaaatttgcatggtattaggacgaattgacaaaagtatcaatgttcgtaataattaaattaattattattttaatttaatttactaaataatatcgtcaattagcttaaaactagtcaaattaatgaaatttagtatttagctagagctccattgcaaaaaaaaatagggtcaaaattgttgagtctaaatttttcatactattttggttacaactttttgtaaagctacgatttataggttctaaaaaactcccaaaataggtgctaaaaagttcagaatttaaggatgtaaaatggaaaattttcttcaaaagcaaaaatatttgccaaattattaagggcatacctacataattttcaaaattaaaaattttcgtaaagaaaataaacaaataaattttagaggtgaattttagagaaatttttcattttttaagggtgtttttttttttaatttttgggttgattcttaggtatgtatttttcgtttttattgcgtttttgttaacaaatttagggaaaaacgccaaaataggtgaaaataagttttaatttaaaaattttttttaggttttttaggtgctaaaattaaaaacctagaaaataggtgctaataactcgaaaagtagcttaacaacaaccaaaaaaaaacatgttttctgcatttcagaccatagggagctcaggaaaaaaatatgtaaaaacctaaaaatcgtagcccta

SEQ ID NO: 38764 - DNA, 1111 bp, Heterodera glycines
tggccatttcgtcatcctccgttctcctcttttccagcaaacgccacacgttttaggacattccttctccataaatgccctccaaatagggtcaatgcatcgccttttgtttgccgggcattcggactgtccgtttgggccaatgccatcgcggcacactgaaaaagacgagcaattggcactgatcactcattctgctgctcttctacctgtctgttctgtctctatttcacctgttatgcttcctctctgttggccaaatgtccttgtccattcgccgcatcgtccgcatgttttcgggcactgttccgtcatcaaatccctccacaacggctcctcacagcggtatttattcgccggacaatccgacggccgtcccggcgctgccaaatccgcgcattgcgtttccgtcgcctccgaagtgccgctttgggcttcgtccctttgcttttgcgttatcggcttgtccccgcagcatcggtcctttccgcttttcgtcgcgtcgtacggatgcgtttccggacaccggggaatattatccacggccaaatacgcttaacaaaacgtggagtggtttgatcggaatgcctttcgcttacgtccgcagtatttgcttttccgcccctttcctttcgttggctttccctcgggcgtataaccgtcgattggcgacgaatagccgcagcaaacttcgcggccatcgacggttttaagtccgctggaagaggcggggcacgcgttagtgcctccgggcaaaagaagcggcgctaaaggaaaagcgaaagttaaaaaaaggatggaagaggaaaagcagcgattattacgtccgcaaaactccaagcagaacaaaattggagcggacgaggcccaaatgagaagagagagaagcgattgggggaaccgagagaacatttgaacgattggcggtaaaggaaaagggaccgaagggacactttaaataggaggtaattagaggggagggggtaattagggagggaggattggcacattggcaaagaaaggatggggacaaaggaaagagttgcaacggacggctgaccaaacatggccaagagaagggacaaagcgaccgggggggggggggggacaa

SEQ ID NO: 38765 - DNA, 215 bp, Heterodera glycines
cggtgtcatctatgttactagatcggggatcgatccccgggcggccgctcgagcaggacctgcagaagctagcttgatggggatcagattgtcgtttcccgccttcagtttaaactgtcaagagtatgagtatgatggtcaatatggagaaaaagaaagagtaattaccaattttttttcaattcaaaaatgtagatgtccgcagcgttattata

SEQ ID NO: 38766 - DNA, 895 bp, Heterodera glycines
tgttctccgccgcattattattttgccaatccattcgcctgtataataaaacatgtttatttgtgggaataatattaatgtttcataaattcaaataatcatttcttccattatatttttatttttttcaattaattaaattttacttttttttctcccttaaattgccaatcaattttaagttgtaatattaaaagtgactttttataattctctctaaatttgccatttaaagtgttaaaaggggcgaaacggtggctaatttttggaatgcatttggcgattgttggaaaagctcgaatttcttcttctgtttgtttgttcaaattgtgtgtcatgtcaaatgacccaattatcctccgatcacttctcttccccccccccccccaattttatattttattttattttttgcaattttttacgcctctcaaaatgctccccccccccttttcccccattcattcgccccttttgctttgtgtcgtgtaagtgtctctccccccttttgccaccaatttttgcgcacattttatggtcagcgccacacataatccaattttcgcgcgacgaatgtttttttttttgcgcgcgaaaatggggcggaaagccaacgaatgaatgaatgcccgcggggctttcatttggtcgcatttttgctttgggcgtctcttccctcgcttagatgtgatcatatcatccattgtaagcagatcagcgccaccatcggctgcagcatccgatcaccttcccatcccaactcaaatattccatttttatttatttaatttattatttatttccataattacaattaataatcacagaatgataacgaagccaattaaacctaatatatcacaattagcctttttacttctcattttcatttttg

SEQ ID NO: 38767 - DNA, 962 bp, Heterodera glycines
aaacaaaaaaatcgattttttcaagtgtccgtttggggtactcaaacatttatggggagcaaaaatccaacgcagaattaaagtacaggctatagggaagctactcccgaaggattcggtctccccataaatctgggcgcatcggttcggggggactgccccgaaaacaaaaaaatcgattttttcaagtgtccgtttggggtactcaaacatttatggggagcaaaaatccaacgcagaattaaagtacagactatagggaagctattcccgaaggattcggtctccccataaatctgggcgcatcggttcggggggactgccccgaaaacaaaaaaatcgattttttcaagtgtccgtttggggtactcaaacatttatggggagcaaaaatccaacgcagaattaaagtacagactatagggaagctattcccgaaggattcggtctccccataaatctgggcgcatcggttcagggggactgccccgaaaacccaaaaaaaaattttttggataaaaattatttaaatgaactgactagataatatttaaaataggttatttctcttcctttcagtatccctgcaaagtttggtgcgcttctgatcagtttctgaaaaaaaagttaagcctaaactttttggcctgtttaaaaaggaattaaaaatttttaaaaattttattcatctccctttttgatagaaaaagcatcagagtgcctaaactaacatgtaaataaaatttggtgcgtttcagaaccctttctgaaaaaatatttaagaattaattttgcaaaaaataaataaaaacgaaagactcagattttcgaaaatttttttgagccagctagctcggcgctcatttcagtgtaagttagtcctttaccggggagtatccctgcaaagtttggtacgcttctgctcaattagcaaaaaatatgagtgatcgaattttcactaa

SEQ ID NO: 38768 - DNA, 282 bp, Heterodera glycines
tataataacgcttgcggacatctacatttttgaattgacaataattggtaattactctttctttttctccatattgaccatcatactcatactccccccacccttttcttcttccggcacccacctcccccgctacgcgccgctccgctcccctccctctcttgatagtttaaagtgaaggcgggaaacgacaatctgatccccatcaagctagcttctgcaggtcctggtcgagcggacgcccggggatcgatccccgatctagtaacatagatgacaccg

SEQ ID NO: 38769 - DNA, 910 bp, Heterodera glycines
tctgtaaattgggttgtagtaagtcgatgggacagagtggctgaatgccatccgctccctctgataccacagtgattggccgatggttgagagtagcctcaacttcggccacaaaagtgttaagctcatcgtaattgaggatttttctccccaatgtccgtttaaagcaatttttgcataattgcacgaggcgttcgtaaacgccaccagacccacggactgatttgagcaataaatttccacttaattttattaagtgtaagaaattcatctttgttttgctgaactccctttggagttgtcaatttctcaatcgttttttgagataatttaaatgaagtggcattgtcactccaaattaaatctggtttcccctccgactaatgaatcgtcggaggacatttaagaaagattcggccgttgtgtcaagcatggcttctaagtaaactgctctcgttgtgaggcaagttactataataatccatgctttgaccttctctcctgccaatcgtgtctctgttggccccaaaaagtcaatgcctattgacttaaagggcatttgtcggcagactcgttcctccggcagtggaggcatttttggtaaggcaaattgatatgccttcatccttcggcatcgacggcagttttttataactctttttactgccgttcgagactgaggagtccaataattgttgagaaattctgtaagggtgctgtccacccctaggtgatgtcgtttctggtgacattgcaaaatgataagatcccggatttccgagttctttccaagaagtatgggatgtgaaaacccataaggttgatcactccttgccaatctcgttttcagtctcagaatcccttcactatcgattagtgagggaaattttgtgaattcatctggatcatt

SEQ ID NO: 38770 - DNA, 1448 bp, Heterodera glycines
cggcttaaaacaattaagggccataatttgttatccaactaataaaataaatttcttttttggttaaactgtacggcttacgaaacctgaaggcattcaaatttatgtggtggtttctaaagcggccattttttttgggggggggggctgctaattttccatatgtttaataaagcacaaacacctctgaaggtgtgcgaaatcaactcccttctgttggtgaggtacgttttgcatcttcgacctaaaacccaatcagaatttatctccgctgtttaattgcgagccgaacgcacatgagtaatattttctgccgcccatatgctctagaaaaggtcgccccatacagtgcacaattcacagcgaacttttgaaatgcaaaaactatttaattgtggcaaagtaaaattgacgaattgaaaatctgacagatatatatgaacaataacttgtggttaaatggtttgataatcgcgactttattattctcagaagacaacgaattttgatgcacaaaggaaatcagtttagtgaattttgattttcataatcacttaaatacaactttgttgatgttttctgtttcatttgtccttttcgcattccttccccgtctctccttctccgtctgttttgttgttctccgttttcgatttgtttgtcgtttccattttgttcactggacatgtcgggtaaagcaccgagtcaaaccaaatacgccatcgctgaggcataaaacgcaaaatgtatggctgaacaaatcgaaggtaaatggccaacacgacgggcagaattatgcatggaacgcaaaccatcggcagaaaacgattaaaaacagttaaatttcaagacaaaaacggaataatcggatgaaaacggcagacaaaaacggataaaatcacaaattctttgaattcttatcaaatggagcagtttttctgcgtattacaatgtgaacaaaattgtcagggtacacaaggtttctagccagccaaatgagcggagtgttgaggggcaacagaatgccatgggtcaccgcttcaaagtctgtttcaatggcataatcgggaaacactttgtgcagcgcgtcaatcaacaacacttcacccatattgccatcgtcaagttgttttttggaatgtaaaagcaattgacgaaatgaatatgatgactgaaaagggtaggaaatgtgcaaaaagattaaatgaaatgactgacggatgccttccaatatttaaatggagtggactttgttacgttttttttttggaaaagttgatgtaaaaaattaatgactagacgaaaagataaattgtatatcatgagtatcggtccaaaagatcattccaagtaaatttggctcaataaattagcacctcataaaatcgggcgggaatagtgctaaactgttcttcgcctgatgatgaacggagtcccatcagtttgtc

SEQ ID NO: 38771 - DNA, 957 bp, Heterodera glycines
gctatagaggaagctactcccgaaggattccggtctccccataaatctgggcgcatcggttcggggggactgccccgaaaacaaaaaaatcgattttttcaagtgtccgtttggggtactcaaacaattatggggagcaaaaatccaacgcagaattaaagtacaggctatagggaagctattcccgaaggattcggtctccccataaatctgggcgcatcggttcggggggactgccccgaaaacaaaaataaatcgattttttcaagtgtccgtttggggtactcaaacaattatggggagcaaaaatccaacgcagaattaaagtacaggctatagggaagctattccggaaggattcggtctccccataaatctgggcgcatcggttcggggggactgccccgaaaacaaaaaaatcgattttttcaagtgtccgtttggggtactcaaacaattatggggagcaaaaatccaacgcagaattaaagtacaggctatagggaagctattccggaaggattcggtctccccataaatctgggcgcatcggttcggggggactgccccgaaaacaaaaaaatcgattttttcaagtgtccgtttggggtactcaaacaattatggggagcaaaaatccaacgcagaattaaagtacaggctatagtgaagctattccggaaggattcggtctccccataaatctgggcgcatcggttcagggggactgccccgaaaacccaaaaaaaattttttggataaaaattatttaaatgaactgactagataatatttaataaaggttatttctcttcctttcatatccctgcaaaggtttggtgcgcttctgatcagtttctgaaaaaaaaagtaaacccaaatctttttgggcctgtttaaaaaggaattaaaaatttttaaaaattttttttcattccccctttttggataaaaaaa

SEQ ID NO: 38772 - DNA, 412 bp, Heterodera glycines
ttgagcaatttggcccacaaaaaaaaaaaaaattagggctgatcgagacaaatgttcacaattgatgaaacgggggaagaacggtactgattaaatttgcgaaatctgatcagtaaaaaaatgagacaattgatcaggtatgggtgtaccatttgatcaaaatgggtgaggatggcactgatcacgtgaattgggacaaatgatcaaagggaaaaatggggaaacggcaaaaaataaaaaataattttatctgatcaatgacaattgggaggagtgacattgaccaaaagaatgcgcgcaatttggtcaatgaacaaagggaaaaattgggaaaaattggatcaaaagagagaaaaaaaaggtgagtttgatcagaacaaattgtgtgcaatttgatcaattggggaaaaat

SEQ ID NO: 38773 - DNA, 1320 bp, Heterodera glycines
tccctgatcggcattgccattttcgagttttcagatcaccatgaaagagtgttctgatgaacatggtgtaattgacttttttttgataagcttcaaaacttaagctaaaatgaacaattatttcaaactttttggggcgactttttggatataatgaagttttcaaagttgaaaggatttttgaaaattgggaattaaattttcggaagatttttgtaattgtggatttaaatgttttcgagttttcaggacttgtccaattgtaccaaaacggatgatcatatgaattgtgccgccgaattggtgatcaagcctgatcagattggacaattacagcgtctgccaaccgtggcaattagcaaaacgaccaaaataccgaaaagcaatttaacagaaaggcatcgacgacgattggatgagggtaattaaaaattgagctcacatttatacacttaggcaatttttttggctcaagtacagtttatggatgcaatcgctttttatgtgtccaatcaataccccgtgtatgcatgacaatatccacaaagatttgctagaattcttcaaaattttgaatattctcataattaactagtcatattcacgtcatagctacatagatttgttaatacaacgaaatttgtcgtagtttttgttgtgttaggacaaattccgcaaaaatgtcaaggcctcgatcttcaatatccgattttgtcactgattaagccgtgtcatcccacagcaggtcaaccgaaatagagagttatccgaaacatgaccaccggatgaaactaattgattggacgcacaaaagtcgattgaacgcataaactgtacttgagctattttttatcaactcttttggacggatctattctggcattttgccgaaatttccttaattttgaattgtatacaaaaaaaaatacatggataattggaaatttaaaattagaaaacacaaaaagggtaattcaacaaatgctaaaaaattaaaaaacggggccgacggcacaaatttttcaaaccattttaacgctaattaaaaaagcactccctaaatgctaaacaaatttcaagaaggattcaatactggcgtgtgcactttcccaccatcacccagcagccaattggtgccggacacaattcctattacaacggttggcacaaaaaattgaaaaaaaacatttaccaacaaaatcccaaccaattataaagtcctggcaaaaaacatgataatcaggtgagtaaaagtacaattaagcaggatttttcttcttggtggtctgtgagttagtcaccaaaaaagggtcccaggtt

SEQ ID NO: 38774 - DNA, 1162 bp, Heterodera glycines
  unsure (1)..(1162): unsure at all n locations
acgtccntgtctatacntgcttaacaatttcaaatgccccctttgcttcgtcagctaattctttacacattaacacatcttttcggtctaaacacttgtccatttcttttctaatatgcccaattttctgctattcttcatttaatttttcggaaatgctttgtacttttctcaccccttctaaaagtcgtccgaaccatattttcatacccgaggcctcgggatgacgagacttaattttttctgcttccgtaattgctctatgagaagcagccgcgaaatctctggcttcgttattaaaataatcaaaatcttacgaaaaaattaaatatttaggttatcgaatgatacatattataaaatttgattcattttggtcaaatttttcagtttcttagattatgacttttttgaaacttaacgaatttttgaaattttgcagaataatagaaaaatttagtgctacgaaagatttcaaaatttgaaaatttggttcatttaaggtgaagttatgaataattctcttgtcgcgactgaacgttagccgtgaatgtccgtcgagcagacaaatggggaagacggtgaggattgaacgaagtagcgaacgaggagtgattgatggatgaaatgatgagaaaattagggcaaacgggaaatgatgaaggaaagaaaggggtgaagggaggggtcggctgacggcgggcacgtgaattaggggaaagaaaacgataaaaagcggatgcggcgccttccccgcgtgaaggacgcccgaggcagcgcaaaaacgccgatcggaccaccggcggagcgacggacgaaataacacatcaccaaagcggacagccgacgaaaatcggcggtcatttgatggaaactagcgaatttgcgggagatcaaattcgccctgacccttcccccccccttttctccggtgatgtgccccctccccgcatgtcaccccatatttgtgccccccatttgtgccatttttcactagcttttacccctcccattttgtctctattgacacaatttccctcctctttgtatttctcgcacatttattggaagtgtaggggataattatccaagtttgagtttgagaaaaacttgcggagtatttttggggcgaatttttgggcgggaaattgggaaattggcg

SEQ ID NO: 38775 - DNA, 921 bp, Heterodera glycines
tttttctttcgtaaataattccccttcaaaattagttcattaaacgctcctgtctgggactaacaaaaatggacgggatttttactggattcccagtcctactcccggaaaatttcggaataccgttaattatttattttttaagacgctctatagtatttgcttctaaggtccgaatccacccattttttgacggcaatgggcgcaccgcccggctgtttatgaacttgattttgcgccgcgggatgcgatgcgcgccggtcacgcttgatgaggggggcgacaggagtattaccgctgcttgaggcaaagggacttcgaaagctttgaagccgaaatacatagattgatcaatctgcagggaggaaatattaagaatttttagaaatttttaatgggaaaaattgttgaaattaaataccccagccctggatttatttaatttatgataaaccatttattcacatattttgtattgttatttgtttcaataaagaactttctctgatcattgtattttcatcacacattgagaattttgtgaaattaatgttggcagtatttcattaattcatatgttgatttattaatgaaaattttttcgtttcttgggcattgttccattttcggacataattcaatataatattgcaatgttaaaaaaataaataataattataataatgatggtgggagaatgtgcttggcaatagcctaaacaatgatggaaataccccattattcattctccaaacgctcagtttttcgtcctctcgtcaaaatcgactgtttcttgtccgtcgcccgggccggggtcacttcatcgcgctcaactctgtcgcaacgcgtacagtcagtcggcatgcaacgcattagtcatcagtttcaaattgcaaaatttaatgaaaaagggggggcatg

SEQ ID NO: 38776 - DNA, 1437 bp, Heterodera glycines
catcgcaaaaatttttttgtgaagagggcgagtgggtctcggtggtgtcgtaaaaaatgttaatttacatttttagaaaagatttcagtttttaaataatccttcaaattctcatccatttctcccctgttttagcttcccgtgcgctgctttccgtcagatggaaggcggcgaaattggtacgacaacgtgttctttgacccattgccaaagctgcgccaggacgacggcccccggggcgcagaaacggaaaataacgtcaaaatttgaggggatttacactcacccgcccccatgttactgttttaccggaaatttttttcctaaaattttaaatttgtaaaaaatgtatttcagtcgggtgcacaaaaatttaaataaattattattatttttgctatttttcgaaattttatgatgaattactaagttgtttttttgggtcaatagcagttcgtacaaaggcgtttcgtacaatggcagttcgtacaatggagtttcgtacaaaaaaattcttatttagtaaaaaataatgacgggctaacccctttctgcaaaaaaagattggggagtggaataaaatgttatgtaaatttaaagtttgtcgaaaacttcattggccaagttcagttgaagtgatgcaaattctccgaaaaagctcgaatgaattattattgttttggttattactattgttatttttataattattagctcattacttatttataatttgctttatttttgttattttgatgaaattatgtgtcactatcactttttttttttaatttgattattgtacgaaacgcaaaattgaaacgttgtacgaaccggcttttgtacgaaactccattgtacgaactgcaaattgtacgaactgcccattgtgcgaactgcccattgtgcgaactgccatgaccccgttttttagcttttccaaagaatcgctgaatttttttcaacaaattaattttgaaaaaaatattttccggcggtgccaatcgccgcggcggatgagtgaattccaataaatttacaaaaaatttatccaaaaagggatcattgttagaattaaaaatctggggggttctaattttttaggtgtggaaaaacctgggcacgataaatttacaaaaaatgattcccggcttttcgaattgggtgagaccaattccgactcgaggcccaccaatttcttaatttcaccaatgttcatgttgtgtttaaggatgccgaatgcgagggcagtttcgccattgagccaattgacggtgccgaactgaggggccaatgtttggccaaaattgcgaaataccaaacgaagcgaaaggcattggacaaagcagtcggccaaaacttttttgttggcattcagacgaaactgtggcattcagacgggccaagcagaaacaggtgaatgcaacttttaaattg

SEQ ID NO: 38777 - DNA, 88 bp, Heterodera glycines
taggcgtcgatttcctgcaacaacgcgattttttcagcaaaatcaggcgcggccaaggggtcatcgtcgccgtaaagcgcccgattag

SEQ ID NO: 38778 - DNA, 1045 bp, Heterodera glycines
cactgaaatgagcgccgagctagctggctcaaaaaaatttttcgaaaatctgagtcttcgttttttattatttgcaaaattaattcataaatatttttcagaaagggttctgaaacgcaccaaattttatttacatgttagtttaggcactctgatgctttttctatcaataatggaggtgaataaaattttaattgctttttaactttgggaaaaagtttaggcttaactttttagtgaaagtttgatcactcatatttttttagtctaatctactcaaaacggttcagaattcaataaaaataacattcacggtgcgaaaaatggggtttgacaagtttattggggaaaaaaagactttacaaaataatacccctgggagaagggagtgggaaacatgatttcaaaattttcaattttttctagtctaatctactcaaaccggttcagaattcaataaaaataacattcacggtgcgaaaaatggggtttgaaaagtttattttgaaaaaaagactttacaaaataatacccctgggagaagggagtgggaaacatgatttcaaaattttcaattttttctagtctaatctactcaaaacggttcagaattcaataaaaataacattcacggtgcgaaaaatggggtttgaaaagtttattggggaaaaaaagactttacaaaataatacccctgggagaagggagtgggaaacatgatttcaaaattttcaattttttctagtctaatctactcaaaacggttcagaattcaataaaaataacattcacggtgcgaaaaatggggtatgaaaagtttattggggaaaaaaagactttacaaaataatacccctgggagaagggagtgggaaacatgatttcaaaattttcaattttttctagtctaatctactcaaaacggctcagaattcaataaaaataacattcacggtgcgaaaaatggggtttgacaagtttattggggaaaaaagactttacaaaataatacccctgggagaagggagtgggaaacatgatttcaa

SEQ ID NO: 38779 - DNA, 1620 bp, Heterodera glycines
gtatcaatggctacccgacatatgaggatttgacatttgaggacacgacatttgaggacccgacatttgaggatcccgccttttgaggacccgacatttgaggatcccgacatttgaggacacgacttttgaggacccgacatttgaggacatagacattttcaaaaaaattaaatcgaaattttattttatatcattagaaaaagaagaaaatgcctttcccaaaggcaaacgggagcaaatgtggcaaaaattcttctagcacagccgaataattccaatctttcttctccacgtacagagtataggatcaggatgccaatatctgccttttgaaattttccttttggttataagataatcccagtttccaaaatcattgcgcataagtcgtttatgcaaagatctgagatattgtaaagtagatttctagtcacttcccctttggtctgggatcttttctccgaaattcctcacgatatttcccaggtcattatatttttcattcttttcccatttcgatcattcaacattttctctcattttctgcgatcctgggaatggccagcccgtttatgtatgaatttctgtcaaatcctcaaatgtcgcagcacggtatcaattgatacacaagtaaatattaattttcctatattagaattttctgtttgtagtgcaaatcatttttttaaatctaattcttacaatagaaaaaaatttttagttcattgattcaatctaaatatatttttatttaataaaaaatttttaatatttcataaaaaaatttcttaagtaatattacaatcacaaggttactatatatgttatattgacaaggagtttcgttgctaaaaccattttctcccggccgaaggccgggagcgccctgaaagtagtggaagggtcttacaactttttgaggcgcatccgggaaaaatataggttttccggtccaagggccaactgagtcccggcggctaatttctcacttttgtttgcatttgaaggcccctaactttttatgtaaaactcgaatcaaaaagtgcccgctgtgagggcactccgcctaagggtcctctacaaggaggtattttttaaaaatttttttgagcaaacccctggcctgcaaaaaatggcaactgaagcgtgctcaaaaagtacacttcagtaccaggcgaataccgcgccagggtttgcactgagcggagggtggccagcagacttattgtagagttttggaagctcgattttctgaaatttaaaaatttcgaaaattttcagaatttttcgagttaggcctaaaaaatggttttcgggtttttgaattttatgattttttaacgaattttcccgggaaaacgaagaccacttccaaaacatagtttttcgagctctatcgaatggtattttttttgaaaaaatttcgatttttttccggaaatagaaaaaatttttggcctaagcgggacatttgagtcccgggcccataactcgtcaggggtcggttttagccaaaaatttccttagagcaaatttgtagagctttttaagctctatcgaacggtgtgctatatctcgaaagattttcaaaaaatttcgagctaggccccctagaaa

SEQ ID NO: 38780 - DNA, 899 bp, Heterodera glycines
  unsure (1)..(899): unsure at all n locations
agatgaccaaaagcacaaaaatcaggcttaacatttgggtgatnntgatattcagcctttctataccgttgttggtcgtactcccataaagaactttttgtcgcccaacaaaacggacaacgcatgcaaatcaagtgagagtgactccaaagtaatctcacgcgggtggaggagggtgccttcagcaagcaatcgttttcgcgtcttaattgatgattttgtaagcataaaaacgtgttcacggaggtttcgcgattactgataagattaggctaaacaataccgcttcagtcaaccgtcttgccaagaatcgagacaaaaaggccggcaatcggagaccgctaatttccgaatttaccattttagtcgcattttcataggataaaaaacgaatgagagaactaaatgttttagttgatgcacatacttcagcagcaggtcacttactaataaagtgacccttcgattagtctttcaattgcacgtgcttttgccctttgttcgttgtccaacccatccttggaataggaaatagaagtaacgacaataatacgtgcaattacttcaattttgaaatagtccgacaatctccacaaaataatttgcgaatccgaaattcgttcaccattcaattcaatgaatggaaagcgcttttgcggggcatttcgaaggttccaactgccaataacctactaattgtaaaacaaattatggcattagaaatggatagacttcataagtgatttcgttcgccctgaggaaagtctcaacttaaaagaaaagaaaatagagaaatattcggtacttgtacagtttacaccccataaattttttttttaatttttagtgataaaaatgtgtttccaggggtgttcggggcccctcagcacgaataatga

SEQ ID NO: 38781 - DNA, 1213 bp, Heterodera glycines
  unsure (1)..(1213): unsure at all n locations
gcaaaagcatcactaatctttgttttttgcagcaggagaagtcccnggatcagagcgcctacatgtgagaagatgcaacaacgaccggcggatggatggacgaaacctgaagagcgagcgacctgtcagaagatgcaaagataaagaagatgtctcataatcgtgatctgtatttattgatgtattgtacatttgtatgcatatatcatttgctgtgtattatcactttatttccatctgtgttccgaaataaattgaattgatggtcattaagcgtgtgtcaatttattaactgaaatttggtcctctccctccctccctccctctctctgtttgacgtagacatttggatggcataaagttttttggcgttaaacattcgtcccctattagcgggtcatcacagaaaccgttggacatacggtacttatcctttttgtcatccccctgaattgttttaccttgttccccccattttcgaaaaaaatgaaaattttaaaaagtcgttaaacccagggctcggatcgacaatttttcaaaaacagaacagatttatttttaaaattattcgatcaataatgtattatttttttcgcctccgattgtcgaatttaacgatttttggggaggaaataagcaaatcgtaaatttcagtgcattcgggatcaaacaataagatttttaacaatttttgcgggtgcagtttttccataaaacttctggtgaacgggcgaggggagggggtccggcggaaaactgatttgttaacagaccaaaaaaggccaatttttccaataaaaggcaagcaatgactttttcaaaggaaagatttgattgtccggcttgttatttgtgattttttgaacgagttctgtccttatttgtgaatttcgtcatttttgtaccagtgttacctatctcaggaattgaaacagaaggaagggcacactctgaatttcagtttatctccaaatttgggcggctaacattcgaattccaaacgaaatgtgtgactggtagacttataggaaggaccacttttgtctaaaactcattttgacctgaatttacaaggagtgagcagaccgagttctacgcgagctaagcctccgaccaaacagacgccaaattttaccaccccgccccccttcctacaaaagcattgaattgaagcacatatgagcatttattaaaagcacacacaatacaatta

SEQ ID NO: 38782 - DNA, 291 bp, Heterodera glycines
ctaaaaacgtttaaatcaaattaattggcaaaaataaaaattatcatcgtacccaatgttcatttggacttgtgatccgctttcctcctcccatgttatagtgactgagttattagtgggcgatattttgaagctttttcttttaatcgtcaaaggctcttaatggggaaaaaattcaaattccaatcggaatttgacaaaaaagttaaaatgtttttagacatgaatgaaaacaaagacacgacacaaaatcaagaaaatcaactgtttgaggaaaaaaaaaaaattcat

SEQ ID NO: 38783 - DNA, 1005 bp, Heterodera glycines
ccaactgagttccagcggctcacataccgactttgccgccagtctcagtgatacgaaattttttgcttttgctttcagagcatagcggaccccaaaagagaaatgccccaactatggcctacaactttgccagcaaaaaaattttgatcagatcaaagacctgacctgtaggttaggcaacgtaagaatcactttttttggacacttcagtaccaggcgaatagcccgtaagggtttgctcggagcagggggtcgccagcggacttattgtagagctcaatgagctcaatttttccaaattttaaaatttcaaaatttttcaaaatttttcgagttaggcctaaaattcggtttttcggtttttgaattttatgattttttaacgatttttccagggaaaacgaagaccacttccaaaacatcgttttttgagctctatcgattagtgatgtttttagaaaattttcgattttttccaggaaatagaaaaattttttggcctaagcgggacatttgagtcccgggcccataactcgtcgggggttggttctagccaaaaattgccttagggcaaaattgtagagcttttaaagttctatcgaatggtgtactaaatgttcggaaattttcaaaaattttcgagctaggccccctagaaattttcggaaattttttttgggttgaaaaagagggtgaaaaatttttttctggggtattttgagatgctgattacgaatatgacctttgtttttcgtttcataatttttagaattttttaaaaattcgaaatttttttcaatttttttgaccctcgggattttggggtaaattttgaaaattcgtagctcattttgaagtgggacgattttcatgcaattaagctttaaaaatagcaaaaaatcgggagaattttatgaggtttatttgaaatttataccacaaaaacaaaaaaagttattccagaaattctggaaattttcgatttttcagaaaaaaattcagaac

SEQ ID NO: 38784 - DNA, 1270 bp, Heterodera glycines
cgacagaaggcctaatttttgttgtttttgaatggtttattcctgtttttccttttttcaattgaacaggactgtgccgccaagaaaaaaaaccgttttaccgggcgactcggtcccggttcaaaatttttgctgggcgccctccgggatcgggcttttttcaaaatggtcctaaaaaacttcatcaatccaaagttattttttgatgcgtttatgttatttcacgcttttttcagatgggtgggaggtccgtgcatgaatttttttatgaattagcgtgataaaaattaatgtctttttattttcaaatttaggacaaacaatgttaaaataatttagattttgatccaaaaatttattttcttataagtttaaatctgatgacatttaacgaaatctgttttgaaattgcaccaaattttcaaaaaccttgagttcggaaactttgaattaacattgaattaccatcaaatatggagcagtttcactggcggaatttaagcctattttatcccagtcaaaatgaccgggcccggtcttagacaattaatcgagaacgggctacccggccaaaaaaaagcgcgttttacaggacgacctgcccggtggtttgtccaaaaaacggaatcgggaacgggcgtcctagtaaaaggccgctgggcgccgggtccttccgctctttcgtgactcttagtaatttcttgcctttttaatgcatttttaaaaaatcactctttcgatccttttttcagggcaaggaatacaaaagaatgttcattcgcaatgcaagcgatgggctcattcccatgagaaaaagggccacggggagggatggcacgcttttaagccggactgtgtgttgactaagccgaccacgcgcagcgaatgccaacggaatcggcattggatggcacgcaattgtcccgaggcgtgtggctgtgaatttgtgcgcgatttgttggacaagtgcaggtgggcaaagggtcaaaaagatgccaactaatttagcatttcattatattttaattttaattttaaatttttagcaaaaatatgcccgaggattataaattggagccaattgatgaatgagaaaagaaggaaataatttcgaatggataagatataaatgaaattttataaatagggctgcaaaaaatatgtacaaaaagtggtccaaatatgtacataaatatgtaagaaaaatccccaaatatgtacaaaaaaaccccaatatgtaaataaaattttttttaatggtattttttgg

SEQ ID NO: 38785 - DNA, 929 bp, Heterodera glycines
  unsure (1)..(929): unsure at all n locations
aaaaacccccaaaatatgtaaataaaatgtttttttatggtattttttggaaagaaatttcnccgtaaagtatgaaatagccacaaaaatgacataaaaattactttctttggtatttttaggcaacattttcaaacttattctttctttataaattttcaaaatatgtaaaaaaatgaaaatatgtacaaaaatatttgccgaaattttggcttttttttgaggatttccaaaaatttccgtaaaaaatactcaaaatatgtaaaaaaaaaatgaaaatatatatgaaaaaaatccaaaatatgtacaaatatgtaagaaaatcccgaaatatgtaaaaatatgtaaataaaagtcccggtttttgttcgcaaacacaaaaaagaaagtgtttttcctgctatttagagcaaggagaagccaggaaaaaaatatgtatttacataaaatttgcagccctattaataagttaataaacaatcatcggcatgcacatcggcgatttaattcattatgagcggacgggaaaattattgggggacgcgtttatacacattacgaaaaaatttaccccccaaatcctaagaaatacccctcaaatccaccttttctctcctcaaattacccactcattaatttaaatttacattctatacctcatatttccctacccaatcagccctctcactcacaaaaatttttctactttaaattgtgtgtacttcaattgtcgatctatttaaataaaatcacgactttgaaccagggatcgcattccgggccccaaaaattttgggaaatcggaattccgaccccaaaaacgtcggaaatcggaaatttttcaaaaatataaaatataataaaaaataattagtagagctgttatttaaaaaatgaaatacttacttggccaaaaatggaaccatacg

SEQ ID NO: 38786 - DNA, 1268 bp, Heterodera glycines
atttaagaaaagttatgacgggggttttctcaaaaaaatctgtaaactcatccatccccatatgcgcggacaaagaaatgagcaacgagggaaatgaatgctctcgtaattaccagtttttacgcccacttaaaaaatggtctattttaaggaaaataacaatgactgccgggtttttagcttttaaatcaaaattacaattaacgaaagcattttggaaataaggcatttatttgtctcgcgaataaaaggaaggcatttgccatgtcagtgccgtactttccccgactcattttgaataattctttccttcgacgaatgcgtttgccaatttggccagtgtgttttttgtggccattttcgcctctgttacaatgaaagatgccaatgggaggccgtgttttttttggaattcagtgccaattgccggcatttggccattctccgaaagtgtgaccacaagccgaatcacttcgtgttccttttgcttctgaaaattttctttaaaattctcgtaaatattttcttaagcaaaaatcaaaaatttaacacttatttttttttctttatgtaattagaaatttttaatatgattcacttgcctcaatggcagcaaacaagcagtcggaaaaataacgtgccggattgcgtgcatgttgcacaatggcaatgaatgcatccaaactgtcaccactgaattctgccgttaatgcctgaatttggctatcagaaaaaagacatcattgttagcatacaaaaaataggggggtcgaaaaaaattaaaaatttttcccctttttaatgcatgcttattagtagggttcgaatttgcgggatcccgtgcggtattgcggaattttggaaaattcgaaaaaatttcaattaaattcaaaaaatttccaaaaatcaaaaaatgctgaaaaaaatctattttgacctatttggcatttttcccaaaatttgttaacaaaaacgtaagaaaacgaaaaatacacccctaagaaatgaaaaatttctcaaaaattcatgtccaaaatttttttttaaatttatttagctcattacttatttggcctaatttttttacttttttgaataaattttgtcattttacacaccttagaaatgaggtaattttagtgccattttccattttttagagcctatttttgaggtttttaggacctaaagccgacctatttttggcaatttttagagccgaaaaatcgtatccctagttattaattaacgattagttgggctgacct

SEQ ID NO: 38787 - DNA, 974 bp, Heterodera glycines
  unsure (1)..(974): unsure at all n locations
aatattcgtgactttcgcgcaaattcaaataaaaccaatgggtccaaattggctgaaatgccatggattacggcaatttcaaggaaaatatttgaagcagaaatggagaaaaaagacgaaggaaaaaaggaggacgaaatggccaaagaaaagtcaaataagctgaagaagaacatgtccaaattggaggagattttgggaaagcaaagagccgaaaagggaaaaaaagaacaaagaaaagaacgaagaaaagtgatgagagaaattgcgaagccgaggccaaagagagacgaaggtaattagggataattaggggccaaagaatttgcaaaaatgtaacgcatcagcggaagtgatggagcacgagttgaagcaatacccgcacgtgctgaagttggttcgggttgaacgtttttaccgcatgttggacaaatgcaacgaatacattcgaagaaaggacgaggagcactcaaagtggacaaaatgccaatgtcatttcaaatgtccaaattggcccaggatccttcagctgtccggattggcatttaacttgcaaacaaaagctgtcgagcgaaatccccttttgaatttgttgcaaatgcaactgagaaagaatgacgtcattggcaagttgtccattctgtcaccaaaattgctctccataatccccgaccgatccaatcagcaaaggtacacaaaccgccgtttgctcataataatcgtgccaaattgggtttaagtttgctcgcatcgcttcggcacaatttgaccagttttaactgttcgggtgtgctttcgcttttgctttcgcccactcttttcagttttcatgagcaaggcgaactctctctgccttctcttcttnaggtgtcactaataattaantnaatcatgccactctaattcccctgctnttagctncgtttgcccgaccgtgcccgaatcgtcgcttggcttgacctttgctgcgcatc

SEQ ID NO: 38788 - DNA, 863 bp, Heterodera glycines
agtgatgcttaatacttccatttacaaaaaggatttcattcggcgctgtttgcaatgtcgcaaggaagaacgggcagacgtaagcgaactcatgcgacacgagcttttcaagcccaggggacaagtaagcataggaatgctatttacatattccttcttcattcctcgttaagaaaaaccaacagccgccatcgccaagtgccaaaattgggcggattgagcaagtcgaatgcgactaaaacggccgggcaagagcgaacgatgacacatcacaccaaaacacaagcaaaaattgaaccttttccctttttcttcatatgagaatcagatgaagatgggggaggggtcttagaaaatatttgcgggcatgtgtaatgactattttccttctttcattagtagatgaacatcgtttttaatgttacgccgacaccaattccccacactcacaaagacgtgttaaatttatttcgaaagtatttatcaatcccatcgttcctaccaactctgtgttgtgttcaactgtataaataaagccgactgatgaggaacgttattttccgagttgagtatggactaacgaaatagcagtaggcaaacgttcataaaatgtagaataaaacagcaacgctaatggcataatgagcggtttataagttaattaataaaatttacgttttatcaagagagtgaatttaaaaacgttcctccgttaataaacgaactagtacagcacaagatattcgacaactgatccaacatggacatttccgacctcgtcaaaccgcccacaacgaacaccaaagtcagttggtcactggaagttactcgttaaacaacaccgaaaaagtgccaaccttttt

SEQ ID NO: 38789 - DNA, 941 bp, Heterodera glycines
cataccttttcatgtgtttgaagtgatccaattgcataaatgtgattttattgagaataaaatttcaacattctgttcacattcgggtccgggttttggaattggtcgaaagatgtcaaatccatgaccagcgagctagaaaacctctataatcatgcttttacaactttttaatttccaaaaattttcatataagggaaactgaccacaacaagcttaaatgtgaaatcagcataataccgtatccgtttaatttagtcttttgatgaatgaaatattccccttggatatgcgtggattcggaaagggcgtcgccaatttggccatttacggtaccgcgtgcgctctcgaccaaatgtttcctgtaattagtttttttttgccaatttttcatttctattttattttcgcagatttttctcaaccaaattggccaaccgcagacttttgccatttttgcgctgatcggtttttgttcactgtttttcacgtggcgatgtttgcccgaaacgcatggcaaatcattggaggaattggagaagcaattcaaattgggcgattggaatgagctgaaaaagcgccggcaaattcacaaaacttacgacgcagcgatcagaacagcccaaaatggatcaatcaataatattcaaatcaattgagaacagcagggtctcctccgtattttggtcatttattataataatgaattattttggtgtttttttttgggaaagccgtaatgagtccaaaaaatttaagcaaaattcgaatatttaatgtggcataagatttttgagttattatgattgttagcaattttctcttttttaacataatgtcccaacagaatttatcacgtacgttccggtaaaaaggcatttaaaaaattcatcgtttttgaatttacacagaaacaaattaagcagcaaaaaaaacatgaa

SEQ ID NO: 38790 - DNA, 862 bp, Heterodera glycines
  unsure (1)..(862): unsure at all n locations
cagtggcctgcaaatcaaagcagagctcgtcatcaaacgcagccaaaggaaggcaacgctcctcatacttcaaaaggaaagccggtgcatcaaatcagtgcacaaaagcgtgattattccacggatgttgcaagcttcgtcaagccaaaaaaagtcaaattacttacagctccaccagcatttattcaattacaattgcaaaaagaaaaaacactntgaattggacagtggcgccgaagttttgctggtctccgaaggcgattggattgccaatggcatgccaaaattgtaaacttgttctggactacacgcgtacggaggatagccaatcaaagtccttggtttcttcaattcaaaattaaagtttacttgtggagagaaaccactacggacttgtatgcggtcaaggacaagacaaagaatctgtgtggacgtgattagattcaaaagctacagatcgacttgaaaaatacgtggaattagaatggtgcaacaaattcgagacacaaaatccggaacgaagtgctccaaaatcacgccgaaatcttcagggaaagacttggccgctgtacacggcacatcacgttaaaatttaaaatggatgtagagccaaaaagatgcaagcaggtcccgtgccattcgcgttgcatcccgaggtgtagaaggttaaaaaccaatggtgccgaagcaaggaattcgggcttcaccggacaaggtggaagcaattcaaaaaatgccgacaccggaaaatttgaaagaacttcactcgtttctcggcatggttggctattacggtaagttcatcccttcattggcggtgttttcggaaccattgaatgaacttagccggacagaaaataaa

SEQ ID NO: 38791 - DNA, 1038 bp, Heterodera glycines
  unsure (1)..(1038): unsure at all n locations
aaacaatggtttggaagaggtacaagacctgttaagagagcaaacataattcatatgtcacctgtttccatgtctttgtggaattggctttgcgtcctgcatcaacagcccccgggaagtcaccgagttcgacaagagtctttgccaactttgcgaagttgctgatgctgctgaacagaattcgtgctgcgtcgttcatcccatcttccgcacaacgatctccaacaagttgtatttgggcgtgatttggctccgtaatgaattcctccaattcagttaaacgccctgtcttggcataagcaaagcacagctcggtctcgatgaatgactcccgtgacttcttgcgggccatttgcaggtagcgcaccaaatcctcccaatggtcagtttcattgcatttctttgccacttcgatgaacgcactggggtcgtcggccttgacaaaagaatccaccgcttccttgaccaggctttcgttaagctgagctttggccaaagccgaccacactgccggttcgttgactttttccgcgaattcgtaagctctgtcaaggtttttaacattctcaatgagcacctaaaaataaaatcgaatgatgatgtgattattataaaatgttaccttaattgctgacgcattgaccccaaatttgcggaagatagcaaatgcctcttcgtacagtttgtccgtgatggcaatgtttgcgatgtcaggcgcatcgtaattgtctaatttttgaatgtattccatcacacgagatgagtctgctttcatggcggtcaaaatcagcaaattttgcaggtttcggttctcggtaaacgccgaattctcgaggacgatcttctccagaagttcgattagttcattgggcaaatcggccgaaatgaaggcacggactggttatagtgatgtcatccggggtcagaggtttccngaaagaagtgtttgcaccacctgtcaaggacgaaataatgactaaacttcagccatggcaaaacctggtcgatcagctgccgaacggtgcgggttgctttctg

SEQ ID NO: 38792 - DNA, 1034 bp, Heterodera glycines
aaaatgtttacgacgggttacagtggaaactgcgtgaaggaaattggagtaaaaaacataaaaaaaatcagtaccaagtctcagcgatggcgcaaaagccacccgatggcatgttttctcctgctccaactgaaaatggaaaggttttttttgattttgccagtgattaaaagaaaatcaaaatgaatgaaatttggccgcacttcgtttagactgacgcccgaggcgaacacaaaaaccatcggaaagttcggcaaaagtggcaataaaacgggcggcgtcctcaatgtccaactcttgctgggtggtgtcgttgatttccaattcgctctgaaacaaacattgctatcagagaaaagagacaacaattgtaattgtaaatattagttaaaaatgaatttcaactttacattcggtgccgttgcggcggccaacagtggaagcagtccaccgcatgccattgtcagactgtcgccgagttggctgagcagatggatggtgttggcgatgaacacctggttgtccgcgttgttcagatggtccgcaattggtgtgctcgaacttaaagccgattagatttaggcaattataaaatgccactgctttcgaatttgccataattaaccccccccccccctgattaattggaaatccccagtttcggactaatgaatctattatagaacacaaactcgttccattcctgcaccacactctcaatggactcgagcaggtcggacagcagacggatgtgcaccggtgaccaggtgaagtcgggcgtccggtacagtgccatcggttgctcaccagcagactctcccgcctgtcgctcaaactcagtccgttcggccaacctcttctccttttgcaggactttgcgccgatatttctcccatgagacctgaaaattgtcgaattcactttttttttttgttaaaaaaaaggaaacggagtgggtcacacatgaaaaaaaggggagggtcaccgaaatttttgcggatatatccgggccatgtaaaccaatgacttttttt

SEQ ID NO: 38793 - DNA, 887 bp, Heterodera glycines
ccttcaagaaatgaccttgctttaataaatttaaatgccctacctatattactttaagattgacgctgtcagcttttttcttgggtttttgttcgcacttaaaaaacagatcgagaaatttttaatttttttccaggattttgttcattttcacccaaaaattgaactaactgactgaaacccgtttccgatttctacccaatttcgttttttaatttaatacataaaattgcctttttatgattaaaataatcggaatacaaaaaaaaatgcatattagaaatattataatttttttttgtcctcaatcagtttcttctgtttcactttatctttcacccagctctaaaaatgtaaatttattaaaattaaatttttaaaaatttacgaaaatgccattacatacattcaattcttatgccgaacaagcaattctttttttcacatggcttctcatcaacagtttttgcttaattaattcaaatgatttatgacaaaattgttcatactgtatgtatcaatcaatcattttgttcactcgattttttgtgagagtgtcagatagtgaaaggccagaaatttgctgtcttacacttcgtacaaattcaaacatttgtacaatatgttgtaacatttagctaccgtacgggttaagatacagtacgagcctgaacataaacagccttcaaattccttacatccacggatgtccaagccgaacaagtgttgtttgacggtagttgttgtcgtggttgtcggagttgtcgtggttgtcggagttgtcgtggttgtgggagttgtcgtagtcgtggttgtcgaagtcgtcgtcgtggttgtagttgtcggagtcgtcgtcgtgggtgtggtcggcggagtgtccgaagcag

SEQ ID NO: 38794 - DNA, 961 bp, Heterodera glycines
caggtgttggaggagagagacgggctcaaggatatgtgcgactcggcagcagaaattttggaccacaaaggacgtgaaggaaatgacggagagcacaacgcgggacagagaggggaataacaaagtgttggagtacatcggagaacgcttcggggtgacttttcattacactttttaaattggcaaattcaaattgacaattccttgaaaaataaggaaaatctttttaaaaaggaagaatgtgttctggaatacatcacactgtgacacttatttcagttcacaatggagatgcttgacagtctgtacaaatacggaaaatttttgtacgaatgcggaaattatttggccgcctccacttatttggacttttatcggaatttgatcccccaacacgaccccaactatttgaatgcccaatacgggaagttggcgtccgaaatactgctccaaagttgggaccacgccaaggacgacctgaacagactgcgcgcctacgtcgactcggagccgtttggctccgaattggaactgctgcagcaccgggcctggattctgcattggtccctttacattcacttcaattacccgaagggccgggacgaagtgatcgacctttgtctgaaccagcagccctatctgaacaccattcaggcaaattcgctgcgataaatcaatcctttcttattcgaattttcacttctttaagattctctgtccccatttgttgcgctatttggccgtttctgttattaccagcaaaaacaaacagaaagcgagcctcaaagacttggtcaaaaccatcgaagtggtaagcgggggagaatattgtcacaacaattggaattgggatgtctttatttgccattttcgggttttgcaacataaaatgttctaaaaaaccaaagaaacaacttgtattgtaacatatgtgagtggttttaccctttctcatttgcag

SEQ ID NO: 38795 - DNA, 711 bp, Heterodera glycines
aaagattacaatggatgagaaagagaggagaaaggagtgagaggagaaaagagaggggggagggggcgcagagtgttcggatcagcagatattgatacagcggaagagaacacacagacgcagaagggagagcggaagagaagcagcagcaggcattatcgtgagaaggagggacaaatggacagcaggggaggggcggaagagaagggccaagacgagaacggggagggggggggggggggctggggaggcgggggtctgtccggtcatcgcgggggattgaccccggatgacctctgcccctccccccggggagtattcgtcgagaccgccctcaccaataccatcgccccacccatcgccgctcatcagccacttttgtgtgccgcaatgtgctccattcgttcgtttttcttcaatttttctgccgttgctgcacaattcgcccttttggccaaactgaaaagcttcaaattaaacacgaaatattattggtaaattcatttcatcagattggttatttttgcgatttgtctttttgaaatggacattttggccggcattgaagcggccaaagcgagcaccaatttgaagcagtacatggcgatggtcaatcagttggcgaatgccactggcctatctccccgggatttggcagcatcgaacactttgagagcagcttttcaagcattgaccaaccagtgagccttt

SEQ ID NO: 38796 - DNA, 1135 bp, Heterodera glycines
agtatgcggccgtctttgctgttgatttgcaaaccgacaatgtctttcgcttctaacagctaaaaatggaggtgaattttatgtgttaaatgtctatttttggtcgttacatcaactcccgttattggaatggcacacattgcgttgtgactgtgcgcaacaacaatgatccgaaattgggtaagaaagacgcgacctgcgaagtaaattatttagaaaaataaaaaccaaaaagcaactcacaggactccatgctgacccaattttcgctgtcaaattcttctccgggcaacggatgcaaagcattgaaagtcgagagagggttcagagaagaacgcgttgacttaaaaaccacgaataaaacaggggaaaacgcaaaatcaaaaaccaacagctgaacgatttctgctgaaattgaattgttgttcagctgaaggcgcagcgggagtttgggccgagtggggagacggcgacgaagcattgttgcaaatgctcagactcctcgtggcgtcaacaatagccaggtctgaactgcttgaaggaaacacgttgtcatcgacggcaccagcagcagatgcaccattattcacccgctcgcaattgctgttaagcaaatggttgtcgttgcaaggcataaatccggtcttatggactaggagtttgttgttcgtcgtacttttaagtatatttgctttttagttgtctgaaaataactatcataggtataaattatattaattgggtcgaatgtagaaaaatacaaacaaataacaaaggaaatttgtgattaattttgtgcgtttgagttccataataaaaacaattaggtttgctttgacacaaaatcaaagggaatgtcctgcaggctcttttgtccgtgtttatcgattatgatttatgaacatgttcatgctcacaaaaaatgcacacccgcaacatttacaaagcagcagttcttgttcagcctttgctccacagcgttcaatccaaccaaccagtcacaaagaataagccctccttgctgctgctgtccgagtagagtagcatccgtcatcacatccaacctcttagcagacactcaacgtggcgaccaagcaagagcactcactgtgaagagagagtgaagaagcagaga

SEQ ID NO: 38797 - DNA, 60 bp, Heterodera glycines
ctgcagctgattaaagacagcctgccggtctcggtgagcctcgggctgtggagcacgctg

SEQ ID NO: 38798 - DNA, 919 bp, Heterodera glycines
  unsure (1)..(919): unsure at all n locations
attaagggttttggtaaaatttgaaaatttaaagaaaattaagtttacactatttcatatatgataaaaagcaaagtaattattaaaaataaaaaataaaatatctcatcgcttataaatggtgaaaattttaaaaattgggattgatcattagtaggattatccaaatctattttttacttaatataatttgtttattatattaaataatgatgcaatatttaaaaatttggattgatcattagtaggattatccaaatctattttttacttaatataatttgtttattatattaaataaagtgacaatatttgcaaaatttggattgatcattagtaggattatccaaatctatattttactgtttattatataaataatgatgcaatatttaaaaattgggattgatcattagtagaattatccaaatctattttttacttaatataatttgtttattatattaaataaagtgacaatatttgcaaaatttggattgatcattagtaggattatccaaatctactttttacttaatataattggtttattatattaaataaagtgaaaatatttgcaaaatttggattgatcattagtagattatccaaatctattttttacttaatataatttgtttattatattaaataaagtgaaaatatttgcaaaatttggattgatcattagtaggattatccaaatctatattttactgattattatataaataaagatgacaatatttgcaaaatttggattgatcatcagtaggattatccaaatctatattttacttaatataatttgtttattatattaaataaagtgaaaatatttgcaaaatttggattgatcattagtagattatccaaatctattttttacttaatataatttgtttattatattanataa

SEQ ID NO: 38799 - DNA, 698 bp, Heterodera glycines
ttattcatctccctttttgatagaaaaagcatcagagcgtttaaactaacatgtaaataaaatttggtgcgtttcagaactcattttctgaaaaaaatatttatgaattaattatgcaaaaaacaaataaataatgaactctcttccttaataattttcctgcaccgaaggtactcactcggccgcttcgcggcctcgtggtgggccttccccccccccccgcccttcagagcacgacaaatatttcaacaaaaatttttaaaaattgactagagcaatcgaacgctaacggacgacctaatggaaaaaaatccccgaaggagagaatttaattaaatccattccttcgggggaccgtgccgggtgccgcggggtaagcagtgctggttcgtttcatcacggcaccgaaccttttggctagtcagcaatcgttgcttaacttgccagatcggacgggtgcgcatgattccactgttccaagcaccccaccaaaagcaaaacgatataaccaaaatataaggaaaaattttttaaaacattttttctccatcttcctttttgatactaaagcatcagagtgctaaaattgacttgtaaataaaatttggtgcgctttagagcattttctgaaaaaatatttatgaattaatttttcaaaaaataaataatcagttaaaaactcacaatttctaaaaaat

SEQ ID NO: 38800 - DNA, 1215 bp, Heterodera glycines
atcgggaatgatcaaaattttaacatccccaggggacttgagctctctctgaaaattttcaatacgttaaaactacacccaatcaacatgacatcatgcacagacatcctacaactatttctgatttgaaaaagacccgataaatctaacaacattccattacattgacattttagtgatcaaataccgtaaacgcaagagtaggtgtctttaaaaaattcctagggggttggaaaaattttttggtggaagaataatatcaaggtcagataaagcacaaaatttgctacaaaatggcatttggatgatggctcaatgatgcgtctccgccgaggaaagtaagcataaattcagactaccccaaaattgatcatgggatactgtatttttagtcaattttcgacctttcgtttctccatgggcaaaagtcgtagagacatgcggttttatgcattctgtagcaatctctttctgtccgtcataatcatctttaacgaaaatttttccagccccctaggaatttttttctgaaaatttcccgatttcaagccattttattttgatcgacaaaaattcaaaaaaattacctactaaaaatcagtaaacttttgatgctggtatacccatccttggtgtcagatacgaaccctggttaagccccttattatttttagaccatattcatataagtgatcgaccttcgaaactagaaaagtaccagaattattacattataaaaaagaaagatgaaaatatatttatatgtcatactgtagatatgtatacggtgggatataaaacggatagacacaactaaaccatacccaattcatccatatgcacaactcatccatggtgttccgggaataaaattcgatctgattaaaacattataaaccgagattttcggattcattacagaccaagaggcttccatttgtgagatttggctttgatacaagtattttatatagactttggtaatactgtcgatggtaccccccccccccccgcctgttttgaaaaaaatcatttttgttttcaaaagaacatgaaagcatgtttcctagggttttcgagatcactgatcacgaaatccggcatctattccgaccaatttcgaaccccggaacctgaatttccaaacatagttccaaagttcaaatttttcgagtttcagattttttgatccaaatggtttaaaaaattttttat

SEQ ID NO: 38801 - DNA, 1051 bp, Heterodera glycines
ccgtcactttcagttgcgttgacagaatttttgtccccttaatggacattccttgcggatccaaacggcccatccattacttcaaattcatttctactcacaacaaccatttgccattctgctgagtggtgtttcgtatttgtttgtggcttcttcctttttcgttatgcaatggaatgcgatttttattcaatttacattttactgccccatttgttgtttctttagcaaaacgctcttcgaataaccctaatctctgtccaacaagcaattcgatgtctgacatctacggcttcatcaacaatatctcagatcgtatatcacgacgcgtacgtcgcaagcgcccaacggagtctggggtttctggtgaggaccgagtcactttttcgaaagttcattttctttcggttttcaggtgtcagcggcgcaccgccggagactcggaaggacgacaaggcgaagggcggcggctgctccaaaaagtgcgcttgcatcatcgtgtgcagcattctcacgctcattgtgctcgtcatcggtggactcgtcctggccgctgtcctgacgcctgaaacattcaaaaatgctcctctgttgagcctcatcgcgggcaaaaagaatgggggcgcggatggtgagggggaggataccaacgactgataagcgactctgttgtcctattgtgtggctatattgttcaataatctgtatctgatcttattgtacacacattatgtttgggataaagaaagtacatttgtttgccaagttttattctttgtttcataaatgcgactttcttttttgaatccagtttcctaatgagtaaaagcgatctttatggtcgcgaaaacggtaatcgttcacatcattggtcccataaaaaggcaaaaaaaggtcgttttttcgattctaataagtactcgggggttatcgagggcgctgatcactaatctgacatcagattctcatataaatcttctaatctatgacttttcctccaaaaattttttgatggattttcaccttttttatcccttgtaactaaaaaaac

SEQ ID NO: 38802 - DNA, 425 bp, Heterodera glycines
ctaaaaaaataaaatagtgaagctttaaaaattaataaaatattttaaattcagaattactggagttagcatcatagcagtgcttttccttgtctttttgatgctctcgcaaaatctggttcgcttctgaccagtttataaaaaaaaagttaagcctaaaatttttcgcatatttaaaaagcaattaaaaatttttagattttttattcatctccctttttgatagtgaaagcatctgagtgcctaaaataacttgcaaataaaatttggtgcgtttcagagcagtttctgaaaaaaatatttatgaattaattatgcaaaaaacaaataaataatgaactctcttccttaataattttcctgcaccgaaggtactcactcggccgcttcgcggcctcgtggtgggccttcccccccccccccgc

SEQ ID NO: 38803 - DNA, 625 bp, Heterodera glycines
ttagcgagatttttgtgttacttatttcaaagacgaacatctttttgatccacaaaacggctggaaataatcaataaaaaataatgcatatataaaatatacacaattccgccgacaaacttcataaggatacagataggtgcaattattgtcgaaaccaattgggagcgaactctaacattttattgtttagtgtatatgtgtgttgagctgctagaaatttgacactttttcgatacccaaggagcagtttatgttatcttttagcgagatttttgtgttacttatttcaaagacgaacacattttgatccataaaacggctggaaataatcaataaaaataatgcatatataaaatatacactagcgggtgcgtgaaccgtcggctatttagctggaaaaaagcgcttcgcgctttgggagcttcgctacctagataagctatgggttatgaagatatttggaattttaaaagattatctgggatttttaggccgcttcgcggcctcgaacgggcgctttgcccccgtttttcatattttgttttgctttgacgggcgcttcgcgcccgtttttaaatttgattgggccttttcggccgcttcgcggcctcacactggcgct

SEQ ID NO: 38804 - DNA, 923 bp, Heterodera glycines
ttttcagtggtccgtttggggtactcaaacaattatgggggagcaaaaatccaacgcagaattaaagtacaggctatagggaagctattccggaaggattcggtctccccataaatctgggcgcatcggttcggggggactgccccgaaaacaaaaaaatcgattttttcaagtgtccgtttggggtactcaaacaattatggggagcaaatacaggctatagggaagctattccggaaggattcggtctccccataaatctgggcgcatcggttcggggggactgccccgaaaacaaaaaaatcgattttttcaagtgtccgtttggggtactcaaacaattatggggagcaaaactccaacgcagaattaaagtacagactatagggaagctattcccgaaggattcggtctccccataaatctgggcgcatcggttcagggggactgccccgaaaacccaaaaaaaaattttttggataaaaattatttaaatgaactgactagataatatttaaaataggttatttctcttcctttcagtatccctgcaaagtttggtgcgcttctgatcagtttctgaaaaaaaagttaagcctaaactttttggcatgtttaaaaagcaattaaaaattttattcatctccctttttgatagtaaaagcatcagagagcctattttaacttgtacataaaatttgatgcgtttcagagcactttctgaaaaaatatttatgaattaattttgcaaaaaataaataaacagttaaaaactcagaatttctaaaaaaatttaaaaccaattacaattgtcattttttcaggttaagttagtcctgtaccggggagtatgcctataaaatttggtacgattttattgcttattgaaagagctagaaccgaagaaaatctttttaatttaa

SEQ ID NO: 38805 - DNA, 892 bp, Heterodera glycines
caattaaattaagtcaaataagaaataaatatttatctatattatcgcagtacctcttctaatcactgttgtacctcttctaatcaccgttgcacttcttttagtcactgttgtacctcttctaatcacttttgtacctcttctaatcaccgttgcacctcttttaatcactgttgtacctcttctaatcacttttgtacctcttctagtcacttttgtacctcttctaatcacagttgtacctcttcttatcgctgttgtacctcttctaatcactgttgcacctctcttaatcactgttgtacctcttctaatcaccgttgcacctcttttagtcactgttgtacctcttctaatcacttttgtacctcttctaatcacagttgtacctcttcttatcactgttgtacctcttctaatcacttttgtacctcttctaatcacttttgtacctcttctaatcacttttgtacctcttttatcacttttgtacctcttctaatcacatttgtacctcttcatcacttttgacctcttttaattgctgttgtacctcttttatcacttttgtacctcttctaatcacttttgtacctcttctaatcacttttgtacctcttataatcacttttgtacctcttctaatcaccattgtacctcttctaatctagaaacgggcgcgaagcgcccgtcttaggcctcgaagcggccttaatagcccaacaaaatttagaaacgggcgcaaagcgcccgaaatattccgctagtcgcaaaatttctcactaacatcttcgatcaattcaaatcacttcacagcctaggtagcgaagctcaagaagcgcacagcgctttcccaagcgccaccctcgcatgcacacacccgctagtttaa

SEQ ID NO: 38806 - DNA, 787 bp, Heterodera glycines
acttgtagtaaaatattggaatctgtgcccttagttaaattaataaattattgaaagggttttttaaattgtttaacattaaaatataataattaaaaaaaaataattcatttaaacaatattgcataatctgattgatggaattcgaaattgagctaggatttgtcaaattgaattaagcttctttaaaatttggacccacaaaaaccttaaaattcggtagtgccaaaatggcttaattaattttaatgtgccatttgccatttcggataataattttgcaaattttgaaaaagagggcaacatcggttggacaaatgtgcacacattcaaacgtaaacaaatgatgatggattgatgaatgatgaaatggtgaataatgccttaattaattttcactccctcccaaaacgatggcacattttttcgtgccgttttcaatggattttcttcttttccttttccttgcgcaagtaagcattgacgaagaattggacgaacaaaacggcaaaagtgatgtagatggtgaatgccaagtacagattggcggtgctttgctaaaaagttaccaaatattggtcaagaaccacttttccgccataaataattgaatggccggtgccccctttttatcctcttcaaaaggttgccgtctcattagaggggggggggggggtaagccacatcttcaatcaacatcttcatgttctgctccaacttgtctttgccatcgcctgttgccatgaataataatgcatctcctccaacatgtgatctacagcttgga

SEQ ID NO: 38807 - DNA, 76 bp, Heterodera glycines
ctgggtggaggtctggtccggctggcgctcccagccacgcaccgtcggtgccaccgacaccggggcgtagatgtcg

SEQ ID NO: 38808 - DNA, 862 bp, Heterodera glycines
ctttttaaatatgccaaaaaatttaggcttaacttctttttgaaagtttgatcactcatattttttgctaattgagcagaagcataccaaactttgcagggatactccccggtaaaggactaacttacactgaaatgagcgccgagctagcttgctctaaaaaatttttcgaaaatctgagtctttcgtttttatttattttttgcaaaattaattcttaaatattttttcagaaagggttctgaaacgcaccaaattttatttacatgttagtttaggcactctgatgctttttctatcaaaaagggagatgaataaaatttttaaaaatttttaattcctttttaaacaggccaaaaagtttaggcttaacttttttttcagaaactgatcagaagcgcaccaaactttgcagggatactggaaggaagagaaataacctattttaaatattatctagtcagttcattaaaaaaattttatcccaaaaattttttttttgggttttccgggcagtccccctgaaccgatgcgcccagatttatgggggagaccgaatccttccggaatagcttcactatagcctgtactttaattctgcgttggatttttggtccccataattgtttgagtacccccaaacggacacttgaaaaaatcgaattatttttgttttcgggggagcccccccgaaccgatgcgcccagatttatggggagaccgaatccttcggaatagcttccctatagcctgaactttaattcggcgatggatttttgctccccaaaattgtttgagaaccccaaacgggacacttgaaaaaatcgattttttttggtttcgggggaggccccccccaacc

SEQ ID NO: 38809 - DNA, 742 bp, Heterodera glycines
gtagtatttgtgtgggtgtggcgtaaatgattgctgggcatggggcggtgagggggcgggcggttattatagggggcgggagggttcgccgtagtggtagcggatgttgtgtgaatgtgaatgaatgtgtgtgtgtacgtgtgcggagtaattaatgaataattaatttgacgggcaaaggtgcctgtcagaaactaattagtcaccgaagcacgcgcataatttatcccgtgtcaatggtatttattggggctgctcgggattcgcggtctcgactctcgaattgagaatttctcgtttttttgggtctcagtctcgactctcagggtgattctaggtcttggttctcgagtctcggaaaatttcgactctcaagcagccatagtatttatgttatgcaacaggtatatgcagggctgccatatctgaggctttagcctcattttgtggttttttgataggtcaatgaggctagatttacaaaatgaggctttttgtggttttttgagaaaaaccgcaaaataaagaattttttaatgaaaatatgctaaaaatatggtaaaaattcttaatttttcccccggcggcgcctatcggcaccgccggacagtaaaaatccttaatttacaagcaaaaatttgctcaaaatcgcaaaatttggtcattttcggacaaaatctgttaacaaatcgcattgaaaaacacaaaatttttcccggcggcgctatgggcaccgccggcc

SEQ ID NO: 38810 - DNA, 982 bp, Heterodera glycines
  unsure (1)..(982): unsure at all n locations
aatagcttttcttttcgaaaagagaggcgaggaaaaataaaggttgcatccaaatgtaaatttttttacattgaagcatttggatggcttgctgtttacagttggctaagtcttctttgcaagaagcagcacaacttttgtttgggccaacgaccccaaaccattcgaatagcaatcgattgggctgactagactccatatttgcaggaatagcaatggcaggtctatcttaaaggcctgacgagttatgtttcgacaaacatcttgtacaccataaatcgattagcaaatttagtcgaactatataaatttttcaaaaaatgattcatcttttttatggttagcgcaagtctctagctttatagaaacggtccccgaatctgcgaggaactactttttagagaatttctatagattattattttgcatgaatccttcgcttaaattcccatttatcttataaagtcagattaaattaattaccccgatttgttttagaattggtcccaatacgcttgctaatagcttttcttttcgaaaagagaggcgaggaaaaataaaggttgcatccaaatgtaaatttttttacattgaagcatttggatggcttgctgtttacagttggctaagtcttctttgcagaagtagcacaacttttgtttgggccaacgaccccaaaccattcgaatagcaatcgattgggctgactagactgcatatttgcaggaatagcaatggcaggtctatcttaaaggcctgacgagttatgtttcgacaaacatcctgtacaccataaatcgatttgcaaatttagtcgaactatataaatttttcaaaaaatgattcatcttttttatggttagcgcatatgtctctagctttatagaaacggtccccgaatctgcgaggaactactttttagagaatttctatagattattattctgcatgaatccttcgcttanattcccatttatcttat

SEQ ID NO: 38811 - DNA, 715 bp, Heterodera glycines
cactgttctgccattcgcccattctctgatcggcacttcccctttctacaaagctcttccgacttcttcctcttctccgccaatgccacttcccgcgttttatcaacaaaatgtgtccgcttctcaactaaatgtcccatctgtcgtcggtcagcccaattcttccgtctccgcctctttggcctctttggtccacccgccccccgttttcgctgctccttccacggcgaattctctccacacgccaaactctgccgctgtccgtttcccattttccacatgcattggcccgatgatgagtcattttgagatgatcggaacagataatcaaatgtttccgcaaaatgtgcgacttaatccgggcttggcgctctgctcttccgcccctttcggaggtgccattcattgggtgccgaattgccttttcttcctttctaagggcacatcggcacatcgcttccctccgccgtcactgtctctcccgccgcagtcgcatcggtcggtggcggtgagctccaacagtttgcaattccgcgcatatcgcaacagtcgcaagctcagcccgtgcaggggttgcaatttgcattgggacagtcggcgatatttggcggagaatcggcgagagacggtggaggacagcaaacgcaggtgcaaacgaagggcaaaacggagagcgatgcgaacggaattgagacctcagaaggggggggggggg

SEQ ID NO: 38812 - DNA, 1005 bp, Heterodera glycines
atttttcaaatttttgttgaaatatttgtcgtgctctgaagggcgtgggaggggggggggcgaaggcccaccacgaggccgcgaagaggccgagtgagtaccttcggtgcaggaaaattattaaattttaaaattttttaattgctttttaaatatgccaaaaaatgtaggcttaacttttttagtgaaaattcgatcactcatattttttgctaattgagcagaagcgtaccaaactatgcagggatactccccggtaaaggactaacttacactgaaatgagcgccgagctagctggctcaaaaaaaattttcgaaaatctgagtctttcgtttttatttattttttgcaaaattaattcataaatattttttcagaaagggttctgaaacgcaccaaattttatttacaagttaatataggcactctgatgctttttctatcaaaaagggagatgaataaaattttaaaaaatttttaattcctttttaacaggccaaaaagtttaggcttaacttttttttcagaaactgatcactcatagcgttttagtccaaactactcaccgattcagaaaggaagaaaaataacattattttaaatatgatctagtcagttcattggtaaaaaaagtctatccaaaataatacccttttgggttttcggggcagtccccctgaaccgatgcgcccagatttatggggagaccgaatccttcgggaatagcttccctatagtctgtactttaattctgcgttggatttttgctccccataaatgtttgagtaccccaaacggacacttgaaaaaatcgatttttttgttttcggggcagtccccccgaaccgatgcgccccagatttatggggagaccgaatcgatcactcatattttttgctaatcgagcaaaagccgtacgaaactatgcaggaatactccccggaaaaggactaacttacactgaaatgagcgccgagctaactggctcaaaaaaatttccgaaa

SEQ ID NO: 38813 - DNA, 1218 bp, Heterodera glycines
  unsure (1)..(1218): unsure at all n locations
taaaaaaaaataatgaaaaaaaagaaaaagctggcggtcctcgagctgacactcattgagtcttaagccacgtgctaggccaagcacgggccctaccacgtcgtctcatcacggccacggacgtagcagcaagcacaaacacaccgctagttacggcacgtaagaccgggaacgaaaccaccatccccagtcagtgtgttatgtgcctgccacaacaaccgctcaacgacgcacagacgccaacacagccgttaggtcgccccacgagcgtgcaccccacattggcgcagcgaaccaaccaagcgaggcagcccgccaccgacacattgccacgcagcagccatacacaggctttaacatgtgcagcactgagcggtataccacagctccaacgtatggaagcaccccaaaagcatggctcgtgaggcagctgccccgtaatgttgggcagcgtccacaagtcagctcgaacgacctgtgcccgtcagcggacgggggcatttggtggtgccaacgctagcccaacaggacagcaggtaggtggtgaataggaatcacttgggtaatgatccagcagcaggttcacctacagctaccttgttacgacttttgcccggttcaagccactgcgattaaatcggttccagtctgcataccgaccgaagccggaacactaaccgtccccgaatttctcgaaatggctcagtcccgggcagcgacgggcggtgtgtacaaagggcagggacgtattcagagcgagttgatgactcgcccctacaaggaattcctcgttcacggacaataattgcaatgtccgatcccaatcacggcaaattttcaccggtttaccaacccctttcggggaaggacaagcacgctgattttgccagtgtagcgcgcgtgcagccccggacatctaagggcatcacagacctgttattgctcaatttcgtgcggctgaacaccgaaaatccctctaagaagttgtgcccacagaagcaatgagccaactatttagtaggctagagtctcgctcgttatcggaataaaccagacaaatcgctccacgaactaagaacggccatgcaccaccatccaccgaatcatgaaaaagctatcaatctgtcaatccttacggtgtccgggccgggtgagtttccccngtgttgagtcaaattaagccgcaggctccactcctggtggtgcccttccgtcaat

SEQ ID NO: 38814 - DNA, 1152 bp, Heterodera glycines
  unsure (1)..(1152): unsure at all n locations
aaaaaatgataaaatgggcaactttttgtgtcgggaggagggaaatatgcactaattagttgatttgtgagctaatgtttgctgtgtggacaaaaggatgagccaataaataccatcctaataaaactgataaggagcaacaatttgcttttaaattgtgctgatagcccccccccccccggggtgtattttgttaggtgaaaaacattcattcattttatcgacgaaaaaagaccatcatttttagcataataaataaatttgtggggagattatgggattacgataataaacatacagtacgcccacgtaattaatttgtccaaaaaactgattatggaggcgaaaatttggtctcattatcgccattatcattgagtccattttttggacagtggccttcgtttttgtacaaaatcagctgatcaacaatttttgtactttttgtgtgcaattagcaaatggaaagtgtaatgaacaattattgtataatgctcattattattatcattaaattagcagtgaaaaataaaaattattcaaaaatttaaaaaatgaaattttatttttaaagagaaaatttttaagaaaataatttgttcttgaatgaaaaatccatatattttttaaaaggattaattttaaaatcattatatttttttgaatgattttcatcaaataaaattaattattttttcaaatattaataattaaatttatttagttttgaaaaaaaaattcaataaaactaattagttaaataattttgtattttttttttgttaattagtgaatctgttttaattcaaacgaatttaaatataggtttgggcgtgtcctgctttttcatctcggacattccccaccccattgaatcggcccataattctgtacagactctcatcaattagaacggtcgcaactaattgagcccattttttcttatcaaagagaagacaaacacaccaaaaaatgataatttgtcacgcttatcatcataataatctgttaattgacccttaattactattttgttatgttgccattattttttgcccatcanaattgnggcatgaaaaaaaaagtttgctgatgaggtaaaaaagtgtgcgatcaatttgggcgaggggtgactgaccgtggatggtacgg

SEQ ID NO: 38815 - DNA, 519 bp, Heterodera glycines
ttttaaattatgagtttttgttcaaatttagattaggaaatcggaattgatcaaaataattgaaggattcgtgatcggggaccccaaaaaccccagagaataaatttttatgactatcacaaaaaaaattttgcaaaacaaaagggtccccccttttgaaaaaattttcaaaccaacaacttttagactagcgccactttttgcttacttggccaatcaatgcctatattcttggtatcaaatgagagctaaaagtctcgggattttataaatgcaagaaaagagcaaatactggcattaaaaaagaaattacaataagaaatcacgagattcaattttttcaagaataattttattgtatattgcatttagcaaaaaataaaattatataaaagctattatagaccttaagctttcgtttgataccaagaatatataggcattggccaactaagcaaaaaattatggcctaataaactgaggatggtcattcatgggacgcataaaatggcatgggac

SEQ ID NO: 38816 - DNA, 1072 bp, Heterodera glycines
gacaagggatcaggtattttgatgtttttttcggaattgctttcgaccacccccgccccgtttagatgagtctgaatgggtcgtcacgagagaacgttacaaatacgatgagcaattcaatcttctacagcccatcgatgggaaaatatccggtattttggatgcgatgcttaatgtatcgaacttcatcccattaaggacgcgttgccaaggagcatatgctaaagtcaaaactcccaaattctgtgctcggaaagatttggaaattgtccgacgtcgacaaagacggacatttggactcggatgaatttgccctgtccaactatttgatcaatttaaaactcgaaggccacgaactccccacagagctgccaaaacatttggtgcctccctcaaagaaagcgatggctggcgatgcgtcgtcttccgacaaccaaatttaccctactttggatgagtgatggggcgagaattgacctacagatttctatgttttgtactttgtgactgtgaacaactccttcggcagtttcggcggcactatcccaatcggtttccctttttgtcataatatctaataaattaaccaattgattagagcccggatatcctatatttaaaatcttaaccgtttaagcatcgcaaaagctttcttaaaatccgggttctgattatgatggtgccgtcctttcttttatattagtcctttgcttgacaaaattccgacgattctttgtttctgtaatacccaaataatgacatttctaattattcgacttgtttccaatatttataaggttgtaatgctatacgtttattacacacatattcgctaatcggatataatcgaaaaacattacacacaaataaagcgagtatcagaggcacttacaaaagccaaggaaatgtgtacaacaacgaagggaggggggaataacgggagagaggaagaagagcactatacatttggaaccaaaaagagtaacttggttttggttatgcgacacacagtccagagaacacagagaaaacgttaaatcatgagaagtgaaactgctcctttggtctacaa

SEQ ID NO: 38817 - DNA, 996 bp, Heterodera glycines
aatgtaaaaaatattacgcaagaaattatttttacatcctttttagaaatgctgcataaatttttattgtaaatagtcacaaacaaacttttgttcactcccaatatctaccagttatcatacaaaaaggcaatagttaagcactgagatataaaaaaatcgtctagaataattatctaaacaatttgtcgggaaagctgtataaattctgggaaaaaacttttcaagaaaagctgaaaaattttcaatcgcatcagaagcagcctcaaattcttcaacaacataatgtaaaaaatattacgcaagaaattatttttagatcctttttagaaatgctgcataaatttttattgtaaatagtcacaaaaaaacttttttttactcccaatatctaccagttatcatacaaaaaggcaatagttaagctttgagatataaaaaaatcgtctagaataattatctcaacaatttgtcgggaaagttgaataaatttcagttgcaataggcatattggcacaatacataaatgtagagcaggctcaaaatagaggaaataccaaagattaaaaaattcgtgtttatggcccactctgctttggctggacataactcgccagagagtggagatagaccctttgttgatacatttgaaaatgtagagctcggctagcgcattcgaataacacaaaatttgttttcatttgcccccaaacaatccgcttatgacgggccgaaagaaaattcacaaaaatttggcaccggaaaaactccatttttttatgggccagcataataaagtaaacccaaaatgtaagggaatttaaattggtcatgtgagatgtttagttttttatttgacccatccgttttctgggaaaaacttttcgagaaagctgaaaattttccattgcatcagagcagactcaattcctcacaacatatgtaaaaatatacgcagaaatattttacatctttttagaatgctgctaaatttta

SEQ ID NO: 38818 - DNA, 1316 bp, Heterodera glycines
ggattggccaattttcaaggaattccttgcgcaaaacaaagtctacctttataactaatagtaaatgaaacgggcacataataataattaatttttgaatttttttaaattcgtcggtggcaaattaaaaaatatatattaaatttccgatcgtagcatatcagtaatgcttttccccactgaccgccccctgctggggtgctccctgaacatctgccgtgccgaccattgtacggtagggccaatatgttccaggacggtccatgggttgcccgggcacttggccaaggccctgattggcttggtacctgtttcttttttgtaaattaatgcaatttctcgaaattttgcaggggctaatagagaaaatttcgcaattattttttatttcaaacaaaggcaatttttcttaactttaaaatttttaacaaagcctaaggaaagaaatctcctaattctcaataaaatttccaatttcctaaaaaaatgtatttgaccgtgccaatgcttcgtattgtgggtttagtgccgaaatgaccggctccattcggcgaaattggttgtcttggccttcatacgcagtgcccttcagtgttgagccgtgttcatgcgcgaaatcgtcaaacactgaattaattcacccgacataaaattgaaattaaaaaaaaataataatttaataaattacaaaaaaaaaattatttgtttccatcataatatttgtgaaaaggatcagaaatggcgtaccaaatttgaaaccgtatatgtatgcaaaataagaagctacaagaatttttaaaaattttttggaacattaattattattttttgaattttttttcgctaactcttcaaaaagtgataaattttcccttttttaattaattaatgctcataaataattctatattttatttttatggcacactttgtccagtggcttgacgcttgaggcgattttctgtgaaatcctgtacagtagacgatggcttcgttaccgtacctaaaatgtattcattttacaactcgctaatttaatgacacattttttgcacattggaaccatatgacactacaaatttcgttgttttaggcgctacagtaaccattggtgagtttttccggttgattagtcgaattagccgattcaattttagaatgaattttttgacaaattcactgctgcgatggcgaccacaaatagaagctgctggtgatttggaaatggttcttaatgaaatttggtgtactactgtattgactagccattccctacagtagggttcaaggaaaaagtttatttaaaaaaaattatc

SEQ ID NO: 38819 - DNA, 1275 bp, Heterodera glycines
tttttagtaacatttttgtccatatgacgcatcgcaaaaacacctgttaatacacttttactgcattaccaacatgcctgaaaaaattttatttgtttaatttttaattaatcaaaccttgtatttatttatttttaaatcttttatatccgccttaatggtataatattttttttcacaaacttttaaacggcaatcaatcaattctttaattgtcaatacttcatttttatttccacttaaaaaactctgatacttaataaaattcgacggcattttctttttattagctgaaacacaaataaaaatattatgatttcaaaaaaaatatgataaactgtttttgagacagttttaaaaaaatcacaaatatttaatattttattcgtcaaattttctttccatgttacatgtttgcagcacgaaaaaaattgttaaaacattgggcaattattgcaactgccaaaactattaataaacttaaaaaaattattagcaaaatcattccaaaaatgagttcattaatgcgatcattccaaaattcataatcttggcacatcattacctaaataaaataataaacatttttttataaaattaatttttattactattattttttaataacgtaccgttatacttagttcaccataaaccaaatggaataatttcaaaattgtttccaataatgccttttttttgaatgggtttatattcttttcgtaaatttcttgataaaatataactttctcttgttggtccaaacttgtcataatcgaaaattaattttttattattttcataatttataatcatgtttttaaattcatcatgatcaatttggttcttcttattaaaagttatccctaaagaaagcacaattaaacaagaaaacataacatattttaccgcgaattttcgttttataccatatttgaccattcttgtcattcctatacttaattgaatattgcttactgccagctgatacaaattctaatacactatttccagcattttcatgtgacatttgactaaaaaattatatttaaaaaaaatgcttgaaattacccaaggaattcgccaaattctataggagttttgcccttgggatgtttgtaaatgacactatctaaaaaataacactttaagttgaacttagttttttttaaccggtatcagaatatagtagcttattttgtttatcattagtaacttgttgcaaccacccataaatatgaattcttgcttgggaagtagtccttaataaattta

SEQ ID NO: 38820 - DNA, 1395 bp, Heterodera glycines
  unsure (1)..(1395): unsure at all n locations
aataggtcgatcctttantcgctttgcaggggactttcaaatcattatttgattgttnntattataacaaattaattattattctttttattttcgatttctatatgttaatttttcaaattattttcaaatatattcaaatttatactttatttatctatgaattactaataatcaatattcgactgtatatgattaattttttatgttaattttcatttggttattctccactagttctgtagcatttgttatatttatatgaaaaagatacaaaacggcattaaaaaagctaaccgcttgagactgtcatcgccatttccagccttttaattaaatttggaatatttagaaaatattttctatgtgtttaatttgcaaacttcttatatttatgtttttaaaatattattgtattcttcttttatttattaaactcatcgatatccgaaatcttcttgttccaagcttggtgcatcccaaagtttaacatttaattttgaattttagtttgttatttaccctaatcaatgtattatttttccattttttttaaatatccatttccttacctattgaagggctggtttggtgcaaaactattcaaataattcaaaagcaaaaaaataaaaattcaagctcattattagcggtcaggtttttcgtatggccatttcatacgctgttaacaataataactctttattattaatgaacagggctgaaaaaaaacatgcaaatgcatattttttcctggcttctccatgctataaatagtaggaaaaattttggggttttctgcatattcatgcatattttgccattttttgtacatattttctgattttttttccatattttgccatttttgtacatattttcagattttttttgcatattttgccacttttcgtcaaatattttccgatttgaatgaacatagtttttcgagctctatcgactggtatttttttcggaaaattttcgattttttcccggaaatagaaaaaaaatttggcctgagcgggacatttgagtcctgggcccataactcgttaggggttggctttatcgaaaaaacgccttagggcaaaattgtagaactttttaagctctatctaatggtatactatatgaaggtaaattttcaaaaattttcgagctaggccccttagaaatttttggaaattttttttcggacgaaaatgggggtgaaaaatatttttctggggtaaattagggtcttgagcacaaatatgatgtttattttaagtttcagattttttggaatattttaaaaattctttattttttggcaattttttggccctcgggattttggcctaatatttgaaaattcataacaaatcanagggttgatcaattttacagtta

SEQ ID NO: 38821 - DNA, 886 bp, Heterodera glycines
ttaaattcccagccctattgataatgctgcattaaatcctttttactccaaatgaatacatagaactccgattaaacgacatgtattttgaagagacgaaaaaatccagtgaagacacaaaagttccgatctctaatgaaattctctcggtttttatttttttaattcatcaacacatcattaatactaatgaacatacatacaaatgaatatacacatacgataatatacgcatacatacatatacaacaacaattatacacatatatacaacaatgtttatcctctcatttcatctcatttggcagcgactgaatttgcgcgttggtagaacacaatgtaggcatttcgcgtgtccacattgcagctttcagtggcctaaaaagaatggatgaaaagccggcattaattgattcgaaattgttttcttacgagagttttgtcgtcgttgcagaaaacccaattgtcagtgaagccgtcacgcacaaacgagcagtaatggccagagttcaagtggccgtgatgagtctaaggaaaagaaagaggggaagaatgattaatgatgtcattcaaattgccactgatcaaaatcactcaactcaccacaattgcaatgcaggaatagagaggaagttgggccaccagcgcagccggcacatcgggcgaaaagtatttgctcaggctgaagttgtccaacgggaacgaaacgggcacgtgctgtttgatgtattggcgctcaaatggttcatagatgaagcgcttgaagcaaatgatctgtgaagggcaaaaaaggggagcaatccatcgatgatcaattaatcaatgattaatgaatcaccaaaatgtcgggcaatcggcgggacttcagctgcttgacaagcgttgg

SEQ ID NO: 38822 - DNA, 297 bp, Heterodera glycines
cggtgtcatctatgttactagatcggggatcgatccccgggcggccgctcgagcaggacctgcagaagctagcttgatggggatcagattgtcgtttcccgccttcagtttaaactatcaagagagggaggagagggttggagaaggaaaggaaaaaaaaatgaaggaggagaaagggtggggggagtatgagtatgatggtcaatatggagaaaaagaaagagtaattaccaatttttttccaattcaaaaatgtagattcacgcagcgttattatagactctagaggtccccggg

SEQ ID NO: 38823 - DNA, 966 bp, Heterodera glycines
  unsure (1)..(966): unsure at all n locations
ctgtaaatgattatatntaatgttatattcgcatttcgataatatatttccacttctacaaatattnttaaaattaatacatgaataatttctaacagagaaatcaattttttactcagatntaagaaataaatntcgcaaaaaataataaatattaataaaataaagttgattgcttcaaattgtttattgaatcttaaatttaaaaaaaatgtcgtgcgcttttttcaaaattttttgattcggacatgcttcctaaaaattttttcatcacgcttcaatttcaaaaaaaaaagattagttattttgtcggtaatttttggtttttttgctttaaattttaaatattccggtctcggtttctgattcatagtaaaaataatcaacaaatcactaaacaacagcagaagagacttgtctttatacaacttatttcatttatacgaaatgtgtaaaatgaaaattttcgaaacctagaagaatttcctaatagattttatctaaaataataaaatttcgagtcttttttattcaagaaccaaacatcaatttttcaatacattcattttatggtaatttggcgcaaattcttttttccattcaaattttcctctttccttcaacttttctttaatggcatcaaatttttaattatttctctcttttgctgttcattttcagtctttttataactttgatcacttttgggaattttttgatcatcccaattggccctttgatcaattgggtcattttccatttcttcaccttttagttgaagaaaatgaataacttccaaatgttcattttgcctctttttgtttaatttcattgtttattcattttcttttttgtcccatccgtcgccaaatatttcatcaaaatttggccgaattttgacggattcaattatgaaagaaatgaaaaatatgaaaaagaataaatgccacaaattcatttatacaa

SEQ ID NO: 38824 - DNA, 1254 bp, Heterodera glycines
gtcgcaaggacaaaggaccagaaacgaagctgtttgtatggttcgattacaaatttgtgccatttccattgcccgaccgtctgttgcccagcaaaatccgttttaagcgccttcggattgagtaattaaaaatcaacgctttatgacaataaaagcattcattccattttcaggtacatcgatcactccgtcatcgcttttcttcgttcaaatcatcaaatttttgacaaaagaggcatcgatttacatttgtgtattccttattcaaacaccacggatggccagcggatttgggacatttttggtcgtgaaatttggccaattttttcgacaaacattcatcacttgcgctataccggtggtgatcatttggacaatttgcttcgtcgcatttcgccgacaattctcatcgatcttgatcagttgacttcaatccattcatttgatttgttgcccgctgcgattggtgatggttttaatgtgccaaatgaaacaatttctgctggccaagcattgtccaaatggttgcacacaccgagaaaagatggccaacccaagcgattgcataatttcaaggaggtgtggcccaacatttttgtgatttttgtttttccaatcaaattgtttagcattttctccgtgccaatgccatttcttccgtcacttacgaaattcattttcctattcatgcgccgtcaatacaaatggtgccatttgaatttcttaacgaatggacaaaggaaaagctgacaatgaccaaagcaaatgaaaatgaattgggcaaccgatggataatgaaacgatgcaaaattattggggagaccgcggcggttcagcagcagaagaaagatgacaattgtaacaaagtggccatttggctttacatttgcaatgattgcattgggtgagcaattaaaaaaggcatttaattttgtttaaataattaaaattccgcctaatttagcccattgtctcctccaccattcgcagaagaatccggacaaagcatcacaaaagggccgtcttctgctgacaaaatgagtgatggacaaaacaacaaaaacagtgatcagatgcagaagaaatgaattaatattaagaatgaccaaccgatcataattcaaatcagtgatcaaatgtattttatgaagaaaatcctctcaaatatatgtaaataaattggatgtgtaaaaatggccgtatgtacttgtcacaataagccagcaacttaatacgtccgattttggcttagta

SEQ ID NO: 38825 - DNA, 1001 bp, Heterodera glycines
  unsure (1)..(1001): unsure at all n locations
ataaaatttctcaaaaaaagagatagccatttttctgggatatacctctaaatataaaaatcctctgtgaaataaaatggcgattgtgcacagccctccgtctcatgctcgagagcatttgtatgtgtataaaatttatcaaaaaaagagatagccatttttctgggatagagtataaatttaaaaattccctcaaaaataaaaggtctattgcgcaccgccctccctatcatgctcaagagcatttgtatgtgtataaaatttatcaaaaaaagagatagccatttttctgggataacctctaaatataaaaatcctctgtgaaataaaatggcgattgtgcacagccctccgtctcatacgcaagcgcttttgtgaggtataaaatttatcaaaaaaagagatagccatttttctgggatagagtataaatttaaaaattccctcaaaaataaaaggtctattgcgcaccgccctccctatcatgctcgagagcatttgtatgtgtataaaatttatcaaaaaaagagatagccatttttctgggataacctctaaatataaaaatcctctgtgaaataaaatggcgattgtgcacagccctccgtctcatacgcaagcgcttttgtgaggtataaaatttatcaaaaaaagagatagccatttttctgggatagagtataaatttaaaaattccctcaaaaataaaaggtctattgcgcaccgccctccctatcatgctcgagagcatttgtatgtgtataaaatttatcaaaaaaagagatagccatttttctgggataacctctaaatataaaaatcctctgtgaaataaaatggcgatgtgcacagccctccgtctcatacgcaagcgcttttgtgaggtataaaatttctcaaaaaaagagatagccatttttctgggataacctctaaatataaaaatcctctgtgaaataaatggcgattgtgcacagncctccgtctcatgctcgagagca

SEQ ID NO: 38826 - DNA, 1071 bp, Heterodera glycines
attagggattatttttttatgtaagaaaaatagcgaaatatgtaaataacatatgtatgaaaaatgctaaaatatgtattaaatatgtactaaaactcccaaatatatacgaaaatatgtaaataacaatttttaaatggtcatttttttggaaaaaattcttcgtaagaagtgaactaatcacaaaatgccataaaaaggaccaaaatagggtagtgaatcacattttagtattatgaaaaaaaagaaaactaatttttgatatctgatttttggaacaaaatcgactttttaagggtacttttcagaagatttttagacgttctgagagatttttataatgtatcccaaaatatgtatgtcagagaaataaatatgttcgaaaaaattgcgaaatatgtactgaagagtccagaatatgtgatcgaatatgtacatatgtaatatgtagaataatacgacaatatgtagataatgaatatctatgttgagctactagactaatggaatatcccaattaggaaataaaaaagcgaaattttcagtttggcgccgcctttgctcagtcaaatttatattcttcaggcaaagtaaaaccctaattttttcacgttttttccatataatacttcaatgggcttatgcttgttcatattcaactgtcttccgcttcatcaacacaattcgacgtgagaaatgatgcggacattgcgtgatgcgtcgctggttaagcccctcaaaaaacgttcaaatcagggttgccgcgggtcgagaaaaatatcgggtcgggtttcgggtaacccgtggcaaccctggtgcaaatgtcgtgtcgtcgtcgcgagaattctcgactcttacagggttacaatgccaccaacaataacccggctaacaaaaatgaccacaattatcttgccaatatcaatgttaatccctataacatactaatcaatttcttctttgatatttcacgaaattatgaaatgcgcccataaccatttttcaatgttttgttcttttttcgttgttaacacattgataaatatgttatgatattaatttaaacgtttt

SEQ ID NO: 38827 - DNA, 773 bp, Heterodera glycines
cttactataatgcgtgaattacatctttttacagactatactatatattgttatacaagagttcccgttaaatattgtttggtgatcattgtgggtcgatacggcccaggaaacctaataccatattcaaaatagataaaataaagttaacacctagaatggacactcttagaatacgtcaagattaaaatgaaataacagtaataataatttattaaagatatagctaataataaataaaagcatcatatattaaaaaaataaacgaaaaacgcaataacgatattgatataaaaattaaataaaaacttaaaaacactaaatcattaatgcataaaacaataaaattataacaatactatatccagttataacaaaaaaactgaaaaataacataatatgctgtgatgtaaaaccctgaactataagcttactagaataaattctatattatttaaagtaaaagttaaaaaatagctatcaattaaccaaacattaattaattaaaaaatggatctgacttattaagtaaaaatcgttaatcttattaatagtagagatcggaccggtcggtttttttcggtttcggttttttaaccgaaaccgaccgaccgaaaattttttgagtttttcggtttttttcggtttcggttttcggtttttataccgaaaccgaccgaccgaaataatcaaaaaaccgaataaaccgaccgacttttttcaaaaaccgaaaaaaaaccgaatgaaattgcagcgatataacctgtttttgt

SEQ ID NO: 38828 - DNA, 1002 bp, Heterodera glycines
ttttgagcgtaattacgattttacttagaccatttttttgctaggcttagatcacatgcgattttcggcactctgatattttagcgctcataatgggatgtataaaggcgattgtagaaggaattggaagcgctaaaattctttgagaagctttttgagcgtaattacgatttttacttagaccatttttttctaggcttagatcacatgcgattttcggcactctgataattttagcgctcataatgggatgtataaaggcgattgtagaaggaattggaagcgctaaaattgtttgagaagctttttgagcgtaattacgatttttacttagaccattttttctaggcttagatcacatgcgattttcggcactctgataattttagcgctcataatgggatgtataaaggcgattgtagaaggaattggaagcgctaaaattgtttgagaagctttttgagcgtaattacgatttttacttagaccatttttttctaggcttagatcacatgcgattttcggcactctgataattttagcgctcataatgggatgtataaaggcgattgtagaaggaattggaagcgctaaaattgtttgagaagctttttgagcgtaattacgatttttacttagaccatttttttgctaggcttagatcacatgcgattttcggcactctgataattttagcgctcataatgggatgtataaaggcgattgtagaaggaattggaagcgctaaaattgtttgagaagctttttgagcgtaattacgatttttacttagaccatttttttgctaggcttagatcacatgcgattttcggcactctgataattttagcgctcataatgggatgtataaaggcgattgtagaaggaattggaagcgctaaaattgtttgagaagctttttgagcgtaattacgatttttacttagaccattttttctaggcttagatcacatgcgattttcggcactctgataattttag

SEQ ID NO: 38829 - DNA, 1205 bp, Heterodera glycines
ctgcacctctccgccagttgccggttcataactgctatattttttggtgcaaatgacatcactgtgctttctgggaggtccttcgggaatgctgaaatcgatttttttttcttgaaaaaattttatttttttgtttacttcggaaacgaggctgagcaatcataagcgaaataacggtaaatagtcctaaaatggcaaatacataaaagttacaattgttatatttttggtgatgtgtttcttaatttcaccaagtgaacgctaacttttgtttttaccaagttttgccaaaatctttggaccgctcaatgaacattgctgctggacgaaaggagcgaaaaatcatgatcagatgggtgaagtgaaattctgcctccaggtcaagttgaattgaaacattctgcagaattagaaaaataataattaattaattgatgtaaaatatctcaatatatgtatgatgtatcggcttgctgattaccgatattatagcgaaattgcaattttaaatttttttcatccgatttccgaaattttttgagggcgtcggaacaatcactgaaactcgaaaattgccaaatatgcactaaatgtattttttttatttccaaaaagtcggtccttaggggtgtatttttcgttttttcatcttgtaaaaatttccaaaaaaacgagacatatgctttaaaaacgcgaaaatggtaaatatgcatttattcttgaaaacgccaatatacatttagacatttcaattattttaaattaaaaaagagtggaatttgcattgaactgacctgtactccattctcggattgccaccagctgcttgtgcgattttcaaaactctgcaaatttacagaataaaaatttttaatgataaaatttactaaaatttaaaaaaacaaattttctttttaataattatttatttattttaactttagccccacattttccaacacaatattctcaatgcgatgactgtgcatgccgccgtcaatacctaaattttaaacgaacaattaaattctttccccagaatttgttcttaccagacgaccatggctggcgcgaatcacagagagagcatttctaaaattaattagttataattattaaaaaacaaatgttttacatcgatttccagatgcgaaacaatgcaaaaaggctgaggctcactaatccctgaaaaaattaaaaagatt

SEQ ID NO: 38830 - DNA, 990 bp, Heterodera glycines
  unsure (1)..(990): unsure at all n locations
aaacnttgacaagaaattttttttacaatggcaaaaagtcaaatcgcgtctctagttggtaattaattattgaattatttgattttttttttttttttttggttttttcctgagggatctcaaaaagtagatcaaattttttcaaaattctattttaattttatttaaccctatttttaaaattttttacacaatttaaaatttaatgtaaaaatataatttcatataaaaacaaattaattagttaatgctttttcagcacctagagaaatttaaaatttggcccaaatgttatggcatcccactaattatagatttttcataaaaatcctttaattaagtgtaaatatcttcctaaagtctatatttttttaaccgagcagtttcctaatctgcaaattttagaggcagaattttcgggaatttttacggcacccagttacccctccgctgtattaaaaaagcaaaataatatttcaatcaatttaccggttcttcgagcagttcaacaacatttttgcaccgctgttccaaccgggacagtcgctgctccaactgttccgtgtgcatgtgttgttggagcagtaacagggcgaacagcaacaggaacagaaatggacaaatgcgatgcacacaatcggtggagggccaaaggttggccaattttgaatttggcgccatttcgttggcatttgtgtggcattttggtttcatttttgtggcattgtgtttggccgacttggacgtgttgaaaaatgtggtcgaatttgttgtggatgatgaagaagcaaatgaagagctgggaaaatcctgaaatttttaaacaaattcagattgaattttgggtgaaaaaaaaattacaattttaatttttggataaattttctaagtcatttttaaggatcttctttttaaaaatnaaaaactacatggcctgtgtgtggggaaaaaattgctacaaataataaagtaccacgatggtactctaga

SEQ ID NO: 38831 - DNA, 1152 bp, Heterodera glycines
tttcgcgccagagaaattcgccccaatacgagtcaagcattgggcgatgtgtgccgtgttgttttttcacgccacagtcacatgcgcgctctctatggataatccccttttctgctaggaaatgtgctgcggtaaattcatttgttgttttttgaagagtgttataaaattaaagctcattttattatcaatattgggggaaggatcgggttgggaagaatgaggggaagcacccttaggtaacgcgtattgcgctaatttattcataaaaatggtgggaaagcaaatgccctttcgttattttatgcaatgggaataaagattattacaattctacgcgcccgctgttgattttttaaaaattcaaattttcggcctcaaaacggaaaagtaccaaaaacagatagttagtccaaatgaatatgtgtattaggtcgtttctaattatttgcacccccctagaaatggcataacttttgaattctcacattttcttgctgtaattagcaatcattcaaaagccaagtgggtcagaattaccttgatcagagtttcaaatacataactttgtttgttttattttaaaaaatgtggtttactactatgcaaacaaaacaaaaattgtctttttaagatgcccgtccgtggcaacaaattttcccggatatttccttcccacccgacttcgtcaaagagcgcgttaaactcgacggtattttagatcccccattcatttcctagtgcctttctttagctctgttggcccgagacctcctctcccaaatgctcgtcatcgacccaaataatcggttatacaaaaattcaaagctatgaagatcattttatatatactacttttgcaacttattaccctactttttatatctgaatcgaattccgctcgtttttccgtttcaaaaaatctgactcaataattgcctcgactcgctacaacatcgtgtaaaaattaatctttggattacaacttcattttaggatcaacgtgcaagaagcactcaaacatccctatgttaatttggtatgaattctttcttatttcgattaattttttctttttctccagtggtacgatgcgggagaaggttgcaaaaacaaacaaaaatgatcatttaaacgtgaattaagtggatg

SEQ ID NO: 38832 - DNA, 1460 bp, Heterodera glycines
  unsure (1)..(1460): unsure at all n locations
tcacaacattgtcggtctgtttcgctcacactctgctctcgtcgnctgtacggaggccggttttacaaaccgcacggcgagcagtgacaccaggacgcgacgactccgagcgggcgctcatgaccgaccaaacggcattcaaattgccgaaaaagggagtccccctcattttagtccatcagaacacgcccgcgcaacgcgacgaagtctccacctcttcggccaatccgggccaaaccgacacagcgatgagagccctctggcgtttggcgcgggccttcccgggcacactcatccgctgcatttgcttctacgccgcccaagccctggagatcgaacggttggtggcccaacaagaaatcccggacattttagtgacgacagcggacgcgacacagggccacgagtcgtcacttgccgtcgtcgtcacaacatgctccgtcttcgacagtggggccgactcgcagcccttctgggcggacgctgctcgcgtggacgtcgccatctctcgtgccagccatggaatgatcatcattggcgatttgctgctgctcaaccggacggagacgtggcggcgctacctggaccaagcgacgactgagacaacagtggtcggtccggagtacttcgacttcgagcagttcaacaaccccgacaactactacgacaaggacggacagctgatctcagccaacggcggtgcggtacggtcagagcatttctacagcaagtacggtaagaatgtgtggtacaataactccggtgagtcaaggggggcggagaacagatatcaaccttatcttcctcaaggtggcactcgggaacgcactcgtggcaaagctcaaacttctggtgtgcgcagatgaaagaaggccaagctgtacgccttcagccatggacggcagccgcgcttggacctccttctttcttcattcccctccctcacgctctgcaaatttcttttttgttttgattctctctatctcactctctctcttttgtccatttctatttaaaagtatcattcattttgtcttcatttccgagctgttaatggcctttctttcccccaattcaaaattcttaaaatgcgtcggttttcctcacactttctctggcccactcttgctctcttctctcatcatgcttttacatcccatccccaaaccggaatgacccctggttgcttttctccgatttcccatgccatccatctgagatgaaggtggaccgctgttcattattgcaatgcgcagcttggccgtggaagttcggattggagagacgaagggcgaagccgagagtttagacccattcattcattcacttcatttttcttttaaggatcggggacgatcctaaggaaagggggggagttgtaaggattattcgacgcatttccctcatttaattatttcccatttgcccattatcaatttcatcacatttaatcctttctc

SEQ ID NO: 38833 - DNA, 694 bp, Heterodera glycines
ccccttttccaataccatattagtggggttttttgtaaaagtcggtgtattgttgaaagagcgcatacctatgtactgtgatatgtgtacatatagagatagagaaatacatacatagaagaggaacgggacaaaacagtcctccagcaatatttgcaccacccagtaaaatatgagtgtgtttgatgagctgggtcaaggcatatatatgtaaagcaaacggtataatctccggtttcgccaatcttagcgaactttgatgggaaaaacttttcaaaatgaatcgagagaggtaagaagtgcttgtgtgatcagtgatcacatcggaaaacgttgacctatgaactaattattcgaaaatttaatcgggaacagttctagtgtgtaaggaaattatccaatgggaattgatcagagaaccgagaatcacggtgagaaatagagaccgagggaaatgacaaaaacccgagaaatttatcgagccgaaaaccggacttttgactcccattaccataaccaccccatttatctccttcccagtcgatgcaaccaattcaattagcaaattttataaagaagtttcaatggaaatccccgtaaacctaatatataaaagtgtgtgtatatcttttttgcttcattatgttaaattatggaaacttttgtagatatagcacaatttaccgataaatga

SEQ ID NO: 38834 - DNA, 1382 bp, Heterodera glycines
  unsure (1)..(1382): unsure at all n locations
cctttctccccatcttcaccaatttcgtgtattcatttcctattctttgcgcctttaaccacacaacttttgtgccaagaacaatcatntaattttgtcaaatattctgcgagaagccaattaaaatataattttgcattttttaaataattaacatgaaaaaatcaaggtccagattaggcacaaaaacctgctggacttcttggatattaatcaaaaatttaaattgatgaataacaaaaatttttaatttaaggcccaaaatgttcatagtttgcgccactataaaaacaaggattgttttttctttattactgctattattaattaattaccctcaatgttttgtgatgggccgacatcgaatcattgcggcagaggacatggaaacagtgctaaatcgcctgcgcccttctgtggaccgatttgatgccaattttcagcgcacatttaacgaatacggacgtgtggactccgtgcgtgaagtcagttcaaaaatttgttttatttttttacattgtaaattattttaaattatttaatttttaatttaattaataattttcttttctttctcccttatccatcagaagggatttctgaagatttttgactccattttccaattgatttttttgggcaactgaatttcattttaataattttttgatacttggaattcttttttgaaaaaaaaaagtttggacatggaatttcgattccgatttttaattgaaacaacccctcatggccataggaactcaagaacacaaaaaagcagggttttcaacatttttgttacaactttttgcaaacttcacaaaattttggaatgttggcagaataatagaaagaacatttaggattgattatcccatgattcaagaattaaaaaacccaaatccccaagtgataagccaaatttatttggttttctgctgtttctttcagtttcttgaggacagtgtggtgccacggtttactgtggaggagcacggtcgtgttgattttgtggacgcttttcaacaattgcagttacgcattcaacaattttttgacaccaaaattcgcgcactccaccgtttggtgggcgccgctgaaaaggaggcacaaaaagtggacatggacaaagtgatgggtccaacgttgggcagtgagggacgctgccgggaccaaatgagggcattgaacgccagctcagtgcacaacccaagcatttggaagaaaagcaatggaaagacgaattcgggaatccatgttggcattttggggatgaaagtgcttggggacgataagcaattagggcatggaatattcaagactttttgagagattatttaagcattgattatgattttttgaactatcaatttttgggcaag

SEQ ID NO: 38835 - DNA, 1274 bp, Heterodera glycines
cccataatgaggcaattaatacacctgtctggtccgcgaggcgctttcttcgcgccccccgagtgatgtatttcgtgcaccaactcggtgtatgcccctttgtttcacaaaggaagcatatgcgatttgagcccctattggaataggggttcgttgttggattatggccgaaaaggaatgattcgtctgaggagacatcctcattgccgtttcatttccttccactggcctccaccgttcctctctgaacgggcgggagaagcggaacggtgttcctctcccttggttggctctcccctcatttgaatgagggggaaaattcctgggtttttcctctccccggaaaatttgagtacatctctatacttcttctttgacttcaacgattgaagagatagctcttcggagctctgtgcagttaaaggctcctcctgccctcatttccttctccaccacttgggtgagaaggtgatagggcagtttggacttaattgtggaggccatgaacttgttttgttcattttctccatagtccaataactgatggcaaatccgttcaatggactctgaaaattgtctcagagactgaacggattcagctggtttggcaaggtggagcaactccgcttggagggactccaccattgtcttttcatccccaaaccgctttttcagaatctcaactacccttaggtagttttaatctgacggtgggtataagtcaattgctctcctagcaactgacttctctgggaggcatcccagcaaataaatgtgcttcttgaagtcttcaatttgaagactttaaacggaagtctcaaatagcttccaaaacaaaggccattctcggggttcccccgagaatttgggcaatgttatcggcggaagcgtcacatcatgacgctgatgcaccactggtgcctgctgcacaacttgtgctggctgatttggctggggaattgcatcccccagctccgagaggcctaaagcccctccaatggtgtcgacaagccctcgggcttggtcgacccaatgcatgaaggccttgccttctggtttgaagtctctgtaattttgctcttcatcttgaagagcttgtcccttcactctcaggaaaatggcttcccattttccattgtatttctcaagaagagaaattgttttgcagagagtttgtctctctgcaatcagatctgcgcggacactttggtccgtcagctctttgcccaagttatgttgggctgtctcaatgtacatcttgagacgcaccacca

SEQ ID NO: 38836 - DNA, 1423 bp, Heterodera glycines
  unsure (1)..(1423): unsure at all n locations
gaggaagaggaaaaagagagggaaaaggaagacagggaaaaagaaaaagaggaggagaaagaggaagaggaaaaagagagggaaaaggaagacagggaaaaagaaaaagaggaggagaaagaggaagaggaaaaagggagggaaaaggaagacagggaaaaagaaaaagaggaggagaaagaggaagaggaaaaagagagggaaaaggaagacagggaaaaagaaaaagaggaggagaaagaggaagaggaaaaagagagggaaaaggaagacagggaaaaagaaaaagaggaggagaaagaggaagaggaaaaagagagggaaaaggaagacacgcaaaacgagcacgaggaacagagagagcaacaccagcagcaagttgggcatggtcatggacaggccgcagaatcagttgagacacggcatggccaattcgaaatgagtgccgaggaaagggaatgtctcagctttttcggtatgacttttgactttttgactctttaacgaataacggttcatctttttttttttgatcaaattgtcttcaatgcttctgctgatgaggaaggggaaagtgatgatgatcattatcattatcagctgcgcaatgcgccttcgacttctcatagcgtaactttttcattttaattcaaattaaaatgaaagttttgttttttaaagcaaccaaatttcaccgacattgatcaatatttgcacttcaaactccattctgatcagcgttctttggcaaatgcccttttcaattgggagaaaatgtgcaaaaaagcgacggacgaagtgatcagttcgccaaaggtgaaaaacaaatgtggccattaattgttttcaatttttcagattttgcaaatcatccgcgaatttcggaccgaatatttgctgcaatttgtttccgctaattttgcaattgaatgaacaaattaggcaggaaactgacattactggcacttagcattaaccgtttagttatcgattgattgatttgattagattagcatagcacgttgcccgaacaaatttgtaaattttttattagaaaaaatttaaaaaatcaaatgaaatttaaacttcttcaattttgtttttgatactcttgttatttaaatacatatgtaaaaaaaattgtttttatttatgttagaaaattatcgcgaattttaatttagaatattcgaaattatcataaaaaataaaccgagacctgcacagaaccaaaaaaattgttaccttttggccaaaaagccaaggaataataaatgaatattaaaatatttataattaacatttatattttctttacttcctctcaatcactcagaaatatgaatttttcgtgagactanaattttaaaaattcgaattaaaattntttttcatcaatttctttacattctttttcattact

SEQ ID NO: 38837 - DNA, 963 bp, Heterodera glycines
attgtggccaataataaaatggcataaatggtgaactcttataaaatcatttatcctcgaaaaatcgtgtaaaagcgctctaagttagcccgcattgatttgctttttcattgctttccgcctaacattcaaggatttagcttcattcaaataggacaaaatgaattaattgacaaaaatttgcaaatttatttatgaaattgcaatttaattaaaataaatcaactaagtagagactgggggataaatagagactggtggattataaattttcttggaaaaaataaaaattctatttacccccccccccccatgggggataattggagactgcgggattaatagagactgggctataattagagcatatacggtaattttaaatccaacctttggaccaattgattttttgaattgagtgattcatattaaaaacgcaataaataagatatgaattttgtattaaatcctttttcccaatttgtccagtgactactgtcaagcatcgtactcacatctgaccgcgctgtacgtgacgctgaagttcgacatcacggccggcctgcgctattactacgggcacgaggagcaagtgatgctgtctgtggagcaacaggtgggtagtgaagaaagaatgatttaattagatgccattttgatcacccacccgccctaatcacttcccaattcattcaaggcgtgctgggatgtttttcctaaaaactgccacccatttgcgttaaaaatactaatttaaaatttaataagtcgaatacaaattaaattttttttactgttctttcgagtgttcatcaaaaatacgaactgaccgcataacaaattctaaatataattaactctttaaaatacgggtaaatttctttggcagtttttgaaaacgccctagcaaagtttaggaaacacccaatttgacagtttttgggaaactacctaccaccaatt

SEQ ID NO: 38838 - DNA, 882 bp, Heterodera glycines
  unsure (1)..(882): unsure at all n locations
ttcacatgacactgatgcccctcaatttgggatgtttttgtatgtcaaatttggcccatttttgcgccaaacattcgccgcttgcaattttacgatggcgatcatttggacaatttgcgtcgtctcatttcaccaacaattcttactgatcttaacattatttcaatcttttcttgtgttctgttccccgatccaatttgtgatgatggaccaaatgcaactgctggccaagcgttgtccaaatggttgcacactccgcgaaaagatggccactcgaagcgattgaatttcttatttactgatgatgatataccaaaagcaaaagaatttgtcaacagtttcaaagaggtgtggtaacagtttcgttaagcaactgattgccatttatttaaatcttttcccattgtttaggcatttctccgtgccaccgacacttcttctgccagctacaaaattcagcttattatttttggtcactcaacgtcaatggtgccatttgaattggtgaatgatcgaactcaacaaaagctgacactgatgagaaaagcaagcaaaaatgcctgggacaaccgatgggaggtgaagcgatgccaaattggggggacgacggcggcggttcagtgggaggacgaaaatgttcaccatttgaacactgtctacttttcgctttgcaaacaatgcattgggtgagcaacaaaaagcacttttattttgttaaaaactcaaatttcacttaatttagggcattgtctccgccaccagcagaacaagaaaaagcgggacaaagcgtcgaaaaagagggacaaagcgtcgaaaaagagggacaaagcagcgaaaaagagggacaaagcagcaaagaagagggancaagcatcgaaaaag

SEQ ID NO: 38839 - DNA, 1240 bp, Heterodera glycines
ttccctgctcccatttccagaaaataatttcagccacttactgagccttcgaatcagtcggattgcccatgtcagtgacttccagataatattctttaaataagttaaagaaaccatttttttggcaaatcgaaactttcctaaattaacatggaatataatcaaatgaacactcattaaacgtgtaaaattacagtgaagcgaattgagacgaatcatagaaaaaatactcaggcaactttggtaaaacatcctttttgatccctttgcatgtgacattattgatagctttttcatcaacaataaaataattgtagtaatttgctccatcacagcgaaaagccattttgtttgtgatgcttttaaattaaatttaaaaatgctaaatatgtagaaattagaattaacaaaagtattgaactgatgggtaaagtaataaaaaataaactgccagatataaaaaggtaaacaacatttgtttatttctttacatatttaaagttgtttgtgtgaatgaataaataggatattccaagaaaatttttagcaaaaactaaatatttaggaaaatttaattttccattttcatatattcttcgtttacagttggtagaaagaaagccgcaaaaatagtcactaaaattgttaaccctaattattgcttaaataatatatcgcatcgaaatttgcaaattacatttaaaacttgattcaatggtataaaactgcattttactgacaaaggaaggtccccataagcacaagtgccgagttatgacgtgccaaacctttttagtgaataaataaattaaatatttatcttcgctttattcgaatgtccaatggtgtaccggtagtgcgccagtcagcccgacatgatattttgtgcatctattacatctttatgtttaatgatgactaatatttaatcatttactctttttctcactgtctctattctttttctgctctccctcttctttgcttatagccatatgacaatttgcctggggcggtccttccctttgtctcctccccaatatgcttgtatatgcttttcctttgtccaccctctcttccttacctggccgttggatccggatcccgaccccctcccttccccgctccgaatcggggaagctcacctttgttaaacatgtacgttcggaataaaggatattattccacttatcgtattttctgtggtgggcttatcaaaggtacggtaacaccataatca

SEQ ID NO: 38840 - DNA, 1832 bp, Heterodera glycines
aaaaaatatttttacgtattttggcgttttcccaaaacatataacaaaaatgcaataaaaacgaaaaaatatacccctaaaaccgatcgcttcagaaaaatacatctctaaaaatcgacataatttttttccaaaaatacaaccctaagaatggaccaaaaaatttctgaaatacacatccataatatgaaactttttgttacctattttccattttagcaactattttaggagttttttagaaactaaaaactaactattttggcactcatccctaattaacatatttttcagtccgatgaatggggtcacgaggacgttgaaatgggcaaatgtttggagaaaattggcgtcaaggctggcgattcgcgtgatgccgaagaccaccatcgctttttcccatttgtgccggaaactcatttgtccccagaccatatggacaaatcattttggttctggaaatacatttactatccgatggaagaagtaggacgaaaaaaattataatttaatttaatattagattttgggatagctattttaaattagaacaaatcgtttttttattactttgtaaattgtacatttaggggcccaactgttgcagtgattatgccatttcttttcactatgttcagccgaattcgatgtatagcgatttgaattatttaaataattaattaattacaggtactcacttgaatatttggtttaccatttacatctattcggcaatgaaattgaattaaaggacaatttcgaaaaaaacaggctaatttattgaaaataaaattatttattatttttttgttgtaaaataaattttcaaaaattagtttaataaatcgaaaatttttattatttgaaacttaatgaaaaagcttaaactttttaaatgttagaaaattaattaatatttatttatcacaattagacttaagtattatttttgtgtataattaatttagtgtcggcataattctacgaaatgcttacaaattggcaatacaaaacattggtgctgatgatgtgttcaagaacaacgaaaaaactatcgatgaacaagtggacaaattgatgggaattaacggccaacaaccaaattgtgggatcccgtttggacaaagtcattatttaatttatttaactattatttttatctttcattatcttgtataacttttctctctttacaaatttattttcccatcccaaccaatgtgttacactttgctacaaacccaagccaatttgtgtccttcccaagtcactccctcattcatctgctttttaaactgaactgttccctcatcgcttttttcctactactcgaaaaaggctgaatttcgtgttatctcaatttatttttcttgaagtcattgttagctcttttctttatttataagtttaagcgttcttttgttgtaaagaagatagctatttaccaagtaaaaaataaaaaaaatgttggcctaagaaacttagggtcggcattgaatgaacgcgtaaagagtagaaacaaaatggggtcggggtctacgggaatacgaaatatatggaatgttgtgggggattggggatgggccaaccgaagatgtgttgtccgaatgttgtcaatagttgggataaatatttattttaaagtaaattgggaaacggcggaagaaatataataaaaatggagggacgatgaatttagaggagaactgcagcagaagattaaaacataaaaactgaacaacacgaatgagaaagaataatgaaaagagggatcaattttgggacgaattgggaaattgtcaaaataaatgatcgcggtaatacaaatatat

SEQ ID NO: 38841 - DNA, 1787 bp, Heterodera glycines
tcaataaattttaaatgctttcctatagatttcaaaaccctctaagcacattggcaacaaattacagtattcttctgtgctattaccgtacttaaaacaaattacagtattcatttcctattgctaccgtaccctttctgccaattgcattttgcactgtcatcttcccttcagcgctgctgctgctcgtttccgtgtcattccgtcgatggttgtcatgcaaatacagttccccaccatcgttgaattggcgcagcgacttgcccaaaataccgtagcgatagtcgtcgtccgaactgtccacaacgcttacacgacgcttactgtattcattagaatcaattggagacaaatttcaaattcaaaagtttcaaattatatatcgcgatgcccaatttaacagcaggaaaaatattttgtgcccgattttagttggggtttatttgtgctaaaaaccctcaaaaatgccaaaaaaaaaagtgaaaaataaatgaaaaccctaaaaaatcttcaaactgatttttttctttaaaaatacttaaattcagcagattcaaaattatctccactcattctacaaaaaaatataaaaaaagataaattttctcaaatttttgtcaaaatcaacaaacaacttttcgccaaaaatttgtaacgaaattatcaaatttgaattttgactttgcattcagttcataaaacattggcaaaacccatatgatcattcactagcagagttcccaagtttttttttttcaaaataagacaaaatggcctaaaaactaagattctgaccccaaaaataagattttttctaaaactaatatttgcgtgaaggaaacgcaataaaaacatgaaaaattgacttaaaacataaacatgtttacgttttggtggcattttgtgaatttcactcaaaaaatgaaataaaatgtaatttttttttaaatcaaattaattcaaatattcgcttcagaaaaaaatgaaaaatcaaaatagtcattcaaatttttcattttttattttcaaatccaaaaataagcacaaaataagcacgtaacgctgaaataagcacaaatcttagaaataagcacatttttactttctaagatccgacccctcaaaataagcacaaatcttagaaataagcacacttgggaactctgttcactagtcataaaggaaactcctttattgactcaagaaatcggcaaggaaaaactttgccattaaagaaaatccgattcgaatcgccacaaatatattaaaaaattaaattttcaatttttaaaagtctcctcctcactttggcacatcgtcgccttttaagtgtccgtcggcggcgtagcggcgcaacgctttgctgagaatgccgccgcgcatgcgcacctcccattcctcggggcttagcatctgagtttttttaatcagtttgagagtttaaggtggcatgggaccaaatgccacaaaatttaatttttttttaaattattattaactcgtcgcgttgtggtggtggtggtggcattttgcgatgaagtcgtcgacgtcacaattgcggacggcacagtgacgcgcagtgccgtgtcactggcactcacaattttgtcaatggacgatgttgtggcagtgtcatctcgtttgtcggcaatttggttggtggtgttgctcggcacagtttctgacgatgatggcaccacaacaacggcggccggttccatcgctacggtggtcgccgccggcacagtgtcgccggtgccacggtcacccgtgccgccgccactcgg

SEQ ID NO: 38842 - DNA, 644 bp, Heterodera glycines
ttgtactttataaagataccaaaaagataggttttgttcgaacatgaacaaagttattgtataaaaatccgggattttcaattgattggactcataaaatactgtaagagaataaaaataaaataaataattatttttttttagtaaatttctcaaaaattcgttacttttccgttttgtctccccattccacacccttttatcaggggaaatgaaggggagaaaggtgtaaagtaccccaaattttccaattggacggaacgaccttgaaaatttgcaaaataattttgtaaaattttttaatggcggtgcaattataaaatttgctaattagctaattaattaccttcgaatgacatgataagaaaagaaagaaaaaaatggaatgaaaaggagctcatcaaattgtttgtttattatgtatttgtacccgaaataaaaaaaaaattgatagagagagagagtgcagcagattgttagaaaaaaaatagaagaagagagaaaagtgaaatggagagaaaaaaaggaaagagagagacaaaggagagaaagaaagagagagagagaggagagagagagagagagagaagagagagagagagagagagagaaagaataagagtgaaaagagagagagagagaga

SEQ ID NO: 38843 - DNA, 867 bp, Heterodera glycines
ttatatcgattttaatgcgctaggttcgatgaaactttttaaaatataagcctaaactttttggcctgtttaaaaaggaattaaaaatttttaaaaattttattcatctcccttttgatagaaaaagcatcagagtgccttgattaacctgtaaataaagttttgtgtgtttcagagcactttctgaaaaaatacttatgaattaattttgcaaaaaataaataattaatgaaaaagtcagaatttcgaaaaattttaaaaacaacaatcgttggcattttttcaggttaagttagtcctttacaatggagaaggcctgcaaaatttggagagattatatcgattttaatgcgctaggttcgatgaaactttttaaaatataagcctaaactttttggcctgtttaaaaaggaattaaaaatttttaaaaattttattcatctcccttttgatagaaaaagcatcagagtgccttgattaacctgtaaataaagttttgtgtgtttcagagcactttctgaaaaaatacttatgaattaattttgcaaaaaataaataattaatgaaaaagtcagaatttcgaaaaattttaaaaacaacaagcgttggcattttttcaggttaagttagtcctttacaatggagaaggcctgcaaaatttggagagattatatcgattttagtgcgctaggttcgatgaaactttttaaaatataagcctaaactttttggcctgtttaaaaagggattaaaaatttttaaaaattttattcatcttcctttggataaaaaaagcatcagagagccttatttaacttttaattaacatttggtgcgtctcagagcacgttctaaaaaatatttatg

SEQ ID NO: 38844 - DNA, 908 bp, Heterodera glycines
ataaatcattcaaaactcctcaaatctgtcctcgcaaacttatatgccgatttgtaagcactgtattctcagctcatcgccgactccaatcggttccgcttggaaatggctcgtgtcgtcgggtcccttcactttcggataaagcgcttcaaacatgcggcacggatcgccggctgagggagcggcggaggcggcggcgctggtgccgcacattgtggcgggagggacaaagctcggcggacagacctaagccaaggaaattgacggggaaatggcacggcactgatcggtaaggtcgagaattgagagtttggggggttgagaatggatccgagtgctttttgattacccttttttgaagcacggcgacccaatcgaccagtgaaaaccatttgtgatttttaatgtccgttggccctccccgcaaattgccataacgttttgtaaggtcaacttggagaagattcttcagcaaatccctcagatcggaggagaaatgtggcgggtatttgacctaaacaacacaaaaaaattgaaataattaatttaaaacaattaaaattaaattattttattggtttatacttttccagaaacaattttctcgtaaatttgaattggctgttcggcaaaaaacggtggataaccggcgaccatttcataaatgagcacacccaaagcccaccaatcgacggcctttccatagccctaattaaatggttattagaataaacacaattgccgatttaaaaaaacaatcaagaaaacagactttgctcagaatgatttcgggtgccaaatattcgggcgttccgcacatgtccacgtccgtcctttgacgcgctttgcgaagccaaagcccgtaatctgtgccaaaatgtaaaatcaattaagtaattgacaaggaa

SEQ ID NO: 38845 - DNA, 789 bp, Heterodera glycines
  unsure (1)..(789): unsure at all n locations
tatctgtcatgggtatttntggagcaattaaaaacgatcaacagtaacgtctcaatttctccccccgacttaccccaatttgcattttccccgtctccacctcccccacccccggatgcttccccgtaaatctgtcgtcttttcccgtcgtctccattaattttgccctccaccccccccccggcgctgttttttccgtttttttccatcacaatttttttaattttgtttttgctccctcaattcaccacaaattatgcattcattcattctccatctccacacatattaatatgttgatcatttttgcactctcactcattcattttgcacaaaaaatggtctcaaaaatctctgctgcggcggcggcggtttgttggacggacggacggacgacgccattaggggagagcggcgaggtggacgatggacgatgatcacagccaccgacggacggctgtaaaaatattacccccaaatccctcagagccccgcctccctatttttttccctcaattttgaggatggtttgtgaagatgatggaccacacaaaacacatacatatacatattatgtagcataatttggtgcgcggagattgacgcggattttattgctgccggtgccctttgatcttttcgcccattaatcgccgcgcggcggcgttcattcgctgcgctgtgcagctgcgaagctctccccccagccccctcatggcccccgggtcctctcctcactccaccaaccccctctcacattttctcaaacattacttgccccccacccct

SEQ ID NO: 38846 - DNA, 943 bp, Heterodera glycines
gatttttgggaatggttttcaaatggttagcacatttttaactgtatttggtcaattttaaaattataaatttcgaaatactttcaaaaatccgagttttctaaatatgcggaaaagaattgtcattttttaaaataatcataaatttgtacatttttaaaacctgtactcctggcggtttttggcctttaaagatggaaggaatcatgtttgtttggatttggttttttgttcggaaaaagcgggtaaaattcagggaatgcgaccggatgggatgtgatgagcggaaaccacgttgactttattttaaaatatttgtatcaatgacgcattttccggtcacgatcacatttgcacctgcaaatgtgatttttttcttttaaatataaaaatttattttttctattcccaaaattttttaaattttgtttttaattatgtcaaaatggcagtcaaaagttttcaaaatcataaaaatacattaaaaatgaaaatctaacaattgccttatttggcattatgtcttcgtcatgtctaaatttgtgtaactataaagttaaatttcatttttccattttctcgatcccttcattaattttaaattatgtatgttttcgtttccccccacggaaaaataaaaaaaacattctcacacctataaatttgtaaaaaaaaccttaggaaattttttatcagaaaattcaagaaaaaaatttttagaaaattttttcagcgattttttcaaagttttatgatgaattaataatttttcttaaaaaaaatttctaaaattcgctgaagaaattttttaaaatttttcccttgaaattttatcaaaaatttctcaagattttttttcttgaaaattttctagatttgagaattttttaatttttttcccgggcagaaacgatgcgggggaaactgatttggagaaacggtg

SEQ ID NO: 38847 - DNA, 1090 bp, Heterodera glycines
aaaaaaatattttttttttttttttgggggcaatcccccccgaacccgatgcccccaatttttatggggagaccgatatctttcgggaataacttccctataaccctgtacttaatttatgcgttggattttttgctccccattattgtttgagtcccccaacgggaccctgaaaaaattgatttttttgttttcggggcagtccccccgaaccgatgcgcccagatttatggggagaccgaatccttcgggaatagcttccctatagcctgtactttaattctgcgttggatttttgctccccataattgtttgagtaccccaaacggacacttgaaaaaatcgatttttttgttttcggggcagtccccccgaaccgatgcgcccagatttatggggagaccgaatccttccggagtagcttccctatagcctgtactttaattctgcgttggatttttgctccccataattgtttgagtaccccaaacggacacttgaaaaaatcgatttttttgttttcggggcagtccccccgaaccgatgcgcccagatttatggggagaccgaatccttccggaatagcttccctatagcctgtactttaattctgcgttggatttttgctccccataattgtttgagtaccccaaacggacacttgaaaaaatcgatttttttgttttcggggcagtccccccgaaccgatgcgcccagatttatggggagaccgaatccttccggaatagcttccctatagcctgtactttaattctgcgttggatttttgctccccataattgtttgagtaccccaaacggacacttgaaaaaatcgatttttttgttttcggggcagtccccccgaaccgatgcgcccagatttatggggagaccgaatccttcgggaatagcttccctatagcctgtactttaattctgcgttggatttttgctccccataaatgtttgagtaccccaaacggacacttgaaaaaatcgatttttttgtttcataaatatttttttcagaaccgatgtgctctaaagcgcaccaaattttatttacaacttaattttagcactctgat

SEQ ID NO: 38848 - DNA, 928 bp, Heterodera glycines
  unsure (1)..(928): unsure at all n locations
aaatgcagtggggcaagcacagcgagtcgcttaatgcacaccctttgacacgtaaaatattccaaaaaaagagatagtgattttttctggattaggccggagaaataaaaattaccagctatttgaaatgcagtgggaaagcacagcgagtcgcttaaatgcacaccctttgacacgtaaaatattccaaaaaaagagatagtgattttttctggattaggccggagaaataaaaattaccagctatttgaaatgcagtgggcaagcacagcgagtcgcttaaatgcacaccctttgacacgtaaaatattccaaaaaaagagatagtgattttttctggattaggccggagaaataaaaattaccagctatttgaaatgcagtgggcaagcacagcgagtcgcttaaatgcacaccctttgacacgtaaaatattccaaaaaaagagatagtgattttttctggattaggccggagaaataaaaattaccagctatttgaaatgcagtgggcaagcacagcgagtcgcttaaatgcacaccctttgacacgtaaaatattccaaaaaaagagatagtgattttttctggattaggccggagaaataaaaattaccagctatttgaaatgcagtgggcaagcacagcgagtcgcttaaatgcacaccctttgacacgtaaaatattccaaaaaaagagatagtgattttttctggattaggccggagaaataaaaattaccagctatttgaaatgcagtgggcaagcacagcgagtcgcttanatgcacaccctttgacacgtaaaatattccaaaaaaagagatagtgattttttctggattaggccggagaaataaatattaccagctatttgaaatgcagtgggcaagcacagcgagtcgcttaaatgcacaccccttgacacgt

SEQ ID NO: 38849 - DNA, 551 bp, Heterodera glycines
aaacaaatttttcctttattttctcttttttattctcttctccgattgtatcaccctttagttctgataacccttctatcgcttacccccttgaggttttccttctgtatgcggtattcccatccaactcactaaaaaaagaaactggccccgaccatgtcaatgggcgctgcgtgttcctatagaattaaaatgacagatatgtgccagatacttcaccttgcatgacaaccattatctttattagattttatagattatacgaaaactatcttgaaaattttatagtagagttttctcaatcagagttttcattcataaaaccataaaatcccggatggcttagcttttcttctcaatccaatctcttctgttccattttggcatttctgtttgtacacacacacattatatttattattttttttaatgacaatgccttagagccgcttaactaattggcaaaagactttatcaaaaaaaaaaggaaaatttccaagcaaatttgatcttgacaagattatatctcgtagttggagaggggggggggg

SEQ ID NO: 38850 - DNA, 633 bp, Heterodera glycines
ttttactgtttttggtaaaagtccatcaaaaatcttgccttagctccatgggcatttaaaaacagcagccgtaagaacattatatacttacgccggccttttcttcaattggtttcagcagcctgcgcaacagggcaattgtttttcccgagcccgacgaatgggtgatcagaaaaacgatgttctgcaaaattgagaaaaggtacatgaaaaaagagggaaggggtgggattgttgccgccggcaaaagagaaataaatcataaaaattgatcattttaaacaaaatcgactaagaagcaggcatttttcaaatttttgctctaaaatgaaattttttattgaaacattgatgactttcaatggtttccttgtactagtatttaagccggttttgaaccaaaaatgcgtaactcaaaaatttaaagtttcggtctttgtgccaaaagcacacctgtgccacatttttgtgcagattgctcagaagaccgttgatgcagtaattgaaggaagcgtcggcacggttgtcgttctctttcagcacaatgccgacgccgtgcaacgcatcatagccacggaggtagccgaacgtgttggccatgttttggttgtccatttcgatgccacgcgtgtc

SEQ ID NO: 38851 - DNA, 907 bp, Heterodera glycines
cagccaagcgcaatggtggcacacatttttccgcccactgatttcagtcggatgctcctgtcgcgaaatgcgccgaaccttttgaggacggtggagagtctcaacgcgggatacctctttgtgatactaaccaacaaatagagcactgattttgccgctcattcataccttcacacttttaattgttttagggaatagttcatagtttattttatttgttttccctgctaattctgacatttcctattccgtgattcggtgtatataactgtacgtttaatacatttattgtatgacagtaatttaaacaattcaaatgataaacctaagaatgtataattcggaggatgcttcaagtggactcactttgagagtctgtaaaatacgctaaattggcgaatattgttgtcgttggtaatccgtccattataaattcatttatgtgtgtgctgtgtgcctccgtggataaatgaattatataagaaagggtcacaaaaggttggggcgagtgagtattatttcgaaggagtgcctctatcaggggaattgggaagcaaaaattacgccgcggggcactatggacggagcctaataattggaattaggaagagcttggagggggggaattactgcccctgggatttgggccatcttttggcattgttttggcaaaacgcttttatatgtccatctgacggagaaacggcatttctcgagaagcgcaaatgaccattggcaaaaaaagacgatttggcacagtccaaaaaaatggccaaattttccgctgtcgccccccccccactgacatcggctaacataaaaaagccaaaaaaaaggtaaagacatgcagtgcaaaagggggggggagtgaatggtccgtccgtccatcgtcccatgacagttattt

SEQ ID NO: 38852 - DNA, 994 bp, Heterodera glycines
aatttctgttaataaattgcaatacaatttttaagaatttgccggcgccacctatcggcaccgtcggaccctaaaactccttaattttcttgaaaaatttgctcaaaacgcaatttggacaattttttgacaaaaactgttaaatatcgcattaaaaatcccaactctcggaggtcaattctcgatatcaacagaatcaattcgacccaattttggttgaccgaccaatatttttcgtcaatgtccggccgagagtctaacaggtcgtcgccaagtgtgtgcaatttggtgaaattgatgcgcaaattggttatttttaacagttccgcaatctccggtgcgtatgggtcctccgtgggaatgtgaggcgaaatcactttgtaaaccaactgaataattattgttagtttgtataccgtatttattctattattagacccggctctttattgttcgaccccctcaaaggggggtcttaaatccgtgggaggggggggggggagagtcgaaatatcgaagaaataccgtatattgttttatggcaatgaatggcaattttttaaaaattaaaaaaattctgcacctctccgccagttgccggttcaaaactgctatattttttggtacaaatgacatcattgtgctttctgggaggcccctcgggaatgctgaaactcgattttttttataatatttatttatttaattttttttttgcctacttcgggaacgaggccgagcaatcataggcgaaatagcggtaaatggtcctgaaaaggcaacaattatatttttggccattgtctctaaattttgatgaatatgtaaatctggcggaatattgcctgttaagttttttataccaagttttgccaaaatccttggatcgctcaatgaacattgctgctggacgaaatgaacgaaaaatcatgatcagatgggtgaagtgaaattctgcctccaaggcaagttgaattgaaacattctgcagaat

SEQ ID NO: 38853 - DNA, 510 bp, Heterodera glycines
tgaacgggagcgctgatctgagcccgccttcgagatcagcgacccaaaaaaccccttaaaacttattttaattaatttcaaaaacatatttatagacatttgaaaatgtatgtgaaatctgtcaggtaaactgaacaagtaccgaaaattcaatcctaaaatagccaaaaaccggtcatttttggccaaaaacgactatttaatgcccagcaacgaaaattctagaataacactggagaaaaattttaaaagaattttggaaaaaaattcgagtttcgcgtttttttgaaatttcatcgtcgtagggggtgccgagaagtccgcgcaattaattgaaccaattctgataactccagggaaacgcaaggtgcgaaatgatgcccaaaaagtgtggcgaaaattaagggaccaaaaaaacgacattctgccgaacattgacaaacccaaaaacgaagcccttctcatagctgtaggcagccacagcagcagcggaaatctgaaaaaggacag

SEQ ID NO: 38854 - DNA, 1060 bp, Heterodera glycines
  unsure (1)..(1060): unsure at all n locations
atccgttccggagagcctctgcaaaatttttccttaccctaagagctgcggaaattgtgaattaattctcagaaaaatggctatctctttataggacaattttctatctcgtaaccccgatgctaatccgttccggagagcctcttcaaaattttttccattaccgtaagagctgcggaaattgtgaattaattctcagaaaaatggctatctctttttaggacaattttctatctcgtaaccccgatgctaatccgttccggagagcctcttcaaaattttttccattaccctaagagctgcggaaattgtgaattaattctcagaaaaatggctatctctttttaggacaattttctatctcgtaccccgatgctaatccgttccggagagcctcttcaaaatttttccttaccctaagagctgcggaaattgtgaattaattctcagaaaaatggctatctctttttaggacaattttctatctcgtaaccccgatgctaatccgttccggagagcctcttcaaaattttttccattaccctaagagctgcggaaattgtgaattaattctcagaaaaatggctatctctttttaggacaattttctatctcgtaaccccgatgctaatccgttccggagagcctcttcaaaattttttccttaccctaagagctgcggaaattgtgaattaattctcagaaaaatggctatctctttttaggacaattttctatctcgtaaccccgatgctaatccgttccggagagcctcttcaaaattttttccattaccctaagagctgcggaaattgtgaattaattctcagaaaaatggctatctctttttaggacaattttctatctcgtaaccccgatgctaatccgttccggagagcctcttcaaaattttttccttaccctaagagctgcggaaattgtgaattaattctcagacnaatggctatctctttttaggacaattttctatctcgtaccccgatgctaatccgttccagagagcctcttcaaattttttccataccgtagagctgcggaa

SEQ ID NO: 38855 - DNA, 1146 bp, Heterodera glycines
ctgttgcctacgttccttaaaaaaataataattttgctcttctaagctaaaatttacttttattattaaattgttttttcattaaatacaaattattgcagaatttattattgtaattcggcaataacgccctacctatttaatattcttttgatggaaattagctaaaggacgtgcaatttgctcttttggtaagacataataaaaaatattataaaatatttttatttaatttaaaaaaataaaataattatttacaaatattttttttactaattttataaaattaatcaattaactaataaacaaataaatatatcaatatttttattatataaatattaatgattttaatgcacttaaataaaagtttccaaccaatttaaaagtagttttaagatttaaaaacatggcatccgattacgatgaggcggactacggtatgtgttgtacacaaatgccacaaaatccgggccacgaacactttgttcgcccactaactgaacttgaacacggacaacacaggcaacattggacgacaactcacaccgaggcaatgtacggtatacattaatagggaatggatgatacggtatatggctgtttagtatggtattaggactgctggagaataaaatttctaaagaaatgaactaagaattgaacccaatacgcgagaaacacgaaaattttctagcgttttagagtgccacgggaccgggacctggtagcggacaactgagtacaactgagtaccaaggtcccggttttgaccgggaccgggactagtcccggttttttcccggtttcccagccaaaaattcccggtttttcaacccgaaaaggtcccggtccagggcttgcccaaaattcccggtcccgtggcactctagttgaaagtacacaggtatggacgcacaaaaagaagccgacaaatgatgtcagtgttgaacagcaatagcattgtcataaacagaacgccaacaacagtcaaattggttggggacgagccaaaacaacgacagtatgccaacaacagctgtaacaatgaataccatctggtacggtattatttgtagtaaatttttcaattattttaggatactgagtttttcaatttttcaaaagtacatccctatgaatgac

SEQ ID NO: 38856 - DNA, 194 bp, Heterodera glycines
catttttcataacaaatattggcaaaacgcaaaaatagttgataatagtttttttttaattttatagttttttagttgttaaaaataaaaaactagaaaatagttgctaataactcgaaaactatcttaacacaacccccctaaaaaacatgttttcgtgtgtttcagtctataggcagctcagaaaaaaatag

SEQ ID NO: 38857 - DNA, 866 bp, Heterodera glycines
ggtccgaagcttattccttgctcatttgactgaattgtaatctgttcaataattcaaattaatgaatttaattttaaccaaattttgtgttttaattaattaattttatttgttaatttaattacctaattactttgaatcaaattttattaaagaaataatttagtttgtacctaattttgagaatttttattatttaattttaaagaaaatgtaaattaaataatttaatttgaataaaatttttgaattcaatttttctatctatattcagcatttataaatctgggccttgatcattagtgatctgtcgagagtctttgtttcgggtctcgactcgggtctcttgatcgctcggtcctgattcttcgactcgttaaaagtttttggaatccaatatcactgatgaatagggccgcaacttttagtgaaaaaattaatttaatttttaaattcgcgaaattgtttaaaaagtttacaaaattttttgtccaaaattttgtcttttattgcccttatttgctcatttagatcctcaaaaattatacagtttctcaaaaggttaaatagatttacttgtaaaagattagtagctaagcacaaaagcagtaaaactgaaaactcatttattaatagaacaataaaacaatggaacaatcttgactctgaaattacggcatcatcttccatacgtagttttaaaaacaaagttcttaatgggttaaagcccgtaaataccataaaatatttacattgcatgagaaaaatatttttgattatttataactgtgtttcgttcgatgcttgtgatctgactttattttttcatgtgtgatctccatttattattcttgtattcaccgatc

SEQ ID NO: 38858 - DNA, 928 bp, Heterodera glycines
aaactgaatatcataagaaaaatctgcttcattgaaacctttgtcagagtgacttgaaagtgccgtaattttccggcacgattctgttcccgctcaaactgagaaattataacaaatacagtaaaaactttcattgtattttttgtacagtaatcgtttttttttcttactatattaataaattgtctttcttcaccaatgtccacacatagtcagtgctgcagttaaaacagttgtcatcattgctgctggcacagtttcgactattgccaataaaaccttcagaaaaattttcaaataaaaaattggctaaaatttccattgggtttggctaaaaaagcaataaaaatattatttcaaaatcagaaaattttatgtatcgaaataggaaattcaaaaattagaaaaaaagcaactaatttcgataatttgatttataatctctttttgacttattctttactttgataaatttttgtcattaatttttttttaaattttccttataaattcgatatgaaaaattcgtttccaaaataaaaaataaagataaagataaatgtgaatattattattattattattgttaaatatttaccgataatttgatagccattactgaccaacatggacagttgcacttctgcattttgcaaatcggcaatggtagcgcttacaattcggacagctggcaaagaagggaatgggcgaggtgccattgcaatattcgtgaagaaaaaagtcgagaagatgaataaaaaatgccaaaacatttccataagcaatttttcttttatttttaaaatattttttaatttgtgaattatttttaaaaaaccctgtcaaataattcctttatattttaatcaattttagatataaaaaatttgggtttttgccacgatcaaaaacaggaaaatcaaggaaa

SEQ ID NO: 38859 - DNA, 942 bp, Heterodera glycines
ttttgcaggaaactgctgagaacactacaaatgcatataaatttcataaatttttgcctggaggtacacagttcttcacacttaccacacaagtattatttttcgaaaattatttttttcattttatcacccaacgttctagactgatcggaagctcacccaattttgcagggaaactgctgaaaaccctacaaatgcatataaattttcataaattttttgcctggaggaacacagttcttcacacttaccacaccagcattattttttttaaattatttttttcattttatcacccaacgttctagactgatcgaaagctaacccaattttgcaggggaactgctgagaacactacaaatgcttataaattttctcagaattttttgcctggaggaacacagttcttcacacttaccacacaagtattattttttttaaattatttttttcattttatcacccaacgttctagactgatcgaaagctaacccaattttgcagggaaactgctgagaacactacaaatgcatataaattttcatagaattttttgcctggaggtacacagttcttcacacttaccacaccagcattatttttttttaattatttttttcattttatcacccaacgttctagactgatcgaaagctaacccaattttgcagggaaactgctgagaacactacaaatgcatataaattttcataaattttttgcctggaggaacacagttcttcacacttaccacacaagtattatttttcgaaaattatttttttcattttatcacccaacgttctagactgatcggaagctcaccaaattttgcagggaaactgctgaaaaccctataaatgcttataaatttattagaattttttgcctggatgaacacagttcttcacacttaccagtccagcattattttttaaatta

SEQ ID NO: 38860 - DNA, 1023 bp, Heterodera glycines
aaaaaagtcataaaaaacgccaaaaagtcacggaaaataaaaaaaaatcatgaaaaaatagtcaaaaagtcaactaaaaaatagtcacaaaaaaggtaaaaacttgttttttttttgttttcgtgcgtatatataataaaacgattaatttgattacaattagggccgcgaattttagtgacgaaaaatctcgaaatagttaacttaaaagtgaggaaaaaagtcaaaaaaattttaatcagtagcaaaggaatgtttaaaatttttttttattcaatttgttaaaaatatttataaaaaaagtaaaaagcaaattaatttaggtctctgacaatataaacaccgcgaaacaactttctgcaacatttttatgcttttttctgtcaaatttgttgttcacaattttgtacattgtcatcacattgaatttggtcactgaagcctatcaaatcagtttggtttatgcctgtggaaattggagcatcgcaattctttgtgtggccactgaattcaccataatgacgtaatgaatttattaaaataaaattaaaaattattaattaatcttttataatttaggcatcatccgttgctgcaacgacggttgaccaatcttttgaattcaattttttgttttagactccatcgggtcgctccaaattcagaaggtctgcccaatgttgttcacaaaaattgtgatgtagaactaaaaggtaactcgcccggtgggactcgaacccacgaccccagcaatccgtgccgtgctctaaccaactgagctacgggcgcctcttttagaggttctctcaggtcctttatcccactttctcccacactccgttccttctggcatcacagtgaaaatgaaatgaatgaccacttcagaatgctgcaacaatgttggaataaataaaattcattaaaaaaatgaatttttttgtattgtttttaccttttttgtataaattctttttatttaaatataattaaaagctagtggtaataaaacttgaaaataaatat

SEQ ID NO: 38861 - DNA, 616 bp, Heterodera glycines
  unsure (1)..(616): unsure at all n locations
taggtgctaataactcgaaaagtagtcttaacaacatcatttaaaaaacatgnttttcgngcggnncaggccacggggactttcaggaaaaaaatatgtaaaaacctaaaaatcgaagccctattaatgacacttttaatgagtcccaataaaaatttaatcaatggaccattttttgaagaaaacgcttaaaacccataaaaattcaattcaattcaacgttatgtcattttgcctttttaaggccttttgttttctcttcacgttttactcatcgctcttttgaagcggcgtccctctgcatttttcttcccaagggaaattaaatgaccaaaaaagaaatgccgcatttaatttgcttaattgattctaaattaatgtttttcaatttttctccaccatttttctctccccttttatctctccctctactctctctctccctctcatctccctctactctctctctccctatcatctccctctactctctctctccctatcatctctccctctactctctctctctccctatcatctctccctctactctctctctccctatcatctctccctctactctctctctccctctcatctccctctactctctctc

SEQ ID NO: 38862 - DNA, 666 bp, Heterodera glycines
tcctttttaacaaacaattcaaaaaaaaaaaaaaaattcctaacaattttcaaaatttgatgcttttagggcgaaaattttaaaaattcggatgcaaaacttttaaataaaataaaattctttaccaatgccattagaaaagtgagcaaaaggatggccacagagtgttgggcaccaaaaattggcattgtccattcccaaaacagtgccaacaaaagcatggaaacggtggacatggccaaaaggacgaggatcagcggtggcttttcaatgcgaagaccgacgcctttgtgcaacacactgtagaggagagggccgacacatgcgagctgaacagtggggtggcttagaatttttaaaatttaatttagcaaatttttggcgggcgaaattatttttttaatttagcgaaaaaagtagcgttttttatattttttaaaaaccaaaggtgggacaattaagttaatgagtgaaaaattgttcacatggggttttttccgtgttcttgatcacgaatctgacatgaattttcgattttttttcaaattctgattagaaattcgtcaaaatcaggcccgtagccgggcggggaaaatgggacccacgcgtttcggcgccgaccgtttcggcgccagaccagtttttggactataacttttttctttg

SEQ ID NO: 38863 - DNA, 779 bp, Heterodera glycines
  unsure (1)..(779): unsure at all n locations
aggcggatggtcagcgaccaaaaacgggatcattttcaacttgcgttcccagatcatagacanaagagcggtcatattgcagaatttatcacgaattgagagattggaatgtttcgcttcaaacgtaatttaaattttaatttattggattttttaatttattttaatataataaataattcaacatttttaaaattaaaactatttttttcagaaccgcagtggtcgtggtaactttcgtctgcggtataacccaatggcggctgttgaactgaccctgctcgggaatcgtcttgaggacagggctcgtaaacaccgggtggccataggcgcatcgacgtcagcatcaactgtgaacgaagccaacgcgggcgagaatggtgagggaggtagcggacaaaaccagaacggtgagttttaaaaatgtgcataaaataaaataatatatagaacaatcaacaccgcgcacttcacgcgtgcctttgtcggccatgggtattaaaataatcacatttcaatttttatccccctaaaaaatagataatgttgtcgctggtcaggctgtgcatcaacctcagatgttggaaggcaaaatggtgaatttatttaataaataaattaataaattattttaattattttaataatattaaattttagtcgccttcttttgggcaaacaattgagcgtcatatggagaaatcgcgtcaccgattgctccatgacgagatggtccagagatcggtacagcagcattttcaacaccaacaacaacagct

SEQ ID NO: 38864 - DNA, 1167 bp, Heterodera glycines
gctcatgtcagcccaatgtttaggcggagcaagaacagcgggcccaggggcagaaaagtccgttggatgtgaccaccagcgaacgcttcagccccaaggcattgcacgaatgttgcgcggacgcattcaaacggctgaaacagcactggccagaagtgcgttttgctttttaatgccacaaaagcgttttttcattaattttgtttccttagttttatttaaatgaaatataatattttagctgaacccttttaatctgttttggctttttgttaaggttcgcgctgccttcaccctttacattggagtccgcgaaactgaggaaatccttctccagccaatacgaaaggcggtggccaacgcattcggcgcattgaatgcatttgctgaacgacattatgacacagagcaacgccaaatcatttctgcaccaaaccaagaacaaatttggcttattttgaatgcctctgcctcgatttctttgcattaaattgatccttaataattccattaatatatttcccataataggcaatggtaaagttttgtggtttcttcgaaaaataaatttaaaaatttaagaagcacattttctaggctgaaaaaatgcgctgatcacgaatctgagctcggattttgcaaaatcattgattatctatgattttttatcaagtacttgacttttacaaaaaaatgtgtatgtcggactattatttgcgccacattgtagaattaatgctgatatcctgacatgtcccagatataactattgtttctttccataccttcttgtacagctcgagctgctctttccaatggacttatcccggtctcgatccgtgccgaactcacaaagttatggagtgaaatgtgaaatattgttttcaccacaaggcattttttctgaaaaccggattcaaaaatctggggtttggtacaaccgttttagaaatagcgtagaaaacagcttcgatatcaagaaaaccagtcaagtccagaaaggagtattttaaaacgatttcgttttgttttggcattatgataccgaataactttcggaaattatggaaacaaaaattggaaaatttcaaataatttttttgactgcaaattttttttcctttttttgaatttgggtttcaaaaaaatttttaaaaaaaatttttt

SEQ ID NO: 38865 - DNA, 1577 bp, Heterodera glycines
  unsure (1)..(1577): unsure at all n locations
agtcatgggttcagtttcgcttcgcgtcgagcaatgattaatgtaatattctgacacctcttatgttagggttcctgttgagggagctcaatgattcgaaaatggaattatgagctcgattgtntacacagaattttttcaataaaattatttaactttttcccattttcaaaattttaatgatttctttttttaatagcaaaaattaatgtttatgttttatgggtaaattgctggacgttgattagttagaaaattcttaaacgaaaggggttcccttttgctttgcctttttttgtttagtcgacgaagatttttcctggttttttctgtatcgatataatgcttttggcatctatttcgcgaaaagtttgcactgctaaacccggcggcaaccctttttttgtcatcggtcggcaaaaaaattttttgatttttatttaattaggcaggattggcctgcgggtggttcttacagattacgcaagaaaaattcttacaaatttcgtcaagaatatcattttcaagaataaccattttattaattccgctgggcaggtgttgttccgattccgagacacctttcaaggcggtagactttgcctctctcatcaattcgaccgcggtcggaatgatttcagaaatcggcaataaaaaaataggaaaggcactctcggcaaaaatcgcccaccgcggcacagttggccaaaccttgacttccggattttcttgtttccaattccaaaaaaccgctccccttgtttagtgaacatcccgcgcaatacgacttgtttttggcggaggaggacagcatggagttggacacggagttgccaccgcaggaccgccgacggttggtggcagactgcggctttcccgcgctggcaatggtcgcccggggggacggacgcggacggcggaggcgcagcagcaaatgcagcagcggcagaaaggcgtcgttggcggacggaggcggcgacaacggcaggcggctccaagcgaacatgtcggtctgacccacttctgttgtagatcaagcaaaaatgcatttgatcagcagattttttaatccattctatgatgcacatattttaaatgggtggagagccaaatgagggggactcattaacagtaatgggcaacccgagggccgagggggatattctcaaaaatttgacaattttttgtggagaggcaaatgagggggactcattaacagtaatgggcaacccgagggccgagggggatattctcaaaaatttgacaattttttacgaatattatgtaaataaaaatcccattttcaaagcgaagaaaaaccccaaaattgacaaaggccttgaaattttgtattttggtggtttcacaaattttagctgatccgaacgccttcacaaattcgagttgctccgatttaaaaaagcattaattaagctatattttccaatatcattaaatggttcagttttcatagtacaatatcgcccaccattcattgtttttacttttcactgtctaaaaaggccctttaattatttcgacatttctttttttctgacattattccaactgtaaaa

SEQ ID NO: 38866 - DNA, 743 bp, Heterodera glycines
cagcgaaaagctctgttcactccatcttctaatttccccatatcattttgagctttttctaaatcagagatttttatcgtggtctttccttgccaaaatttcctatcaatagccgaaatcgaggactcatcatcctttccactcaaaaacatctttgtttcctgcccgaaggcttgggatgtaccaaagggaaactcatttgacgagccccctgatgtagacattcgaagtcgttcagttcgtaataagattttgttttattttgctaaaaaaaaatttatttggtaatcccattatgcattaattgagagagaaaaaaaattaatgaatgatagcgggtaatcgaatggatgcgaacaccttccaggaatgggcttatctgctccatctccgtttaaacttcgcctaacaagagcaattaacaattctcaggcgccgcaaaaatgtttaaagtgaatgatctcgcccaatgaaaaatgcggcggcacgtgattacgtgaatattcttatggcgtgaaaactgagagaaaacaaagagataaaatgaactttggaacttgtaaaaactgtagttcatactgtaagcaaaatgatagggcctaattttcattttttttttaattggtccctctttttagctaaaatagcgcccctttgattggttaacagcccgggcctttttgcttcctcaaaaaaaaatagttctatatttttttgtttcaattcttctctctctctctctc

SEQ ID NO: 38867 - DNA, 304 bp, Heterodera glycines
gaagacaaaacacacaaccaaaacaaactcaaatgtccattaaaattttaaattgggcactgataaatgaaatttatttgttttgttatttgtaaataatatattttaataaattatttattttaattgaatttaattatcctgcaaaaatcccactgaattaaccattgggtgcgctttctaaatcaacttcggtatatccaattgcttcatcttcagcctttttgcattatgccagctttatcctctcttttggcacccccggggaggggggaggcgggggaaggggaaagggtcttcacct

SEQ ID NO: 38868 - DNA, 1015 bp, Heterodera glycines
ctgcccgaaaacaaaaaaatcgatttttcaagtgtcggtgggggtactcaaacaattatggggagcaaaatccaacgcagaataaagtacaggctatagggaagctattcccgaaggattcggtctccccataaatctgggcgcatcggttcggggggactgccccgaaaacaaaaaaatcgattttttcaagtgtccgtttggggtactcaaacaattatggggagcaaaaatccaacgcagaattaaagtacaggctatagggaagctattcccgaaggattcggtctccccataaatctgggcgcatcggttcggggggactgccccgaaaacaaaaataaatcgattttttcaagtgtccgtttggggtactcaaacaattatggggagcaaaaatccaacgcagaattaaagtacaggctatagtgaagctattccggaaggattcggtctccccataaatctgggcgcatcggttcagggggactgccccgaaaacccaaaaaaaaattttttggataaaaattatttaaatgaactgactagataatatttaaaataggttatttctcttcctttcagtatccctgcaaagtttggtgcgcttctgatcagtttctgaaaaaaaagttaagcctaaactttttggcctgtttaaaaaggaattaaaaatttttaaaaattttattcatctccctttttgatagaaaaagcatcagagtgcctaaactaacatgtaaataaaatttggtgcgtttcagaaccctttctgaaaaaatatttaagaattaattttgcaaaaaataaataaaaacgaaagactcagattttcgaaaatttttttgagccagctagctcggcgctcatttcagtgtaagttagtcctttaccggggagtatccctgcaaagtttggtacgcttctgctcaattagcaaaaaatatgagtgatcgaattttcactaaaaaagttaagcctacattttttggcatatttaaaaagcaattaaaaa

SEQ ID NO: 38869 - DNA, 1028 bp, Heterodera glycines
  unsure (1)..(1028): unsure at all n locations
ttatggggagcaaaatccaacgtcggggggactgccccgaaaacaaaaaaatcgatttttcaaagtgtccgtttggggtactcaaacaattatgnggagcaaaaatccaacgcagaattaaagtacaggctatagggaagctattccggaaggattcggtctccccataaatctgggcgcatcggttcggggggactgccccgaaaacaaaaaaatcgattttttcaagtgtccgtttggggtactcaaacaataatggggagcaaaaatccaacgcagaattaaagtacaggctatagggaagctactccggaaggattcggtctccccataaatctgggcgcatcggttcggggggactgccccgaaaacaaaaaaatcgattttttcaagtgtccgtttggggtactcaaacaattatggggagcaaaaatccaacgcagaattaaagtacaggctatagggaagctactcccgaaggattcggtctccccataaatctgggcgcatcggttcggggggactgccccgaaaacaaaaaaatcgattttttcaagtgtccgtttggggtactcaaacaataatggggagcaaaaatccaacgcagaattaaagtacaggctatagggaagctactcccgaaggattcggtctccccataaatctgggcgcatcggttcggggggactgccccgaaaacaaaaaaatcgattttttcaagtgtccgtttggggtactcaaacaattatggggagcaaaaatccaacgcagaattaaagtacaggctatagggaagctattcccgaaggattcggtctccccataaatctgggcgcatcggttcggggggactgccccgaaaacaaaaaaatcgattttttcaagtgtccgtttggggtactcaaacaattatggggagcaaaaatccaacgcagaattaaagtacaggctatagggtagctattcccgaaggattcggtctccccataatctgggcgcatcggatcggggggactgctccgaaaaca

SEQ ID NO: 38870 - DNA, 1260 bp, Heterodera glycines
  unsure (1)..(1260): unsure at all n locations
acacggcgattcaattttaggctccttgtacaattaagttgggtttttcgtcttagtggtctgtacgttagtcaccaaaagggggtctcaggttcgagtcctccttatgttatgtgttatttcaatttcttcttttacagaagaaggcagaattattttttcattaataaaagttttcgtgtcaataaaaatcatattcaaaaagcgttggttacgtgcaacatcgacaattttatgaaattttctttgcactgggagcccaaaattgaatcgccgtgtgaatgaataataaaaggtagttttggtttcattgcactttaaacattgtttaaaaatcaattctgactaatattaacggaggattaaatatggtattaattttccaataactcaatgctcaactgtaagagtacagtattaaataaattaccgtatgccttacagttttgtgtcttcgtcccttttttgctgtcgttttctcccgccactgttgttttgaccaacagcagctgctccaattcgctgtcctccttgtccaaactcttcaaccattggtcaatctttttgcttagtttttgcattttctgcgcgatgcttttccgcccgtcttcgccttctcccggcgctgaaattagtgaaattcaaactcgagactcttgaaaaggacacaaatttaatttttaagaagccaattatttccattttaaaatgagtcttttaaaattagaattttttaaataatgcgctaaaaatttcaaaattttctcccattagtgtgcatcagcaggcattaacggaccattttggtcttaaagtggcatcccaaaaaggccaaacggctcctgaaaatttccgaacccattagcggaatttaagaaacgcgtcagcacgccaactgccaaaaaaaagcgacggcaaattttaataagtccggcacgaacccaaaaagcggcacatttcgaaaaaatcggcaaaatccgtcctgttgtgacttattaatctttgagcatttctgataacgtttcaattatgctttcgaatttactgcaccgttattagcatccttttcgcccgccgctgctccgtccggctcttcagtgactgcgcttgaatagcctttgtccgcttcggaataactcagctctgaggaagcgtaggagcaataggagtanggcccaacggacacttcaacatctgtancgaataannggtcattagcaaccaattagtaacccatattcctaaantattgctccttcc

SEQ ID NO: 38871 - DNA, 940 bp, Heterodera glycines
tcagtatcagcttctcattcgtccgttcgttcaccaattcattaggttcaattggcattgttgtcacaaataaattaaatcgaatattgtaactgacagaagtggtggcacggagaaatgccgaaacaaaatgggaaaaaaataatgaaaatatggtgggccacctctttgaaattgttgacccattcgagatttgttgggcccaaataatcacgacaacacaatcgcttcgactgtccatcttttgtcggagtttgcaaccatttgaacagcatttgctcagcagctgcatttggcccacatcagcaattccatcggggtacagataaaagcaatcgattgaagtcaattgatcaagattaaatgagttgacgcaaattgtccaaattaacgccaccagaaaggcgcaaatgtcaaatgcttgtcgcaaaaattggccaaatttcatgggccaaaacatccaaaatcggctggacattgctttcggatgaaggcacattcaaatccaatttggtgccacttctgtcccaaatttgcttgttggaacggagaaatgtaatgacggaatgatcaatgtaactgaagaatttagaatgcttgaatttaaataaaaatttaaaattaccaaatatgaagaagttgaaaacgaattttgttgggtagcggacgctcgggaaacggaaattccacaaaattaacaccgatccgtacagacagtttcagtgttggtccaatgtccttgcaaattagtatcaatttagaaatggtatctgtggaaaaattttgaagtttctccaaaattttcttatatgcaggtcataaaaagttaaaattggagaaaacttttccgaaagctttagaacttattcgggggttccacggacagtgttcttgggcctcttcttttcttggtttttataaatgaccttactaattatat

SEQ ID NO: 38872 - DNA, 1290 bp, Heterodera glycines
ttaattttgggaaaactttcccccactgatttcatccggtatgagcagcaagttttgcctaaaaaggcagcggagcttggttttcaggaaaccatttcaaatttgaagtccctattttcagacacgaagtcaattttcatccgcaggttcgagtgttttcaaatgtcatgcgcaccggaccaggacgttcttgaatttggcgcttccgtcaacgcaaaatgcgaacgggcggacatgacactcagcaaagatgagataaaatgtctcattttcattacaggcctaagtgacgcgcatcgcgatttgcgccaagagtgtttgcgtcaattggagagggcaaaaagcgcaacaccgccacgaacggtcaaactcgaaaatttgcttgaggaatgccgttcgattttgtcgctgcaacactccgctgccgctctcacaagttctggtcaagcacatgccatccaatgcaaaccacaggttttgaaggaggataagccgaaaaacaagggttttaagccgaaaacccaattaaattcgggcaaaaatttccgtaatgagggaaataattcgggcaatgtcaattcaaatcccaagcgacaggaatttcgtgcccaaacgtgtggacgttgcggcaaagggcattcatatagggtttgccgataccctgccgatgtccaatgttttggctgtggaaaacggggccacgtaaagcaaatgtgcccaaaccgagcccagtcaaattccgtcgccgtcgcatcaactttcagcgtggcacaaacaaaccgagattggatttggatcgaattgcaaatcaatgacaaaccaatcaagttggctgccgactcatgctccaacttgaccatcattcagctgccaatttgggaaagtttgggaaaaccaaaactcaaaaatgctggtaagatggttggttcttattctggtgaaaaatttaagcttttgggaaatttctggtgtaaggggtcaatttcagaaatgtgattttaagtctttgttgttcagttgcaaacacaacagctccaagtatcatggggttggactggattaccctgtttgaacaaaagacgcagctgccaattgcgaccacactgccagtgttgttcgactccactcttcaccagtcggtcaacgcaattcagtctcccaaagacccaaccgatttggccaatcaaattaaagcgcaattcccacaggtttttcaacagggattaggccgttgtacaaagatgaaggccacgcttcatctcaaaccgagcgcaaggccaactttctgcc

SEQ ID NO: 38873 - DNA, 765 bp, Heterodera glycines
tatatttagggctgggatgtatattgaaaatcccaactattaaaacgaatatttactaataatgtcgaatattaaccaaaatattgaaagtgaaaacaaaatccgaaatattgggcagcaaacatttaagaaagtgagaaaaaattgcaggatataaattaatttaaaaaaatttgctcaaaaataaccaaaatttttttttttttttttaatatttaatcattttttaaatctaatttttgctattctgaactttgtataattataaaaaaaatcggagaatgctaaaatactcaaaaacattgacaaaattctaaaattgtaagtacaaaaattatttatttttaagaaaatgactttcaaatgaaaacaaaattgttttgatttattcctatcttcggtgtataaaaagtaaaaagaaaattattaaataagtcacagcactaataataacttgatattgcctaggccattttatttttatttaatttcatacactcaaagcaacagcaaaactttgcgccttataagtgttgtacgtttctgaattttgaattttcgtacaagttcaccacatgattgtcgaaagaagaaaaaaataggtgcggttagcacagggttcggatcgaaaatttttccaaatcagaacatcaggcccaaaaaaatcagattttagagtggaaaatcagaacatttcgcaaaattgcttcaaatcagatatttttacaatttattcgatcaaaaatgtatcaaatattatatttt

SEQ ID NO: 38874 - DNA, 779 bp, Heterodera glycines
tcactgttgtacctcttttaattacttttgtacctcctttaatcaaagatatacctcgttgaatcacttttgtacctcttttaatcatttttgtacctcttttaatcacttttgtacctcctttaatcacttttgtacgttttttaatcactgatgtacctctttgaatcacttttgtacctctttgaatcacttttgtacctcttttaatcacttttgcacctcctttaatcacttttgtacgttttttaatcactgatatacctctttgaatcacttttgtaccacttttaatcacagttatacctcttctaatcaaatttgtacctcttctaatcaaatttgtacctcgtctaatcatttttgtacctcttttaatcacttttgtacctcctttaatcacatttgtacctcctctaatcagttttgtacctcttttaatcactgtttgtacctcttttaatcacttttgtacctcttctaatcactgttgcacctcttctaatcactgttgcacctcttataatcactgttgtacctcctttaatcacagttgtacctcttctaatcacttttgcacctcttctaatcacttttgtacgcacttccggtttccattgcattatgcgatgtgtcaactccaattattggaggaaaccaagtgcatgtcggctgacgcaaagaccctaacagactaaaacgcgcctaggtagcgaagctcacaaagcgcgaagcgctttttcccagcccagatccgacggttcacgcacccgctagtt

SEQ ID NO: 38875 - DNA, 981 bp, Heterodera glycines
gtccacgttttggcgccaaggtcgttttggcgccgacgttttggcgccagggtcaggtttttaaattttgtctatgtttgaataaatgaaaatatgtattcgtcagttttctgagtcgctaatcacgaatattgtattcattttgacaattgcgaagcccgtacttgatttaaatgaaatacaatttttgaacatattagatcaggccttctatctgttttgttttatcaaatgttttaatatggtgggtccaaatctaatgatttaccagattctgatttagggatagtgactattatttattaaatataccgttaaggttatgtttataatcattaactcttttgaaatttcaaccgaaaaaatttaagagtttaaaaatattcaaaatgttttgacattttttgaagcatagcgaagagaaaaatttgaaaaaattcttgctaagtcaatttttcatgttgaccaacaaaatgttcacagcaagttgatcatatcactccttcatgttgatctacactagagatcaacattttgaaaaaaccgtagttgtacctgtttaaaaaatggcctgtacctatttttttctgtacataagtacaggaaaataaatgtacaggaaaaatccaggttgccgaaaaatggcctgtgcctgtacctggatccaggaaaaatacagggctggatccaggtacatgttgatatctctaatctacacccataaaacacagtcaaaatcggaaatttgaaaaaaaattctagggggttgtgaattttttgaaaatttgaaaaacctattggaaggtaaaagtttttcacttttttttgtaaaatttttgatcaaatttttaccttttttaatttttggcttcgcgccaaaacgtgggcgccaaaacgatcctggcgccaaaacgtgggcgccaaaacgtgggcgccaaatcgtcggcgacaaaacgtcggcgccaaaacgacacagtcccg

SEQ ID NO: 38876 - DNA, 896 bp, Heterodera glycines
tctcgaaatcgagcccgagaccaccaaaaatccgagatttttctcgagatcaaggctcgagagtgagtctcgacctgcactattagtcattatttgcttggttggctttgtgctcaaacactttttcgatcagtcgctcgttttcccccatttcctccaccaattgatcaaactcattctcagcaatgccttcctctctgatcagttccgtcatgtcggacttttggccgccgtctcccacgcaattgaccaaaacgtaatactaaaaggacagaaaaagcagagaaaaaaagtgacttccgaccctttaaagtcagcattggaccaaaaaaatttgaaaattttaattttataaaattagagaaaggaatgggggggcatgggcttttctctttaaattttcaatggaaaattttaaaatggcgttgagggtgggccttgggcttttctctttaactttcaacggaaaatttaaaaatggctttgagggtggaccttgggtttttgaatttaaattttcaacaaatatttttaaggctttgagggtgggccttgggtttttcaatttaagttttcaatgaatttttgaaaaaattcctaaaatagctttcataaattagcattttctaattttttgccaaatattttcataaaaggaattatatgaatggaaaagcgaatatgaataaatttaaaataaaatatgatgaagaaaatagaaaagctctcgagacctggacccaggcctgtacctgtatctttttttttataaaaaacttttattaaaaaaattaccgtacaaacacctaaaataaatctataaaacaataaatatcgcttgtatttaaggctataaattatatgctattgcatattttttatgcgcatatgctgtg

SEQ ID NO: 38877 - DNA, 938 bp, Heterodera glycines
aaaggacgacgagggaatgaaatgaaattggcaaagcgtatcatattttatttgctcaaaatcataatgccaggggcttatgacacaggccaaggccaagcagagagaagcaaaagaaatgccaaaaacatttgtacagaagagacggcacggcacggaatttgctggggggggggatttggccacagcagggagatggaccacctaacttatgaatgaaaggagaaagaacaagcagcagcagcagcagcagcagcagcagcagcagcagcagcaggcagaacaaataaagtcagtcgagaagaacggacacacaacaaaaagagagagagagagaaaagagagagagggagagaaggaggagaaaagagagagggagagagagaaaaaggagaaaagagagagagagtgagtgaaacgagagagagagagagagagagaggggggacatgagtataaaatgagtggaaaaaagagaaagagaactgctggagtaaagagtaaaagcgaaggaggagagaaaggaaaaggaaagtgagagagaattaaaacggaagggatcagaagagaggtggaaaaagagcgggaagaaattaagaacaactttgaaatgagttaggatttgcctataccatagcttattctgtgcatttttgtgcccttattgattgtttacacattttcacagccttcggcggggttttttggacggattcagaaaagatggccgcagggagcggagaaaatgaaaaacgccgcagggaaaggaaagcggggagagagtgcataaaagaaagggaaaggcgaggcggccaaacaaaggcggacggaagagaagcgaattatgacgaaacgaagcgaaagtggcaattaattaatgagctgctgaatcaccacgacaaaagcagggacaagtacatatgtcggacatacgcatg

SEQ ID NO: 38878 - DNA, 981 bp, Heterodera glycines
aacctctcccccccccccacccgcacactctccacaaacgagggaaagtgaaatagtgagtttaatgatggaaattgggggatgagaagaaattgcaggcaaaaggccaagggatattcttgtcattaaaacaaaaagggacagaagggaagagtcactcactttcttctctttcctcctctctctccttttctctctctctctctctctctcttctctctaaccaattatcccttacaaattaattattaaataatatgtgtatataaataaattaagctaagaaatagccgaaaatgcacaaatttcaattcaaatggccaatggaatttggaagggcaaatggggggaaatgggaaatgaatggtacgacggacagaaagcagcagctgatgagcggactctgatcagatgggatggcgttgtccttcttctgatttgtttttgagtggtcactccgtccgttcattaatttcgtttgtcagttattttcggaaacattctctccctgtcccaatcgttctcccattgtccccattttgccgttcatttccggttctcacctaactttcctttatttgtttttgtccgcttcgactcaaattcatattttaaaatttttcgaagagctttcgcttttggctcgtctaattattgggtatgaagccaatcagtttttttgatcagtttattggtcatgagaaaataccgtaagtttacaatagcaaagtgggatatctatacgatggatatggttagaattttattttacaggtagaagattgcgatcctcgagactgagatggttaccccgagactcgtggttacaaaatgcatgcttttctcgagtcggactttagtggcttccctttttcttcacctatgatatttttacgtaaaaaaagacttggcgagcaaaggtctgacggtgccgattttgagtcgaataattacaacccaacctacaaaaattgcaaattt

SEQ ID NO: 38879 - DNA, 1404 bp, Heterodera glycines
acgctattacagtaagaaacactttggccaatttattcggctatcccaaggctaggctaatttcatttggtgacagagcctatggagaaggacgagacgacgaagttgagaaattggagaatggggccattggagaagaagcagaggaggaagaggaagaacggaggaagagaaaggggaagaaagtggcacggccgggggaagggaggagacaacgcctgggggaaaagggaggagggagcaactgtgacagacagactaaagagtgccaatcagctatggtggcactgatcggcactcacatttcggaatcattcttccaatcaaagtgattgattaaagtgccaatcagctgccgttgcactgatcggcactttcttacttcgctgcccccttccgtccgtctctccgctttccctttggctcttttccgcttcctttggcacttcgtttctttttccgcttttgctccgtttcgcctttctcggacccctctccttctgcacgcctttaacaaatcttttattgctttatcaattccattcgtacgttctttggccatattcgcctcggcaatgcatttgttaaaacggcacgcctggcaccaattgcgacggcatttgtccaccaaacatttgccagtgcccgctgagctttcaaaacggcattaatcagaaagacaaaaccagcaaaactctcaccaacgcatttatattcagcacttcgacgaatgctaaacataaaaatgggaggagaagtgatcagttcgtcggatgactctgataagtgatcagtcagtcatccttttcaccttctcttgaaaaaacagctgcacccatcgcacacccatgcaccgtaatggcgcccgaaagttttatccccgcaaactttgcaaagattttgggtcggaatgagtcggcctaaaattgggaggaaatgaattgatgatgtgaatcatgccgttgaagtggtgaactaatgtttgtcaaaactgacccatttggaagaataaaatggagcgaattttcgagggaatggccaaagaaagtgccaaaaggagtgccgaggcattgccgaactgccctataaaagcatgacccaattacctgacaaatcacaaagtctgtcgataagaaggcattggcactcgtctcaatttcaccccccccccccccccccccctcattcatttgccattccattatttttttgcttgtcaatcaaaaggcaaaacgatcgcaccaattaaaagtgttttgtagacgattcgctgctgtttttatttttgttttacttggtcttatttcacactttgcgttgttaaaaaatgcgagcaaataattttaaaattagaacttaaaaatcccccgagggtaagcgaatgatagcaaatgttaataaaaa

SEQ ID NO: 38880 - DNA, 964 bp, Heterodera glycines
tgctgttgttggccaaagttgcggcgggcgccgattcggcccggatggagatgattggtgcgtgcggtgattgggggagcggacgacgaccgacctgaccccggggggggccacgacccgccgccgtccaggaaaaagacggggggcagggaagaaggagaagagatgtgattgtgatcataaaaaatgatttatgtggaattttgcgcggcgcggactccctccctcccccctttcccccgcactccgatcggtcggaaggaatcgagttgtccccctcagagcacgcgcattccgtgcggattgtgtgaagttgggggacaacaacactaatcagtttaaagttgtggaaaaacgactgctactgctgctgttggttggacaaagcagcaaaaggaggagagagagtatcagtttaatcggaaaattaagagggtcttaattataaagtccgtcgtggacatgacactaattggccacgcgccaaaaaaaatattcggtttcacagaatgctttttttacgctgaagccttcggaaaaatgcagaaacggagttgcccgctgttggccttggctgccacattttgtagacaataattattactgcagcgcagcaacagaaaaaataaatcgggctttttttttgcatcacttaatagtgggggaggggggacaactgcttggccccatcagcagccaccaaatcggcggaaggaaaagcagcagcagcagtttaaagctacacatgcgcgcgcacatcgcttcccaattgggggaaagcggacgggcgggcgggggatgggagaaagttttgcagcggcagccgcagcggcgaagcgcagcggtcgcgtcggcggcggacagtcagtcggctttcccatccctgggccccgcgcgagaagtccatgttgtggaggaggaacctgttttgccccccccccccccggttaccacaccgcccatt

SEQ ID NO: 38881 - DNA, 1512 bp, Heterodera glycines
  unsure (1)..(1512): unsure at all n locations
tttttagaggtgtgccntgattcacggtcacggtcacggttactgtgatttcacgggttggatcacgatcacgattcacgggttttttcagtcacggcacacctctagttttttttccagagggaggaaattatttttttcttaatggggtatgctcttaataggaaaaacttatagttctaaaactagaaagtttatatattaaaagtttaagatcctttaaccctttttaataaaataaataaataataatttataggtttttttataaaaattaaaatttttcatttattttcaatcgtttgtctatttttttaagaaaattttatttttctgggaaatgaaagagagggtggcggggaatgaaatgaattctacccatttcaattgatttattatcactggcatttttatttaattcactttatttcatttttaaattcaataaattataaatgttaattttttggataatcttttttatgataaataattgtaacaggaaggcatttcgattgcgtagataaaatgattgttaaataccaaaaagagtttaacgaaataacaaatgagatggggaacggattttgcaaaatttcgcatttgttttatttcatattgcacaattttatcatgttttgtattttgttcttcggtttaaaaacctaaaaatgtgtgttcaagtatttagcttaattaatgataattaattgggctaatatttatagttttttcacaatttttttcctgagcccccgtagcctgaaatgcacgaaaaacatgtttttttcggctgttgttaagctagttttcgagttattagcaactatttttatagttttttatttttagcaactaaaaaactataaattttttgaaaaaaactattttcaactattttggcgttttgccaaaatttgttaacaaaatttgcaataaaaacgaaaaatacacccctaaggatcaactttttgaaaattttcaaaaatacacccctaagaatcgaaccgaaaattttttcaaaaacacacccctattctcgaatcaggtagtttgggatttcaaggttctgagacaatattgaatctgaaaattttcaaaaatgtggttttatccccgatgggttaaacaactttaaattgtatgcgaatttgatcgttagaaaatttttgaaaaaaatattaaatttttcaaataatgtaattattgttcctaataaaccaaacgaccgtgttttcttcaatttaactctgtttgcgacctccaagattgaaaaagcaaatttaaaaatccgatttttggcataggcacaaatcagggatgttgcaaagagaaaaataaaaagcgaaaagtgaaaaaagcaaaaccaaaataaaaagcgaaagcgaaatgcccaaaaaagcgaaaaggcgaaaatgcgaaattttttttccaaaaattagatgaatttgaaagtctcaaaaaattcaccttttttaatacttaactgttatgatgattgagtgatttttt

SEQ ID NO: 38882 - DNA, 1350 bp, Heterodera glycines
tgcaggtcaaatggcctggcccaaaaatcgcaattttacattcattttttgtaatgtatcctctaaaaatcactttaaaaaaaggaatattgaaaattacttttaaaatagctaaaaaagttatacagaatagttaggtcatttttcggcatttgtgccctatttcacgctttctaagaattttttgtcaaaaaaatcataataattttttttattttggtacatatttgagagtttttgtacatatttcttaaatttttcgtgccttttttcatattttatgtatatattttgcgattttgttaagaaattttgcgtcaaaaaaaatttttttatgaaatatttcgtatttttcccaaaagtgtccgctaatttccgtccgcatctgtccgtaaggcaccaatgatgacaatatttactgtgagctatatgacacggaaaattgaaagataaaaataaacaaaaaactaggcttcttacagattgaatgtgctacttcttaacaaaaaaattttacttaatgataagtattttaaaaatatggaacacagaaatagtgaagaagcaaagaaacgagagtaaataagagagcgtaaggaaacaagtacttttcctttttttctcttctcactgctacaccccatccttttttgatttacattatcaccagcagggaaagtgtttttcttatctaaatcccttgcaataggttttggatatagaatttttggaacggggccatcgggggatggccctacaaaaagcatttgaaacgaataaattttattttttaattttggtttaaaattaacaaaaaaatgaatgatttttaaaatttcagagggacatttgtcggagtgctggtgaataatgccaggggcctatttcaatcaacatcaagtcaacgacttgatgacttgatcatcaagtgaagcgtttcaattagatcaagtgcaatagcacttgataatttggcgcagaataggcttgtgatgtctgcccatgatgttaaacatcatgggcagacaattctgtttcaattctacagacgatgacttgacgtgattttttacgcttgatgatgcatatttgggggcagggaaaagttttttttgaaatttctaatttctgttgtaaaaataattatgttatattatacataatgatttttgctgctagaaaattatattaaggatagcgcgcatatattccgattaccgaaattttttttagaaatttcgagttccaaaatttttggtaaagtcggatttctgccatcaaaaaatttcttataaagtgaaaaataattagtttttgtattgtaaaagattttcaagaaaaaaaccgaaa

SEQ ID NO: 38883 - DNA, 958 bp, Heterodera glycines
  unsure (1)..(958): unsure at all n locations
gtcctaaaaagagatagcnncatttttctgagaattaattcacaatttccgcagctcttagagtaatggaaaaaattttgaagaggctctccggaacggattagcatcggggttacgagatagaaaattgtcctaaaaagagatagccatttttctgagaattaattcacaatttcctcagctcttacggtaatggaaaaaattttgaagaggctctccggaacggattagcatcggggttacgagatagaaattgtcctaaaaagagatagccatttttctgagaattaattcacaatttccgcagctcttagggtaatggaaaaaattttgaagaggctctccggaacggattagcatcggggttacgagatagaaaattgtcctaaaaagagatagccatttttctgagaattaattcacaatttccgcagctcttacggtaatggaaaaaattttgaagaggctctccggaacggattagcatcggggttacgagatagaaaattgtcctaaaaagagatagccatttttctgagaattaattcacaatttccgcagctcttagagtaatggaaaaaattttgaagaggctctccggaacggattagcatcggggttacgagatagaaaattgtcctaaaaagagatagccatttttctgagaattaattcacaatttcctcagctcttacggtaatggaaaaaattttgaagaggctctccggaacggattagcatcggggttacgagatagaaattgtcctaaaaagagatagccatttttctgagaattaattcacaatttccgcagctcttagggtaatggaaaaaattttgaagaggctctccggaacggattagcatcggggttacgagatagaaaattgtcctanaaagagatagccatttttctgagaattattcacattttctcagctcttacggtaatggaaaa

SEQ ID NO: 38884 - DNA, 848 bp, Heterodera glycines
tttcccccccccccctttctccgtccttttccgatactttcgccacccatccacattaatcatcactgtacacacacagaataaatttattacgaataagcaaatgtggtgaaatgtgtgtggtataaagaacgaattgagggggggggggggggctaacttttctggattcattcacagcaagcataaagtgtggtgcccttcccccgctgtctctcatcgctcccctgggggtgtgtttccaaaaatggcttttcgtgccctctccttctcatgcctgagttcttcatctcactcttggccttggtcttcctttcccttcccattccgttgggcactcccttttctcgcaccctctctttcttctgctttcgtccattgttcaaaaagtggcttttcccttcatctcttttccctaaatcagtcgctaattagcccccccccccttcctcatcgttgtctctccctcgccgcccgctttgtcattgtcggccaattggcctccctgccatctgaggcccattcccatcttttctgctaggtagtgtccatttggctctttttctttccctttctgtctttttttctctgactgcttctagaaggttcttctctctgttgaatatcccttttttccatcattcatcctttcgagaaccttctctcccctctctctgacctccctcgccacccctcctcccgcgccgtcgtccatcagtcactcttttggcagagaagggggcgggggagatagaacaggggctaagataaagagggggagaaagagaggggagagagagatggagaggcgggaaagatggatgatgaatgcttcttcgccacccccc

SEQ ID NO: 38885 - DNA, 949 bp, Heterodera glycines
  unsure (1)..(949): unsure at all n locations
ttgggtcgcaaattgcacactcacatttcactcatgcgctctgatcaatgtcaaacacgcacagaggaaacaatgtcaacgcgcagaaaatgaaaacacagtttgacagaaaacatggagcaaaaaggattgagtttanaataggcgatcaagtatagtttgttattaccaaaacggtaaaacagtttggctttttggtaaaattgtggcaaataatggattaattctcaaaattcaatccccacaattagcacataagatcatcacacgtcacgcaaacgcagtgaggttatcggcagcgactggcactgaccatgagtggtcaaacgacgaagtgatcagaccgcttcaacaatatgttccggcaccagttcattcaccagtccgatcgccacaaggacacaagcaaaacacaccatcacccgatcgtcgaatgcaaccacaagaacggactgatcagaaggaccaacaacaagaaactgaagaacaaacaccggaactgcgacgatcaaaaagaacaaccaagaaagttcgatttttgagtccaaggcccactggacagcgacatgagatcagggaacgtgattaatttaagagggggaggtgttgtattattgccatttcatattttcttggcattatgtttattgacacgtcaccacatcaccgcccataaataccgctgtcttccctccttcttcgcttcggacttccttcattctcatttctcatttgcattcacccaccccacacatatttatctctctcgtcacctctgacttaatttatttatttattattgattgtatttgttgttgttgataaacgacacaacatctttcaccgagcgtagacactcatacctgtcaatccagacggattgaggtcggctgaacaataccttcagcttctccgcagtttccacaaagtcgaagtcggccacttctct

SEQ ID NO: 38886 - DNA, 1205 bp, Heterodera glycines
cttggaaaagtagagaaaaatagacatagtcgaaatagtggagtagtttgtgcgaccagtgcagaaggcggagatgctagggcagcgaaaaaagacgatctctgagggaggggggggggggagtgatcagagaaaggaaggacaaaatcagcctctgatcacattgagaagagtgaatcactcactaatgagccaaagatattttggtggataagcgaatattaattagtcaattaattattaattttgctttggataattgacccatagattggtgattttgtgacctgagctgaggccaaatgattatggctaaggtccaattcttcaattgccggactgaagcgcagaatgtgttcactgatagtctaaaaaaggcaaaaaacggcgaaaagattagggaaaagggaaaagccaaccaaaaggcaattagcgctgagggaaaggcgccgcaggcgaaacagtcgaaaggcctcccattcgacgctaacgatgcgattggtgttcaggcgaatttcttcggcattcggaaaggcaatgaaactgtgccgggaaatactctgagagagaagagtgatcggagtttaaacatccaaagttaccgtaattaaattttggctgaggtcgagaaaaaccaatgcgggaaaagcgggcataaaatgagaagtcattcgacgatcggtgaatgagaaaaagctaaaatgaaggtggaagcaaaagatcgttaacgaaaaagaaaatacataaaatttcccaattttggcataatttgccttaattgccatcgtttgactggagtttaaggtgaatcccctccccatttcgtaaaatgtcaaaatgatctcctctgctcaccttttctctacccgcaatgtctccactttctctaatttattttcgcgcaaatccaaccacattaagcgttccattggcggcaaaatgtccaaagagtccaattggctgcggacaatgctcagattgagcaaagtcgaggcgaattgttggccggagggagtgccaccgaaaagagaaagaaacaaatgaaaaaaattgagaacggtggataaaagatagagaagtgcctgaaccgaagaggtggcgcaaatcggcacgggcttaatcgctgcaggcgatggaagagccatctgatcagtgaccggaagtcagaggggaagtgatcgggtcaaacaaataccctgcgaaca

SEQ ID NO: 38887 - DNA, 1071 bp, Heterodera glycines
  unsure (1)..(1071): unsure at all n locations
ccccccccccncctcttttcaggatgggatttatactgtaagcagtggcccacccctccctatcgccaaaatgccaaaagagagaaaatagtgtgtgccaacggtcatcaatggtggtgccaaaattagtcaggctaaattgggagagggagaaagtgcgtaaattctagcctggaaaaggttttttccaaaaattgaccaatgaattttttgcacgaggtgtaaaactaagtatgtttatttaataatcaattttaaaaaagtacttttattttcaaaaaatttacaaattttttctgtttttgaatcatcggataagggggctaattgtaagccaacgcggaccacatcctttccaaaccaattgaaagagattgaaaatttcataacaacaaataaatttcttgagcgcaaaaaaccaatagaaggacgcataacggtagaaggaaaaatgaatttttttttaaaccatttccgacatttatgtaaaagccgaaaaagaaactttccatatttggtagttggagcacaatgagaagattgcttgatgagaaagaaaaaatttggcgacattttgccctcatcattagaaaaaagcctcaattttcaaaacaaaaactgctcgcgggcaaaaaggacataagcgcacggaaaaatgttggacaaatttggtgccaaatattttcgcgacttaataattgtaaaaaaatagttcattatttgtggcggcagcagtttttggccaaggttttaagtatcaaacggtttagccaatgccgtcggctggttttgggtggaaaaatttaaggcgccctcgccggtcacgcataccgtatcacgtctaattatcccccgtctccaattatcccccccccctttctgagaaggttgaacaataattccccgggggataattagagataatagggtatctgtataattttttggcctcaattatgggccaccagccaaaatattttgaatgcaattaggctgcttctgcctattcgacctttgccagtattatattattgttcattttcttgcaatttaaagttttttggaacgaaa

SEQ ID NO: 38888 - DNA, 950 bp, Heterodera glycines
tcccagaaaaatggctatctctttttttgataaattttatacacatacaaatgctctcgagcatgatagggagggcggtgcgcaatagaccttttatttttgagggaatttttaaatttatactctatcccagaaaaatggctatctctttttttgagaaattttatacctcacaaaagcgcttgcgtatgagacggagggctgtgcacaatcgccattttatttcacagaggatttttatatttagaggttatcccagaaaaatggctatctctttttttgataaattttatacacatacaaatgctctcgagcatgatagggagggcggtgcgcaatagaccttttatttttgagggaatttttaaatttatactctatcccagaaaaatggctatctctttttttgagaaattttatacctcacaaaagcgcttgcgtatgagacggagggctgtgcacaatcgccattttatttcacagaggatttttatatttagaggttatcccagaaaaatggctatctctttttttgagaaattttatacacatacaaatgctctcgagcatgatagggagggcggtgcgcaatagaccttttatttttgagggaatttttaaatttatactctatcccagaaaaatggctatctctttttttgagaaattttatacctcacaaaagcgcttgcgtatgagacggagggctgtgcacaatcgccattttatttcacagaggatttttatatttagaggttatcccacaaaaatggctatctctttttttgataaattttatacacatacaaatgctctcgagcatgatagggagggcggtgcgcaatagaccttttatttctgagggaatttttacatttatactctatcccagaaaaatggctatctctctttttgagaaattttatacctcacaaaagcgcttgcgtatg

SEQ ID NO: 38889 - DNA, 61 bp, Heterodera glycines
cgccagctgctggtcgaagatcggcgagttggtcatcacctggtagcgccggtcatggtgg

SEQ ID NO: 38890 - DNA, 502 bp, Heterodera glycines
ctaaaaattggctagaaaatcgcaaaatttggacaatttttggacaaaattctcttaacaaattgcacttaaattttcaaaaattttcccggcgtacctatcggcaccgcctgaccatattccctcgccccaagtttccaaaaaattttttttaaatcgcgccgctaaaattgtaaaatttttgagcctcggttttcgatttccgaattctgaaatttttgggcccttggaatggcatgttataaaatgccaaagtggacgcacttttactggcgccaacgaatgaatttgattagattattaaagtgaaaaaatgaagatttacgagtctttaaaaataaaaattgattattttcgttaatataaaattttggtcatcccccgaccggggtcccaaacccccgacaatttagctccccccgacccgacccccgacatgtcgccccccgaggtccccggcccccgacatttcgccccccgagggctcggggcttaaccctag

SEQ ID NO: 38891 - DNA, 958 bp, Heterodera glycines
acatttattgatattaaattttatcattgtttgattattattattattattattgttgttgttgttgttgtccaattaaaagcatttcttccaacaaacacttcacccaattcggcacatttctccccccccccccccaaattgccattaaaagtgttcgcgtgagtgccggaaatttgcatttaatgtgaggaggaaaatgcgattgaaagtgttcatttgttgccaaaagaatggatttatttttgatacgaaaatgaatttggacatgttcaaaatgtttttttttcaatttcgaaactcaccggtccatccgttcggacacgaacagctaaagccgccctcgagggcatggcacgtgcccccgtgaaggcatggcgcgttgaagcattggttcagccgttggttgcattcaccgggcacactcgaatttgctaaattttaaaatttttgattaatttaatcctttcaattggccgactgactgataaatccgcgcggacattcgcaactgaaagagcgaagtgttgaaatggggcggaaaatgaagtcatccgtggaaattgtctgaaatattgaatcgatttattttaatttatcgtaaccaatttaaatggtacggtactcaaacgcacttcggaaagccttaaaaaacgaagggcacttcgacaccttaacaaaaatcaacgatttaaacaactttttgtgtgattgaaatcagtcggattgcctttgaaagtacggacacggctcggacacacaaagactttcgcgcttcaaaagtatcggagcgccgaacaaaatgctcaggtttgctcgaaattcctcgatggcatcttcgacgagccatgagctgaaaattatttgaaatttttcatttttttcatttggtcccttttcccgttcccgttggcattgccttttgcataaaatcccctttttgccccccccccccccc

SEQ ID NO: 38892 - DNA, 1139 bp, Heterodera glycines
  unsure (1)..(1139): unsure at all n locations
gctgtccagcatggatagggatcggagttctaaatttatggctctttcggcgggtggtaaagtnttctgagtgctacaattttgctttctgggtgatgataccgaccggaaaattgctgttttggattgtcttgatatattctctgcattggttatgacacataattccgagaaatgtgtccaactgaccacaattgtagaaaatgacgttccttcgttgattttggaagctttcatctgagaagaaccgttattttggctgtttcgccaagaaattcgtgcagcattttgaactgccttacccttcgtaaaaggttgctcgcggtttaacggctatcctatggtcatggccaattcgggttaagcgagagccctgatgaaatgcatgttcaagtattcgttgtaaaactgttcaatgaggactgagtattattacggaccaatctcgaaacaccttcgcctaactgtaatggtttcattcggcctaggccaagcccctttcatcaattgatcaacctttaattccacatcaatttacttgaaaaaggcgttcaacgaatctgctcctttgttgccgtccaaattttggattgtattcaatgtcattgtgtgagccgtttaggcttcgattcgcccatgccatcatgccatcaattactagtacaggatgaaggccgctcattctctccgaatccatttaacatatcattaattgtggcattgtttgtcatgatgggtcgccttacacaatttcaagaagccgatgtctaaactcgtttttgtccgcttcaatcccgttgttttagctggaaaatgaatatttgcgagctaccacaaagatactactcgaagaaactcatataattcggccaagttcagaactttcttaacaattcgctaaagaagtcagttgccattgtttatagcagcaatgtgatatcagtgtaaaagaacggatcaattcgaaacacctaatcgcagcaatacatttgttttgtaatcaacaaaggataaaatgcaaagccgcagcaaagcgtttgtgttgcgccagactttacccatgattttcttttcttttctcattgatctatgaatatcccttatcgacttagtatggtagcattcagaatcgttcatac

SEQ ID NO: 38893 - DNA, 817 bp, Heterodera glycines
  unsure (1)..(817): unsure at all n locations
ttttcaagagactgatttttgggaaaattgttggacaaaccgtgcatgtccaaacatttgcgcctattccaaaaatcggtttcaaatttatgttttatagccggaatttacagatggcattaggctcacaattaggcgcaaatatcgggtaatcctgataagcccccgggaaaattgttggttttattttcaaaaaaataaaagaattctttgttatgctttgaaatgacgtcagatttgggatcacaattgtacttgaatgcaacaaatgtttgtttttttataaggttgacggatgggcgacaacggcggccaagccggagcagcaccagcagcagtacagcaacaactgcggcagcaacagcaacaaccatcaccaccaatatcaacagaatgggaccaacagtggcaacagcaacaaaaaggggtactgtaaggggaagtgtgacggcgtaggcacatttaatttgcaaaattgggtactgtaggggggcgggagaggccggtgccccggaattactgttttttaaacaaaaattgctaaaaaattttcaagaatttttttgtaaattttttaagttctcggggggcggggcggctgaaacacgtagttcaccaagcttatacggttataccgtataaattttaaaattttatttgcctcccccccccccgctcaaaacagccaccatcgttcccactcgacgactccgttcgctgctgctgaactgttgcaggaaaccacgntggtggtgaccgtgctgctgcacaactacgcccaccagtacattgactccatgctcacgctgtacatcgc

SEQ ID NO: 38894 - DNA, 1260 bp, Heterodera glycines
  unsure (1)..(1260): unsure at all n locations
tgctagtcatgattattaaattaagttttcacnatatgtaacattaattaagtgtatatttttttttcaaatatagatttttgtttatttatggatttagttttttaaatatcaaatgagtgggacgatcacaaggtgtgatcgggttttccgacgggggagtcggaggccaagattttgattgaatagccatttcattgatttgatcaaatttggtaaaaaatgtgatgatttatttaaaaaatttaatttgaaattttttcaaaaatgttttttgttttttctcagatggccacgtgctccatgttgcaaatattattggcttcgtctgatgactttttgtggcattttttaaggtcatcattcaacaattagatttttatgaaaattgaaattttggcataattttgccattcatttgtgtaatgcattcatttatattttatttacaattcttttttttacaaatattaaattcaaattgaagccttggctaaaaaccattgaaataataattaaaaataaaaatttaaataaataattaattaatttcttaatgaccaggcatgagctgccaccgaagcgttttttcagtgtgtttgacccatttgatgacgaatacaaacattggaacaaatacggctcaaaacggatggacgagcgattgaacagacaatgctattaccacaacaagcggcattattttgttggataaaatgccgaaaaaagaaaaacataacggcattattttcttcgacagaatgccaaaaacgattgattgatgtcaatttttttgttatgataaaaaggggatctacaaaaccacatcctgggctaaatctctttgcaaaaaaaaatagggctggtgatttaagccacgaaaaatcgccaaaaagtcgactaaaaaaagttttaaaacagcaaaaaaggcattaaaaagccataaaaagacgaaaaaaagtaaaattaaaaagaaatatccaaattaacaaaacaaattaaaaaaaagaataacggagaacgaaaaaatgtggaaattaaaaaaaaattgcaaaagaaataaaagagattgtagacggatttttacaagaaaatttgagaaatttttttatcccatatcctgaaaatatatcaacgcttattgttttaaaaaatgttcgaaattcagaaggaaaattgaacacaaaaactgatggggtgaaaataaaattaaataaggaagacaacaaaatgccgcaattttttaatttaattatccct

SEQ ID NO: 38895 - DNA, 886 bp, Heterodera glycines
aatttggagagattatatcgtttttagtgcgctaggttcgatggaaactttttaaaatataagcctaaaatttttcgcaaatttaaaaagcaattaaaaatttttagattttttattcatctccctttttgatagagaaagcatcagagagccttatttaacttttaattaacatttggtgtgtttcagagcacgttctgaaaaaatacttatgaattaattttgcaaaaaataaataagtaatgaaaaagtcagaatttcgaaaaattttaaaaacaacaagcgttggcattttttcaggttaagttagtcctttacaatggagaaggcctgcaaaatttggagagattatatcgattttagtgcgctaggttcgatgaaactttttaaaatataagcctaaactttttggcctgtttaaaaaggaattaaaaatttttaaaaattttattcatctcccttttgatagaaaaagcatcagagagccttatttaacttttaattaacatttggtgcgtttcagagcagtttctgaaaaaatatttatgaattgattttgctaaaaaaataaaatagtgaagctttaaaaattaataaaaaattttaaattcagaattactggagttagcatcatagcagtgcttttccttgtctttttgatgctctcgcaaaatctggttcgcttctgaccagtttataaaaaaaaagttaagcctaaaatttttcgcatatttaaaaagcaattaaaaatttttagattttttattcatctccctttttgatagtgaaagcatctgagtgcagaaaataacttgcaaataaaatttggtgcgtttcagctgtgaagctgaaaaaaatatttatgaattaattatgcaaaaaacaa

SEQ ID NO: 38896 - DNA, 932 bp, Heterodera glycines
  unsure (1)..(932): unsure at all n locations
aaataaaatggcgattgtgcacagccctccgtctcatgctcgagagcatttgtatgtgtataaaatttatcaaaaaaagagatagccatttttctgggatagagtataaatttaaaaattccctcaaaaataaaaggtctattgcgcaccgccctccctatcatgctcgagagcatttgtatgtgtataaaatttatcaaaaaaagagatagccatttttctgggataacctctaaatataaaaatcctctgtgaaataaaatggcgattgtgcacagccctccgtctcatacgcaagcgcttttgtgaggtataaaatttctcaaaaaagagatagccatttttctgggataacctctaaatataaaaatcctctgtgaaataaaatggcgattgtgcacagccctccgtctcatgctcgagagcatttgtatgtgtataaaatttatcaaaaaaagagatagccatttttctgggatagagtataaatttaaaaattccctcaaaaataaaaggtctattgcgcaccgccctccctatcatgctcaagagcatttgtatgtgtataaaatttatcaaaaaaagagatagccatttttctgggataaactataaatataaaaattccctcaaaaataaaaggtctattgcgcacagccctccctatcatgcgcaagagcatttgtatggtataaaatttatcaaaaaaagagatagccatttttctgggataacctctaaatataaaaatcctctgtgaaataaaatggcgattgtgcacagccctccgtctcatacgcaagcgcttttgtgaggtataanatttctcanaaaaagagatagccatttttctgggataacctctnaatataaaaatcctctgtngaataaaatggcgattgtgcacagccctccgtctcatacgcaagcgc

SEQ ID NO: 38897 - DNA, 926 bp, Heterodera glycines
agaaaaggaacctgtgctacgcactgtatgaaatacctaatgcgcaatttggatacaaaaaagagatagctatttttgggcacgttacgatttttctgtcggtgtccaacaccctactaatgcttcgtttggccggataagaaaaggcaacctgtgctacgcactgtatgaaatacctaatgcgcaatttggatacaaaaaagagatagctatttttgggcacgttacgatttttctgtcggtgtccaacaccctactaatgcttcgtttggccggataagaaaaggcaacctgtgctacgcactgtatgaaatacctaatgcgcaatttggatacaaaaaagagatagctatttttgggcacgttacgatttttctgtcggtgtccaacaccctactaatgcttcgtttggccggataagaaaaggcaacctgtgctacgcactgtatgaaatacctaatgcgcaatttggatacaaaaaagagatagctatttttgggcacgttacgatttttctgtcggtgtccaacaccctactaatgcttcgtttggccggataagaaaaggcaacctgtgctacgcactgtatgaaatacctaatgcgcaatttggatacaaaaaagagatagctatttttgggcacgttacgatttttctgtcggtgtccaacaccctactaatgcttcgtttggccggataagaaaaggcaacctgtgctacgcactgtatgaaatacctaatgcgcaatttggatacaaaaaagagatagctatttttgggcacgttacgatttttctgtcgtgtccaacaccctactaatgcttcgtttggccggataagaaaaggcaacctgtgctacgcactgtatgaaatacctaatgcgcaatttggatacaaaaaagagatagctatttttgggcacgtta

SEQ ID NO: 38898 - DNA, 987 bp, Heterodera glycines
atcatcaaactcgtctttgtcaatacgcatagtaattaaggattaccccttcgggatcgaacaaagcggctgaactcacccatacgcttttctaaaaatcttgccaaattcaaaatattacaatataaaaaaattactgtatcaaaagttgagtggttgaagctgacatatacaccgtttcctcccaatttttttctgctcaacttcactacttgtttcccgccttctgatttcgttttcccgatgaaaatatcacgagattgcacattaacagttgtgacttgtacggtgtgttcaaaatcgctgggctcaaagtgaataagcagaaggacaaaaggaaccgccacaaataaaagttgcatttctgtgggcaattaggtttcaatttaattatttaatttttgtaaagtgattaaaaattaaaggatgctagcttggaatttgatgttcagaaaaatttttatgtaacagtttctataaattgcattgcactcatttcctaaatttttttcggcggcgtctgtcgcaccgtcggtcatcagagttcataatcggcaccgctggcgccatgttcgtgataagcgacccagaaagtccttgcaaacatgctttcatgatttttgaaagcaaaaaacattttttgttcagggataccaacggcaatattaccgaaaaatatgttttttaacaattaatattgagctcgctcagaccatgtaagtcatttttagcatatttcaaaaaaaaaaccagctccaggcctggatctaggcctcgaggatccttgatttttcctggacctggaatttcctggattttaatccagaaaaaccagtgaatgtccaacatggaacccaggtacagcttttttcaaaatgtctaactctatgtaattttgtaatttttggactcagattaataatttaaaagaagtgaaagtgaatgaattatgcgctgctggtccatcgcggctcctaaatagcaaaa

SEQ ID NO: 38899 - DNA, 948 bp, Heterodera glycines
tttttcattaccctaagagctgcggaaattgtgaattaattctcagaaaaatggctatctctttttaggacaattttctatctcgtaaccccgatgctaatccgttccggagagcctcttcaaaattttttccttaccctaagagctgcggaaattgtgaattaattctcagaaaaatggctatctctttttaggacaattttctatctcgtaaccccgatgctaatccgttccggagagcctcttcaaaattttttccattaccctaagagctgcggaaattgtgaattaattctcagaaaaatggctatctctttttaggacaattttctatctcgtaaccccgatgctaatccgttccggagagcctcttcaaaattttttccttaccctaagagctgcggaaattgtgaattaattctcagaaaaatggctatctctttttaggacaattttctatctcgtaaccccgatgctaatccgttccggagagcctcttcaaaattttttccattaccgtaagagctgcggaaattgtgaattaattctcagaaaaatggctatctctttttaggacaattttctatctcgtaaccccgatgctaatccgttccggagagcctcttcaaaattttttccattaccctaagagctgcggaaattgtgaattaattctcagaaaaatggctatctctttttaggacaattttctatctcgtaaccccgatgctaatccgttccggagagcctcttcaaaattttttccattaccctaagagctgcggaaattgtgaattaattctcagaaaaatggctatctctttttaggacaattttctatctcgtaaccccgatgctaatccgttccggagagctcttcaaaattttttccataccctagagctgcggaaattgtgaattaatctcagaaaaatggctatctctttt

SEQ ID NO: 38900 - DNA, 915 bp, Heterodera glycines
  unsure (1)..(915): unsure at all n locations
tcaaatattctttggactgatcagcaactgccaaaagtgagtttaatcggctgattagcataagcaagttgggcaccaataaaggaggagtaatagcggataatgttctcgtggttcagcttcttcagcaggtcaatttccttgcggcagtcctcccgtgcctttttgttcttcattaggtccatctgaaagtccaattgtgccgtcatcctttcccccccccccgccccctcccaatcgcccaaatgacctcaatctttttcagtgccaccatattcccgttcagtttgttccttgccgaaaggacctccgagaattggccctttccgattcgcttttccatttcgaaatgctccattgtgccgtaattattggcaaagttctggtcaatggtcattttcaaagtgccattgggagcagcagcagaagagggcgagggtgacgctgaagaagtgctgctggtgctggtcaattggcccagcggcgaaagtccgttggagggcaaaaattgggccaccctttgggaaggcatcgccgaagggggagaaagcggaaaagggccgcacgcggtgaacggaggcaaactcattattgtggggaattgatcagaaatgagggtgagaggtgatcagcagcagaattggtttaatggattatgacagacggaggggagcgggggaggcgacgatttttggatcaatggggcggngattggatttgcttgcggaatgtaaggggcgagtgagtgggtaaataattaattaatgataatgataatgcagacagctaaacggaattcattggaggtgacaaaatgcgacaaatttgaggggaaatcgattgggttgtgagaaactccaaaagtaagagcagcaaaaagacaatttgggggagttgtgaaacgggaaaagacaa

SEQ ID NO: 38901 - DNA, 1143 bp, Heterodera glycines
  unsure (1)..(1143): unsure at all n locations
ataagttcaatttgtaattatatttctttttcatttctgacttttgtgccgcgctcgctaactgaaaatttgtttaaatgaaattaaatatatntagaaacaaaccccatntaaaaggggtaaaaagaagtaaatgcatcattttagaagagattttttatattattaaattcttattaactatggactttaataatctgtcttcaaattcgacaattcttggggatttggtaatttataacattaaaaataaaaaattaatattatcaattttttagttttacaccacttacaaaaatgccggactgagtgccggcctcgtcacaatggctgtgctaattgctttgtgtgctgtgccgggaaattgcatgaatctgttccttgtttatttgacaatcaaacgaaagtaagttttttaattaaaggaataaaattaaaattgattattttattaaatttttgattttaatttatttttcttcgtcatttttgttcactttcttttgcctattccttcactcaaatttttatcaaaattatagggatttgtcgaactcaattttaataccatattccctaaaatatagcctcccccaaaattctgcccgaccattgagaaaacgcccttccgaggggccaaatttgagttcgggaccctgtgactgaccatttttccgtttttttcaattattattttttattttcgcttttaaatttatgaattttaatgataaatcaaatttcaacaggtcgcttcgcgggagcagcaattatttgctggcattgaactcgttctacgagtttctgcaccaaacgggccattacatttttctgttcaccattctgagcggacgcaattttattccgttttttggcagtgccatcttccaactccaatccatttttggctataatgcggcaattttcacaatgattgagacggcggtggaccgatttttggcggtggtgacgccgaaattgtatgcttcagaaaatgaaagaatttatataatttntattggtacttttccattatgcggacacaccccaaaattatacaaaaagaaggggaaagggccccgattttatgcctcctaaatatttttagcggagatgtacgggactatgaagatacattcgatg

SEQ ID NO: 38902 - DNA, 974 bp, Heterodera glycines
taatgtactgtttgcatatggtaacaaagcgaatattaagtacgcactcaagtacccgtttaaagggccaggacattgttatgtcgagtgcaaagaagagtccggcaataaaatcggaattgatgagccggctcaatatgccaagatgaacttccgtggtgcaacggaagcatatgccattgttcattcaatgccatttgcccgtctttcacatcatgttgtcaaattggcaattcatttgccaaaccaacagcccattgtatatagggcattccagctggtgagcaaagctcaacaaatccagcaaggcgaactgccagaaacgcattgttcagcatattggaaacaatggcaaaatgagtggaagaatgacccaaagtttaaggacattctttttgaaaaagtcccagagcagttccgatgggcaaaggacaaatgggtcctgtacaaaaggcagcaaataaaaaggccacctatcggccgaattgttcctgtacccccatcggacccggaaaggttcgcgctctattcacttatgcgtcactttcctggagatccagatcatcttaagatggttaatgggttgctttgtacctcattcactgaggctgcaataatgcatggtcttcttgaagacggcaaaatttgggacaaaactctggcggaggcagctctgtcgcgctggccagatcagatgagatggctttttgtgagcatcatggtctatggccagccgagtaatgccatagaattgtggaacaagtacaaagaccaaatgtacaatccgcaaggcattattactccggcacagcataaagcagcagagcttgaagccctagccgaccttgattggcggctgcacagctgctttaacttaagctgtgtgcattttggcctgccagacccgccaaactcaattgccaaaaatactgacgcggcaattgaagagtttttctttggcgatgatgatttga

SEQ ID NO: 38903 - DNA, 618 bp, Heterodera glycines
ctttggcaccctttcctcattgctccccttccccccctgccttcctcaatacgctttttctccccctccccccaacggcttcatcccccccccttttggccccctccgttctccccgcatttcgctgccatttgttttgattggaatcccttcaaatgtttacactttatctccccccccccccccaccatacgctctctctttctctctttgttaagtgtttgttattgctttggcttttggtccctttgcccttttgttttcccctataaaatattttcgaattccccccccccccattttctgtttatattttatctccactcatttgtaccattcactgccgccacaataataagataataactccgctccaccacatcaaatttcatttatcagcgatttttaaaattttccctgcccaaaaatagaaaaaaggggaaatttaaacccggagggggggggcatgtcgcggacagagggacgaaaggggacaaaaggggtaccatttggggagagaattaccaattcacaacaattgtttttacattttaatatgaaaagataacaacgaagttcacttaattgctctcacgaaacgcggcggaactataaaag

SEQ ID NO: 38904 - DNA, 1177 bp, Heterodera glycines
gctttaaaaatagcaaaaaatcgggagaattttatgagatttatttggttttataatgttcaaaagaaaaaaagttattccagaaattctggaaatttaagatttttcagaaaaaaattcagaactcgtttctgaaaagtcattctgtaaaagtaaaatactacaaaaatccgcaattttttgctctattatataaattttattttaaatttttatcccttttaaaaaaaaagttataaaaataaaagtgattttgggattcgggaccaaaggggggtgaccaggatttttgagtgaaaaaaaattttcaccaaaaatcttcaaaaaacatgtctttaggcgttatttgggccgctgatcacgaatacgtgatcagattttacttttgacatcgtcaagacctcagaatccctgtgtgattggggattctgggacatgttctgaggggggggggcagcaggttcgaatccggacggtgtaacattatttttctttgtatttttggcttattttacaatgtttttaattaatttgaagatttcttttaaattatttaaatttattttttttaaattaaagaatttcattatttatttttgaatttgtaaaaaaaattcatttaatttcaaattaaataaatattcaattaataatttccaaggttgtttttaattaataaaagagtattttattattaaaaaatttttaaattaaaatgcactcgatttttaacctttaataaaaacgtttccttatttatttaattttaaacaatattgtacctctcctaacaatgatgaaccacttctaatcacagttgtcctcttctaatcacttttcttcctcttttaatcactattgtacctcttttaatcactgttggacctcttctaatcactgttcttcctcttttaatcactgctgtacctcttgtaatcactgctggacctcttttaatcactgctgcacatccttttaatcactgctgaacctcttttaatcactattgcacctcttttaatcactgtcgtacctcttttaatcactgctgtacctctttataatcactgctgtacatcttttaatcactgctgaacctcttctaatcacagttgtacctcttcgaatcactcttgtactgttgtgaatcactttggtaactcttctaatcactttt

SEQ ID NO: 38905 - DNA, 1115 bp, Heterodera glycines
  unsure (1)..(1115): unsure at all n locations
tttctccgtcttcttcctgattggtcggcaattgggcatgttcctctgaatgcccatcctccatccacattgttcgaccaatttcctcgtcctgttcatattccaaaatttgaactcttgcctggagagtgtcaaggctctccaaaactttgcccacttcagccttcattttttcaattattttcccgaaacgcactttagtcaatctttcctggtaatcaattctcatattcactttaccaacttcttgttcaatatcaatcattttttcttgagcctgaaatgtgtccatttccattgtattttcgagttcctttaaggaagactctaattccctgacacgatcagcagtgtttgaaatttgaatttggttcgaaatttgagcaaattgggtttcaatttgacgaaattgtcggcagacagcctgctcgaatgctctcattctgaccagtaagtttgcccatctttggttctcctcaggcgaaaagtataccggatcaaaatctgacccactattttgagcttcgttgccttgaggcaaatttgtcgtcattttctcttttcctttttatgcgcacacagcgtaattcactttcttttcaaaagtacggcacacagcccggctggaaagacacacttttaccagctcttttcctgttgtttctattggcactcagcccggctggaagcacacagcttgaccagctcaaattcactcgtttgttggcacttagcccggctggaagcacacagctcttaccagctcaaaatttccggcacttagccttttttcggctcttggcctttgcttcccctacattcctttttaggggtcccgggtcgtggcaccaaaaagttgttgtgtccaaaccacttggacttcccggttcttaaccctttttcctttgaccaaggttttttggaaaagagtttatttaagtcagaaagcaaaagtaaaacgaaaggttaaatgtgattaaatgcaaagaaattaattaacagttgaaaaagatcgcttttaggatttgtctgaagttgggaatgtgtgggaaaaaanggtgctgaatgagagaaaaagaggcttaaatagtgccacaaattgggaggggcgaaca

SEQ ID NO: 38906 - DNA, 1271 bp, Heterodera glycines
gatttcttaacaataaaattaaataaagatttatttttatagatatacagcaaattgttaatgaattaataggcgaattagaaaaatgataaaagagggagaattgaaacacaccaagttaaaatacgaaaagtatgaatgggatttgctcaaaaatgaacttgctaacatcggacaagaagaaaaatgggaaggaattgaaaaagcgatgaataattgaggggaaagttatgacaaattatggaatggaactgaaattaataccgaaacttataaaagtaaaaatgaaagagactaaaagaaaagttggaaattttggaaaatggaataaaaacggagcaaaacaaagaaaaggaaacggaaaagcaaaatgagaaaaaggaaaagtgaaaaataatatagggaaaggaaaagaaagatttgctttaatgataatcccaatttaaatttaaaaaattataatacataatgtttgtgatagccaatattaaaaaaattgatgatttttcagaagaatttcatgtcgtgcaatgcaagatatattaaataaaagggcttttgactgatttataacgagtgctgtgcacaatggtttaagattttgattgattaaaaccgaacgacgctatcagtagttaacctccccggtgcgtagtttgggcgggaaaatttcgcgcacaaacgtcagcctattggctggttttaggctttgaagttgccgccacctgtcaatcaaaaggtggccggggaggggaggagtcgagagtgagtgatcggtagggaggggtgcgcgggaggggtgaacctaaacctattgcgtagtttggggaggggtcccgtgggtgttgaggggttgggttgggatttttttgaaatgtgagtgggggtgtgtgcccaattgagtgagcaggtgcaacaatacaccaattaattaattaaacgttttttgtccaacaggactttgtcaatgcgcaccgtcttttggccaaactttactatcagtacgggtcacgaacacagcccattttgttgcgggacgcacccaacccaaggaaattaatcataatatgcttatttaattatttgaaaattaagcctaagcgcgttactcgccggtgcctttggcatcgttgcgcttcatcaggattatctgagagcacagaaattgttgtcggtgaaaaccgagcgcaatgccgaggcagaagtgaatcgattgtacagagaagagctggaagacattgtgaagctgccatttgccattgtagcaggtg

SEQ ID NO: 38907 - DNA, 847 bp, Heterodera glycines
tattttatatatgcattattttttattgattatttctagtcgttttatgtatcaaaatgtgttcgtctttgaaataagtaacacaaaaatctcggtaaatgataacataaactgctccttcggtatcgaaaaagtgtcaaatttctagcagctcaacacacatatacactaaacaataaaatgttagagctcgctcccaattggtttcgacaataattgcacctatctgtatccttatgaagtttgtcggcggaattatgtatatattatatatgcattattttttattgattatttcaagtcgttttatgtatcaaaatgtgttcgtctttgaaataagtaacacaaaaatctcggtaaataataacataaactgctcattcggtatcgaaaaagtgtcaaatttctagcagctgaacacacatatacactaaacaataaaatattagagctcgctcccaattggtttcgacaataattgcacctatctgtattcttatgaagtttgtcggcggaattatgtatattttatatatgcattattttttattgattatttcaagtcgttttatgtatcaaaatgtgttcgtctttgaaataagtaacacaaaaatctcggtaaatgataacataaactgctcattcggtatcgaaaaagtgtcaaatttctagcagctgaacacacatatacactaaacaataaaatattagagctcgctcccaattggtttcgacaataattgcacctatctgtatccttatgaagtttgtcggcggaattgtgtatattttatatatgcattattttttattgattatttccagccgttttatggatcaaaatgtg

SEQ ID NO: 38908 - DNA, 1103 bp, Heterodera glycines
  unsure (1)..(1103): unsure at all n locations
aattcaattttaaagcggaatcagaggaggagaaaacatattgagatgcgcacagaacagagagcgagagagagggaaaatggaaaaaattgatcgttttctcctgatcaatcgatatcgagttttggtttaaaaatttcctacatatttgaaaaaacattaaacatgtatttaataatttaaataatcaaaattaagttgtttttttttgattatccccctggaatatgtaggtcgaagaaaaatcatacattttccaaaaacccatacaaggtttccaaaggaaatcttgattcaaaacgaggcagatatgattatacatatattgtcttgaaaaaaaatatatagcgcgaacattacattatactcgtcattttcattatttcccatcatcatcgtcctcctccccctcctcatgttcatcctcagcaacatcatcatcatcctcatcatctttggcattcttttgcgtttggctttgtgtcgtttttgattgaccatcaccatcagcagcagcagcaccattattcgtattggcatttttgttgccgccgccgccaccgctgctcatcaacatctgcaggagacgtgccaccgcattggtcactgtctgtgccggacttgacgagctcgacgtctccgtgtgctggtcccgatgggtacgcgtgccatacggttggaacagacggcgccggtgctccgcatggccaagcacaaccgttccacatagtcctggtgcttgtacatgtactccttgaaaaacacgaggggaattggtaacagataattagtgaattgaagaagaagagcacagaattcatcccaggatgggagttttttattagaaaaaacctctttgaaataaaaaaaaattggtgggggaggaagggcgtcggcggtagagaacatattggagcccccacacaaaattccatgtcaattttctgtttattttttcaaactttttccaaaaaattgttcaacttttttccattttgcttggaatttttctttanaaatgcaataatatacagcgtccccctcttttgttgtttttaatttcaatttttgcgtgccattcaaaaaccgaaaaaatgccaatg

SEQ ID NO: 38909 - DNA, 1044 bp, Heterodera glycines
caaaaaaagagattggcatttttctgggatagagtataaattataaaattcctcaagaataaaaggtctattgcgcaccgccctccctatcatgctcgagagcatttgtatgtgtataaaatttatcaaaaaaagagatagccatttttctgggatagagtataaatttaaaaattccctcaaaaataaaaggtctattgcgcaccgccctccctatcatgctcgagagcatttgtatgtgtataaaatttctcaaaaaaagagatagccatttttctgggatagagtataaatttaaaaattccctcaaaaataaaaggtctattgcgcaccgccctccctatcatgctcgagagcatttgtatgtgtataaaatttatcaaaaaaagagatagccatttttctgggatagagtataaatttaaaaattccctcaaaaataaaaggtctattgcgcaccgccctccctatcatgctcgagagcatttgtatgtgtataaaatttatcaaaaaaagagatagccatttttctgggataacctctaaatataaaaatcctctgtgaaataaaatggcgattgtgcacagccctccctatcatgctcaagagcatttgtaagtgtataaaatttatcaaaaaaagagatagccatttttctgggatagagtataaatttaaaaattccctcaaaaataaaaggtctattgcgcaccgccctccctatcatgctcgagagcatttgtatgtgtataaaatttatcaaaaaaagagatagccatttttctgggataacctctaaatataaaaatcctctgtgaaataaaatggcgattgtgcacagccctccgtctcatacgcaagcgcttttgtgaggtataaaatttctcaaaaaaagagatagccatttttctgggatagagtataaatttaaaaattccctcaaaaataaaggtctattgcgcaccgccctccctatcatgctcgagagcatttgtatgtgtataaaatttatcaaaaaaagagatagccatttttctgggata

SEQ ID NO: 38910 - DNA, 984 bp, Heterodera glycines
aaaacaaagttaggaactcactccacgcaaagccatgattcgcgttcgatcttattgaggctgccgtagttgcagcagcccctcgctttgaccttgtggaaccagcccgaacaaccccaacactggacgcccaaatggtggcattttcggcacgacttttcctgcttgtcgtaggaggcttcagcggcagcctgcggagaacgacgaggcgtggcagaggccagcggaggtggaagaggcgtggcagaggcccgcggagatcgacgaggcggcgtggcagaggcccggacccgcggggtggaagaggcgtggcagaggcccgcggagatcgacgaggcggcgtggcagcggcccggacccgcggaggtgaaagaagcggcgcctgctgctgctgttcctaaaaattttttataaaaggatgtacaaaacgtacatttacatgggcacccttgtaaatgtatatttagtacatatttatttatagataattacaagggtctaagaacattccaaaaaaaaaacccgcagttcccgagcgtagactggtgtctcaaagtcgagaacttcacggcggcgagcagcatcggccctttcgtccatggtcaggtcgtctgggacgtcgttggcatcgtcctgctgctgctgctcggtgttgtgagccgcatcctcttcctcctcgtccccttcgctttcgctgctgagctccgggccaatgtccgcgagaccgagcttcttcagcttagccttaggagcgatctctttgagctgttgcacttgctgaaaaaggtcgtcttcggcagcgcggatggtgccaatggcagtgttgacctcacgtttcagctcccttttgcgctttcgaaacttggctttggtgcggtcgagtgcatgcctggtcaacaccaccctgtgggagacaatgagaaaataaagtcagatcaaagctaaatttcagtccgattacctttcgctgcagcagcccaatga

SEQ ID NO: 38911 - DNA, 1047 bp, Heterodera glycines
ccgttaattctgtacacagcgcattaaaaattcttcaacattattgcgcagaatctcaaggcattattaactagagtttaatcaaatttttaccatatccggtcgccagcgaccctatagaattggactagttgtcgcctcaattgatccattaaaaattctctctaagagaagctttttctaatttttgacccaaatttaatgcaagctttaagcaatatattacgacggcctattttcggctggcaagagtgggcagagtagatcggcagctggcagcacccgcgatggtgccagcagtgccattgatggcacaccctcgttggatgttggtgacattgttggctgtggtgttaaccgaattggcggcagaatcacttacacactgaatggaaaacacttgggtatgtgaatggaatgggggaagggcaattgataaatttaaaaccgaaattattagatcctaataatgtaaataaatagtatttttttgcactaaaatttagttacaaaaaatttttcctactacaaaaaaatttctccgacccctcctttccaccaaaaaaaaatttaatagaataattttttaattggcaaattttgagatggttttgttctgttttttaaattaaagacaagcaaatattttattatttcaactgaaaaatcattttttggtttttttctcttggacaaaatcctgttcgtttaaatgcaacttttggttcgatcttttcttgcacaaaaataactccaaaaaaatgctgaataatttttcaataaaaaaaatgttcatatctaatattctcgtgtttatagagcgactcgtttttttaattttatttttcgcaacatccccatggctcttaccgtctgaaattttttggggatgttaatgtttgtttgtaaattaatgtttgaagaagaaaatttttattcttttagaatttttttttattttggtttagattaaaacctggagatattttatttcaaattgaaaatatgtaaaaaaaataatgcataaataaaacagaaatacaaaaa

SEQ ID NO: 38912 - DNA, 1018 bp, Heterodera glycines
cttactatgatggttgtgtcggtcaatggccagcgaacttccaaaatttgagataaagacgggccaatttcgcggaacaatgaagtgccaagacttacagcacacgaacaaacatttggccagtaaggagcaattttcaaaagcaccgacaagaatttaattcaaacgatgacctcaagttgaattctataaaaatatgcaaataaaacttaataattttgaaaattgggaaaaaactttcaaatacaaaacatgaaaaaattatcataggctttttattgactgctgtttacaaaattctgcttctgcattcactactacgcggataaaatttaaaaaaagcgaatttcggagtagtgccattgtaatatttttacgaagtgataaaatgaacttacaatcagctattgatcgcatggcgatttgtctctgattttggaggtcatttattatttatttactaattattctttcgtccattctctcgaaggtccttcattttcttacaagtaaaagtgtgtgcatttgcttattcctttatcaattcaatcgtccgatgattgacctgttataaaaaaaagatttcactataattaaaatagaaataattatctcttggtttattcattgaaaggaattacctcccatttttccaataattattcattttaataattttattcaataagtgacatccaaatcaaagttaatattaactaataggtaatctaaagattggaatgtttaattttgagactaaatttttgagtcctcaaaatttaggacaaatagtgtgcgcctacgggaaaatttaaaatttagttgaaatttgttaacataaagaaaatatggacaaaaagattgcgttgaatacataaccttaaaaaatactgattatcagacagaaaattcattttcccaaacaaatttaaaagaattttcttaaatttatttgatcttcacatttaaagaaattacattttgtttattgcattttcttgatattttattgctattt

SEQ ID NO: 38913 - DNA, 1026 bp, Heterodera glycines
aactctttaatttcggtcattcatcatcaattcggttcctttccggtttcaatttccggttcgtagtgttttttcgattcccattagtgcggggggagggtaatcgaatcggaacggacgaagaaatcggtggtagggagcaactaatcgttcatttcgttaatcgattttcgtgccgatcgtcgtcatcaaagaaagagaattaattcggtattaacgttcaaccaatcgttctctctctctccctccaaccctctctctctctccctcgctgtctctctctctactctctctctctcacacacactctctctctctatctctctctctctcctctctctctctctccctccctcgctctctctttctctctctgtgttccttccctctctctcttccattctcttttttgagaaatttagacattttttgggattttgccggggcagagaagggggagataatttttcatcatcatagtaaatatcaatcgtttaattcttcggccccaacatttcccccccccccccttctcccctctcctccgacttcgtttgtggcagctgtttccacaaatgtttctcttggcttttctgtctgtgtcctttttttctttggcgccctctttctgccaacttatgtgagcagcagacgaccacgaggtcttttacaacacattaattttgaatgacgatgaatgatgaaaataatggtggagggagagaagaaaagcattggagagaagggaggagagaaagttaggggaagagaaagaagggagcgataggagggggaggggaaaagaaaaaggaggagggagagaaggggaggagagaatgggggagaaaaaggagaacagcagggagaggaaggggaaggaaggccgtgtcggactgactttgactgccaaatggtgttaatttgcggaatgactctttgtgggtttgttgcattaaataccaaagacgacacacggaattagtcgatatttagagaattagtgccaaaagtgaaagaaaatgaaaa

SEQ ID NO: 38914 - DNA, 862 bp, Heterodera glycines
  unsure (1)..(862): unsure at all n locations
aaatttcgatttttgaggcctcataacttttttttatttttgatctcacaccgctaatattaaaaattcacaacagaagtcgaccctgctcgatccaataataccaaatttatacccactttttgactaacagttcgcgaggttcccttgttagtccatttaatattttcgacttgattggcccatggtaagtatgtgaaatggacttgtttattaattttgaaaataagcattatattggcaaaatgatcttaagtatatttgaaaaaaaaaaattttttttttggctacgtttttatccaaaaatctcaaacaaacaaaaaaactcaaaaaatcctcattttctattaaaaaaaccataaaatcgggatataaatcctcacatatctgaactctctattattttatttaattgaaatggtatagattaccaaataatttaattaaatggcctcttcacgtcccgaatattcgggtccacctgaacaatattatgacaacacagaagcacgcaaatacacggcaaattcacgcatgcaaaaagtatggcagcaaatgaatttagaaattacatttcatggttttcaccactatttaaatttataaatttgtgaaatgtacggcaattttttgaaattttcgatttaacgcaaaatgaaaaattttctcattactaggaaaagtggtcagagttggctaccccaagatttcttgcaaatataggtctatgctagagtctggtgtgaccaggattcccgcaggatttgggggattttacgtaaatcccgatcccgtacttttagaccaaatttttatcctttcatccaacagatccagcgtgagcttgcccagcgtncatgaa

SEQ ID NO: 38915 - DNA, 1008 bp, Heterodera glycines
gggcagtcccccccgaacgaatgcgcccatatttatgggagaccaaatccttcgggagtagcttccctatagcctgtactttaattctgcgttggatttttgctccccataattgtttgagtaccccaaccggacacttgaaaaaatcgatttttttgttttcggggcagtccccccgaaccgatgcgcccagatttatggggagaccgaatccttccggaatagcttccctatagcctgtactttaattctgcgttggatttttgctccccataattgtttgagtaccccaaacggacacttgaaaaaatcgattttttttgttttcggggcagtccccccgaaccgatgcgcccagatttatggggagaccgaatccttcgggaatagcttccctatagcaggaggaggaggaggaggaggaggaggcaaaagtgaactgagggacggagaagggataagtgaaggtggaggagagggagaaagggcaaaggcaattaagcgacaattaagggcaattagcaaaatgagtgagtgactgctgctcggatttgggcgttgttattgggaagaatcggttgttaagttgtacatttgtgttgctgcagacgacgagtggttggagaagacggaggggacggacgaaccaatcgacgggttccaagggcagtcagaaacgactgccgctttcaggaggacgacggatgagtgacccagaaaagggaagcggcggcgggggacaaatggacgagcagcgagcgtttcttcttcattcccatcttggtcgctgatctctccaattgaattggatgtaatattcgctgcttcatggaaagccgtatttgaaaaaggaagaaaagaggggggggggggaggaggaagatgagtaatgggaaagtgggaaaagggaaaaggggagggggaaggagagaaagaggaagaggaaaaagaaaaacggaggggacggatgaatgggaaaagcaaatgcaaagcgaacgcacggaagaa

SEQ ID NO: 38916 - DNA, 845 bp, Heterodera glycines
actttaatggtcggggttacgaagaactgcgatttttacaaatgttcgagtctaacttttatcccaagtttcattttattgcagaactttaaagccgttttttatttattttaaattttggcagggggagccccaactgtggtgaccaattcacgcgatgtaacatttgaaaaatgaaagccatttgttctccccaaaaagccacgccatttcattgtccgccgctggggtttcccaaaaaataaaaggcgacaaaaaagagtttagtcataatttgagacggtaaatgctagggaaaatgagaaatgaaagagagtttggaatggcaaaagtctcaactctcgggccaaaaattccttacattcaaatatatttaaacttcgaaaatatttttgatcaaattcagaaaatgtccaactttattattatgtcgcaaattccatgggaaaaaatcaaatatttttttgtttttttgttgtccttaatattcctttttattacctacaaaaactacggctttttatatgacaattcggcattattcaggtgacttaattgaaaataatattcacaaaaaacacatattttaaagaaaacaattatcaaattaataattaatttaggtttgcctatacggaaaacaatagcgttacaatatcaccagaagaatgctgcggtgaaaatgtatttttaattaattatttactaaaatgaaataatttaaatattaagatggtttacactttgaaaatgaacgactcgcgaataattcgtggcaaaaagtttaattgctcattaaaatggcttttggaacgctacaaactttcagacaaatatgcaattaa

SEQ ID NO: 38917 - DNA, 1549 bp, Heterodera glycines
ccccccccccctccacgcccttcagagcacgacaaatatttcaacaaaaattttgaaaaattgactagagcaatcgaacgctaacggacgacctaatggaaaaaaatccccgaaggagagaatttaattaaatccattccttcgggggaccgtgccgggtgccgcggggtaagcagtgctggttcgtttcatcacggcaccgaaccttttggctagtcagcaatcgttgcttaacttgccagatcggacgggtgcgcatgattccactgttccaagcaccccaccaaaagcaaaacgatataaccaaaatataaggaaaaattttttaaaaaattttttctccatcttcctttttgatactaaagcatcagagtgctaaaattaagttgtaaataaaatttggtgcgctttagagcactttctgaaaaaaatatttatgaaacaaaaaaatcgattttttcaagtgtccgtttggggtactcaaacatttatggggagcaaaaatccaacgcagaattaaagtacaggctatagggaagctattcccgaaggattcggtctccccataaaatctgggcgcatcggttcggggggactgcccgaaaacccaaaaataaattttttggataaaaattatttaaataaactgactagataatatttaaaataggttatttctcttcctttcagtatccctgcaaagtttgctgcgcttctgatcagtttctgaaaaaaagttaagcctaacatcggttcagggggactgccccgaaaacccaaaaaaaaatttttttgaataaaaattatttaaatgaactgactagataatatttaaaataggttatttctcttcctttcagtatccctgcaaagtttgctgcgcttctgatcagtttctgaaaaaaagttaagcctaaactttttggcctgtttaaaaaggaattaaaaatttttaaaaattttattcatctccctttttgatagaaaaagcatcagagtgcctaaactagcatgtaaataaaatttggtgcgtttcagagcagtttctgtaaaaatacttatgaattaattttgtaaaaaaataaataaacagttaaaaactcagaatttctaaaaaaatttaaaatcaattacaattgtcattttttcaggttaagttagtcctgtaccggggagtatgcttataaaatttggtacgattttattgcttattgaaagagctagaaccgaagaaaattttttttatttaagcctaaactttttggcatgtttaaaaagcaaattaaaaattttattcatctcccctttttgatagtaaaagcatcagagtgcctaaactagcatgtaaaataaaatttggatgcgtttcaaagcattttctgaaaaatatttatgaattaaattttgcacaaataataaacagttaaaaactcaaaatttctaaaaaaattaaaaccaattacaatttgtctttttttcgggttaattagtcctgtacccggggagtatgccctataaaattttggacgattttatttgcttattgaaa

SEQ ID NO: 38918 - DNA, 1316 bp, Heterodera glycines
tgccctcaggcgagaatacaaaatatttttagtcaattatttaattaattaattgaatttttgcaagtgacgcgatggcatttcaattgtatgtatggcatttggtcacgacataaatcgctacattttttttgcgcagaaaatgccgaaaaattttgtattttcacgacatatggcaatttataatacgtttagatctcaacgattaatttcttttatttatttttcggctttctacaataaaatggacgcgatcaagaaatacgcgatcaaaaaattccatgatttgggtaagatttttaagaaaaaaataaattttcaaaaaaaaatttaagttaaaactgcaaagagcccacaattgccgaccacactgcccatggaaaagttggtttggccaattggaaaaaattttcttaaaaaattgggccagcccatcatggcaaattcagacagattggcgctatatacgattttaggcgcccaaacaatgactaactcagtttcttgggcaataacatttttcttactttattaaatacctacattcttggtataaaacgaaagctgaaagtctcgggaatttattaatacaagaaaagagcaaaaattggcattatgcaaaaaatacactgagaaagaaacaagaaaatcagcttttttcaagtataattattaattaaaaattaattttttgttttttttttgctttttacttttagcccagaatttattttttgcaaaaacttccatagaatttaagctttcgtttggtaccaagaatgtgtgggccttgatcaagtaagaaaataattatgcgatttactggtgctcagattttctcaggttccaatatttttggctggcacccaaattttctgcccgcttccccaaaaaattggcccaaaatttttagccctgcatcactgcaatctaagttggccagattcttatttttgcttttaatccagaattaatttttacaaaaactataaatttcaatgccatcatcatgaagtaggcattattgaccaatcaaggaaaaaattatgctatttctggtgctcagatttccctaagtttggccagatttaattggtctcataaaaatcttttatccccccccccctttaaaaaattgtcccaaattttccaagatatatggaattgttggacgaaatgtacaggatgagcattgactatgccgaggatggtcgagatgatgagaaggcgttcatattgaacatcagatattgcaggcaagtttatcggcaaaaaaaatggaaaaaaatatatattaaaaatggaaattttttctc

SEQ ID NO: 38919 - DNA, 898 bp, Heterodera glycines
ttcacttgtccccctatttttgggttgcctctgatggggctggttctgatgataccaagtgataattgatgtgataatgataattatgtgcctatttcaacaattttttctgatcgatgatcaatcggtcattcgcttcccccgtccgcgttccctacaaaattcgtctctattttctattttctgttacactttcaacatgtgtctattttatacattctgctttgctcttccctttaattatagattatcaattagttcattaattatctcgctaattggtcttccttcaatcattaggctgttactttgtgcctttgggcccgtttgattgattgcttttgaagttgccgattccacgcccactccccctacataattagtgttaatctcttttattcgctcgtttccttttccgttcattttacgtttttattcgtccctttttcaaattgtctcctctgtatttttcaaatcatttctttaattagtcccgtgactcctcttttattttaactgacgtcaactgtctgtcttttttttctgtctttaaattgccctaataaattaattaccctattaaatttcgttgtccttgaatttcctttctttccctctgcctttgcttggctttgttttgttcccccaaattcttaatccccacaaaatcagttcgaccgtcgccatcatcagatggatggatgtccttttctcagtttgcattgatttatttattggcttcccccccccccccccccctcttcgcttatcatttaaaaactcgttttctgttccattattttttgtgctgccattgtcgagagttggctaatggccgccgacccgagagtgggaaatttggggggaacagcagcacatgctgaggatgatgctgggg

SEQ ID NO: 38920 - DNA, 1256 bp, Heterodera glycines
ccccctcgccacagcgtactttggtcggccgccgacaaaatggcggcggcgattgccgacgggaacaaacgaataatgacggcaaagagacagccgaaggtgggggagggaggggggaggaggaggctaatgagctcagagttcgttttttgagtttgtttttgattcatacagcaaagaaacagcgtctttcccatgctctctggttctttcccattctttgtttttttaaagtttcgtaattttcagcgcttttttgcatttttaaaatgggatttcattttgtgtttaaaaaaaaatatttccgttactcactctgttgttgctggccatccaccgtttggccacttctttgcccatgttcagcgagttcattggcataaattgctacgataaatgaataatgatgatatcaaaaaggtgctgccatcgcgtgattatgctgtttgatctgctgctattgtgtgccgggtgatgggaaaagaaaaagcaatcattcgccgatcgatcgatgaacgcacggaccaacgaattgactgacctttgagaatcgattagtggggcaaaaagggggggggggcaagagcaagagggcatgactaattgacgaaaatgagggaggacaaatcgattcaattacgtcgcgagatccccatatcccctcctcttctcccccgctaatgggatattataataaaattgaaattggaaatatgtatgtaattaaaacagaaaagggcgcccggggggtcattttgctcagcttaaatttccaattccaaataaaggaaaacaaacaaattggcgagaattgtgcgaataaaacacacactccgccccattttatagtgctagcagtagcagtagaaaagaacctcggaggggaatcaataagtaaaaaaagggacagagaatgacgggaaagggggcgcgaaatgcaaagtgacaaaggcattttgcgattaattgggtcattaagcaacaattaccgacccttctcaattaaatctcgaaaaacaaacatttatatttttactctttagaggtcacaaaggtaattttatgttttttgaaaaacggcaaaatatggacataacgcaaaaaccaattttcaatttcaccaagctaatctttataaaaccatgttaaaattattttttggaattttctgagtcaatcgcatgaattcttaagcatttttcgcctaaaatgtgaaaatgaatttcttaaactaaacacgaattaaacagtaatta

SEQ ID NO: 38921 - DNA, 888 bp, Heterodera glycines
ccgcaaaaaaaaattgttaaaaatctgatttttgatcccgaatgcactgaaatttacgatttgcttatttcctccccaaaattgttaaaaatgatcatgggaggtgaaaaatataatatttgatacattttttatcgaataaattgtaaaaataactgttttaatgcaattttgcaaaatgttctgattttcgaccctaaaatctgattttttgggcctgatgttctgatttggaaaaattttcgatggaagccctgaattaaagaccaaatatgtatatttctaaggaatatgcaaattctgttaaatcttccgatcattcagatacagcccgggggcatgtgaactatttttaagtttcacgcgccgaggtcaaaatccgatagaaccggaaattaattcccggaatccgagttctgttccctcgagttcgaattagccgggaaaaattgtttggcgatttgcccggcctccagaaccggtccaaaaaccatcaaatttgaacggtcattttttcggaggcccaccgtgtcccattcggggcaccaaaagtcgcttatcaggaacccggaccggtccggtaaagaacaagtatttgtcgttttttacgggctttcttcggctaatcatccgatgcatgtattagggttttgtggcattcagtgtgaacttacaaattagttcaatttagcccggtaaaaaatcagcgtttgacctcggacaatacaggtacaggcatttttcaaaatgccaagccttaattttatcggaacagttttttgtcaatggtaattaatgaaactcaattttcagaaaaagaacggacaggaaatggtgtgaaatcaatcatatcatcataatatgatacaaaaaagtgtgctttttgat

SEQ ID NO: 38922 - DNA, 910 bp, Heterodera glycines
ttcgtctgacaatgagcaattcactgaaactttgctgctttttccgcttccgaatggcgaccttttcacgctgttcaatttcactgtttttgcacaccaagaacatgaaaattcaggtttttgaattcaagaatttatacattttccgggggacttttttgtttacgtcgaatcaaaatttctagagctcgacattttaaaaagaaacaaaatgcctctggattatattttttttaccagaaaatatattagacctggatttcctggaccaaaattcatgaaaagttaggtccagaaaaaatccaggctttccatgtcctggacccggattttttttttcatttttggcctagattcttgtccaaattcgggattttgtcaaaatggatgtcagatttgtaattagcgaccacaaaaacacccgtttaccaactttttatgacaaaaaaattttcaaaaccaaaaaaggacccctagtgtttttaataatttatctaaaaatctaatttttttttacaattttcaggtgctaatgccacaaggcatcggcctattcttgtcccaagtcttctccaacatttggccaaccaatttggcatcacggatttgcatctgtccattgcgcaaggcttttggcggccaagaatttggggcgcacaaatgccgtgcacagaagtgcccagtggcaacgaattaattgccaaatttgacacatgccaagtggctaattgcaggcaatatctataaatgccagaaaaaatttttattataaaattaaaaattcggcgatccggggttttaaaggtcgctaatcacgaatctgacatgtattttgactaatttctaatccctaacccgaaccgaataacaatcgaaattttgaatttttaaattatgattttttgttcaa

SEQ ID NO: 38923 - DNA, 892 bp, Heterodera glycines
tgtataatcccatccctaataatgtaaattgtcctatctccttcagatccaagcccgtcataaaaactttcgctgcctgttcttctcatcccaagcttaatcctttctctctgatttctcgtgccatttctatcccattcacctctgttgtaaatgccatccattttgtttttgccgtaattatctctaatcctatccaaagtccgtccctcctcccatggtgcagtgcgaaggaacaacaaaggcataaggacaacatttcaccctctttccatccttctctccctctctctctcgcttgctttctctttctctctcgctttctctttctctatcgctttctctttctctcctctccctctctctctcgcttgctttctctttctctctcgctttctctttctctatcgctttctctttctctcctctcgctttctctctctctctctttctctcctctccctctctctctcgcttgctttctctttctctctcgctttctctttctctatcgctttctctttctctctctctcgcttgctttctctttctctctcgctttctctttctctttcgctttctcttctctcctctcgctttctctctctctctctctttctctctgtttctctctctctctcgctttctatttctctctctctcgcactctctccctctctctgcctcaattattctgtctatcttttgtctcctctccccatctctggcacgcgcgcctccctgctgccgccaccaaagcgtgcgtcttcaacgccacacgaccgaaactcagacaaattaaatgcccaatttttatgtatggccaatggacgacaattgatcaaactaaaaaataaataaacaatcaagaattgcaccgcattaataagca

SEQ ID NO: 38924 - DNA, 1371 bp, Heterodera glycines
  unsure (1)..(1371): unsure at all n locations
aaaaaaaattatcgtcaaaaaccaatttgactttcgaatatcttggaatgtatttgttttgcaattgtgcgggcgaaaatgataaagaatgagattttgtgggattttatgcaaaaatacccttggtttttccaattttttaacacatattttagcacatatacttgcattttttggtgtttttagcacatatttcagcatttttgagcacatatttattacatatttcaggatttttagcacataaaaatccggtctttagttataagactacaaacgaacttatttgtttgcataactaaaaaaagttttttttttttgcaaaagattcaaaatccaccggaaattactatttaaatcaattttctcacaacttttacattaaaattattttagatttactaaaaataatatttttgaaatgatatgggaatttcttagttgaattacgtaattttacgttggtggtggacgtgcttctaattgcccgtatataaaaaagtgaacagaaatgagaaatttcattataaaatttattatgaataacacaaatattgctaaagccttgttaaataatacaaattatatttttgtaattggaatttaatatttaaaaaaacactctaatttatctttaatataaataaattatagactctcaaatattttatacaaaaattacaatcatttatttttataatggaatttaatattttataaaaatatttttctttttaaattaaaaaaactctaatctataattaattttaaataaatattatgactattaaatatttgattttaattttatctttaatattaaataaagtaatatgacaattaaacataatatgtcacaaaaacacgttccccggagtaccataatacattatcatgaatatttggtttaatttggacaattccgaacccggagcaaaaaaaaagggcgacctttttcaaatccatttttggttcaacaaaccctcttctaaaacccaaatttagctaaaaattaattttaataaatgaatttagcgttaacttttttgattcagtgcaattgagttaaaaattccgtttaacaattttatttattttttttaaacaataattctctcatctatacataattgatgtaaatttaggttaattacacaatgtttcaagaataattaataanttgatttgggcatctacctttggttccgatgttaacctgcatttatcaaattgaattgccattattaaaattattttcattttttattttccggccactttccccatttatcaaagtccaccctgatttccccccatataaaaggggctattctttaaaaaaaggggacttttccttaattttaatttttc

SEQ ID NO: 38925 - DNA, 1267 bp, Heterodera glycines
ctatacgggaagctattcccgaaggattcggtctcccctctatctgggcgcatcggttcggggggactgccccgaacacaaaaaaatcgattttttcaagtgtccgtttggggtactcaaacaattattaaaaatttttagatttttattcatctccctttttgatagtgaaagcatctgagtgcctaaaataacttgtaaataaaatttggtgcgtttcagagcagtttgtgaaaaaatatttatgaattaattttgctaaaaaaataaaatagtgaagctttaaaaattaataaaaaattttaaattcagaattactggagttagcatcatagcagtgcttttccttgtctttttgatgccctcgcaaaatctggtccgcttctgatcagtttataaaaaaaaagttaagcctaaaatctttcgcaaatttaaaaagcaattaaaaatttttagattttttattcatctccctttttgatagtgaaagcatcagagagccttatttaacttttaattaacatttggtgcgtttcagagcacgttctaaaaaatatttatgaattaattttgcaaaataataaataattaatgaaaaagtcagaatttcgaaaaattttaaaaacaacaagcgttggcattttttcaggttaagttagtcctttacaatggagaaggcctgcaaaatttggagagattatatcgattttagcgcgctaggttcgatgaaactttttaaaatatgagcctaaactttttggcctgtttaaaaaggaattaaaaatttttaaaaattttattcatctccctttttgatagaaaaagcatcagagtgcctaaactagcatgtaaataaaatttggtgcgtttcacagcacgttctaaaaaatatttatgaattaattatgcaaaataataaataattaatgaaaaagtcagaatttcgaaaaattttaaaaacaacaagcgttggcattttttcaggttaagttagtcctttacaatggagaaggcctgcaaaatttggagagattatatcgattttagcgcgctaggttcgatgaaactttttaaaatatgagcctaaactttttggcctgtttaaaaaggaattaaaaatttttaaaaattttattcatctccctttttgatagaaaaagcatcagagtgcctaaactagcatgtaaataaaatttggtgcgtttcagaaccctttctgaaaaaaatatttatgaattaattatgcaaaaaacaaataaataatgaa

SEQ ID NO: 38926 - DNA, 1123 bp, Heterodera glycines
gccgcgaagcggccgaatgcttcccacaaaattaaaaaacgggcgcgaaagcgcccggtccccgtgaggtcgatgaattgctaaattacgtcactttctagcgacgcggcgaagccgcgtccctgagcgcgaagcgctttccccacagcaccaaaaaaaaactgttcacaccattgccaactgtgcaccctagtttctactatatatagagaaaaggtgcaactcgtagaaaaaattataagtgcccgtggtttgcccggaggctcatgaaagtgcggcattgcttaagcaactttttgaggcgcatctgggaaaaataaggatttttcggtccggcggccagttgagcgccagcggcgatgaaacggccaaataaaaaaaatcgtcgtggttttcgggctgtaacttttctcagggaaccgggagcggaaaaagtccgctgagagggcacaccccagacatgttggctacaactttgtcactgatcactttttgatcagatcaaatgccgagcctgtagaaattggcgactgaacggcgctcaaaatgccggttttggcttttcgtgaataactcgctgggggttaagcggagcgggttggcgccgcttgagcatttgtgtagtttttaaagctgcatccgatggcgttttcagattttgaaaattttcaaaatttttcgagctaagccccctcgaaaatttttcgtttttgaattttattattttttgccgatttttcccaggaaaacggagaccactttcaagcaaccgtttttcgagctctatcgattggtggcatttttgaaaaaatttcaaaattttccggaaatagaaaaattttccggaattgagctccccatttccgtttgaggcttataactcgtcaggcgttgattttagcggaaatttgtcttagagcttttttgtagagaattttaagctctatctaatgtgctttatctcatgtttttaccatgagtttaaaaaaagttataaaattaattgtgattttgaaactcaaaaccataggggggaccccatggttttgcatttcatgaaaaaattttttgctcctaaattagccaaaatgcatttttatggcataatttgaggtgctgaata

SEQ ID NO: 38927 - DNA, 1128 bp, Heterodera glycines
  unsure (1)..(1128): unsure at all n locations
gggcataaatgtcncctccacggttagcggttacggcacgagcagcctttccgcgtaagcaaccgtggagatagtgagcttgtcgacgggctcaagggcggcacggtcgacggcactctcgaaactctgccaaaacgcgggccattccattggttcgcccgaaaaaacaggaagactgagctgcggcagccgagcagtggctaaaggcgcaggcgcagcaacagccggcaagtttggcacgatttgggcattatttggcaccaatggtggctgattggcatggttggcaacagcagctggctgttgaacattggcaccgccgagaaatgcggcattgttgacgaatggcacggctggcacgggtggattcacaacaacagctggttgctgtcctcccgccgcgatcggctggttgggttcatctgcgagttctgctgctatgtgagccaacatttctcgcgcatcttccaaccactccgtcaagtgccggtcatctcgaataaaggcagtgaaaagcgcttcctccgcctctctcgctgggccttgcagtccgttcatgatggcaccccacgcgtccagctcgacctccatccttgacaggatacgggtgatgtgcccccgttcctgttcaaggttttcggtcgtctcggcattgatcacgggctcgtccagcaaattttcggccgtagtgacatgttgccgaagtcggaacagcgcgggccccaaagccatccggcatcgagctgaagacatctttgtttgctaacggcaccacttgttggctcggacggcaaaggggggcaaaaaatgggaaggcgaaaggcggagagagggcggggtggaaaaagggggggataaattccgaataaataaaagagtttatttaataatataaaataaatatgtcagatgaaaggaaagtgctgaattgaaaccgagtctgcatggtcctgcctagacgtttcttgataccgattataagttattttgcactcaaatcgacagactgactctgacacacatttgcctttgatcgtattgtatctcctgtgtagataatacgaaattcacactcatttatatgcttatgccttttaactcaactaagttcttcttcctcaattccct

SEQ ID NO: 38928 - DNA, 1104 bp, Heterodera glycines
  unsure (1)..(1104): unsure at all n locations
ttgaagtgcattagcaactgattatttgccattgctggccaagcatcagatggaacaactctgaataattatttgtaattagtgaacaaataattatattcaaacaattacatcactaataataacattttttaaagttcggtcgtcattttgaaaaaaaggctgcatttgacatgctgaattcctcgcttgacctctgtacgtacctgcacaggtatttgcttttttcgtaaccaaaaattcacttttatgaattaatttgttcaatatttatgtctccccaatagatataatcccatcctttcaactaatgctttccaaaacccatctttttgggatttgtcatgaaaattcgagcattttgcacctcagatagtatccgaactgctccttgtcgctcaaatccgtggtcgttgccgagtagccaatctgcggaatgcggaacacctggagcagattctgcaccgcaattgttgtggacgacttcgccggcccgacgatggccactacggggctcgacttcttctgacagccggccatttggcagcacgaacattgggtgaccccctcgcgcagaaaggcgatggtctgcagggaaacattttaaatttaaaaaatgtttttccattttaattttggcattttaaaaatgattctgctcttggcagcgaaaacagcggtgacctgctccatggcgattcgttctgtccagcacgagtcgcggatgctaatcccaagccgaaacggcaacactttgttcagctgctgcaccgttagcatggcaatttcggctcgttgaattcctaaaagagccgcccaatattaacagcactgcgatggaaattcgaattttgaatttacaaataccgctaatacacctaccgtactgttcccaaatggcaccgcacccctcggagccggcaatttggcgatgcattgggaanagtgcgccaatttgaatgtctcctggcatntcgcccaccaacattttggcggactgttgcaccgacgttttggtaatacgtcgacacgcgagcatcagcagagtacatgactgtacacatcactactacgtaggcgaagagaataaattatttaaattat

SEQ ID NO: 38929 - DNA, 1091 bp, Heterodera glycines
  unsure (1)..(1091): unsure at all n locations
ggttcccgaatctgcgaggaactacttntttgagaatttctatagattattatttgncatgaatccttcgcttaaattcccatntatcttataaagtcagattaaattaattaccccgatttgttttagaatggtccaaacacgcttgctaatagctttctttcgaaaaagagaggtgaggaaaaataaaggttgcatccaaatgtaaatttttttacatttgaagcatttggatggcttgctgtttacagttggctaagtcttatttgcaagaagcagcacaacttttgtttgggccaatgaccccaaaccattcgaatagcaatcgattgggctgactagactccatatttgcaggaatagcaatggcaggtctatcttaaaggcctgacgagttatgtttcgacaaacatcctgtacaccataaatcgattagcaaatttagtcgaactatataaatttttcaaaaaatgattcatcttttttatggttagcgcatatgtctctagctttatagaaacggttcccgaatctgcgaggaactacttttttgagaatttctatagattattattttgcatgaatccttcgcttaaattcccatttatcttataaagtcagattaaattaattaccccgatttgttttagaattggtccaaacacgcttgctaatagcttttcttttcgaaaagagaggtgaggaaaaataaaggttgcatccaaatgtaaatttttttacattgaagcatttggatggcttgctgtttacagttggctaagtcttatttgcaagaagcagcacaacttttgtttgggccaatgaccccaaaccattcgaatagcaatcgattgggctgactagactccatatttgcaggaatagcaatggcaggtctatcttaaaggcctgacgagttatgtttcgacaaacatcctgtacaccataaatcgattagcaaatttagtcgaactatataaatttttcaaaaaatgattcatctttttatggttagcgcatatgtctctagctttatagaaacggttcccaaatgtgcgaggaactacttttttgagaatttctatagatta

SEQ ID NO: 38930 - DNA, 1323 bp, Heterodera glycines
gaagtcatccaattgtggaccgacgcggacagcgtcaaattgcgcattttctcattcaaaatgcgatcgaaaatgaaacgcgaattgggacggaggaagacgtggaaaaggtaagccaaacgaaccgacgaatgaacccaaaattttgcaaaggtttcatacaaataattatttcgcagcgaagggaaaagaaaaatagtaaaataaggctattttcttaagttcttccgtttggtcgattctctgctggccgaccaattggaaggacagactcagcgcgtgtccctcgtcggtgggtcggaggacggcgaagggctgacgaacggaggggccgacgaccaagaggactttgaggaggagcaggggttggtggccaaactcgtccatttggtacacaacgacgacttggagacgcattttaaggcttgttttagcatttttttaaattgcaatttttcggctaattttagctgactaacaaagtacgaaaggcgttcggtttgggcggaaaggcgcgacttcgttttacgctcccatcgctcattttcgccacccacaaattcgcgttgcgactcgcagaaaatagggaaacggttggataattttcatttgctaattttatttcataaaaaataggaaaattttgacggacggatgggcaaagtattcacattttgtatgaacacaatcaatgcactcagacaacaggcggaaaaccccgaattggcactccgattttaccttaatgtgcggggggggggtcaaaagtgattaaatgcagtaattttatttttagagtgctttggtttctgaccgaattcactttgatcgttcggcagaaataacttatgaattcatctcaaaggtattccaaaataaacgtaaaaacgcattttaaagtccgaaatgaaaaatacatttaggctttttcgttgtatgaagaagagatttccgaaagtcgagaacaagtccaatcgcttacgcttttgatcgccacaattactcaggtggaggggggggggggagacacgttgaaaaacaaccttttcccacccaatcttacaatccgcagtgttttgggtcgagaagcttttaaattctcaattttctttttcataaaataaacgtttcaacaaatgcgcattggttattttggcggatgtttcggattctgtttttgacattttcggcacttccctgtcaattatttattgtgccatttaagattgagcatttgaacgacgagtcccacgagcccctgcgcaacccatgtgccttatatgcgtcaaattgctgaaacgcccgaccaagcgcaatgctctg

SEQ ID NO: 38931 - DNA, 1308 bp, Heterodera glycines
  unsure (1)..(1308): unsure at all n locations
ttaatcattttgctcttattatanaatgttctcaaattcagcgttggcacagacaatcaaaaagggccacggattatttatctgcaagagccgactgttcaccaaatttctcctagtcaattccgcaattttgttatagaaaataccacagatcccgaatggaaaggtgaaaatgtttttttaatttatattttattttaatttgaaattttagcaacaaaaaatgcaaatgaagcatcatcatcttccataaacatcccaattaacattgatagtgacagcgatgatgatgattatgatggtttggacagaagagatgcattaaggacaggaggcccattgcttttggactttttcaccggaaaggcatatcagcaaaacttaagcaggcaaaatcttggagaatattcaaaaagcaatttacttgatatgtcaaatcaaccaaataattcgaatcaaatgattttaccggttgtgagaaatcagccaagcaattctgatcagaccaagcaacggagtgtaaacgatgattccaatatgcttatgcgagtaaatccagctaataatttgccagaagtgatagcttcagtaaccaattctcagcagcttactgaccagaataatcagccgttgacggaaaatccaactgatcagtctgtaagatcaaatcaaaacaatcagcatgaaattcaagaaatattacatttaccaatgaaaaatcaacaaaacaataaaagagcagcagcaccaaattcacgacaagaatttggatttgatctggagaaagtgccaaaagcaaaaaagggtaaaggtttggcagaatggttgggtcatagcatagatcaaaagcagaaaattgctgtcgaaaacacgtctgaacagccaactattactgatcatattaatttatcgtcacagacaacccaattaaacaatttgaataatccaacaaccaatcaaaatgtggttgatttatctgacaaaactttaagtacgaagcaaaccaatgaagtcggtccgttaaactcaatggacaattctgatcatcaaatgatgggaaacgctgttgttcagcaagtcgcatcagatcagtcatgccagtcgacccagactgacaaattgtctgatcaaataacctttacaaaccaatttgacccgaacaatttggaaaataaattcaatcagtccaatttcatcaatttttcattatcagggcaaaatcagacaaataatgataatcactctgaacaatctgaaccagttacancacaaaattanagatgcacaaacacaaatattgccaaagcc

SEQ ID NO: 38932 - DNA, 1656 bp, Heterodera glycines
attttattaaaattactcaatttttagattgttttgtattgtttatttatttaggatcatttttatgaaatgacataatttttttctcaacgccaattgacttcacatcatgaaatatttataactacataaattattaagtcttcttgcagtatttgatgcattcattgtatgtcctaaatatttgtgttttggagaatcaaatttaaaataataattaattattattactcgaaattgttgccatttccgagtgcaccgtaataagtgaacagaaggcaattgtcaatgtctttcttgtagaagtaacgctgtaaattttcagtgcagtgttttcaatttctgtccaaaatttaccggcgtatgcgacccctggaaggcgtatcgtcccgtatcatattcaataccgcagacaatttcttttagggtgttaattttgtaagatatattacaattaatttttgcttaaagcgcgcatcgtttggtctctccccattttcaaaagaaaaaataataattaaaaaattcagttgaaattatgttttccgagtgttttcttggtcatttgatcatgaatcaagcattcacttgtgcaaattctgaaccctggaccgggaccgaacaaaaagtcgaaatttctttttagtttagaattatttaaatgatctttttgttggctttttagtttgtttctttgtatttaatccggacttgagccaaaaaagcgaatttcgatatgaattttcgactttcttcgaatttggatctgatattaagtaatggtcaaaatatagtttcatgaattttgaaaacaattttgcatgatgcgccatttccaaaattatttgtttggcacctttcgacgctggacaacagtttttattgccaacacatgtgtagccgtccgggcatttgtcagtgccggcacattcaatcactcgtgcatcagcgttcaccgctgcgcgaacaccaccagaacactttgctataaaagggcgtttttaaaataaaataaaatatttttttgtgcaactcacggactggcaaaaccattgaatgatgttgtccttcatcgcctgttgaactgccttgtgccgccgactcaaagttggcacatttctgcctgcattgtgccaatgaatcaaatcggttgccattcccgccacagcctaggagaatttggattcgaaaacagtaaaaattattttatattatttgaatcggagcaggacaaaccgttgccaaaaaaaaatataaagaaaatgcaagaaaattgtgataacattttttgaaaacactacatatatcgtatttcttcgattataagccccggggcttctattgttcaacccccctccaaagggggcttatattcgaggggggggggggtccaatcgagggggggcttttattgttcaacccctttccctgtataaattctcaaaatttttggcttttgcataatggtacaatttaaatcttaatctgaaatttttgaattgaaaagatttttcattttttggcccttggaaatttaggcgaatgtttgaaaattcataattcacttctaaatgaatcaattaaagtgcaaaaagcattaaaatagagaaaatctggagcttttatacttttttagaatttctatcttcaaaatga

SEQ ID NO: 38933 - DNA, 999 bp, Heterodera glycines
tgtcctaaaaagagatagccatttttctgagaattaacttcaatttccgcagctcttacggtaatggaaaaaattttgaagaggctctgcggaacagattagcatcggggttacgagatagaatattgtcctaaaaagagatagccatttttctgagaattaattcacaatttccgcagctcttgcggtaatggaaaaaattttgaagaggctctgcggaacagattagcatcggggttacgagatagaaaattgtcctaaaacgagatatccatttttctgagaattaattcacaatttccgcagctcttgcggtaatggaaaaaattttgaagaggctctgcggaacagattagcatcggggttacgagatagaatattgtcctaaaaagagatagccatttttctaagaattaattcacaatttccgcagctcttacggtaatggaaaaaattttgaagaggctctgcggaacagattagcatcggggttacgagatagaaaattgtcctaaaacgagatagccatttttctgagaattaattcacaatttccgcagctcttgcggtaatggaaaaaattttgaagaggctctgcggaacagattagcatcggggttacgagatagaatattgtcctaaaaagagatagccatttttctgagaattaattcacaatttccgcagctcttgcggtaatggaaaaaattttgaagaggctctgcggaacagattagcatcggggttacgagatagaatattgtcctaaaaagagatagccatttttctgagaattaattcacaatttccgcagctcttgcggtaatggaaaaaattttgaagaggctctgcggaacagattagcatcggggttacgagatagaaaatgtcctaaacgagatagccatttttctgagaattaattcacaatttccgcagctcttgcggtaatggaaaaatttttgagaagctctgcggaacagattagcatcgggggta

SEQ ID NO: 38934 - DNA, 1023 bp, Heterodera glycines
catgctatttacttcgggactcaatttatgacgaaaatagggctccaattattttttattttctactaacacttttctagtggatcaatttatagattcaggaaattcattgcatgaattgaaaagtatttatttttattaaaatttgctgcttattttccgtaagaaagtttttgggaggaatttcacaaccttgccataggaaaaactcatatctgactcgtataaaacataactcgaacagtaggtatatttgttgtgcaattttatagtccagccttcgctagggctctcaccgcggtgtattttaggtgtgtctttgatgtatcaaaatttctctcggccgtgttgttgactgaaaaataaaacgaacttaaattattgcaatattgtttagacgaagtcttttgatattattctgacgacttccatgataataaatacttatacaaagtttatctttttatatatttcctcatcccaaacatggatggaaaataggtaataaatcgacaaatatttaaaagttttgccatgctatttaactttcgggactcaatttatgacgaaaatatgggctccaattattttttattttctactaacacttttctagtggatcaatttatagattcaggaaattcattgcatgaattgaaaagtatttatttttattaaaatttgctgcttattttccgtaagaaagtttttgggaggaatttcacaaccttgccataggaaaaactcatatgagactcgtataaaacataactcgaacagtaggtatatttgttgtgcaattttatagtccagccttcgctagggctctcaccgcggtgttttttaggttgtctttgatgtatcaaaatttctctcggccgtgttgttgactgaaaaataaaacgaacttaaattattgcaatattgtttatacgaagtcttttgctattattctgacgacttacatgataataaagacttatacagagtttatctttttatatatttcctcatcccaaacat

SEQ ID NO: 38935 - DNA, 985 bp, Heterodera glycines
tctttttcgatccctcaggactttttttgattttattacttatccaatgggtccgtcaatagcatgcttttcctttttcaggttctccgaaaccgtaactgttttaaaaaaaaaactttggatttttttttggagcagcagcggggatttagttcagtggatcgggaaaatttgttaattgtttgcctgattatttttaatttattttttggcactcgcttttcccccaggcaaatgttttactcctcggcctgacattgacgtgtgcgttgtgcagtttctgcctcgattggagccgctcattcccaccgcttacattgtgcgatttgtgaaatatttctttttacaaaattccatttttttgaaaaatgggcaaattttagcaaaatttttgaaaattttataattttcaaaaaaatgagcgttcaattacttttctgtatttccacataaaatgttgtgtcccttctgtcacaggtggcggacaaagtgttccgtactcttttccactacaaacggcgctttctcggcaaggctgttcagctgctgtacccgcgggcggtggcgttggaaatgggccatcacctgttgacgtgggtgtgcccgcctattttgggtcaaaaattatgaaaaaatttaaatggggaactttctttcgctaagagagttagaaaactctaaaatttcacttttttaatatttttcggagacgccgggacggaacaggacaaattttcactgtggaaaatttttttaattttaaagttcgaaatctttgaaaaccagagtttttttagaagaaaggtttactatgaattagtgtgtttttagatccgctaaaaaaatttaagacttcttttccttggaatttcttcttttttaaaaaaattgtgttgggaccgaaagagttggcccgcaaatgttgtttttggctggtggccgcaaatgtcagggcaccacaaaattttacattttgtgtaggtta

SEQ ID NO: 38936 - DNA, 1089 bp, Heterodera glycines
  unsure (1)..(1089): unsure at all n locations
aaatggatgtcagattcgtgatcagcgaccctgaaaaccccctagaaatgtttataaattgatttaaaaattattttttttatgggctgcaaacgacataagtaccaaatntaatcctagtcataatgaccgggctttacaagggcggcccggtaaaagtccgtctgggctcaagttagcagaattttgcaagaaatgaaaaatttttctttttgaaatactttcattcaacaaatggtaacaacaaaaaaggtgattattcaccgtaaacggtcccacatttctgactggtcttcgtcgtcttctttacgcgtgtccgtattgctcgagaattttgtcgaacagtgccgtctttggctttgcattttcgaccgccttcctcttcagcttcagcactgcctttttcttctcatggaaagcagcgcctctgacctttcgcttcgtctccaatttctctacaacgccttgatactgccaaccaacttcgtgagcgagacggccgactaaattgttaaaataatgagttgaatagtataaggaatataagtttttgtctaacaataagaaatgggggcactactgattatgccattcatactttaatgggaggaggggcgggtgggatcggaaagcttaattaattttgtacaagtgaaagggataattcatatttagctcgggtgctggagaatctgggctccatccaaaaaattatttttctgttacgaaaatagcaaaccggggggttttcgtggcttcttatcacgaatacgatatcagatttgtaaaatcattgattctatcattaattttgaaatcagattttcaaaattttaatcaatttgatcaaaagttgcactctttttcgagtggggcaaccatatatgtatgagcagcactatttattagccaatgatgtgatcaaagacaatcgcacaaataataagcaaaacatttattaccatgcaaataatcaatccataggaacatttgaccatattgacaaatcttgaaaatctatgactttcaaaatcaatgatagaatcaatgaattttgcaaacactgatatcgtattcatgataatgaag

SEQ ID NO: 38937 - DNA, 564 bp, Heterodera glycines
gggattcggtctcccccataattttgggcgcatcggttcggggggactgccccgaaaacaaaaaaaatcgattttttcaagtgtccgtttggggtactcaaacaaatatggggagcaaaaatccaacgcagaattaatgtacaggctatagggaagctattcccgaaggattcggtctccccataaatctgggcgcatcggttcggggggactgccccgaaaacaaaaaaatcgattttttcaagtgtccgtttggggtactcaaacaattatggggagcaaaaatccaacgcagaattaaagtacaggctatagggaagctattccggaaggattcggtctccccataaatctgggcgcatcggttcggggggactgccccgaaaacaaaaaaatcgattttttcaagtgtccgtttggggtactcaaacaattatggggagcaaaaatccaacgcagaattaaagtacaggctatagggaagctactcccgaaggattcgatctccccataaatatgggcgcatcggttcggggggacttaagataaatcaaaaaaatctga

SEQ ID NO: 38938 - DNA, 547 bp, Heterodera glycines
ctagagaccgagccggaccggatccggtaccgggtttttctggatccagcaatccggtccggcgattttgggaaaaatctagattgaccggattaccggattgaccggattatgagagaacggatccggaatctggtcatttttgaaaatgccaatccggtccagtcggcgaatttttgaccggatccggtctggctcggtctcaaccaaaaaaccttcacttttgttcatttttctttgaaaaatatctctttggcataatgtctttaactttaaatggtcaaaatttcaaattttcccctggcggagcctgtcggcaccgccgaggctccaaaatttttttctttttaaaaaattgtacaaaaaagcaaaaaaaaggtctttttggtgaaaatctgttaacaaattgcctcaaattttcaaaatttcccggcggcgcctgccggcaccgccggccccactcccaaatttttttttaataagggcgccacaaaaaataaattattatttttcattaatcacaggttttcaaaaataaaaaacctta

SEQ ID NO: 38939 - DNA, 913 bp, Heterodera glycines
tctttactgactttgttgcgcagacttttccacttgccggctcacacaaacgaagttggcggatggacccctcgacgctgcacaaaagttcgctggaagaaaagcaatgaatggcgcgggaaagcgacggaatgccaaaagcgcacgtgaatttgaacttggagtagggagtgatattctcagcgaatattttgcacgtgtcgtgaaactgttgcagcaagtcgccgattctgatcagctcgacatgccgttggctttggcgcgcgtcgtttagcccaacgccatgcgaacttttggcaacgatcgctttggacaaaaggaaaacaccggcggattgggcggaaggggcggcgccggagggacatgccgaagaggggggccggcggttgtgcaattcgttgaagctgactaaaccgaaggaaaagcaagggacggtgacgcggaagaagcaaagcagtggacaaaccatccaattgaacgaacagttcttgcaggtactccttgctgaccggcggttgcgagttcagtcgctcctcttgcaaaacgaccaccggcaactcgtggtgatcttcgagcggtgccattggctccaccagcagagaacggcgctttacgggctcagaagaggaagaacaaagcggcgtaatgaaacgcggatctgagcggaagtcatttcattgctttaaaagtcggaatggggaggaactaagagcaaatccgatccgaccccgaaaagtgttgagagagagagagaaagcaagagagaaaaagagagagatgaaaagggagagggagagacattggtaaagcattggtcaggaaagacagagacgccgtccggttcaaaccagggatgggccaaaaaaattttttgggaggagggggcaggcggcggcgccggggaaaatttttg

SEQ ID NO: 38940 - DNA, 1130 bp, Heterodera glycines
aattgcaaaaaagtcataatttttgtgatttcttcataatagcttccttacaggtcaaacgttttttttggttttttgtaggtctaatagggcttctgaagggctttagtaatgataccaagattattagatttggtttgtcaaagaaaatagttatagtccaaaaacaaggcctggctccgaaacggcggcgccgaaacgagacccttttccacacatacatacatacaaacactcaactttattatataggattaatcatttttggactaaatcatcgaatattaatagaaattcagatttgattttcacatcacttttttcggagcgctttttcaaaaaacttttgggaaagaaggggtccggtggtgccgataggcgccgccggggaacgggtcgtttcggcgccgccgtttcggcgccgccgattcggcgccgccgtttcggcgccagggtcgtttcggcgccgccgtttcggcgccagggtcgtttcggcgccaaaaatcagaaacgcagaaatagtaaaaaaaattttgttttgtttcaaaaaatgaagtcaataaaataatagtctatattaaatttaatttctccattttcacgttcattttttgtgatcttgcataattttgtcgttaatgtttaggtgaaatgaatcgccaaattgatactaaaaggcaaaagtccaaaatcacgcatgaagggcacctttacacttttgataaagcaagtgcggacgggatgacaaaattttggagatgcgaattcaaggacctgtgcaagggaagaatctggacgaatttggctgatcaattcatacgtttggcgactccgcatacgtgtcctgcaaatgcatcaagcgttgaggtgcaaaaagtcaagacggcaataaaacggcgtgcgctcgccacatatgaaccgccagcagtgatccgttccgaggcacttcaaaatgtgccgtctccagcgggacttttcgttacacagaatagtgcaagacaggtactgttcaattaatgatagacaatacagcgaatgaattgttaagatcgttaaaagggcacgacatgaagtcaatgcaccacctgtggttcctaaaagcgttgaccaactgattgtgccgccggcat

SEQ ID NO: 38941 - DNA, 1145 bp, Heterodera glycines
gaatgtccccaagcacagccaggcccccagggtgcgcctttgccccagggagtgcctgggtcgcctggagtgccaggcatagatgccgatggaggagtccgtgggcagcccggcttgccggggcctccgggagcaccgggcgagccagggcagccgggccaacccggcgaaccgggcccagctgggataatgcagtgagaattataactaataatataagcataaaaacaatgaatattgccatgaaatttagcgaagttgacggaaagccaggaccgccagggccagcgggaccgcctggtctgccgggcacagagggcgcgccagggcagccaggcgccccgggtcaacccggcgggcagggggcagctggcgaaccgggagagccgggcccaccgggcaaaacaggcgccgccggacaacagggaccacagggcaaccagggcacagggtaagcgtggaggaaaacggggtaaaaatttatttttatttaaaaatcattgagagtcgaaatttcggcatttataaagtaatgaaaatttgtcccttctgaagaggcacttgcgaccattgcccgccgccgagaacagcgccgggctattgagttcgaaattagcaaatgtttttggagaggaaaatttgtcggaatttcttacccattttttaaaataaattttgtttatttcaaattgaataaaattttaaaattttttcgtaacacaaacgcaacaaatgtttttgtaccaattcatcacagttttgtggtcatgggttttctcagctattctcgatcacaattttctgttcgccaaagtctgggtttcgcttttccacaaggtaaaggttccgtttttcatcgaaagtaccgtcctcaggtttacaccaaaataatacatcggttccgttaacgcctagaggtaacaacggttctccggttttcacataagatatcggttcggttaccaacaagagataacaacggttctccggttttcccataagacatcggtttcgttatcacccagagataacaacggttccggtcttcacataaaacatcggtttcgttatcacccagaggtaacaacggttccggttttcacaaaagatcggttctgttatcaccccagagttaacatcggttc

SEQ ID NO: 38942 - DNA, 867 bp, Heterodera glycines
ctcagttgggcgccggcacgtttgggcgccagcatgtttttaggtataacttatttcttggtcaaccaaatccaacattgttgatatcattggaaagctctaagtgtcctctattaggctgcaaaatttaaaaaaaatttagtttagattcaaaaaagttatggccagaagaattcaaaaaaccaaattttccaacttttttggccataaattggttcaaaattatgagaaagaaaaaagttatagtggaaaaacatgtgctggcgcccaaccgtgcgcgcccaactgaggagaccgatttttagtgaatattaaaatttttgaaaaaaaatctcgggattttcggtctggagtctagtgaaattttcggttttgaacagcctagttatgatcatgatttggctctagtacagtttatgcgtccaatggtttttatgcgtccaatgcttttttatgcgtccaatcagatatttatgcgtccaatcagttatttatgcgtccaacaaaactaattgaatttctcgagaattttaaccactaaatttcaccttaactcctaaattgtcagcaatcattgacaaattcggctacaaacgagttaatccctggcactgttgcccaatatgtcctgacaataattcaatctacgaaaaagggcgttgcgtaaacgagtctacccatgagttggctattgatcggtacattcgcaacacaactcatatctttatgaccggtagttttgaaacttcacctaatgtaataaacaaaaaccaaataagggattgatgggactacaataggcacctatcttttttttttttggtagcctacagtacccttttggggggcgtgcgccggggggggacg

SEQ ID NO: 38943 - DNA, 728 bp, Heterodera glycines
attttaaattattctttaaattaaaaaacagctatttaaaaaattacatcgctaaatttggaatttttttgccattattttgtcactattttgccatttttttgtcactatttagttaattatttggggttttttgccactaaaaatcacagccctatttataaaatgctaacgattaaataaattgtttaaaaagatgatttttgccgaataaataggtttttctgatttgtaagaaatcaatagagttgtgatttttagcttgtataaaaacatattaatgttaatttatattttatttttaattcgttacgattttatcagaaaaatttcttattttttctcgaaatattaataacaaaaaataattttttctttcttcataaaatgcataataaataaaattgttaactaaaaaaatcatttaaacgatattaattagtttttttttcattaaaacataatcaattacaaaaatgatcttctcatcaatcataaaaaaatatggaaatgttattttattaattttatattttgcttacatataaattcttcacttattctccgaacacattttaattctaaatagtcgtcaaacaaaatagtttcacccttctgacgaaatattttttgcttttgtgccaaaaatgtgaattttttgaaaattgagtttttgactttttgttcgaattcgggtttggagtttgaaatgtgtcgaaatagatgcc

SEQ ID NO: 38944 - DNA, 966 bp, Heterodera glycines
tatcctttttcggatgattatggaattaatttaatttcttctctgatgggtttagaccccggcacctgggaccaaatccttaagtacaaaaatgggtgttttttaaagcaggggcggggtctggaccccggcccctgggaccttatactactatcacactttaataattatctttaatcatattttaattaacgtgttgaaacattttacccgccaattttcttttaattccagttcagaaaatttgatattcagctgcgtcagtaattaacacttttcattcattctgtttacattggaattataaattattataatgaaaattctgtctattgcgtgcctcggctttttgccttttgactaattacatttgcgcaatgacacttatccaatgtcagtaaacgacagtcagctatatctttatctatttcttacttttttgagaattttttcaactaacaaattaaatttgttaatggccacgaaaaagacatttgatgttgcaataatttttacatgtaaaatatacttgggaaaatttttgtgactatatgggacgtaagggaaattgaaaaaccctgatgtcatgacaactcgtacaaaaggcaactcgtataattgcttaggttaggcataggctttaggcttagactaaggcctaagctttcgtttgggcctaggcttaggcttgcatgtgcctcggcttaagctcaaaattatgatttgcgaaatgacgctttgtcatgtgccagtaaatggcaatcgtatggatttactcacaaatagatatttaaataaagttcgaaaaagaagaataaataaatgttgtatttttttatgaccaaagattttttgaaagtttttgttctaaaattaagtagagtatcatatgaatctctgcaagaactataatgcaaataaattaaaaattttggcttttgaaaaaggccttcaaaaattatataa

SEQ ID NO: 38945 - DNA, 1353 bp, Heterodera glycines
  unsure (1)..(1353): unsure at all n locations
gctcgcccatgttccagactttgcaaagcgctggggtggtttcgcatggatcagtgacaggggcatcgaacaccttcaccacgtttgaacaaagcaggttggacagactcaatttcacagttcaaaaaccctatttttgttntagtctgagcgcttcatgcggtacaagggcgacgaactgctgctgaagatcggagaacatcagacattgctcaattctattttcgacagacaaaccggtttcctctgatcaacaattgttaggaatcattaattttattatccggttttgttaaaatattgttacttttaatatttttgataaaataaacctttcaaacacgaattatcaactaaaaattatgtttgattagatttgatcagttgggaataaaagatttttgaatttggcgccttcgtttcaatactcatttttttttataatgatacgcatttttattcaaaatgatgatatatgtacgagtcaagcatttggcgatgtgtgccgtgttgttttttcaccgccacagtcacatgcgcgctctctatggataatcccccttttcttggcggaaatgtgctgcggtaaattcatttgttgtttttttaagagggttataaaataaattaaagctcattttattatcaatattgggggaaggatcgggttgggaagaatgaggggaagaagcacccttaggtaacgcgtattgcgctaatttattcataaaaatggtgggaaggcagaaagcaaatgccctttcgttactttatgcaatgggaataaagattattacaattctacgcgcccgctgttgatttttttaaaattcaaattttggcctcaaaagcggaaaagtaccgattttttgctataacaaatttggaaatgtgtttttttattgtaaccaaaataattgttttttataaatctaaaattgtttttttaatcttggttaaattcatgtcttttgcattttttgtagcattttggcgttttatgtcctttttggcgatttcttatgacttttagtcgtctttttttagattattcgcgatttaaatctgttctcaagcgatgcaaaaaaatgaagggaaatgcatgtagacggtcggttaatcccgactcatcgggaaaagctcgtttcccctctctccgccggttccctgcccccccccccacgctgtgtaaaatcttcagatattttttgtaaaaatttttgaaaaatcttagtaattcaccatagaatatttagaaatcttttttccttgtaatctttctaagattttttcattgaaaaacccaatttccagaaattttttgtccttattttctttgtccatataatgcag

SEQ ID NO: 38946 - DNA, 762 bp, Heterodera glycines
  unsure (1)..(762): unsure at all n locations
cccccccccccctttncccccaaaatccctccaaattcggctcccctcgctctccctctcccgccccctcccgctaaatgcttcttcctccgcttcttcgattgtcccccgccccacggcgatttttgtctgtgctccaagtgcaaagtgcgctcgcgcatcactctctgatcggcgcggagggcactcgccgctttttcttttttttttgtttgccatgcgcgacaattgctcgccttggggcacgcggcaaaaatttcacttttatttatttttgcaaataaaatgtcgttttctaagataatttaaaatatgacgtcacttttgcgccataattcattgccaaccttgaggcgtttgctcactcagctgagctttcttcttttggcactttattcttcgtttgcagaaagccaattgcagggtaataaaattttaaaatttttggaaaaatatttcgccagtaattattgcagtgagaataaaattactttaaatgcatttcaggctttatcaataaaaaaatctacggcaattgaacattccgaaactcgaaaattgaaaactttacaataattttcctttcataacgcgaaatttaaacgatcaattaactaatgacaatgttttagcaagacctccctgtcggccaatttttgtacgttggccgcgcgtcagactgaacagcaaccacgtgagcgcacgcagcgcatcgctgccgctcaacgcatgccgcgacgcgtgcgcggacgaacgcggagc

SEQ ID NO: 38947 - DNA, 928 bp, Heterodera glycines
caaattttatactaagctgtcaaaatttaaagaagttttctttaagtttcgacggggcaggcgtcgctgagaaaattttcttgaaattttaataattttgctccaaaaattttgcaaaatgaggtcgcaatcccgaccacactaactaaagatacggtagcaagaaaatttatggtatccttttcccatagtctgctcagccgagactcaaatgtctcgagactcggctaaccgagacacgtaatttgaggagccgtgagccgaccattgtcctgcaactttaaactccgctgcggggctaatacgttctgcggtcgattgtgggcaaaacgccaatacttttgccattggtgaaagagtgcactcacagagatggcagaggaattattgattcccgctgggaatggacggaatgaatattcacaatgtgcgatgggtgggcggtgtaaggacggacagcgggggaattggaagaaaatggggaggggggcgattttaattatgcaaaaaagttgtatgaaagatttcgactatcttgaattctcattgtatgactattgtgtaattgcttaatcgcaaagcaataacttccaaacatggcaagcttgttgcgattgatactaagctaggggcgtttgatcggcaattaaaaaatgagacctaaaactcagctagtgtcagaatgccggctccgccaaaacgacccacattccaatatttcacatcattttttttacaaaatcactcattcaaatatgagtttcttggttccattcaaaagcttagtatcataaattataaaacaagaagcaaaactgacaataaaacaaaacccacacagagaaaagactacaaatgtagaactaaaaagatgaattgtcttgcaaatgatgtgaaaacaacccactttctggaacttgaaatcttt

SEQ ID NO: 38948 - DNA, 953 bp, Heterodera glycines
gtgccgccggtaaacgcatcgaagggacgcaatggcattgccaagctacacgcataggcatccaactgattggcctttttcaacgacacgcttggaggaagatgcacaccagcggacgaagtgaacagctgaacaaccaattaaaagggcaattagccgacaatttgggcaacctgctgagagaacaattgaggctttgctgctggtgttgtaaagtgccattcagagaacaggtagaattggaggtcttgtagcagtacacgcgcaacggaagcaaaaacgctcgagataattggcgaactgtaaatgagaaaatggtgaaaatctaataacaaattgcactctaatttcaaaattgacgtctatcgcgctgccgggtcccctagttccccaaaattaaaaaaacgtgccgcaacaaagcgtttgaaaaacccaactttgataagttaactgtgatcattcgaaatgggaaggaatggaaataaaaagattttcattgctgagtttccaaacttttctcaagtcgttccttatgcccccccccttaaacctcattccgctgtaccagcagttccatggcctgtcgctccagttcgattcgctcgcgcggcaaccgttccacttcttgctttgcacgctctctgtcgcgttcctccttttctcgctgctcccgcttaatgcgttcaatctgtgtaaaaggcggtctgttttcggcatggagttcgcttggccaacctccagtcgctcccgttcggcccgtccctgctccaaccactgctgctcgcgtctcagtgcctccgcccgctcgagttccaattcgcgccgcttctccaactccgtctcctcgtattggcgacgttcacgctcaatacgctcccattccttcagagaagggaacaaatgaaaggtcacttcacacaagcgaacgaaagaacgcaacgaaacgccaaaaa

SEQ ID NO: 38949 - DNA, 958 bp, Heterodera glycines
cgttttgagtagatagactagaaaaaatgaaaaattttgaaatcatgtttcccactccctttctcccaggggtattattttgtaaagtctttttttcccccaataaacttgtcaaccccccaatttttcgcaccgtgaatgttatttttatcgaatctgaaccgttttgagtagattagactagaaaaaattgaaaattttgaaatcatgtttcccactcccttctcccaggggtattattttgtaaagtctttttttccccaataaacttttcaaaccccatttttcgcaccgtgaatgttatttttatcgaattctgaaccgttttgagtagattagactagaaaaaattgaaaattttgaaatcatgtttcccactcccttctcccaggggtattattttgtaaagtctttttttcaaaataaacttttcaaaccccatttttcgcaccgtgaatgttatttttattgaattctgaaccggtttgagtagattagactagaaaaaattgaaaattttgaaatcatgtttcccactcccttctcccaggggtattattttgtaaagtctttttttccccaataaacttgtcaaaccccatttttcgcaccgtgaatgttatttttattgaattctgaaccgttttgagtagattagactataaaaaattgaaaattttgaaatcatgtttcccactcccttctcccaggggtattattttgtaaagtcttttttccccaataaacttgtcaaaccccatttttcgcaccgtgaatgttatttttattgaattctgaaccggtttgagtagattagactagaaaaaattgaaaattttgaaatcatgtttcccactcccttctcccaggggtattattttgtaaagtcttttttccccaataaacttgtcaaaccccatttttcgcaccgtgaatgttatttttattgaattctgaa

SEQ ID NO: 38950 - DNA, 1265 bp, Heterodera glycines
cgtcgtgctgatgacaaacgactttttgcctccaaatgtgttcacattgtaattgttgtgaactaacagttggtatgtgccggatggcaaaccatcagcgaacatttgagtcctggtcaattttcggcagggcttccgaaaatcaggcagtgcagcggtacgcatccaaatgacaaaatcggcattttgaaacccgctgtttgtcacatttgtgatgtccaaaaggcagaggtccttttgccagttgggcggtcggacggttaactgtcgcaaaagtgaacttttagaacaaattctacaaacggtttgacaaacaatcagttcaattgatttgttttctaacaatttttgtatgctttttaagataggattataaacatgtaatattcccgtcctgaatttatttggtgtctagaaagattcggcggaaaataaccagttaaaaatagaaagttatacggaaaatttgtgacacaattcagcgattgttttgcatggctggccatcacaagtggggtttctgaacttcgactccaaatcgaccggccagacgagcccttcgtgactccatgaaatatttgcataaccattgccattacgcccaagataattgagttggaatgaatctgcgttaaattgtttagcatcaaataaataatgaaaactgaaccattgaataacgaatttgctattgcgccacaaggggcgatcggacgaccgtccggagctttctcgaaaggagtacaatctttggtattctgtagaacaatttaggctattatgagagaaaccgtattatgtattactaaaaaatcaatgcccgataattgctgatcatttctgcttttcatataacgacgatgattttggaagaaattctcgagagcataataaaagtaaacatcgccctgaaattcaaattctgtagtaattaaaatcataaaacgactttgaagtcctcattcagagtgaagttcactgcgcattggccattcgcatggtagtctttgcactcgttggcatcgtttacatattgaacgacatattcctggacttaaaagaagcacataaaattgcacagtaccgtctcaccagattgacttatgcgaagaagaacaattccaattgggatgaacaaaatgcttatactgaaaaccaacggaatgaccgttttagcggtcagaataggctgcctaaattaaagcactaaagagaaaatgataatcaaaaaaccatgcaacgagtctctgttgtagtaacctcgt

SEQ ID NO: 38951 - DNA, 1040 bp, Heterodera glycines
atatctgaaacagcgaattaaataattgaacgagtaaaaaaagaagagtgaaaaagttctgcttttttctttgcgatttatttataaaactcacctttttccaattgaggacacgtttaaacaaaaggcagtggaacagtcgacatgacgaaatcgcatccggaacggcattttcagcagggacaaaaggcataagttcgaacaaaagttcgggcggaaggcacttgagggtcattagtaagcaaaatagaacgcagcaacagaggacaattcggtgtttaggattaattagcaatgagtaattagcatggaaagccgcagcagacactggagaatgtttttggtcttctcggcttggaatttgttgtgtttggctcgttaaagcagagcgaaggccggagagattggcgtagtgtctaccgcactgtctcgcttattctcttctctcaaatatctctcccactctttaagtgcacactatttcattttgtgcttttcttctatgctcttcttctgcgttctcaccagtgcgcggttgttttccttttactctctagaatgttagtttctccgcatgtttcgctttgccctaaatgcctgtctgcattgtctcattttccttgtgactcgcacatgccattctcattttttatgcagtgaccgctgaccaacggatcggggtcacttcgccgcggccatctcaccgcgagaaactcgccgcggggccaactcgccgcggcgctatctcgccgccgtccaactcaccgcggccaactcgtcgcgccttgttttttggccatctcgccgccagaatttttttcgttaaaaagtagtcatatctcaatatttcaattataaaattctgatgtttatttcaaaaagtcattaaataacaaaatcacgggttcataacacaattatttgaaattccccaaagagactcaataatattttgggcatcaaattttcaataagattcaaaattcgcttgtctgtcttccgaaacttatttcgcttcatcgatggttcttcgccgttca

SEQ ID NO: 38952 - DNA, 1059 bp, Heterodera glycines
  unsure (1)..(1059): unsure at all n locations
catcggaggacaaatcgaagccgggacgacagctgcactggacagaaccctgggggaggaagctcatcaattaaacggcaccaacaattagtgagttaatcatttgtaattacagcccaactaacgtcgtctttaactgagcacaaatgttggcatttggcactttcacagttggcatctgctaaattcacgtccaattgttccgctcgactgttgttgctctgtcccttcactttacctccattttcgggcccaatggcaaccgcaacactttggtacggttgtgccaaaaggattggcgctgaatttcgtccgtccgtttcggcaacccctccccatttgtctccccaaattcaccgtttaattgcggcccttccgccgacgaattcccacagcatttgttgaaagagttcaaacagtccgggctgaacctaaacacagtgcgttttgtgctgtgcctttgccaacaactcaaaaccctttgggcgctgcgcatctttcgcccctttgcgacaattcataggccaacaaacaacaatcgcagcactcctccaaacttagctttaccttttgatcaagctttcaacaacctttttggcgcctcctgccaattcgctgatgattacggtagcgcacattttatgccgctgggcatacaatacgccggcttggcacgaagcatcgatcagagccctcaggcaacagattgaagccgaacggacacaggtgggcgttgatcctgcttcaacgcaacattttagcatgggcctatttttgatttatttgcttggcgttttatttggcaaaatggtttgttctgtcaaaatttgacctgcccttaatccgtggcaattgccgtgctcgcgcaaatgacgtgagccgccggcacaacaactcgaaagctcattagaagtgccgaaagaggcggtcagaaaaaagatgatgatcagagaagggaacaaaatngtcggatggtccatttttggataataaaataacatttaatttngagtgaattgtctaattatattgaacaaatgaagcaattgaatgaattac

SEQ ID NO: 38953 - DNA, 823 bp, Heterodera glycines
  unsure (1)..(823): unsure at all n locations
ttttcttaaatatttttagacggaaaattaattttaatggaatatgtaaaatcatccaccgtcatttcttctctcgaaatcggtgaaaatcagcagcagcaactgccgtattcatttgtggcaacatcttttggaaggcgatggcattgctaacactgacaataaagcaataaaaatcatttatttttgaaataaagataagtttcagtccgagtaactattcgaataattaaaatttaattatttaaatatattttttataatgttagtcaaaagtggcttttaattttaaacaattataaaatgcaataacccataaccaacttttcatcatttccgaatttggattctggaacttttgcggtcctttaactcggacaatttaaaattattcactcattcagctgggtttggttcaagggcaggggggggaggctgagggggctaaagccacccccctaaacccaagaaagtaaaaattttcagtagtttttttttaattttaagcaaaaattttggttttagccctccctcctcactctgtcccagtggcccaagtgcggcactctctgcagcattttcggaaacgatcccagcacttcgaaaagctcaacacatttgcgcattttgagaacttcgctgaacggggcgtacttgacaatgtccatgtccatgtcctggtcgaagtcctcctgtgcataaaaacagtgaaatctgatcagaaagaaatacacataaaatctgaatcccttttttggggcattgggtattaatatagagaaaaaattttccgtatgtgnaaacacttgatggtaatatttat

SEQ ID NO: 38954 - DNA, 867 bp, Heterodera glycines
tggttcgattggcgttcctgggcgagaattttcctatttggattcagaggacaaagccaagggggaggaccgatgggagaggcgggaaattgacaaattaaacaaagtgcgaatggggtggggtgggggcggaccaggaagaaacgtcgccgccgaacttaatacgaaaaatattctagaaaaattcaaaaaaaatgttatcaagaaaattcaaggaaattttaaagtttttgggttttttccgaaaattcagcaaatttagtttttattaacacttagattttcaaaaaactaattgtaaaatacttttaagtttttttgaaattttgaaaattttttaatttattttaaatgaaagagcattttagggccaaaaatagaggattttccctggtcttccgagtctgtacgagagagaattagcaataaaacatttcttttattaataatcgcttcattgttcaggccgaacgggaaaagcgacggaagcgcgacctgagacgcatttcggtactcgtcgaattggcctactccaaggacccgcgcgtggcccgttttaaagtcggattctgacgcgtctatgaatatattgcatttacaaattaacaatttctttttaaatcattttcaaaatgtcctttttatattctttaggaggaggacaaacggtcaaaaaatgcgcaaaaagagcggcggcggatggagcgcgaggcgcgcgagcgggcggaggcggacgaacggcgtcgcgcggaggccgaggcgtcgcggaagagcgaagcgcgggcggaggagcaacggagggaagcgcaggtcgagattctaaataacagagaaaatggcgcgacatttgtggactgattactgaca

SEQ ID NO: 38955 - DNA, 1004 bp, Heterodera glycines
tgcctctttagactgatcagagaagagaccaactatcgccgtgatcattcgctggactctgctaaagtgccgtcgtgccttatcagagaagtgccaattgtccgtgtgccgtacccgtcctctggttcatcttccgcaaccatcggcggatgccgagcatttccgtccgcgcttgaaattggcgattatcagccacagcggcgccaacatttgtatgagcggcgagaggaatttttccaccggacggcacaatgccaacagaatggtgcgagcagcacaaaattgagctgggagcagcggacagctgagttggaggtggttactcggatcagtaacagtaattagacatgagggaagcaaagtgattggggaggggtgtcgaagaaagaagtgatcaaggctaaactcggtcaattgagtcattaaatgtgacccgggtgagtgtcaacgagtgattgaactatctaagtgatcaggaaggatgtcgatgagtaatcaaaactaactctttatcattttaatactcaaattgatcatgatccaattacgagacccagagaccaacaccattctcgaccaattagtaaattaagaccaatcttgggatttctgggcaagaattgagactcgaagaccaaaaaattcattctcgagacgagagagactcgagagtttccgtgtatctccaacgatgaacacacatccgttttgctttactcataaaacaagaaatttgaatcttccaattttttaagtctcaaatatcactcaaccaaaacaaacatttccataggtcattcgctccattttcacttccatttgaccattgaaagcacccaaaacatttaggaatggatgcaaactcagccaatttcgttgcggaaattggaacagcacgaaaggatgcggttgatggtggcaggtgggatttgaaatgaacttcgaaatccccccataaattcgttgtattgcgtgcggaatgccaaaaaatttataactgaatg

SEQ ID NO: 38956 - DNA, 893 bp, Heterodera glycines
tggtttgagtaccccaaacggacacttgaaaaaatcgatttttttgttttcggggcagtccccccgaaccgatgcgcccagatttatggggagaccgaatccttcgggaatagcttccctatagcctgtactttaattctgcgttggatttttgctccccataattgtttgagtaccccaaacggacacttgaaaaaatcgatttttttgttttcggggcagtccccccgaaccgatgcgcccagatttatggggagaccgaatccttccggaatagcttccctatagcctgtactttaattctgcgttggatttttgctccccataattgtttgagtaccccaaacggacacttgaaaaaatcgatttttttgttttcggggcagtccccccgaaccgatgcgcccagatttatggggagaccgaatccttccggaatagcttccctatagcctgtactttaattctgcgttggatttttgctccccataattgtttgagtaccccaaacggacacttgaaaaaatcgatttttttgttttcggggcagtccccccgaaccgatgcgcccagatttatggggagaccgaatccttcgggaatagcttccctatagcctgtactttaattctgcgttggatttttgctccccataattgcttgagtaccccaaacggacacttgaaaaaatcgatttatttttgttttcggggcagtccccccgaaccgatgcgcccagatttatggggagaccgaatccttccggaatagcttccctatagcctgtactttaattctgcgttggatttttgctccccataattgttgagtaccccaacggacacttgaaaaatcgattttttgtgtttcggggcagtccccccgaaccgatg

SEQ ID NO: 38957 - DNA, 1441 bp, Heterodera glycines
  unsure (1)..(1441): unsure at all n locations
ttcggcagtatatgagccaaatggagaaaaattcgaaccaggaagagcagctgaagatcggtccctcctgacagcttcgaagtttcctctaccaattcaaaattgtccaattgttctgctgaatgttgtcggaaagtgcagacaagacccgctctcgcattcgttgacgaacgattctcaaactgctgcggcaattcagatagtaactgcgtttaaagacacaattttgtcgccaaatgtttcattagttgtgatttgtttgtactcttatcaaaaagaatcacttcaaactgaattcgaaaagcagagaattgaggtacttgtagtgacagttgatggatatcaagcgcaagaaagtgatttagtaattttggtcacaacaagaacgagtcttcgagatggggcattaagtgagaattcagaatttttgaaggattcgagaagagctacagtagctctaagcagggcaaaaagcggtttatttttgattggggacttcaaaactttaagtgagggtgaggtatggaataagtttttggaaacagcaagtgaggactctcaaattgttggtgaggaatatcttcagatcctacgaaatggtcgatacatgcgtgatcgatattggcaattaattgatggcattggcagagtagtccaggatctacagtggttacaaaagaatgatgaaaattggcgaacgatgcaacagcagagcacttcaagcagcatgtccacatttgagtcgagaaaaagaagagctgacgaacccgaccaagggccgagtgcacgccgaaatgagacatggaggccgcagcagcgtcttggacaattcagcggtgccgtttttgtcagaagtcgcgaaccaacgggtcctcgtggtgcttgctttgtgtgcaaacgtgtcgggcatttggcaaagaactgttggtatgcggatggacaatcagcaggacgtggtcaaccaaggggcaaagggcaatggaaataaataggaatgataaaaagggcggaaatgacgactttatgctttggcaataaatttaaaaaaaaatggatcagggacgatccttttagggaagggagtgataggtgaaaagttcataattcatttttattaattttgattttacattttaaataattttatgcaaaaagctaagaaaatttttgaagtaaattgcgcaaaattaatttatgcaaaaactttgttttaactgggtttcaaatctgagaccagggacggtctaaaaaggggtatgaggtgtaagacataagctaattaacataaattgccgaagcatttaagcacatttcacattcattttaatctcttttcattttcattttaatttatttatttttcccgttagcatcgatccgacactcctcccctttncatttatgtctattaangctgcgatctctccattgatattcactt

SEQ ID NO: 38958 - DNA, 1203 bp, Heterodera glycines
gtaggaaaccttttagatataatgagggcagtttagtataagagttagaaaataaaggtataggaagaccatctacctataatagttttggatcaacacttataaaaagaagatatgttatgcttgataaaagatctagtcagttttttcctttgcctattggtaaaaaagttaatgaatgatttacaaaataattttaacgatataattaatcaagattatacggctttattagaggaaaaacttgatgaaataagtaatcaaaaaaataactatcttaattttataaaaggtttttgatccgatttttcacctaaaataaaaaaaataaataaaaaaaacataatttgcaatttaatttacacacaaagccacagcaatcaagcaaagcaaaaaattttattaagctaaataaatattttatattggtttattttattttattttttgaactaattatatttgaatatgattaatcaatgaataaaagcaaatcaaatttttattttcatacaacttgatcagatcactcctttatggtgatcgagactcgggaaattttcgaaaaaattcctatggttagtaaaattttctgaaaattttgaatatgctcattggaaagagcacaaaattctctaccgaattgccttatgaatgttaaaactacggcttgtatataaagttatacttgggctgaaaattggacaactcaaaaatgatcaatttttgatcattttcctaggaattttttcaaatttttccaaaaagataagctagcatgaattatttcaggtttttaaatgaactttaaggtggtttttcatgtttgagtcaagactttttccgccatttctttgagtcaagtctgatcaagtgaatcaatctcgataatgaataaatcaaataaattttcttgttgggtgtggatgagtcatatattgagggtaataattatacaaaaagaaaaataataagtcgactttaacaagcaaaattttaattttacaaattttgtcactttgagtcaagactttttttcaatcacagtatttaacccaatgaaacaccgtactgatgaggccggtctctttcggttaaatttgcacgtttcgcgaagtgcccatttttgcactgtcgcgattcgcgaagtgcccacttttattgatttttatttttgaacttgtcgcgaaacgacgtagcacc

SEQ ID NO: 38959 - DNA, 1059 bp, Heterodera glycines
taagtaaaaatcgtaaatacgctcaaaaagctcctcaaacaattttagcgcttccaattccttctacaatcgcctttatacatcgcattatgaacgctaaaaattatcagagtgccgaaaatcgcatgtgatttaagcctagcaaaaaatggtgtaagtaaaaatcgtaattacgctcaaaaagcttctcaaacaattttagcgcttccaattccttctacaatcgcctttatacatcccattatgagcgctaaaattatcagagtgccgaaaatcgcatgtgatctacgcctagaaaaaaatggtgtaagtaaaaatcgtaactacgctcaaaaagcttctcaaccaattttagcgcatccaattccttctacaatcgcctttatacatcccattatgaacgctaaaattatcagagtgccgaaaatcgcatgtgatctaagcctagaaaaaaatggtgtaagtaaaaatcgtaattacgctcaaaaagcttctcaaacaattttagcgcatccaattccttctacaatcgcctttatacatcccattatgaacgctaaaattatcagagtgccgaaaatcgcatgtgatctaagcctagcaaaaaatggtgtaagtaaaaatcgtaattacgctcaaaaagctcctcaaacaattttagcgcttccaattccttctacaatcgcctttatacatcccattatgagcgctaaaattatcagagtgccgaaaatcgcatgtgatctaagcctagcaaaaaatggtgtaagtaaaaatcgtaattacgctcaaaaagcttctcaaacaattttagcgcttccaattccttctacaatcgcctttatacatcccattatgagcgctaaaattatcagagtgccgaaaatcgcatgtgatctaagcctagaaaaaaatggtgtaagtaaaaatcgtaattacgctcaaaaagcttctcaaacaattttagcgcttccaattccttctacaatcgcctttatacatcccattatgagcgctaaaattatcagagggccgaaaatcgcatgtgatctacgccta

SEQ ID NO: 38960 - DNA, 730 bp, Heterodera glycines
tcaaaaaaaaattaaaatttttaaaaatgcttaaaaacaggttttagggggttttcggggtcgctaatcacgaatccgacatccatttcgaccaattccgaaccccggacccgaattcgaacaaaaaatcaaaatttcatttttcaccaaaatgcacaaatgcacggaatagtcattggttgatgcaatgcgtctattcaattcaaaatctttggactttgtctatcgcttctgcattttgaacggcttttgtgtccaccagttgctgctgccgtttgtccttttgttttcggggggcggggttgtcgttcaaccatcggctgtcagcaatggtccactcattcccaatcctatcaaagtcccttccccaaaatggccctagaaagattccgaaaccttaacctacccaatttctatgccggtctcgccattcccgacaacgatttttatccatgtcaatagtgtttttcctttcaatgttgttcctactacatgcttttttgtgtgaatctcttatttgctgccattccgtgcatttttggatcgattttgtgcaataaatatgcattttggtgaaaaatgaaattttgattttttgttcgaattcgggtccgggattcggaattggtcgaaatggatgtcggattcgtgattagcgagcccgaaaaccccctaaaacctgtttttaagcatttttaaaaattttaatttttttttgaaaaaggggggg

SEQ ID NO: 38961 - DNA, 480 bp, Heterodera glycines
aattgtaagaaaaaaattgatgaaattttcttcgaaaacaaattttatattgaaaaaatttccaatattttttttattcaaaatatatctattttttaaagataggtaggtacttaaatttacaaattttaagggtcattatttgcttatttgttatttggattccaattttggtttttgtttttcagtttgtccgaatattttgactcaatttgccgtgaggcgcttgaacaacaacaacacaatgccaatgatcgccaacagcacacagcagaagcaacagaagcagaaggaaaaacaaaaagcgacgaatgcccggcgatcaaaaaattgaaaatttcacattttgtcaaataaaattacttttttttgtttgtttttttctttcttgttgttgattttatttgttgaagagagaatttgaaaggctttgcagttcataataattaactccaaaacaggaaaatatgggataaaaaa

SEQ ID NO: 38962 - DNA, 1049 bp, Heterodera glycines
  unsure (1)..(1049): unsure at all n locations
aaatttcaaatttttttaggaaaattttggccgtatcccccccaacttttttcccatcagtaccctaattttattcatattctaaaaattaaaaaaaataaatttttataattcaaatttttgcaacctttacaaaagttacagtaagaaggaatgggggcgggaattcaaaaaaaaccaataacccacctttgtgggtcttcatatgcataacatcccggcaaaccgttcccgatataaaaaatttcagtttgcttctcggccggtttctaaatccgtttcgaaacatttagtaaaataaataaaaaataaatagataaattaaaatatccaaaataaaaattagttaaattaaaagatttanaattttacaaaatatttttcttggctgcngaacacggggaaaagcatttgcttctctcgctcgtcttccgttgtgcatttatggtaagccttgtaaattggcttcgtccataaggtttccaatgccatacaatgcggcaaaacggaactaaaaatgataaataaaagccaatggaaaagaaaaagcggctaatttgtagcacttttaatttgcatatttattttcccaaagtcccggtgctctgagattgataatttaatatccattaaagtaattaccatttgattgccatgttaatagatttagtccaaaaattacatttttacgattttaattgttaaaattgtgtttgaactcccatcgaaaaaaacattaattttgaaaaatgagaagaaaaaataatacttggaggggaactgatccaacgcaaaaataagtaacaaaaccaagaacacaacccgctgaccacgcatatattaacaaatttgaacaaaaaagaacctaaatttataaaaatagaagtttaccaaaggccaacaatcattaggggtgtaaaaaagtctcggtctcgagtctcgaaaatcgagaccgagacttgaaaacccgagaccgagactcgaaaccgagaccaaaaaaacccgagacttttctcgagtcgagaccgagactctcgagcatcactact

SEQ ID NO: 38963 - DNA, 732 bp, Heterodera glycines
gggagggggggcgggtagtacattgcctattccgtcgaacgtccttccctctgctctgcctttgggaggggtgtggaaagcgaccgccgccgatcccgagcggcgcgcgctgcgaagggcacaatgtggcggtaaaatttaccaccacatttgtggccttatactactagcaaatactggcattaaaaaagaaattacaatgagaaaacccggaattcatcatttccttttataatttttttttacaaaagcttctatatcccttaagcttttgtttaataccaagaatatacctaggtgtttaccaagtaagaaaaaagtaatggcctaagaaactgaggatggtcattcatgaaacgcataaaaccgaccagaaccgatgcttttgctaaaggaaacgtccagcgatgtaaatcggtgattttcaaaaaaaaaaaattcatttaggcaaaattattttttaatggcatcgcccgtcgcaaaaaagaaaaagttttcctccgccgaccaccgccaaatgaataatcgaattttgaggaaaatgtgagaatttttgggttaagaatttatgaatttcatttaaagcctctcagtatatttttctcgcatttcagttggatttgttccgatgtttggatggacattttccccctttttgaccgtcctcaactcggcctcaaattggcactcctttcaccacgtttcgatgttttagtggacacgcattttgat

SEQ ID NO: 38964 - DNA, 1042 bp, Heterodera glycines
  unsure (1)..(1042): unsure at all n locations
atttaaaaaattattacacaaaaattaaatttctaaactaatatttttaattgattcttgttttccttttatattaacgtttccttttcttgtgttcacaaaatttctgtttaaatttcgtgaattaaataaaaaagccaatttttttttacctttttcactgaattgctttttccatcgccctaatgtatattttgaaatgcccaaaatatcgctcatttgatttccagttattctcggattttcctctttaattctatagaatttctctattatttcaattttttccaaattcgtgtaaattcgcatttctagaaaaaaagatatttttgttttttttaataattcacttaattccctccaataattattttgtttatttaaaatgatttaattaaattaattattataatgattataatttattaaaaaggggatttgaagctttatttttatttgccttaaatttcaaaaacttatttaattttgaataaaaaaaacttacttttcttctgtacattttcacatttgttcttggaatcattcccataaaattggtttttccaatttgttagggttcgtcccgtcacatttagaattttcccaattttttctttgtccaattcggggtgtttctttttaattttttcatacaatttcagcaattcttttttctcggcgtcattataacatttaactgacaaattttgggatattcgcattaatgactccgaaattctcggaacatttaattacaaaaaatcatgaaaattaactatttcgaaacaaaatccaccccccgtccattacaagtggccaaaattactcttttttgaaaaaatgatcatttaatataaaatcagggttttcagtttctccagccgagcctaggatcgtcacttgngctagtcagggattatggaagcgtttttgacacagtaattatgnngttttatgccccataaacccagngaccgtccctgagtcagtgaactaaaattgtgatacttttgatagcataaaaccccccggggggtttttt

SEQ ID NO: 38965 - DNA, 1032 bp, Heterodera glycines
  unsure (1)..(1032): unsure at all n locations
caagtgttcgtttggggtactcaaacaattatggggagcaaaaatcccaacgcagaattaaagtacagnctatagggaagctactcccgaaggattcggtctccccatatatctgggcgcatcggtcgggggggactgccccgaaaacaaaaaaatcgattttttcaagtgtccgtttggggtactcaaacaattatggggagcaaaaatccaacgcagaattaaagtacaggctatagggaagctattccggaaggattcggtctccccataaatctgggcgcatcggttcggggggactgccccgaaaacaaaaaaatcgattttttcaagtgtccgtttggggtactcaaacaattatggggagcaaaaatccaacgcagaattaaagtacaggctatagggaagctactccagaaggattcggtctccccataaatctgggcgcatcggttcggggggactgccccgaaaacaaaaaaatcgattttttcaagtgtccgtttggggtactcaaacaattatggggagcaaaaatccaacgcagaattaaagtacaggctatagggaagctattccggaaggattcggtctccccataaatctgggcgcatcggttcggggggactgccccgaaaacaaaaaaatcgattttttcaagtgtccgtttggggtactcaaacaattatggggagcaaaaatccaacgcagaattaaagtacaggctatagggaagctattccggaaggattcggtctccccataaatctgggcgcatcggttcggggggactgccccgaaaacaaaaaaatcgattttttcaagtgtccgtttggggtactcaaacaattatgtggagcaaaaatccaacgcagaattaaagtacaggctatagggaagttactcccgaaggattcggtctccccacgatcagtcacaacaaaaagggaactccaagatttatgctcaaaacacaagagctctcagtcacaaacgataaccaaaatacgcctcactcactactggaggtat

SEQ ID NO: 38966 - DNA, 936 bp, Heterodera glycines
agaaagaaaatccagaaaaattagggtcgtcgctactattccgaaaatgtggttggaattcatttgagtgttgagcagaaaaagagatagacgttttttcaaaattttcagagccaaactcgcccagaaagaaaatccagaaaaattagggtcgtcgctactattccgaaaatgtggttggaattcatgtgagtgttgagcagaaaaagagatagacgttttttcaaaattttcagagccaaactcgcccagaaagaaaatccagaaaaattagggtcgtcgctattattccgaaaatgtggttggagttcatttgagtgttgagcagaaaaagagatagacgttttttcaaaattttcagagccaaactcgcccagaaagaaaatccagaaaaattagggtcgtcgctattattccgaaaatgtggttggagttcatttgagtgttgagcagaaaaagagatagacgtttttccaaaattttcagagccaaactcgcccagaaagaaaatccagaaaaattagggtcgcgttccgaaaatgtggtaggaattcatttgagctattattccgtaaatggggttggaattgtctagagtgttgagcagaaaaagagataggcgtttttccaaaattttcacaatcaaactcgcccagaaagaaattccggaaaaattagggttggcgctattattccgtaaatggggttggaattgtctagagtgttgagcagaaaaagagataggcgtttttccaaaattttcacaatcaaactcgcccagaaagaaattccggaaaaattagggttggcgctatcattccgtaaatggggttggaattgtctagagtgttgagcagaaaaagagataggcgtttttccaaaattttcacaatcaaactcgcccagaaagaaattccgttccggaaaaattagggt

SEQ ID NO: 38967 - DNA, 444 bp, Heterodera glycines
attatatggaaatccatatttttttcctggactgtgggaggcctgaaacgcacgaaaaacatgtttttagcttggtttgaagcttctaggaagaatttctatatccatattttccatatttttccatatttcgcgatttatgtccatatttccatatttttccatattttggcattttggtccatattttggcatttttcaaaaaaacctctattagaacggcccccagcagctaaattagcctttttgagcccaaaacccgaaaaatttttcaaaaaatcattttttcgccaaaatttctcgagaatattgaataagtttaaattttcttaaaaattaataaattatgtcaaaaataagcaaaaaagcgaaaatttcgcttttgttgttgattttgcgctaaaaaaattaatacattttagcttttatgttttttttctttta

SEQ ID NO: 38968 - DNA, 743 bp, Heterodera glycines
tttgttcctaagcggaattggtgttgccaagacttcgttaacggtaggaattgcacaatccttacagtaatccgcatcctttaccatctcagctttgattttttccaacgccttacggtacttttgagtggttctttttgctttggtgccattaccttgtgatttacctaaatgaaaatttttgaatgaatcaaatgtagaaaaacatgcaccaaaatttttatttatttttattaatttttatccgtttagtttggcgtatggtgcttaaatttgtaaattaaatttttaatgggttttgaaggaatttttgttaaattttatctttcttatgtcaattttagacactacttcttgtcattcttaataatccatagaaaaaataaattattcattaattgaatatttaatggacaaatatattttttaattttaaaaaatctttagaatcaaattacgctccaatgctctgctcattttaaatgccttgaccagtttctgcactttttcataattttctttattagcaaaattttgcgtaattttttcaaattcactaaggttttcctcttcaggtataatgttaaaatgtttgtatgctttcaacaatatgatttttatctccgaaatgttgtcgttcgaactcgagagaaatgatggcttcaacgccaaattctccaaaaggcctaaaaaatttttaaattttcggctttttcaaattaaaaaaaaaatatatatatata

SEQ ID NO: 38969 - DNA, 1336 bp, Heterodera glycines
  unsure (1)..(1336): unsure at all n locations
tgacataattgtctggtgatgacataatgtctgaggtgcaaattcggacagggagagatgtcaaattttggaaaaatagcggaaaatcgatgattacatgaaaatttgtttaaaatatttttgcctgatagtttttacaaaaaaattgcgtttttttaaaccaataattgcattcattgtgtcggtggacacagctgcncaattttggcctcncagttcaaaaagtaaatgcatgtgtggcgaagtggtttttgtaagatagtaaagggacaaagggtggggttcgagtccgttgtgcaacatgaatatttttatttatttttgtcaaaaaaaattgaaaaattactatttttgaaaattatttttgaaggtttttgccaaccaaattggtcaatcttggtatcattcgaaagctcttgatgcggagaaggtttttctgctaaacaaatactaagcgatttgacaatttagaaaatagataaaggcgtttgaaattttgttttttgaataactcatgaactaacagataaaatcaaaaaataacagaagaatcgatgcagaaaatttttctctatcggtatgcaaaatttgaagcctatttaacatcaggaaaaagaaatttaaacatcacgaagtaaattcggtttttctctacttcgggatcaatgtgatcaatttctatcaaatccgtattaatgaataatatatatcaattatatctaatactaatttaaatattacataaaaaacattttagaaataaatgatgtttcaagctcaacgtttctcatttgttctacgtttagtccgcttttcggcttcatttgcactttgatgcaacgccaatgcctttcatcagcagaaaaaataattattaatttaaaattaatttattttttaccattatttgacggcgaaaacattgtgaaggaatcgctttggtcattaccatcaaatctgatcgaaaattgacgtcgattcaacccgacattgatgcttaattagtaatgttaaatcagctaattaatactaattaagtaattcttaacatttatttggtagttttttttattacttactaattttataatgaatgataatattaatttcttattattttcatgaataaacatttgagaggtaaatgatgtttcaagctcaaagtttctcatttgttctccgtttgggccacttttcggcttcgtttgcactttgatgccacgccaatgtcttccaccagcagaaatgccatcttttcccattttttcagagcattctttggcaattttgttgtcctatttaattaattgattaccaatgcctaaaataaattcat

SEQ ID NO: 38970 - DNA, 862 bp, Heterodera glycines
atcttagctaatttttatgttttaatatcattgaaatactattttatactaaacttagagtttactaaaccaacattcgaaaagttgagttccatcgtgaaatgacaagtttaatgagaactatataaacttaatttattcacatttccataaaaattttaaatttaaatttgttaattcattatatttacgcataactagtgtggtagattatgttatacaactcactcgacatgacatattcatatttacaatagaagaaatctaaagggttatttatccatattttattattaaagtcggttttttaatctatatttacaacttataaattttccctatctaaggctgttcattaaattataatagtttttgaacatttattaaattactggttttggagcagccacaacattacataaattggtacttattcaggtttctttaaaatttatttttagataccatgggtattttgttgagaaattttgccaatctatttttttcgtctcttcttcgacataaaattccatttttgctgaaacattttttgtcaagtccatcaacttaactacaatcttattttttttattatttataatgacctcaatttttttcctgaaataaattccagcccaaccgccggaagtgatccatggctcaaattgaataaaggaaaaattttaattttgaaaataaattctaaaaaagtaataattgttaatttgggtattatttatttacggttttaaaattataaaattatttttttattatttatgtttttttttgttttaattaatatattgttaattttaatttataatttgtcctcaagttttatttaaaattaaattttatt

SEQ ID NO: 38971 - DNA, 949 bp, Heterodera glycines
aaatccaacgcagaattaaagtacagactaaagggaagctattcccgaaggattcggtctccccataaatctgggcgcatcggttcagggggactgctccgaaaacaaaaaaatcgattttttcaagtgtccgtttggggtactcaaacaattatggggagcaaaaatccaacgcagaattaaagtacaggctatagggaagctattcccgaaggattcggtctccccataaatctgggcgcatcggtttggggggactgccccgaaaacaaaaaaatcgattttttcaagtgtccgtttggggtactcaaacaattatggggagcaaaaatccaacgcagaattaaagtacaggctatagggaagctattaccgaaggattcggtctccccataaatctggacgcatcggttcggggggactgccccgaaaacaaaaaaatcgattttttcaagtgtccgtttggggtactcaaacaattatggggagcaaaaatccaacgcagaattaaagtacaggctatagggaagctattccggaaggattcggtctccccataaatctgggcgcatcggttcggggggactgccccgaaaacaaaaaaatcgattttttcaagtgtccgtttggggtactcaaacaattatggggagcaaaaatccaacgcagaattaaagtacaggctatagggaagctactcccgaaggattcggtctccccatatatctgggcgcatcggttcggtgggactgccccgaaaacaaaaaaatcgattttttcaagtgtccgtttggggtactcaaacaattatggggagcaaaaatccaacgcagaattaaagtacaggctatagggaagctattccggaaagattcgggctcaccataaatctgggcgcatcggattcggtgggactgccccgaaaaaaaaaaaatctattttttcaagt

SEQ ID NO: 38972 - DNA, 1243 bp, Heterodera glycines
cgattcgtttctgtcccttcgattgttccgctgttaaatatttcatttggcgcctttttgccaggaaatgttttttggcgaccgaatgaagcgaatggcgcggggagaaaaatccccggggaaaagccaaagggaggaaaagcggagaaagaagcagaagcggcgaaggataaaaatgaagcaattggctgataaaaaataaaagaaatccgttggcctttattttatttaacaaattatccaaatgataaatgaatggatgacgtcatcgcatcgtccgtttcaatgaaccaattatctcttcaattggtaattaatttgactaatgaacttccatcttttccatttgagcacattgttccttcaaaatggccacgatttgtgccgtgtccgcccttcgctcgcacaaattggccaatgtttttgcatatttcataacgtacggactcttttgggtaattagttagttaattagcttttaaataattcccttttttacctttgagaaattaaaacaaattttgttgaaagtgtgcatcaccttaacaattaacaatgttcaaattgttcatttccttctctttccccccacttcgttatggcattccgtttgcgttattctgtcgcccccaaaagattcgttttgtccgttttttggcattatttcgtccaatgccttcccaattctctccatttgcgtgtccacataagcccgtttctaatcattttccaattaattgttaattattattaattccaatttccaacttcggccatcgccattttgtccctttgcgattgttccgtcagaattccaatgtcccgcgacggatacattttgaaatttgccggtgaattctgccaaataattccctcactttttgtcctttccctccctttttttactttattttttccatctgttttttgtccattttttgacttcgttttgccttggaattccgacaatctctccgtcattattcgcacatttccgaaccatttgacgtgactttgatcggtcaatcgtttaaccgaattgaattgttcggcgattgtttcgttgcgcagaaataactgtggcaaacaattaagttaagaaattttaagcaaaaatatttacaattttctattaaaaaacaaaaaaatttcggaatttcaatttggttttgttagaaataggtctacaacgagtcaactaataacagttgtggaagattggtacgaggcaataataaatgga

SEQ ID NO: 38973 - DNA, 1012 bp, Heterodera glycines
  unsure (1)..(1012): unsure at all n locations
tgtatacgtcagctgctgaataggggttagagattgcacaaagatgcaaaacatttaaattttttaaaaattccatttggcataatgttttaaattcttagcacttttttaaataataaaactgcaaaaaataatcgtagtaatttacgcgctgcgaccaaaaatgcccaatcccgcttttatcctctcaaaaaagtccggtatccataagaatgaacgagaaaaaaaatttccctaaagcaaaggacgagaaatacaaaaataaaccgtaattcatagattaaaaagaaattctccccaaatttacttgttttcaaacgcttaattcagaaaaagaattgttttgcggttaatttctgttgaccccattcccggcttttgctcaacaacagatggtggatttgtacgagttcaaccggcagcgaccgttgagcagcaacagcaaaagtcggccccaaatgctttcccctcgtgccatcgcacaaaatcaaacagtagcagcagcagcggcatcaggcgccaatgtcggcacaaatgcggcgccggtgcgacgcttttggccctcgtacattgaccaacatgtggcccagctggactttgacgcctccgtgatgatgatgacgagtgccggcgacgagtgccaaaatgacgatgacgaagaagacgacgatgaggaagacgaggatggtggagacgaagatgatgttgtgcaacaggggggaggacgaccacaacaacggctacaaattgggagcggaatggcacgagggggaggaggggcggaagaaacggcacgggacggcaacattttcgagtaatttcggttttatggcactaccaaatttanaatgaactcattttcaattatccggcggtcgtttcggtcattacagtttctgggattntgatcatgnaaanccgtgtttcatggtccaattccaacccccacgatttgggtagtcttgtgataataaatctcaaatgacacttccacaanatgcaaaatccatca

SEQ ID NO: 38974 - DNA, 1126 bp, Heterodera glycines
aaaaaacggattagggtttttattactttggaatgttagggagggtgataaatggtttttgacctttttattcagtctctgttaatacacagctgcgccagagggctaaaaaatattgtggaagaattgagtttggacgaacacatcgacgtcaatttggaggactctgagggcaacacggcactgatacacgccgcgcaagcaggtcggagagagtgggacggacagtgccggcaattagctcaaagggacggaggaattagtcactaattacccttcgcctgtcttaggatacactcaaataattgaactactaattgaccgttttgacaagctcgagattgatcacgtgagttggtatttccaaatcaaataaaatgctttccatcgaattcttttgccaaggtaaacaaattgggccaaacggctctgatcaaagcggccatccaaggccgggccaattgcgcccgaattttgctgtgtgcgggtgagtctaagctgattagccatttagtgacggacctttaaggcgcggaccccaacaaaagggacaatgggcgacaaatgacagctttggaatgggccaaatttgtggggaggacggaatgtgggctagtgatcagagagtttggggagccgaagaggggcgaagacaaacaatcgctgcaaaactcagcccacagcaacttcaagcaggtcgaggggattcggactgattttggggccataaatgacttccaaagtgccgtcaggtcgcctgcgttgccgccatccctttggtgggccttcgcgaagtgtccgccctcgcgcggccccgcgtccgttccgcgcctccaacgcccgtagtgaacattcgaattacgccgccaccgtcgcccttttgccaaaacattgagacggaaggcacagcacaacaattcccattcaaaatgatatcaaagcaaaacaattcgtcaaagaacagacctctcagaactgaagaacgaccgaaaaagttcggtaatgtaaaaaaaaaggagggagagagagagagagagagagtgagagagggggagagagagagagagaaagagggagagagagagagtgagagagggaagagagagagagagaaaaagaaagaggg

SEQ ID NO: 38975 - DNA, 196 bp, Heterodera glycines
tatcatgctcgagagcatttgtatgtgtataaaatttatcaaaaaaagagatagccatttttctgggataacctctaaatataaaaatcctctgtgaaataaaatggcgattgtgcacagccctgcgggtcccttttaaggggttttgagagggataaaatttctcaaaaaaagagatagccatttttctgggata

SEQ ID NO: 38976 - DNA, 1031 bp, Heterodera glycines
ttaagatttttgactcaaaaaactgttatttgagccctaagttctaattttgtcgaattatttttcgatggcacgactttttcacagtttatgcaaaaaataaattaatttaaatcggctggaaaactattggttatagaaagtgatttcaatcacttattactcaaattcatagctaaattttggtacattaaaataaaatatgttttttaaatcattaaaaaatgaatgagcgtcaagcatattgaccatatttatttataatttatttattttaacttaaaaattttagtatgaatattaagtattttgaccaattttagtaatcaatttttaaaagaatttgttttttaatctttaacaattttgccataccgtactttagctggctgcccatttgcctgtgtctttttgctattaattaattaattaattaaaggtaaacatatccaagggatcttgtaattagctaattaattaaggaacagaacattgcgacccaatgtttacaattttttgtttattttcactcccaaacatttttctgagcatccgaatgcaataaacacaatatttcgttgcataaattgtgctgaaacttctctatgatattcacaaatgcatttagcatcaattagctaattcatttatttttgtttaaaattttatttatttatttttaattaaatttaatttattgcaaaaaaatagttgtaatattttaaaatatacggccttttcttggcgaattttagctatttgttgtttaaataacaattttaaaaagtttgccctattttttaattgccaaattcgacatggccactttcaatgtggcccatctcatcactttaattggcgttgtggtacaaaaatataaattaaaatttattcatattttttctaatatttatttttgttttagtcaattgcttcatccgttgttgctgatgagcaacaaaaccaaaacaaaactcaaaatggaggaggaggtttaaagcatttgttgggatcggatggtaaaaatgata

SEQ ID NO: 38977 - DNA, 1095 bp, Heterodera glycines
  unsure (1)..(1095): unsure at all n locations
tgaacagaatgccacatttaacatgaacaaatccagcgccacaatcattcagcgggaaatgcaaaatggtaaagaattgaggcaaggggggggggggggggaattgagacgcagtaagcattcattaaatatgtgccatcgttttcatggcattttttaaacatatataaaaaaacaattaaaaatccaaaaatggcataataaaatccggcaaaattattcaattattttcaaagtcggcgtcgcggataaaaattgcttattaatagatcttcgtccaaaaatcaactgtctttttcttacatagattttttaatttagcgactgaaatgatccgtaattgggcaaatttaacaatttcatgggaagacaaattggacagtttgctgaaaggccaaatatttgaagaaaaggtaattaatattactactcagtgttgtcatggtaaattttcattttttcccccaaaaaactgaaaaaattacagtattccacgctagtactatttcaattacggtatttatttcactaatgatttgctaattatatacattcctccctttacagtatgcccattacattcgcatcatctgtaaatctgcttcactggcagatttttatgatttttgtgggtatgccgagacgcgaattcgtctccaattattgattgacattgaacgctttgatcacatccgattagcccatgggaaacaaattattgcaaatgaacaatccactgaagaaattgagaacgaaaacggcacaaaaaatgagcagaaaaggcaagtgacaattaagaaaatattcgttatatttgcgatggttagttaattggcaattttattttaatttgattatttcttgtcaaaatttatttgactttaattaacaaatattcaattttaagtttattacatttacaatagcagggatctcatatgagagactttagcttatangctgataattagagttcgcaaaaaaggcaccaaaagcgcaaaaaagcactataataggcacaaaaaaatggaaaaaagactttacaaggaccgaaaatccccaaaaaagcatgaaaaaagcatttaaaaatttttt

SEQ ID NO: 38978 - DNA, 1236 bp, Heterodera glycines
  unsure (1)..(1236): unsure at all n locations
gaatctgcgaaaaaaagtataagtgatcagcagacacttaaaccaattattttaaattcactcaaaacccctccaaanaatattccggtgattataatgaggatgactgcccgatcacccatttggcctagcccatcacagagtcacaatttaaaaccccactncttaccgtgttaagggaaagtgcctgcgtttcactggcgacgctcactctgtgaaagggacaatgcattttggagtgatgtgaagggtaaatgtgactatttgtgcactttctgtgtctttccaattctgttccctctccgtcaatcatttccaccctttaccaatggcctaatttcgcacatcttttcttatattcccatccatttttatgcccccttttgaagtcgccctcctcaaatctcaagttccctagatggatcgataacttgacattttgcattgaattttcctcattttttctaataaatttctaaaccctttaagagttaaccgagtcgaattaatttgggtttggacacgacaataaacactcacacgcatcccatcgcaacgagcagatttttcaacacattttccgacatataaaaatcctgtacaatcggagaaattggcaaagtgaattcgggatctaacgataatggggaggggatgatttgtggcagtaaaatatttgaagtaaccgtcgaaaagcagcaaaagacaaagcaattcggccaaaatgcgactccttttctctgctgaaagttcgtagaaaacccttcctttttggttttgcggaattgctaaaattaaaaaaaataaaattatctttatgttcattttcttacataaaaattcctcgcggatatgacaaagcattttcggtggtataaaacttaatgattcgacttccttcaccgaaagcttccgaatttctttaacattgactttgtgaatggtctgaagtattcttaaaattagaaaagagcacaatattcgcacctgcgtcagtttggcaagtgcaacagttttaagggacaaaaaacaacggcgggacggatttccatagcgcaacggatttccaaggcgtttggcaacgacggaagatatgcctaaatcgggggaaaaatcacatcgattcgattcgctttgtcatttgcttacgcacccaaattgaccaatttttgcacactttcgttttgacggaaaaattgcatcgcttcctcttgaagctcgcgcaaatgaacttcg

SEQ ID NO: 38979 - DNA, 986 bp, Heterodera glycines
aaaattggaattctagaaaactttacaatttatctatttttgatataaaaaaaaattagaaaaataattaatttcgaataattgttgaattgttaaaattgagatagatatttgttttttgttttctaacattcatgcaaacgattttatataatatgaaattaaattcatagaaaaggatgaaagagggaacaaatgtcaaaatagagataattagtcatagaggttttagtgtttttaaacattgttttttgaattcaaatttttcgaaagaatcgtttttagtaggggtaaattttcagaaaattcaaaattcgcaaaaaccttaaaatatgtaaaaatgaaaatatcacgatgataatattgattaaaatttcaaccaacttttgctcagtgttgccttgctcaacatttaagtcgtaattttccctaaagttgttaaatggaaatatttattgtacacggaaaacttcacacacacgaagctaattaaaacgaatacaaaaaaaaagagagagagcgatgttcaaaatttagtagtaattagaaagaatggaatgttattcaccaaaaacataaaatacaataaatacacaaaataattaaggcacgaaagacatttacgatctctgacgcttaaggatattattgcgttttggttaagaattttagacaagttttgcgagttctgtgcttttttattattttttaaaatatttttaatgcagttttgattatgagttttgagacaaaataggcatttgggcgtaatgaccggggcggagtcgttatttaaaaaacatcataaagggcgttatttaaaaaaccatcattatgaaaatttttgtcgaaaaattatttataattttgctccaaaacaacaaaatttttaatgatggtttttaaataatgactaagccacctaatgaccctcccccccaccccaaaaaaggcaaaaaccgggattataaaagtcatccaaagaa

SEQ ID NO: 38980 - DNA, 1100 bp, Heterodera glycines
ttgagggcaaaaacgatgctattcataagtgattattatcagaagaatgggaaaaacatttattttataaaagaaaaaaaatctgatgtgcatcttgagacaacaaattttattgagtatatttggaggtggtcttccaaaaactaagcggagaatcggaaagacaaaagatgcaaacgaaggaaatgagaaatgaaccgatgaaagtagactttttaaacaagggggagggatggtctactgatccattttctaatattttccaatctcagcaaaagggaaacattgaaagaatgcaatttgtttgagttacgccatgagtatcaaaaaaaaaaatattaatttgaatttaagttggttgtttttaatcctttttttgtaaattaagcagtgagataaaaaaaagtgtaatacgttttagaacctcataaaatattttttaaatgagttgcagttaaagaacacttaataacggaaagggaaaaaatgcacaactgcactttagtattttaatcaggcccacattcagaaaaaatttcaggaggaggggcaccaacgaaagaatactttttgctccttggatttaattccgcggggataaaaataatttgtttttagcagttttggtgagagaaggacgctcctcctctccttcccccccccccccccgaatatgagcctgactaattataatccaggattaaaaaagagtttttaagtgttaaaggatggatgggcaagtgcaattgaacggagcaaaacagacatttatttacaaatttcgagaaaaagtgaggtaggctctaatgagacagacgggcattcatttagccagacatttgaaggcgaaacaaaaaaattaaaatactctgtcagttccgcgttgtttggcccataacgaacaaaaggcgaaaatctgttggggcgtcgaccttatccggttgtgaatgccaaagtgtctctgaagagttttctcatgaaacttgcaccgcgcgttacattttcagtggatcggagaccttaagaacgaagttgaagcagaaaaagaaagaaagagaaatggaaagctcaccatattcagaatccaacctccaaagata

SEQ ID NO: 38981 - DNA, 1187 bp, Heterodera glycines
ttttttttggattttgccgtgttttttcccttctttgagtcaatgcgaactgagggattagctgagcagtgaagggaataacgaataatatggtgcacaccggcatagggcggtggggggggagggaatcccccgggcgttgtgccgcccgcggtgagcggataatccccgtggcattgccccgctcatccaatgcgagtggcacggctaacaacacctttggcactgagcagtccatggtgaacatctctgctgactggtgattaaggtggtgtcacttttcagtttcgttcactctctaacttcgtctgcttctcttccgtcccctttgcccactcttttcggcttctctctctctctacatttttccattttcattccttcccctggcattccatcgattccatccaaatgccattgccatattctgccatctcatttttcattcgtggcccttccccccccccccccccccctcttctgttggtttccctctcttttttctcttttcccgtgccattgttcatttttccctttcattgtcctcaaaatattcaaagctcaatgataagagcaaaatgctttttccccgcctctttataagttgctttccgtgtcatccgaatgatttggccaaatgctcggagaaggtcattattaagggaaagcaaagtgaatttattcggcaaaatcagtcgagaaaattgcacagaatttattcattcaccgatgacgaactgttattaattcaaacaacttaattgcttctccgacgcttttcaataattaatctctttttgtcaataattcttttttcatttttcatttcatcctttttctctctcgctctcgctctctctctctcctctctctctttcactctcctctctctctcgatctctccacacactcacaactatgaaagcaaatgatcgcttgcttttaaacccacgaaatctttcaaaaagcccgagccacaccacttgaactttttaaagaaaaaatagaaataatggcgggtcggcgtgattgtttctccacatttatccactatttcactcatcccgacataaactgaatgttaaatgccccgtcggcatttttgccggagaaaattttgccaaaagcctaagcggggcggaaggggtggtgcccgctgccccgtggccccgcccgtcagcctcggt

SEQ ID NO: 38982 - DNA, 1522 bp, Heterodera glycines
ccgatcagcggtcacctccttcaccgctgataagcggtcccccctccacaccgccgatcaggcggtcacctccttcaccgctgataagcggtcccccctccacaccgccgatcaggcggtcacctccttcaccgctgataagcggtcccccctccacaccgccgatcaggcggtcacctccttcaccgctgataagcggtccccctccacaccgccgatcaggcggtcacctccttcaccgctgataagcggtcaccctccacaccgccgatcaggcggtcacctccttcaccgctgataagcggtcaccctccacaccgccgatcaggcggtcacctccttcaccgctgataagcggtccccctccacaccgccgatcaggcggtcacctccttcaccactgataaacggtctccgctttacattgccgaaaggcggagttatcacaccgcttatccgcggttttgtattcttattattctatatttagtgctgccatgagcacgaggagcagacagaattcgataaggcggattcggccgaaaaaaaattcgaagtgttgtctgcttctttgtacgacatcaaagaatgtgtcgtctgtagggaagagcgcaaatggtatataattaccttcaagcaagttggaagaaatgtgatcacaacgcgtggggcaaatgtcttcctccttgatgaagacgtttgggaacatgtaaataacgggcaagaaacaattgatttttaatcttaatttagtcgggctttttgttgggaaacctcttggcaacaatttatgctcgggcgctggttcataacatgttggacatttctcgagcccggcaaatgtaattaattactattttttataagttccataagatagaatttatatttagaacaattgtgttgaacaatacgcgccaaggtttcaagattgttgacactgggaacgcagcaacaccgccaccacaacaacaacaacaacatcatcaacaacgacaaacacaaacaccacaacaacaacatcatcaacaacgacaaacacaaacaccaccacaacaacaacatcaacaacgacaaacacaaacaccaccaccacaacaacaacgacaacaccatcaacaaacacaacaacaacaacaacagcaacaacaagaacgacaacaaacacaatctccacaagctcaacaacaacaacagattttgcgtccagtgccattgaatatgtttcaatttcaacctgtaaacgacgatctgttgcccggtacaagtggtacaacaacacacattggtatatatgtggggggagggacctaggggaattcaatttctcgtttcattttaagttcccatggcatttaaaaataattttaaatatttttctaggaaaaatggtctgtttttgatgttcaaattttgcttaaaatcctcaaaaaattttttgggggaacatttaaaatacaccagaccccccaataaaaaactgaaaaaattttttattaatcccatttaccccaaaattttt

SEQ ID NO: 38983 - DNA, 1022 bp, Heterodera glycines
  unsure (1)..(1022): unsure at all n locations
tttaaaaaggaattaaaaatttttaaaaatttattcagtgtccgtttaggggtactcaaacatttatgggggagcaaaaatccaacgcagaattaaagtacaggctatagggaagctattcccgaaggattcggtctccccataaatctgggcgcatcggttcggggggactgccccgaaaacaaaaaaaatcgattttttcaagtgtccgtttggggtactcaaacaattatggggagcaaaaatccaacgcagaattaaagtacaggctatagggaagctattccggaaggattcggtctccccataaatctgggcgcatcggttcggggggactgccccgaaaacaaaaaaatcgattttttcaagtgtccgtttggggtactcaaacaattatggggagcaaaaatccaacgcagaattaaagtacaggctatagggaagctattccggaaggattcggtctccccataaatctgggcgcatcggttcagggggactgccccgaaaacccaaaaaaaaattttttggataaaaattatttaaatgaactgactagataatatttaaaataggttatttctcttcctttcagtattcctgcaaagtttggtgcgcttctgatcagtttctgaaaaaaaagttaagcctaaactttttggcctgtttaaaaaggaattaaaaatttttaaaaattttattcatctccctttttgatagaaaaagcatcagagtgcctaaactaacatgtaaataaaatttggtgcgtttcagaaccctttctgaaaaaatatttaagaattaattttgcaaaaaataaataaaaacgaaagactcagattttcgaaaatttttttgagccagctagctcggcgctcatttcagtgtaagttagtcctttaccggggagtatccctgcaaagttnggtacgcttctgctcattagcaaaaatatgagtgatcgattntcactaaaaaagtaagcctacttttttggcatattaaaagcaactaaaaatttt

SEQ ID NO: 38984 - DNA, 1022 bp, Heterodera glycines
  unsure (1)..(1022): unsure at all n locations
aatttttttttttaaaattatttataaaaatttttttttaaaatattcaaaaaaaaaaatttttaaaaaaacaatttgacgaacaaacattaattattggataaaaaaattattattattttaagtacttttgatgcagcaaaaaatgataaaacgtcaaaatcaccacaaaaaaaatatttgactattttggagctcggcgaaagagattttggaagaagaattatgcaaacttgatcgacgattatcccttgaagagtataaaaaaatgcttaaggatattatggaaccgctagtcaaatttcataaaggtaattactatttgaaaatgctgatcaattaaatttcttaattaatttgcaaaattaacggaattatttttagttgggattcatttggatttcaaattaaagaatttaattgttgttgaaaaaatgatgaaatcaaaacacaagaaaaagaccttatttggaacaaaggaatgtttggaaaaagtcaaggtcaaaacttttaagttgatcgattttgatggtaattttttttaattctatcattttaaataacagtttttagtatttaaaattcataaatataaattaaattatgaaatatatttttatctactcaaattttaagggtccgttttatatttgaacagagaaaaaaagggaaaaattgcttgggatttaatgggctacacagaagccttcagtgcacccgaactgcttcaggttggaagaatttaaaaaatatttacaatttcgataggttttccgtgaaatttttgaaaagttgtaaatgaaaatacctaattcggtaatattagtattttttgcatttcattattaaatacagattgaatttctgctaattatatcgttaataaaataatatttcagaatttatctctattcactgagggcgatattgaggttatttgaaatattaaattttgaattttaaaaaattcttgcaataatttatcaactcttaggtcaacccanaaaatggatgtttggtca

SEQ ID NO: 38985 - DNA, 1282 bp, Heterodera glycines
attaaatgatttagagtaaatttaaagaatttaaaaaaaatttttttttaccattccttcgttttacgtcttcaatctcacagcgcaattccttaaaataaaaataaaaaattcaagaaaaattggccgcttttttttgttgtgaaaaacggatacaaatttcgtcttttcttcctggcgttgtaaattttaaaataacacttaagtaaaaattttggaatttttgggccgtagaaaaaaaaattcatcccctccgaaattttctatggctacggtaccgaaaggagtttttggcctcccccataaccccgctcctgtccatgttcaagtcatactgtaatacccggggtttaaatttgaaaaagcaataaactcacataaaatctgttgttttccgcactttgcatattgtcccaccttaaaatggacaaaaattaatttctgtaagcaaataccaaattaaactacggtataccataattcgggtccaacccaacggactttaattctgaacacttcaacgaatccatcactgccactaaaatgcaaaggatagctccgagtccaaatttaaataatttaattagggcacctccccgaccctcgggagagagaaaagtcggggatcggagaggaaattccccgaaaattttgtctgtcaaaggctggagaaattattaaaaaaatatccgcgagcgttcaattggtgacattcgaatccccgagtcgggaggaacccgaaatttaaattacgtcgcctcattgagcgtgaccatcaaacggaggcgcctcacgggcggaggttcggtaatgcgtgacaaatttttgtagtggaaagacccggtgacgaactgaaatcaggaattcagcatttgttaattgtttaaatttgccattttaaattaatttaaacaaaaaaaaaattaaaatttttaatcatttacaatcaaaaacggacattccgtttgatcagatatctgttcggctcgtgaaagcgtatcgcaggaacacgccgacgagctgttgttgttacacaacaggcgcataaaatcaacagttcaacaacaaatagtagcacaaaattcattgtggaaccgaagctggcaatgtttttgaaaatgtgcttttatggcttaatgaaaatgtacgaaatttcgattttacacattttcagatccccgacttcagaaagctttttaggggcacgaaactccgatttccgaaaggttattctaacaaaaatacacgaaattcatcccaatttgtttttttatatcgacct

SEQ ID NO: 38986 - DNA, 879 bp, Heterodera glycines
agttacacaacaaaaaaaaaattttcagattttttgagtctgagttagggatttagttttttaggctaagaaaatgcctacctaaacattccgaaaatgaggattagatttaaaaaaaaaaaaaaacgtttgtagaaagcaaagactggtcccaaaaatttcgctaacaaataagtaggaattcagtaatactgccaatggcatttcatttttttaattattttttaaaaaaaaatgaaaggaaagagtcttgttttatgaataaaatttcttattttacatccctaaaagctgaaaattatgtcgctattcatcattttttttctcgacttttgtcacatttttgtctttcgagattgttgttacttaaaatcccgtcccctatcaactaataaaaaagaaaacctcataactaagcagctcattcattcacagcaccaaatatgcacaaacggcgacatttccacacttaacatgcgcaatgaatattggtagaacaatcaacacccacaaacagcatttgtgtttgacaacctgaaatagaaaaataagtgaaaatgtcaaacaatcactgaaaagcactacggattcattaaaagtcgcatttatttattattcatttttaaagttttatttattatttattttttttttgaaacgaaaataataacattacgccaaacattctatttattctgccaaaatttaaagcaagtgtctaactataattgcccttcttaaaacttcatattttaatctcggatttcagaccccttcaaaaccaaaagatcaatgctattttaataaattaattaaattctttagtaattttaacatttcatacaaaattttacaaaaaataaataaataaattttttt

SEQ ID NO: 38987 - DNA, 966 bp, Heterodera glycines
  unsure (1)..(966): unsure at all n locations
cagcttgatgcctgaggtcttttggctcaacaaatttgtgctttttagccccatagggcggagggaagggcaattaatgaaaagctttgctcaaccaatcttttttttctctaattagtcatcatccgatgatcaaacgtaaagccgtcgactgtgtgaaaatgcttttgaaattttggatcaaagattcacagcaccgacgggtgggcgattcgtcgatggcaatgacaacgacgacacaaaaaggacgaactttggtggacattcatggccaaaatttaatcactcatcagtcagcagagacggaaacttattttcaaatgttgaaagaagagtggaaatgatgcaaaaaatgaatttatgaattttctaatgatgtgcgggagggaaatgatttgcccgggatgataaatctttatgtacattgtaattacctttaagatatgtgcatatataattaaatagattttaaatgttttgtttcggcaaaagtagcaaacattgaagaagcacggaattccgatttccgaaaatttttggggcctcggaatgccattcctgtcatacagtttttggccataatttgccctgaaaatgccatgcttggtgattccttcgaattgcttcttcgtcttttcttccgactcaatttgtcattccatccgtcacttctgcttttcctgctgttctgctgctgtttttgtcccatttttcatgccttccatcggcggatgaaaatgaaattttaattacatttgcctctcccactggcgactgccaaattatgctctcctttttgngaccttccctttcattttggcgttgtgcatggaattccctctcattttcagtggcttattacccaaaaacattgcgacaaaatttgcattgttttaggcacaaatatccacagtttttcataaaattagataatcttttaaattttgctaattctttgactgacta

SEQ ID NO: 38988 - DNA, 1286 bp, Heterodera glycines
catttaaataatttttatccaaaaaatttttttttgggttttcggggcagtccccctgaaccgatgcgcccagatttatggggagaccgaatccttcgggaatagcttccctatagtctgtactttaattctgcgttggagttttgctccccataaatgtttgagtaccccaaacggacacttgaaaaaatcgatttttttgttttcggggcagtccccccgaaccgatgcgcccagatttatggggagaccgaatccttcgggaatagcttccctatagcctgtactttaattctgcgttggatttttgctccccataattgtttgagtaccccaaacggacacttgaaaaaatcgatttttttgttttcggggcagtccccccgaaccgatgcgcccagatttatggggagaccgaatccttcgggaatagcttccctatagtctgtactttaattctgcgttggatttttgctccccataattgtttgagtaccccaaacggacacttgaaaaaatcgatttttttatttcataaatattttttcagaaaatgctctgaaacgcaccaaattttatttacatgttagtttaggcactctgatgctttttctatcgaaaaagggagatgaataaaatttttctaaaatttttaattgctttttaaacaggccaaaaagtttaggcttaacttttttttcagaaactgatcagaagcgaaccagattttgcgagagcatcaaaaagacaaggaaaagcactgctatgatgctaacaccagtaattctgaatttaaaattttttattaatttttaaagcttcactattttatttttttagcaaaattaattcataaatattttttcagaaactgctctgaaacgcatcaaattttaattacaagttattttaggcactcagatgctttcaatatcaaaaagggagatgaataaaaaatctaaaaatttttaattgctttttaaatatgcgaaaaattttaggcttaacttttttttataaacttatcagaagcgaaccagattttgcgagagcatcaaaaagacaaggaaaagcactgctatgatgctaactccagtaattctgaatttaaaattttttattaatttttaaagcttcactattttatttttttagcaaaattaattcataaatattttttcagaaactgctctgaaacgcaccaaattttatttgcaagttattttaggcactcagatgctttcactatcaaaaagggagatgaataaaaatcaaaaaatttttaa

SEQ ID NO: 38989 - DNA, 483 bp, Heterodera glycines
cccgtcgtcgtccaccacaccttcgcattcccaaaaagcattctctccccccccccattcgtttatgaatgtaatcgctgctttatgtaagtatcttcccccccccccccttcccatctccagccaaacaataaaagaggcaagcgccgctcgggcggatggttgttggaatatgttacgaccgaccgccgaggggggcggggggggggggggaaatccctccttcccctcccccgctttcccatcctttcgagactgactgaggaagggaaggagggtggggtgggaggaatgcagcaatgcgatttatgtattcctttggtctctccgccaccaatttcccgatgatttgatggccggaggggacaaaaaaattaaaattttcaacggttacatccattaaaaaatacaattcgattagcactttatttgtttctccccattccattatttaatcaatctattaattgcttattcctttat

SEQ ID NO: 38990 - DNA, 945 bp, Heterodera glycines
aatccccgacccggactcgaacacaaaaaggtgaaacaattcaaaaaaattcggatttttgattaaaactggttaaacaatgatcggaacggaagccattttggattccgtgattgatcactgataaattacgccccgaaaaccaaccaaaattgccacgactttagaagtgggcaaatgcttactaatacctcgaaatccatggcccctcactccaaataaaaattttttcaattttttacgacttttccctccctctccttcaacagaattgtcgatatgatgggggcaaaggatgcgcaggcggtttttgacaaatttcttgatgcaaaaggccatcaccgacttgacaaatggaacaccacgcttcaggtgagtgggtggcaaaaagcacacgccgtagccccacgccgtttcctctggaaattttttaaaacaaaattttaacaaaaaaattttttaagaaaaaaaatcacagaccataaaaacctctctaactgcactccttagaccgtccccttgtggagcagatcgtttctctccattagccctccccaaatttcaaaaatattttccaacaaatttttcaaaaaaaatcctacagggaaccacccgaaaatttttgaggcccccatagctaaaaaatttcatttttttttaataaaccctccccttttgtgttgtccagtttaaactgcttgatggtgccaccaccagcagcactgaacaacagcatcagcaactgccgaagaaaatgacgacgacggcaccgtcgccgccaccgacgacggcaaaaccaacggttgttgttgttgctgctcgaagggatgccaacacatctctgtgctatgctcgtgatgaactgatgtcgttgaagaataaatgtgagaaaatttgtgtgcattttttagaggaaaatgaaaaaaaaaatttttttcaaaaaaa

SEQ ID NO: 38991 - DNA, 760 bp, Heterodera glycines
ttactatatttctcaaagttgataacacactttcgtactgtattcctcaaaattgactcactttcttagtgtattcctcaaagttggcaacgcgctttcttgctgtattccgacaacacactttcttactatatttctcaaagttgacaacacactttcttactgtattccgacaacacactttcttactatatttctcaaagttgacaacacactttcttactgtattcctcaaagttgacaacacactttcttactgtattcctcaaagttgacaacacactttcttactgtattccgacaacacactttcttactatatttctcaaagttgacaacacactttcttactgtatttctcaaaattgacaacacactttcttactgtattcctcaaagttgacaacacactttcttactgtattcctcaaagttgacaacacactttcttactgtattcctacaacacactttcttactatatttctcaaagttgacaacacactttcttactgtatttctcaaaattgacaacacactttcttactgtatttctcaaaattgacaacacactttcttactgtatttctcaaaattgacaacacacttcttactgtattcctcaaaattgataacacactttcttactatatttctcaaagttgacaacacactttcttactgtatttctcaaaattgacaacacactttctaactgtatttctcaaaattgacaacacactttcttactgtattcctc

SEQ ID NO: 38992 - DNA, 1097 bp, Heterodera glycines
  unsure (1)..(1097): unsure at all n locations
tgaaaatgtcatttttngagcttttttggcgtaactttttttgaaaactgataaaaaaaattaaattctgcaggctaatggaaaacattaagggctatagaatgataccaaaaatatttatttggttaataatgataaaagttattagcaactgtgccgaaagtgttggcgccgaactgggaggttcccctttttgattcggtaatttgaaaaaaagttacgggtcctaaactgcaagcaaaatgttattgccatttcacattttcttggcattatgtttattgacacgtcatcactttcatcgcccataaataccgctctcttccctacttcctcgcttcggacttcattcattctcaattatcatttgcatttcacccccacacatatttatctctctctcttcacctctgacatttattgttattgattgtatttgttgttgttgataaacgacacaacaattataatcatcagtaggaatattctaaaaaaatcgatgctttaccaattcactgctagggaaatttttttgaaaatattcgtaaaagtaactttattaaagatatgcaattatttattaaatatttattcagttgaggttaagctagcgtagcacgccaacacctcggggaagaattctcggggagcagggagcgccaatattggccgattttgcgagaaaattttaacccaaaactgttcatttttgattttgggagacggagaaaattaattagacctaatgaatgatatttgttaataattttacaaattttaataaaaatttctccaattcttctcttctcaacttcgattacgaaactcggcaacgaaaaaaaagaagctcaaatttatgagcagattttcaaaaatggcgcgacctttggagacccgcatttaaataccggacctttagggatccgaaaaatttgggcaccgaaacgaccctttccctggggcccatccctgatataaagcaaaagaattacaaaatttcaggtttggatccgggtgaagtaagtgatttttctgtattatttttatgcttattcaacattcagtttataaatgtttagtatttattaaaaaattta

SEQ ID NO: 38993 - DNA, 825 bp, Heterodera glycines
tttttcgcaaaaatcaacccctgacgagttatgggcctgggactgaaatgtcccgctcaggccaaaaattttttctatttccgggaaaaaatcgaaattttttcaaaaatatcaccaatcgagagagctcgaaaaacggttgcttgaaagtggtctccgttttccccggaaaaatcgttaaaaaatcctaaaattcaaaaacccgaaaacagttttttaggcctagctcgaaaaattttgaaaattttcgaaatttttaaatttggaaaaatcgagcttttcaagctctacaatagtcccgctggcgaccccccgctcagatcaaaccataatgagttattcacccgggactgaactggacaaagttggtactgaaaaagtctacgcacctacagccttccctattataggtagaggcctggaattttttttaaattttagtcaacacttcaacttaggtccctaccagcggaaactttttgattcgggttttaggaaaaaagttatgggccctaaaatgagcgaaaaagtgacaaatcacttcccgggactcagtcgtccgcgctgatttttttcctatagttttcccggatactcctcaaaaagttgtaagacccttccaccaatttcagggcgctcccggccttcggccgggagataatggttttagcaatgaaaccccttgtcattctaacgtatatataattttgttcagtctcttcagttagtcacttacagcaggaaaacactgagatccggcggaaatcaagagacacacactttctttcagactttgacagcattttctccaatttgaatttggca

SEQ ID NO: 38994 - DNA, 1277 bp, Heterodera glycines
atttaaaattcattaaattattaaaaatgttttttttattattccctacaaaattcctccgcgtctttcactctctgtttgattgacgaggacatttttgattggaaatactccggatgccgcgagttgagtatgccgcgaaggcaagacaactcctgctcacgattgatgatcgggtcatccaactgaattttttttttaattttactatttttaatttctaaatatcaaaataaaaaaaatgggggtggggagcggagcaggtctttttcctccccgtcgtttccccccccccccctcgaaaaattaaaaaaaaaaatttcaaacagaaattaatgaacccaccctccgcctttttttgcaaaaaaaaaaacatgaatggtcccacgaacccctccctaacttttatcacacaatttttggcccattttttgtgccctccccctctgtgccacctgttgcaagtccgccttggccactcggctcgcgctggccatcagggcgcgcagcagggcacgtgcctgcatgttcaggaaagtacatttggcactgtccgagcaacgcgcgcgcagcaacgtcaccgcctcctccgccgtgcattggtgcggctgttgttgttgctgtgccgtcgtggcgctcggcaagttggcaccgtggttcaaccgttggaccagccgggcacagtccatcaccagacagtacccatcggactgtgctgcacgtctggccgagcgttcagcagactgtaaaattgtaaaaaatggaaaactgaggggcattcattgtctccctccccgaatctgaaattttaattttttccaaaaaaatggggcaatttttattggatttttttaaaatccagtgaattttgtaatttattttctcataaaaacatgtagtgaattcttcgaaaaaattttggttaataaaaatgttttcaaaccaaaattcggtccaaaattgtccattcctcgagtcgaatggtccacagaattgcaaaaagccaagcgcagaagtcagtgccttttgtgaagaccaccaactcagacaaacagaacagtgcctcataaaactggaaaatttgaaaaattaatgctaaaaagcaagtttttgaatctttaaaaacattttttaaccaataagttttcaatgtttgcaaaagaaaatttttttagttgcgttcagaaatttaattaatttttgactcaaaattcaaaaaaacgaaccctggcctcgagaaaacaaatgccgacaatgtatttcatgagttgacgcag

SEQ ID NO: 38995 - DNA, 463 bp, Heterodera glycines
gggatcccccgggatttcttcgggatcccgcgggattaaattcgggatcccgacctcgggatccgtcccgagcgattttttaaattcatcgggattgatcgggatcgggatttcatcgggatcccgaaccgggatcccttccgaccattttaccaatcccgcgggatcccgcgggattgaagtcacgatcatttttcaaaaaatcaccatttttaaattaagatcttgaattttaaattaaaaaatattgtcatttgctaatttttcttaaaaaatcccttacaaatcccaaaaaattttacaggtctccaaaattccactaaaattttcaaaatttgacgcaaaagttggccgttttgtgacttttgtttcttcataaaaagaattatttttttaatttctaaaacattattctaaatcttattaggtagttttatgtagagaccggacaagtggggggggg

SEQ ID NO: 38996 - DNA, 1010 bp, Heterodera glycines
aaaaaataattaaaaaaaaataatgctggtgtggtaagtgtgaagaactgtgttcctccaggcaaaaattctaagaaattttataagcatttgtagggttctcagcagtttccctgcaaaatttggtgagcttctgatcagtctagaacgttgtgtgataaaatgaaaaaaataatttaaaaaaaataatgctggtgtggtaagtgtgaagaactgtgttcctccaggcaaaaaattctaagaaaatttataagcatttgaagggttctcagcagtttccctgcaaaatttggtgagcttctgatcagtctagaacgttgggtgataaaatgaaaaaaataattaaaaaaaaataatgctggtgtggtaagtgtgaagaactgtgttcctccaggcaaaaaattctaagaaaatttataagcatttgtagggttctcagcagtttccctgcaaaatttggtgagcttctgatcagtctagaacgttgggtgataaaatgaaaaaaataattaaaaaaaataatgctggtgtggtaagtgtgaagaactgtgttcctccaggcaaaaaattctaagaaaatttataagcatttgaagagttctcagcagtttccctgcaaaatttggtgagcttctgatcagtctagaacgttgggtgataaaatgaaaaaaataattaaaaaaaaataatgctggtgtggtaagtgtgaagaactgtgttcctccaggcaaaaaattctaagaaaatttataagcatttgtagggttctcagcagtttccctgcaaaatttggtgagcatctgatcagtctagaacgttgggtgataaatgaaaaaaataattaaaaaaaataatacttgtgtggtattaattcataaatattttttttcagaaaatgctctgaaacgcaccaaattttatttacatgataggttaggcgctctgatgctttttctatcaaaaagccataaaagtaaattctaaaagatttttaattccttttaaacagg

SEQ ID NO: 38997 - DNA, 1563 bp, Heterodera glycines
  unsure (1)..(1563): unsure at all n locations
aattattntaatgtttcanaattccatcgggattcgtcttcattatttnttctgtgtttattnttcgaaatttcttttcatntactggtacgtaacgaagtgtgcctttaagtntaaagtttgtttggccccctgggcattcgacaatgcaattcatgtttatgtcggccatttcaaagggtaaaatatccttttgttcatgtccattttctgaacattttgctaaaaatattggcccattttggcattttatttctgcttctgcttgaccaaattctgtttggcacacataatttagggttccacccgtgccgcaattgtaacagccgctaaaattagttggttttatgttgcattttgttccatctgtgactgttacaatttttataccattaactcttattgctaatttaactggagaatattcagtctcgcttaatatttttttaccttctttgcgaatatttaattttgctgttgtgaaaggtaattttggtgtcattttttctattgttttttcactgcatgcgcattcaacttctcctttttccctattaatccaacattctctgcacacttctttatttaatttgcatgaaaaattttttgcctcatttgggtcatcacatgtcaaatctgtcagaaattcttttccaccataaattatatcattttttgacactatgaaataatcatttaaaattggtgaaattggaggtgttaatccttccggtgtaaatgaaaatttactccatttaactgtaaggccaggaaacatggtcaaatctttagattttgtttcgtttccgattgttaatgttaaactcatttttaattcataatcccatccggtacatctaattaattcccaaattgtgtttgatgttggttctgcgtaagttctataaaagaaacattccgatgatgggagtgcgcatttatgaccccaaattgcgtctccttttttacagaaattgtttcctggaaaattttcataatcttccatttctggaattttttcatccattttaatgtttttacatttactttttgtgcatgagcccattgttggacagcgtctttttgaaataacatttattttatatgaccgtaaccattttaaagtttgttggttacagtgtaatcgtaaaaattgtaaaattaattctaatgaacccattatttttcctttatcatcttttaatgctaatgaaattgttaattcggttgttccactgactctacatacagaaccatttgattgtctttcacagtcttcggaagttgactgaattgatattacttcggcaccactgtgcactaaatcaggcattgtcaaacataaaaatagtaatattacaatgcttccaagtctatatagtcttctgttttttcttttttgaattttttctttttctcttttttcaaattcattaataaacttttctgtatctcatcgttaaattttttgtctaattttgggttcaagacccattttaacgccaaatattgcccataaaaaaaagttttaataatccacccatatttttatgataaacttta

SEQ ID NO: 38998 - DNA, 362 bp, Heterodera glycines
cctttctgaaaaaatatttaagaattaattttgcaaaaaataaataaaaacgaaagactcagattttcgaaaatttttttgagccagctagctcggcgctcatttcagtgtaagttagtcctttaccggggagtatccctgcaaagtttggtacgcttctgctcaattagcaaaaaatatgagtgatcgaattttcactaaaaaagttaagcctacattttttggcatatttaaaaagcaactaaaaaatttttaaaatttaataattttcctgcaccgaaggtactcactcggcctcttcgcggcctcgtggtgggccttcgccgccggaaaattattaaattttaaaaattaaatatacc

SEQ ID NO: 38999 - DNA, 1219 bp, Heterodera glycines
  unsure (1)..(1219): unsure at all n locations
aagcggtggttttgttcaccaccaccaccgcccncaaagaatgaaagaacgcctcaaaaatgcgttcgttttgtcgtcgtccgtttttgttcgccaaagtgacacaaggaaatacaaaaatgtgcaaaaaaaaaaggaaaagatttttaattaaatattattattattattgttagtgatttgattttggggaagggaagtggcgtaaaatttggaaaaaattgggtgggtagaggagtgagttaaaaaaaattaaaataagggttactaaaatgagagtatatatttttttaaatttgattgctaatggtatgggatttttaggaaaaaagaggcaatagggaattttgagaaatttaaagcgagatgctaaaagatcgtaattgttaagcattaatgatccaggatttgagacaaagactcttgagtattaagacaatgtgactaatgagtgaaaaatccaaaatcgaggaccctcattattatgaaaatgaaatttcatcgggacggggtaaaaaaaaaatcaaaaatttacaattggaggctgtttgtaatataaatttagcaaaaaataacgaaaatatttttaaaaatttatttttaagatgaaaaaattagaaaaatcgtatatttatagtctgatgggggtgataaagtaattttcaatttttctgttttttgggtaatttggtaaacataaattaagggagaaaataatcaattgaactacataccataaacttaatctaataataatatgtaatttgaccagtacaaaaaaataatttaattgttttaaaatgcaaatttactattagcaaatttggcataaaaacggtttgaaaaaatattttatttgtttaaaaatataaattcaatttcagtttttataggaatttacatatttaccattggatttaattttaattgccttcggttgactcattaaacaaatgaaaaaattaaaatttaatttacctatgaaatttgttctttgataatcgtcattagttgaatcattaagcaaataaaaaaaatgtttcaataactaaatgaaatcatttagtgatttaatcgcttaaattatccaaaaatatttggggaatttggcgaaaatgtttcaaaattgaggacggttaacgaaatgagaaatggaatcagtccaaaataccgaattgttatgagttaaacaaactcaaaatggcgatgagtcggtaaa

SEQ ID NO: 39000 - DNA, 893 bp, Heterodera glycines
  unsure (1)..(893): unsure at all n locations
ccctctctcatagccaccgcggcacatcgttaagctttagcgtgcttcttaaattctctggagctgcgatcagcccgcaaaaaagctcactaaatttgtattccaaatataattatcaccctctctcatagccaccgcggcacatcgttaagctttagcgtgcttcttaaattctctggagctgcgatcagcccacaaaagaggtcactaaatttgtattccaaatatcattatcaccctctctcatagccaccacggcacatcgttaagctttagcgtgcttcttaaattctctggagctgcgatcagcccgcaaaaaagctcactaaatttgtattccaaatataattatcaccctctctctcatagccaccgcggcacatcgttaagctttagcatgcttcttaaaatctctggagctgcgatcagcccacaaaagaggtcactaaatttgtcttccaaatataattatcaccctctctcatagccaccgcggctcatcgttaagctttaacgtgcttcttaaaatctctggagctgcgatccgcccacaaagaggtcactaaatttgtcttccaaatatcattatcacactctctcatagccaccgcggcacatcgttaagctttagcgtgcttctgaaattctctggagctgcgatcagcccgccaaaaaggtcactaaatttgtattccaactataattatcaccctctctcatagccaccgcggcacatcgttaagctttagtgtgcttcttaattctctggagctgcgatcagccccacaaagaggtcactanatttgtattccaaatataattatcaccctctctcatagccaccgcggcacatcgttaagctttagcatgcttcataaatctctggagctgcg

SEQ ID NO: 39001 - DNA, 475 bp, Heterodera glycines
ccagtgattagaatgctgttgtgttgagtccgattgaaatgttggtgggttgagtcccagtgattggaatgctggtgggttgagtcccagtgattgaaatgttggtgggttgagtcccaatgattgaaatgttggtgggttgtcccagtgattgaaatgtaggagaattgagtgccagtgattggaatgctggtgggttgagtcccagtgattagaatgctgttgggttgagtccgattgaaatgttggtgggttgagtcccagtgattgaaatgttggtgggttgagtcccagtgattgaaatgttggtgggttgtcccagtgattgaaatgtaggagaattgagtgccagtgattggaatgctggtgggttgagtcccagtgattgaaatgctgttgggttgagtcccagtgattgaaatgttggtgggttgagtcccagtgattagaatgctgttgggttgagtaccagtga

SEQ ID NO: 39002 - DNA, 337 bp, Heterodera glycines
cgtagccgcccagtcggcatggcgcgggcgcagcgccgccagcgcggccgagagcgtgcaaccggtgccgtgggtgtggcgggtggcgacgcgcggcgcggtaaagcgctgctcgccttctgcggtaaacagccagtccgggctctcactttcgctcagatggccgcccttcatcagcactgcccggcagcccatcgccaacagcgcccgcccctgctcgcgcatctgcgcttcatcttccgccggcgcgcacgccagcagcgccgccgcttccggcaggttcggcgtaatgatcgacaccagcggcaacagctcgcgccgaatagacgccaccgcc

SEQ ID NO: 39003 - DNA, 1072 bp, Heterodera glycines
  unsure (1)..(1072): unsure at all n locations
atggtcgcttttttcttcactgctttttcgtgctttcttctttatctgtcntcgtttgtttctcatttgccactgtttaaataataattgtcgtttattaaaatntattaaattgtttcttcaattatttatttctttcaatttcattttcatttaaatttctcgccttttcccatttctttccgcttgttcgcttaacgaatttctgttgcacatttgcccgtcacataagcaataattcacaaagccttaaaacattttaaattattatttttgtaatatctttgaattttcaccgtcataagtggcatcacagccaattggcacttcgtcggcactatgcttctccaattcttcagggaattgctggtaaaattggcgcgttgtcacacaacttttttccacaataaatgcatcttaacagaaattagagttaattaattaactaaataatattttttttaattaatttttattgccaattcacccatttaaagatttatcaattcatttgtaactttagcaataattaataaccttttccgttttgcgtttgcctggtcaaacaataggctttctcttcccgaattttatgtccgcagttttgggagtgcgcatttcgacagtccgacacggaattgctaaatagcacaaatatcaaaaacaaaataataaactaaaaaacggattttatagtcaaaaattagaataaaaggtaccaccaaatgtcgacttttatttaaggaatgagctgtaaatattttaaagtctcgggaatttaaaaatacaagaaaagagtaccataaatttaagcttttttaaagtaagaatgagttattccaaaaaactgaggatggtcattggttggatttgttaaaagtgcagcagagcctaataaaaattgactccaattcgacgtccaaacaaacggcgcaattcaaaggttcgctcgttgtggacaaaaagtgctcttccgctgataaatttggcacagattttgtggtcgaatcgaacgaagaagtggaaaaggcagcagaagaagaagaagtgatgagggaagaaggagaagaaa

SEQ ID NO: 39004 - DNA, 304 bp, Heterodera glycines
agctattgataggctctgacggaaaatttggtaaaaaaattacatcatcttaatttaaaaattaatgggaaaatttacggcataagtgggttaaatcaacgaatcaataagaaaatagtaactagattaaagaatagataatccattcatatataagataaaataaatacttataaaaaatttttaaagaaatttttcttttcccaactagacccatctttaggtggtgtatttttacttttcgctttttgggccaaaaaaatgaaattcgaaaaaaacgaaactcccaaaaaaggcgaaaata

SEQ ID NO: 39005 - DNA, 1325 bp, Heterodera glycines
  unsure (1)..(1325): unsure at all n locations
tttcggggaagacaagcacgctgattttgccagtgtagcgcgcgtgcagcnccggacatctaagggcatcacagacctgttattgctcaatttcgtgcggctgaacaccgaaaatccctctaagaagttgtgcccacagaagcaatgagccaactatttagtaggctagagtctcgctcgttatcggaataaaccagacaaatcgctccacgaactaagaacggccatgcaccaccatccaccgaatcatgaaaaagctatcaatctgtcaatccttacggtgtccgggccgggtgagtttccccgtgttgagtcaaattaagccgcaggctccactcctggtggtgcccttccgtcaattcctttaagtttcagctttgcaaccatacttcccccggaaccggaagactttcgtttccgggaagctccccaccagggcgaataaatccgccggcggatcgctagttggcatcgtttacggtcagaactagggcggtatctgatcgccttcgaacctctgactttcgttcttgattaatgaagacattcttgccaaatgctttcgctgtagtccgtcttgctacggtccaagaatttcacctctcacgtagcaatacgaatggccccgtttgtctctgttaaccattatctcggtcagcaaaaccaataaaatcggaccgaaatcctcttctattattccatgcacgaacattcaagcgaaacgcctgtttgaagcactctgatttgttcaaagtaaactcgccagcccaccgacgccgaccggtaaaggccaacgccggggaaagaccggcagaaaagccaaccaaaccagtaacacacaaagtgtgcaccggacggctagcacagatccaactacgagctttttaaccgcagcaataattctatgcattttgagagctggaattaccgcggctgctggcaccagacttgccctctcatagatactcgttaaagggtttaaattgtacccattccgatgaccggcctcataagagatcggtctcgttatttctcgtcactacctcctcgcgttgagagtgggtaatttgcgcgcctgctgccatccttagacgtagtggccatttctcaggccccttctccggagtcgaacccttatcctccgttacccgtcatcaccatggtagtcagatacactaccatcgaaagttgataaggcagacacttgaaagacacgtcgccggtacaagaccgtgcgatcagcttagttgttctgagtcaacactggacgcccggagggcgcttggttttgtggcgaacanaatgcgctccgctctggggagatt

SEQ ID NO: 39006 - DNA, 1060 bp, Heterodera glycines
ctagggatgtgcgagaagtgatttttaccgggaaccgagaaacgagaccgagaccgagaaatgaccccgagaaacgatacgagaaccgagacccaaaaaacccgagaaatttctcgactcgggaatggagaaccaagaaatttaaatgaaattaattcaaatatatatatattttttttaatgatcaatttttacgcttttaacacaattggcgaccatttttacattcaaaaggctttcgagtccggcggtgccggcagaaatcgtcatccttaacagtgtaaaaatttctcggtttccgaaactaaaaacccgagaccgggaagcgaaaaacccgagaaatttcccgagtcgggaaccgagaactcttggacattcctaatcatacacacaaaatgtaccttcgtattgaattttgtaagcagatgggggggggggggggaaagcgagtcaggtcaaaaacttgtatgttattggcttcaaaatataaaatttttttcatatatctgtactcatttcatcatccgagaaagcaaattagcttgagacacgaacaacaggagtcggacggatcccgagaaaaatccgtggggtcccgctacatacatatttacttttgctaattactggtttttacggttcggtggtaaacagaacagatgaacttggaaattaattttatgctaaataggcacaaatgatactttttccccattttattttctctttttttttatcaaatttggccattttaaaaggtttggagagcccttttttcctcaaatttcgaaaaacagttcaaaaaccagttctttggcatttccgctactgcagacctatttttccgtgcttagctcctcgagacgaaccgtgattggtatatcatttagccatttttcttcacggggcgttacctatagtttatctccttcgttatggatatagaaatccacgctagaagcttcaaaccaagctaaaaacatgtttttcatgcgtttcaggcctcccacagtccaggaaaaaaatatggatttccatataattctatgccctactgacg

SEQ ID NO: 39007 - DNA, 920 bp, Heterodera glycines
tttttttttaaattttaaaaaatttttttgaaatttttaaaaatttccccgggtggttcccggttttttcttgcggtccccggttcccggtcccgaaaaaaaaatcgagggtccccggtcccgggtttctcaggtcccaggcaagtccccggtcccgggtttgggcaaaaattccccggtccccgtgccactctaatctttttgtatgcaggatttattttgaatgacctccgaaaaagtctctcgcatgaaaatctcgaacggcttatttttcttcatcataatattatcctttacaattttgattattgataatatgggaattttctaattatgcttttacaaatgtgcgatccgcggcgttttttgcgcgatccgcgatccgcgaccgcggcaaattgaatccgcgatgcgcgatccgcgaccgcgggattttttttgcgcgatccgcgatccgcgaccgcggcaaattgaatccgcgatgcgcgatccgcgaccgcgggatttttctgtgcgcgccccacccctggtgccgataggcgccgccgggggaaattttaaaaatttgggtgcaatttgttaacagattttcaacaaaaaaaggttggtttttgcgattattaagctcaattggtaggattttcatttaaaaaatgataaaatatgtatcaatttaaaaaaaaactatgagtaatcatattttctttataggaaaccacgagtatacaaaacaaaaaattgaaaataatctaatttctgtagagggattgaaccaggggaaagaagaagggaaagtcaaggagactagccattagaccatttgcacacttgggcagtgttacttttaaagaataggtatattaattattattttttatttttccctttgactccaattttcttcactaatttttcactca

SEQ ID NO: 39008 - DNA, 1004 bp, Heterodera glycines
ttttaaagcaaattgcctcggggatttgctaccctaaatatattaacactcccccttttttgcacgaaatttccgacaaaattaaattgcagcaaattttgcgcaagtgtcatagaaacgccgtgccaatttcggccaaaaataaattgcccgcccggtaagaagccccgttcccgtttagtgctgtctttcccgccaaaggttttttgtggcaaaagcttctctagggggtaaagagtggggaaagggatgaagcaattattaaaatgaaatgtgatcagaattggcaccaatttagagcttctggggccactgagtgagcttttcttttccgaaccttctcgaaagctcgcaaagggaaaatcttcaattaacacatttcattttaaaattattagtaataatttatgctgtttatatggcattgtttaatctcggagtttcggtatacgttagaaaatcattttaaaatatgtaaaatttttggaaagaaatttgaaactgagaattattaattccgtgtttaactttctattaatttttggctttggggcttcaattattgtgcccggcatcggaaacgattttttctaaaattttttggatcgcaactcttttttcatgttttaacttcgacataggcttaaacacaaggcaataccatgcctaattatcgataatttcgaaaattaaaatccgtaagttcgtttttgtattaagcacagattttattatggcctatcacaacaacagccagcagcatttgaacccgcctcgcctctgcttccaaaaccgttccctaagtgcccgtgaaagcggtgccgcggaagatgaaggccaccgattcgatgctaccggagtcgacgcattttggcaaagaaccgcaacgccaacaacggcgacgcgtggacggcgccaactgtccgccagcactgatcagttgcttaccggtgagttgcggtgttggaggtctgtgtccatggtgacgaatcacgggggctgat

SEQ ID NO: 39009 - DNA, 868 bp, Heterodera glycines
aaaaattctaaactactgaaaagaaagtgtcacgatccgatcacttgctaatcaaatctctcaactttgtgcaattttgtctagttttgttatagcaaatttagaacaaaaagtttataaaacattttaattttttctgtgttaaattaatcaaaaactaagctcggttggactttggaagtaacaagaaaaaaatgaaattttcttgataattaattcttatctattgcatttatgatcgtattggtttctgagaaaaacagagaaaagtgaaggataattaaaataattaaattttctaacgattgaatatgcttaattaaaagaaatatttttttgaaccaaatcattaactagaataattttttttacattttatgcaatttataaaattaaaattttaaattaaaattatatgctcacaaaaaccataaaataatgttgaagattggaattttataaatttgtgtatcgaattttccggccagcaggcatttgtttagattttattaattttaaattattaattattttttaaagttattaattttttttgttagaataatttaaattaatttaattatttttaaatttaaattttaatttgttttaatttttagttgatccccttaaaaagggataaaatcttggtactttcctgttttggggtcgcatgatgcaacaatattggtaaaatctcgtcaaggttcagcttgagaagggatgttgtgtgaatttgcgcgcctttttgttgattttttaaatttttagtgtgcgacactaaaaacaggaaagtaccgaactctttcataataaaaatatttcgcttaaaatttaattgtttttatcaatttattaatttcatggc

SEQ ID NO: 39010 - DNA, 890 bp, Heterodera glycines
taatttttaaaaaagttgtggggaatggaagatataatcattataaaaaatgtaaaatccgcgcggataggggggggaggtggtgcgctgccatcgtctttttggagatggtccctttaatcgatccacatggaaattgattggaaatatttaattttaaaaaaattgaaatttaaggacagaatcaaaagtaatgaaaaataattaaaaattaaggaatataataaatataaaaaaattgaatttataaaatcttataagaaaagagaaaataacaataattcgaaataattgtttaaatagtttaattagattgaatatttgaaagattgttgtgttcggaacacattatttttgcagttattattttactttaatttttttaatttgaacgtgaataatgatatatttaaaataataagtattagcacgtaatttacaaccatttgtgctactaaatttcaaatttactttatttagagttttttaaggaattaagattttttaaattttaatccctcctatatagactataaaatatttcatttaattgcgatgtaaattatagtgtgtataatatatttcataagccttatttattttggactgccccctacggtggggtgtaaagaatatttctcgctctacttgtttaggctcaagtattttttgaattaatttttctatgtcaattctaacattcgcgagttgattttgatagctatcaaaaaattcttggctttttttcaaaattttctctgctcgttggcaaatcatcaaattttttgtatttagacaattctcaattccgctcattgcaaaggcggtatttttatattcttgtgagattttctgaaaaagaatccagtctttctcgtcccgtttcaaaa

SEQ ID NO: 39011 - DNA, 756 bp, Heterodera glycines
  unsure (1)..(756): unsure at all n locations
tacaattttaaaaatgaataaaagtataaaaaagtgataatttggtggtttggctgactgtaaaacagttatctcccgatgggactcgaacccatggcattgcaattccgttgaatgctttaaagcaactaaactttacaagcattttttttggcccaattcattgattataagagatttttaaatatttttttaaaagctaatatttttaaacctctttacgccgaattttctccgccatttttttggccgacatgaacagaagcggctcctccgcctcgccctctgtccacgtcactttgctctttggccaaaagtgactgatcagcgtgaacacgcgattgatcaatgcataataaagggaagcgatcaaacacagaaccggataaagcgatcggatcactttgtaacgcaacatttcgtttttcacaatttatctgattaagacaatgagtttttaatttatataattaataaattggtcaaggaaattgtcgtaaaacgcccagagtgagtgagaaatttggcatgcctcaaagcaactaataaattttgggttaataggcattaatggngaagtattggattaatagaaccaaaatattttaatgcaattttaatttatttttttgctgttaaaaatgaaaaatattattttcaataataaaatatttgaanatttgtaggttgaaatcaaaaaatagaaaaagtttattggggtgttgaataaaaaaacgaaatttgcctttttaaatc

SEQ ID NO: 39012 - DNA, 1348 bp, Heterodera glycines
atagggaacgtgagctgggtttagaccgtcgtgagacaggttagttttaccctactaaagacctgttgctatgatagtaatcctgcttagtacgagaggaaccgcaggttcagacatttggttcatgtgcttggtcgatagaccaatggtgcgaagctaccatctgagggattatgactgaacgcctctaagtcagaatcccgcctaggcaagatagcaatattcttgctccccggtgtcgggaggcactacttatgcgccgcttgcggtgcagcacaaatgccccagcatctggcccgatgtgcgtgcttaattgctcgcacattgccaaagccgtagcactcgtgtgccatggtggaacgtcggggcgcaaaatcacttgtatacgacttgactactggtcagggggttgttagcagtagagcagcttttacactgcgatctgttgagacttagcctttgatcggatgatttgtcttctttttccccctttactttttgtgccaacaacattttaggtacaagtacatgagaaggaaggctctcttaagggagtcaaatgcctcgttgccaccatgaaattaggtaggataagttcttgactttgcttttttgtccatttattccaatcgcctattgctttaaggttttgtctttgactttgcttttttgtccatttattccaatcgcctagtgctttaaggttttgtctttgacctttttgtccatttattccaatcgcctattgctttaaggttttgtctttgactttgcttttttgtccatttattccaatcgcctattgctttaaggttttgtctttgactttttgtccatttattccaatcgactagtgctttaaggttttgtctttgactttgcttttttgtccatttattccaatcgactagtgctttaaggttttgtctttgactttgcttttttgtccatttattccaatcgaccacgttaattcattctctatacatttagtgtcttatttcatgaaattatatataatttaattttaaataaagaggcaaatttttacagaaaataaatagacgctgactaattagctaacatttataaagaaagtagaaatttgattaaatgcatatacaaaatattacttttttaaaatttgtataaagttcctagtcgtatgtgctttgcgttggttggttggcgtgggtgattgtggtggttggaccgtttttgcgatattgtggctggaaaaaagatgccatttcgctatggggagcgcggccgtctgggttcaagtgcttgcttgcgcttgtgctcggcattgaacggcgatggctgctgctgtggtgccacctttgac

SEQ ID NO: 39013 - DNA, 818 bp, Heterodera glycines
  unsure (1)..(818): unsure at all n locations
gacacattgccacgcagcagccatacacnaggctttaacatgtgcagcactgagcggtataccacagctccaacgtatggaagcaccccaaaagcatggctcgtgaggcagctgccccgtaatgttgggcagcgtccacaagtcagctcgaacgacctgtgcccgtcagcggacgggggcatttggtggtgccaacgctagcccaacaggacagcaggtaggtggtgaataggaatcacttgggtaatgatccagcagcaggttcacctacagctaccttgttacgacttttgcccggttcaagccactgcgattaaatcggttccagtctgcataccgaccgaagccggaacactaaccgtccccgaagtccgatcccaatcacggcaaattttcaccggtttaccaacccctttcggggaaggacaagcacgctgattttgccagtgtagcgcgcgtgcagccccggacatctaagggcatcacagacctgttattgctcaatttcgtgcggctgaacaccgaaaatccctctaagaagttgtgcccacagaagcaatgagccaactatttagtaggctagagtctcgctcgttatcggaataaaccagacaaatcgctccacgaactaagaacggccatgcaccaccatccaccgaatcatgaaaaagctatcaatctgtcaatccttacggtgtccgggccgggtgagtttccccgtgttgagtcaaattaagccgcaggctccactcctggtggtgcccttccgtcaattcctttaagtttcagctttgcaaccatactttccccggaaccgg

SEQ ID NO: 39014 - DNA, 1401 bp, Heterodera glycines
taaaatcccattccaaatgagtaatttccattccttttttgcttttttaaaattccaccatttctagtgtcgcaatacgctcaccgccgagctgcaaattgttgagcaggaaatgctgccaatctgcgaccaaattcgcaccgctttcaaggagtgtttgcgcgtcgactcggagtcgcccccggccgacccgccctgttcatcttcgactccgtttcatcagggtatcgttaaaccgtttttgcattccctatggcattcatgggctctgatatgacaaaaattagtccatttttaccatttcgaacttcggaagaaatgattggtgatatttctgaaattatggcgattcaaatgcgtccttttcagtctcatcactcggccggtccaacagcaggaagcagtacacctcgcagcataacaaccactgcagcagcggcggtggttcggtcggtcgtcacgcgttgcctccgaacaattcgctgccaaaacgacagcaaccgcaccaccacagccaccaccacatgaacaacagcagcagggggacaccgtgcaacagcggcacgggcagtgggaaaagcgcgcgcgtgcgccacgacgcggccgccgcgacagcgacgggacggacggcgaagcgaacggtggcgacgacgaacggaacgcaaccacaacggaatgacaacgcaaacagcacacacaccaacgccacctccaccaccgcatcagcaacaacagcaggcaataacatcgcaaaccacgcgatggacacaatggccggtggggaaagtggcggggagggggggggacaacggtggggaactcgaaaagccaaatttttggctcttcaatccaccaattcttccagtattattttacaaaattacacaccgctggaaaaaactgtatttttggctcacaaaaaagatatttttcaaaataatttgaggattcttttgaaacttgagaatttctcaaaatttggcgccctaagttggcgatggaatgaatgtgcgcttatttcagcaatgtccagcagtaccatcgacatggacttgctgcccgccgaagtgtcgtccggatacgactcggacctcgtgtcgcgcatccaagacgacataatgcagcagacgccgcctgtccagtggaatgacatctccgggctggaggaggccaagcgattgctcacggaggcggtcgttttgccgatggaatttccggtagagagggaatgcgggtatggcaagaataaatgccaacatcccccctcctcctcgtaggaccattttcgtggcattcgtcgtccatggcgtggcatttgcatgttcggccccccgggcaccggcaaaacattgttggccaaggcggtcgctaatgagtgccagacaacattcttcgtattca

SEQ ID NO: 39015 - DNA, 1089 bp, Heterodera glycines
aaactctcggcccggagatttgttcaaggacgctgctgatgatggggacaacgagggtgctgcagactcattggactctttaaaatcggcagcggagggacgccgaagcgacgaatccattgtttccaatgccgacggcttgaaggtggagggcgaaaggcacaaatcatcttgaacggggtggggatgatatgagaatgatgtttgtttttcatcccctacccaccggttgggaaaatttaaaaaacacaaaaattgaaaattttttcaaaaattatatttttacctatatatgttcgctttgctcatgttattgtataatacagacattaaaatgttacctaacaactggcgcatgtccagcattgggttccgcgcactattcaacactttggtcagcttttcccggtactcctccgtaagtgtgtcaattatgcgtttaactttcgcatccttaaagcaaaataaataaattagaaatataattgtcaatcagcgaatttaaaaaatgcaggagacatcgtaataaatattcaatattgggggggggggggggttaatacagcttcgaaaaaggcgtcggtagcccatccaagcgaaatcttggtacctttccagccttaggagacattttgtgggcggattaatgagcaatttccctggatttggacacaaaatggctcaagattctcggtgaacccggttacaccctttgccacccacacacgacacctcggcattcatcaacaaccgtttgccccatccgattggcaaacggtcggcgacggcggcggcactgtccctctcctcctctgctctttttgccccctcatttcgatgttcgtcaaaattgtgtcgataattggtcgggatatggaaggaaacccccgccgcaggcaattgccgtacatctttatcagtgctgccgttcgaaatttggtcaaaaaattccgccgattggacggccaatgcgaaaaagtcggcgtctacgcttcctgaaaaataaaaaagagaagaatcaatgattttggagaatgtatgaactcgctttacatgtcttttttcgggaacgccccaaaatctcgccgc

SEQ ID NO: 39016 - DNA, 1113 bp, Heterodera glycines
  unsure (1)..(1113): unsure at all n locations
aaacaaaatatcaaaaaaactattagggtatttaaaatccatgtgaaaagtatggcgacaaataccaaagtatttggtaatactggagaatctggtatcacaaaaacaattttttgataaaaaactaaccttaacaaagaaatgaaatagaatcacctcgtgtaatcaaacacatagatttctcgtccaatgttatggcaaattctgtcgatgtatccattcatttcattagaatgccatttgtaattttcccttaaaagctcgtgatggtgtacatccgaagtggaaggcaaagcttcttcagcaaagcttagcctcgttactggaattcttaggaaggaaaaacggacgggtgtgttgcatacggaaccggcgacctcaaaaggtatgtaaataaatgatgtaaaaatagcatctcacaaatcttagggtttgcgagtggacaaattgtcttatcaaaatttattgttttttacctgattttgtatgcgattcgctctgaaaaattcgttgacagtcatttgccgatatattccttcaggtgtgacgaaactcgtgcgaatgggaattgaatcagttgtggcaattgttggttcggcgacaacgctgctttgattatagccgtataatggcgcatgcattttcacttttgatattgtttacactgaccattagaaaaacatgttttattaaataatttggtgaattttaaaaacaaactttgttgtcgttattaaaatgcgaaaattgatgtaattaatggcaaactccatagtcaagaaacagaagattcatctcacaaaacattaatgcatttcttgtttctataggcaaataccatatcaatatcaaaactgtttgaaaaaagcattttttctttttgtaaaagtgacataaaaccccaggttaatatattaggaaatgctagctttgttaaaaaagtagttaattcttaacagttaaaaaaagtttaactgatttaaatttgttcacaattaggaactttggcattttttgttttgattttttaaagccgtgaaatgtttccgtaggtcttctccaactcatttgctcattgtctannagtgaaaaattcgacatttcattcaaatt

SEQ ID NO: 39017 - DNA, 1234 bp, Heterodera glycines
  unsure (1)..(1234): unsure at all n locations
tgttcgtccacgtagaagtcaaatcgacggctgatcagtgcaatttcgaggccaagtgagaaaggcgcaagaaagtcgaccaccaanaagncaaccaatcggcgcagataaagctgaaaaattngaagaattttttcgaaattttcaaaaattttttggtttaattttatttacatttcttttttgggagggcgtcgtcgttttttgacatgctcaaaaaagaaccaaagaatgctggcacagacgaccaacagcagaagaagacacacgtcactccaactgaaaaaatgaattgaatggaaagggagggaagccaaaagtgaaattttattttaaatccaatgaagctaattattgtaagcctcaaaattaagtgaattttgaaacatttaaaagttaagcaaaagaaatgtaaaacgtcagaaaaaagaagaaatttaaacgtaccgaatttttgaaggcatttgcagcaacaaaatgaccagggaaaatatagggagaatgaatgaataatgaatggaatgaggaagagaggaagaaaaaaaagcatttttatattaaaatattagcgtaacgccccgagccctcggggggtgggaaaagtcggggtcagcatttgtcggggatagacgattccgtctgggtgcgcaccaaattggtcgggttttctaattatcgcaataaaaaaatgcgtcagttgcttcgcgattagacaattagcaaaaaagtcatgaaaattgcgaaaaagtcgaaatttgaagtttttcttaacaataaatttttccaggcttgaaattatgtgtctttcaaatttttatgtcgttataactagagctggtcgggaccgggatttttgacaaaaaccggacttttttggttgaaaaaccgggtctttttggctgggaaaaccgggaatttatcggtcccggtcaaaaccgggagcttggtactcagctgtcccgctattttcagtaccaggtcccggtcccgaccagctctagttataactcatctcctaaactgctaatttcaatcaaaatgctaaaacgaatcattcaacttaatattttcaacagaacaaacaaattaaatgtattcaaacgaaagaagcaacaataaatacacataaatgtgaggagcaattatatatcagcagcagatcaatttacattcctaatgatcaatcatttgccatttccaaataattcattcactttttctttcgctgggcccg

SEQ ID NO: 39018 - DNA, 945 bp, Heterodera glycines
  unsure (1)..(945): unsure at all n locations
ttcaatacatttggaaattcgcagtttttggggtcaataagcatcgtttgaggaattggaaaacgcccctccccaatgaccctcaggcggtgtcagaatgttcgggttcggctgctgttcgtagctcattgccatcatgttgttgttgttgttggtgctgccaatctgtgcctttgccttcatttgttgaatttcgatctgtgcctgtctcaatttcctctgctgtttggccaattccgactgatacgaattggtggcgaatgctttgtcttttaactctccgcgtttcttctccacttcgccgattaatatttggttgattcggtccttttcaacgattgactcttctttctaaacggagagtgactcacaatcagtcgcaaataacaattaaaaaataaatgattgggcacttgccatctgcaacagactgcgcaactcttcgatttggtgaattttgtcggcaatttgtcccgtcaaatcgtcttgaacactttccctcgtttgacatgtgctgcatctttggtttgcggctaataaacaaaacttacatttttaatttatgggtccaaaattctgttatgaaattttgcaatttttatatttgttatccacctcaagaaatttaaaacactaaatcttatagcccttctgacaaataaatttcttctttttaattataatttacccaaaaaaagtttgtcgtgcattttctgtcggatttcctgcgcctcgtccaatgcgttgcactgttccttcaccgccactggggctcgccgttgctccaattccaacgcttcttgaagaaggcccaaattttggtagagcaatttttttttcttccttaacaaacgaaaatttatttttatgttgtaaaataaacattttaataanaattaattgccttcaaagctttgttcttttcttcttttgcttttgagtttt

SEQ ID NO: 39019 - DNA, 1060 bp, Heterodera glycines
  unsure (1)..(1060): unsure at all n locations
tgttcaaaaatcatttgttaaaaccaattttatcatgtagagcatactcgattgtatttttttatactttaatttttttaaatttcaaaaaaaaattacaatttttttagctatttttcaaatttatggttgattttttatattaactcttttcttacttttattactggttttttatttacaaatgcaaaacaaatgaaaaatttgatggaattacgaccaattttcaagatttactaacaatacgttttttttaattttcaacaaatcgctgaaaaaacttttttattttttttcgtgtggaatcctcccccccccaaaaaaaattatttttttctcgaaaaattgtacatccagcagagaaagatgaaaattaatgtttttttatttttaggcaattttaaatttccgccagaattattgggatgccaatgcttgtcatgagaaactcgaaatcattggcgacaaaagtctcattgtccattataagagaaatgagaatggtattttatcataatttacttagttatattatatattctccttaaaagatggtatgtgttctgttttcgctaaacatccgattttgctgttcaataattcgtccgacattttttactacgaaatttcaatcggaaataagaaaaagtaagagattttttattttttgaataaatttattaggaatataaaaatttaattatttttattattattaataataaatttccagttttatgttattcggattcgccgtcaaacagcagacaacactgtatggatatgaaaagggcacttatgcatatgacaattatggcaatattttcattaacggagaacaaaaggaatcaaatgtcaaatatttctacggtgttggcgataccgtaggaattggcgtcaattcggccactcggcagatcattttcacaaagaatggacaacgtttgggttggtaaacaaacagttactaattgaattattgtcagagaaataacctatttaattncctattttncattaatttaatgttatatttaaacttattgagaaacctttaact

SEQ ID NO: 39020 - DNA, 1576 bp, Heterodera glycines
cgcaaaagcgtaaggccggaggccacaagccgcgaccaggcactagcgcaccagccccaagcacagggctgagcactagcaccgtgtccaacctttcgccgtcaagcttcaggccggaggccacaagccgcgaccaggcactagcacgccagccccaagcacagggctgagcactagcaccgtgtccaacctttcgccgtcaagcttcaggccggaggccacaagccgcgaccaggcactagcacgccagccccaagcacggggttgggcactagcaccgtgtccaaccattcgccatcaagcttcaggccggaggccacaagccgcgaccaggcactagcgcaccagccccaagcacggggttgggcactagcaccgtgtccaaccattcgccatcaagcttcaggccggaggccacaagccgcgaccaggcactagcgcaccaagccaatatcaaaacaaaaaacataaaaatgaatgaatgaatgaatgatgaaaaatatttagacaaaattcaattcagtaaatattaatgcatgagaaaggtcagagaattgctggacgggcaaaagaaagagggggaggagagaacggggggttaattatctcataattcagttctgtacgatttttatttaaatatttttttttataaataattttaaaaaaactttttagatttttaaaaaaaatgttgtgcaaatgcggcgaatgcttcgaatgcgaagatgaaaagcgccgcctcaagcgcaatcgggagctcaatacccgcaaagagcaaattaagaactgcacaggcaatcatctagcaccggctatgatggaactcaaacgccggaatatgaaactgtttaaaaaggcttataggccggtgaagggcgtcatcaataaaataaccgggggtgagtttaaaaaagaaattgaaaaaaaaaaaattttttaggcccttggaatgtagaatgtgaggtctgccatgagaccttcacatacttcatggtggagtgggaaaactcccggaccgacttctcgtggggtcccgggaggaccatggtcgaagcggataacatagtaaaaatttttgaaattttttccagttaaaaattaattttagaatcagaaagaaattttggctcactatgtaggccaaaatgatctactccagaatgaagtggactattatcagaaccttggtaataatcctccgttgaatgtgcccccaatgggggaggatgctataattttgaccagggacgatggtatgccgattggtgcagaggtaaaatatttaaaaaaaaaagaaaaaaaaacaaaacaaaacaaaaaattaaaggcaaatgatggggcacggtcggtggccggggaaagcatcgttagcaaaagagggggagggcagagaaagagagagagagagagaaagaagagggcggaagaagcgaagaaagcacaaagagatggagcggaagaagaagaagatgatgactttttcttctttgcgagaaatgggggagagaaacgaggggaaatggacatggaaagcagggtagtgaaaatgaaatataaatttaaaaattaaaat

SEQ ID NO: 39021 - DNA, 680 bp, Heterodera glycines
aaatcatttaattaaaaattttattaattgagtaccgttacttaaagaaattagcgaattttgagttctttctataaaaataaatatagattctcttcactaagcagcaactggatgattgattggttggaaaaaagagaataaatgaaaatctttaatttaaataaaaaaataaaaattcttaattttcgcgatttttaaaaaataattaaacaataagaaattttaaattattttttcataactttattttgaaatttctatatttacctttagattcgattcatgaatcagtctgattctataaaaaatttaattaaatgcataaatataataaacaaggaaaagggattaacaattttacatttactgtaagagaataaaggaaaaataatttacaaattaatattttttaattgtaaatttatttaacaaagaaaaaaaatttaaaattactcaattaccttttcaagaagataaactgcgcgagaaacagaacgagattgagatttaaacaaaatattcagagttacccgtgaattgatagaaactaaatttccaacaacaatgttttttttaaaaagaataacacttatagggaaaataaattaatgaaaaagaaaatgaaaattttgacagaattattaataatgaaaaaatcaaataaaaatacctacatg

SEQ ID NO: 39022 - DNA, 944 bp, Heterodera glycines
  unsure (1)..(944): unsure at all n locations
tgatgaattttctttcttgtcgttatccttttcttattaacaaacttgaattagctatgatataattatatgacaattttttaatttttattcatttttcataagaaatcatttttttgttatacagaattgcagatattatacagaaaaattataaaaattaataatatttgaaactttattaccatttattttttcaagcatttcattttacttggatttttcaacaaaaaaaacattgacgaaaaattcaaataataacaaatgtatttaaaatactatgtcttaattgaatttagtaaataataaaaaattctaaatttttataaattaccatttacataccatctattcggctccgacggcagctaaatggcaaatatattaaattttttaaggatgtgaacgacgaatccaattcggagacggcgtaatttcctcatgctgacatataaaacacttcgcacgcaataataatgattagtagggctgggaatttaagtcaaattttttttttgctggctctaaatggccttaagatgacttaaaaagtgttctaaactttgttttaagcttctaacatgcattttttgggacttttttgacttttttaaattttttggaatttttatgacttttttgagtttttgcgacttttttcgtgatttttttttttgactttttgaggcaaaatcttaattttagcgaagaaaatgcagaaaattaaaaaaaattccttttttacgcctattttaggtacctatttataaaattaagtgccaaaaatacgattaaatgttattctataaattattaaaaatgggatttttttaactatcgcataatttttcagaacttttttgcatttttacgtgctttttttgantttttgtaactttttagctattttttcagcacttttttcaatttttcgtgactttttt

SEQ ID NO: 39023 - DNA, 647 bp, Heterodera glycines
  unsure (1)..(647): unsure at all n locations
tccatatttggccatttttggcctttttagtccatatttcgggcttttttagtccatatttaatgtacatatttcgcgttttttagtccatataatttacaaccctactaataattggcaaattgtttttatatgaaataaaaaaataaaattgtatttttttcgtcatttgaaggagttggtcacactgtggatgctgaacgaaatttgatcaatttgtatccacaatgccatctgatcactgctgatccgtcagcagaaattaatgacgcattgacacatcaaattggtggcaaatttgttcatgcagcaattggtggcaaaacagcaatgggacagccggtgaatgttcgacgagaaggcatatttagcaaaaactaaaaaataatttaaataaaattattattatttttataaatatcttattanattctcaattaatttaaataatccactattttaaatcatactcttttgaaaatatttaaatttatttttcaaccctaaatttggaagaaaaaaaaaatttaatttacccaaaataggcgctaattgctaatttaaaaattttaaaaaaatggctgccagtgggactcgaacccatagcccatccaaaccgtgaaatcttttctaaaagccattgaatg

SEQ ID NO: 39024 - DNA, 368 bp, Heterodera glycines
tcagcggcgcgcaacagtttcatgccaattcttacatatttcccctcccaaatctggtgccaactttagccctctcaaaattggcacctccccccccccctcctattgtcatgccaagactccccataatgccaatttgtccatgcccactgtcatgccaatttttgactcacctcatacacttgtgtgttgtccagctcagcggcgcgcaacagtttcatgccaattcttacatatttcccctccaaaatctgatgccaactttagtcctctcaaaattggcacctcccccccccccctcctattgacatgacaagaatccccataatgccagtttgaacatgcccattgaaatgccaattattgac

SEQ ID NO: 39025 - DNA, 530 bp, Heterodera glycines
gaggaggaggagtgaggagaggggaggaggatgaggaggagtgaggagggggaggaggatgagggaggagtgaggaggggaaggagaatgagggaggagtgaggaggggaaggagaatgatggaggagtgaggagggggaggaggatgagggaggagtgaggaggggaaggagaatgatgaggagtgaggaggatgaggaggagtgaggaggggaaggaggatgagggaggagtgaggaggggaaggagaatgaggaggagtgaggagaaggaggatgagtgaggagtgaggaggatgagggaggagtgaggaagggaaggaggatgagggaggagtgaggagggcaaggagaatgaggaggagtgaggagaaggagtgaggaggaaggagtgaggaggagtgaggagggcaaagaggatgaggaggggggtaggagtgaggaggggaaggaggatgatggaggagtgaggagggggaggaggatgagggaggagtgaggaggggaaggagaatgaggaggagtgaggag

SEQ ID NO: 39026 - DNA, 1101 bp, Heterodera glycines
  unsure (1)..(1101): unsure at all n locations
tggaaaaagcgagttcataatgtcaagcagcagaagttgaaaagccaaaaagaaagaggtaaatctttataaggcttccctttgaaattatcagtgatgagacgtgggcaataaaacagttaaattttgcattagaatgccttaattttgcattcanaattgttttctcttaaaaatatanaaaatttattaagaagaaaaatgtaagtgaattcttatcaaattctgaggaatgatggaagtgtcaaagncaatttgtcggagggaagaggaaaaaatttttgttgaatttggcaccggaaattaaaacaaatttcattcttcaaagcgaaagacagcaaaaattcaaacaaaatggatgaagaaataaagggagggaaaatttcgaaagaattggaaaattaccatgaacttttgttgcgtttatttaagatcaaattcaaacaattgataaatcaaaatgacaaatttgtggaggaaatgttgactaaagagtgggtcattgaattggtgggaaaatatttgcccaaattgacaatgtgaccatttgggtgagaatttcggactgctttttgttttgaatacataataccatttctcatttgcagctttgtcgtcaattcaaaaagagaagcattaagaaaaatgactgttaggcaattgattgaattttcaaaaaaactattctgaaattctcattttatctgttgttttttcattataaagatggcattttggagaagtaaaaatttctcaatgaaatatgcttcattttatgtaattcctacattttttttgtttattttactaaagtgcgctccttttcgaatgaccaccaatcgtttatttattagattattagtttcttaattgctttggttatttgctcgtctcttttgttggataaatttcttttctttttttttgatctatattttataataatataatattattgttgctaaattacatatgttctctgcttctgctactgagttttcctttttgctttttccattttttctcctcccatttttctgtccccaatttttgtccgcctcctcactgatcaacgattatccaaatccgttgcgcgagggg

SEQ ID NO: 39027 - DNA, 1149 bp, Heterodera glycines
  unsure (1)..(1149): unsure at all n locations
accccgaccccgaaccatttggtcaacnccgaccccgaccccgacacttccaaccccgacgaccccgaacnccgacttttccaaccccgacggtcggggacgcaacccctagtcctcgactattgaaaagtcaaaatgaaaattttataatttaaatagaaataaaagaatgaacatttaaaatttagtgaaaaaataaaaagaaaagattaaagataaacctaaaacaaataaataaatacgaaaacaattaatctgacctaataaaaataataggttaacaatatgataataaattattggttaaagatttattttaaagaagttcaaataagaaaaatcaaacaaacacagtctcttaataactcaaaataggaaagcaaacaaaatgaaatgaaaaaaataatagaaaaataaaaatgattacaaatatacataaatatttatgtaaaataatgttttagaaatgttatagtcatatataatgtttaggaactatattttaatatatttatttaaagcaccaaaataaaataataattctgaaaaatgcaacaaaccagtttgacgccgttaataatgattatgctcccactgaacagtcattttgcatcatatttctccacaaattcattaagtatttcccagacattttatttaattgagaatttttcttcaaataaattttcaatctattataatttttagtgattaaaatcatgaatcaacaggaaattttttaaaccaaatttactatgtttagtgcaaattttaataaattaagccaaatttcaatttctttctaaccggcccggccagctagctcgagaccagaatcggaccaactgggaattttaattaaaatattttaaacataaattttttattaatttgtttttaaatgcaaatataagttttactattttattttataaaagaaaaaattaagcaaaatatacgactttaatgttctttttcaatgatttaatgttaagagaaaatttatcaatgtaaaaatataactccttttacgaaacaataaatgaatttttgtcaaactaaaagttaattaaaattgataataataaccaaaatcgantttatgataatagtaaataatacgtaaatatcaagtcttaaatatctata

SEQ ID NO: 39028 - DNA, 1087 bp, Heterodera glycines
  unsure (1)..(1087): unsure at all n locations
ttccaaaacatagtttttcgagctctatcgattggtaatttttttcnggaaatttttcgattttttttcggaaatagaaaaatttttttggcctcagcgggacatttgagtcccggcnccataactcgtcagggtttgattttagcgaaaaatttccttagagcacaattgtagagctttcaaaatgctatcgaatggtgtactaaatgtcgaaaaattttcaaaaattttcgagctaggccccctagaaattttcaaaatttttttttgggttgaaaaagatggtgaaaaatatttttctgggctactttgaggtgctgaatacgaatataatgtttattttaagttttggaaattttagaattttttaaaaattcgaaaatatttttcaattttttgacccttgggattttgggttaatatttgaaaattcataactcaatgaagaactggtcaatttaagtgaattaaagctttaaaaatagagaaaaatcaggagaattttatgggatttatttgggttttctaacttcaatatgaaagaagttattccagaaattctggaaattttagatttttcagaaaaaaattcagaactcgcttctgaaaggtcatactgtaaaagtaaaatactacaaaaatccgcaattttttcctctataatataaattttattttacatttttatctctcacgaatatgaaatcagatttcagttataacatcgttaagacctcagaatccctgtgtgattggggattctgaggcatccatcttctgggggggggggagttcggatccggtcggtgtacattatttttctatttatttttgtgttatttttcagtgcgtttaatttatatttaaagatttgttgtaaattaataataaaagaatttatgtaaaaaataataattatgttttaataaagaatttcctattatttttaaattgaatttattaatttcatattaatttaaatattcaattcttgcacatttcaaaattctctttttaattaataaaaggaataattaattttattttttaacacctataataaattgatttcaactttcgtacctct

SEQ ID NO: 39029 - DNA, 1260 bp, Heterodera glycines
taaaagggaaaaaataaatacatattgctttatgttcattattagaacccggaaacatagtaaaatgcttatggccaggagcttggtaaagacagggtttaacccatttgttcgtttccgagtcctttcgaaattttttgtttggtcgcgcttttttttttcaaatttctggctttatttgcaattctgctaatttattaacattttaccaatttattttacattttcaaaaaagtttttcacttggtttcgggcggaaaaagcgagctcataatgtcaagcagcagaagttgaaaagccaaaaagaaagaggtaaatctttataaggcttccctttgcatttatcagtgatgcttcgtgggcaataaaacagttaaattttgcattagaatgccttattttcgcattccaattgttttgtctagcaatataaaaatatattaagaagaaaatgtaattgattgtatcagttgggggggggaattattgtcaaaagactatcgatggatcagaaaatgcatcgatttatacgccggggggggggggattggagcatcggacgaatgtcaccgattctctcaaatacattggggagcagtgactgattgagcagtgtgtgattctgctgctcttccaaacgacgaaatgaccaaaaatagtccccccggcgggggggagggggtgccctcgggggtaaaaagacaaattgctaatttatcaaagggaatttggggtgcaaaatcaggcgaagagagaagagtgagtggggaggagaagataagcatgggatgagcgattgttgaacattgacgaaatatgtacaaaatgaaaaaacgctgacggagagagaaaagggaaaggaattttcggggggagaaaggagaggctaattgatcatcaaaagtgaggaaaaacggaaaaacggaacaagacggacgaaaatggaacaaagaaatgcaaaatattgtctaatgaaagagaggaagcacaaaagggaccaaagaaagccaaaatttaaaaatataaaatgtaaaatgagagaaactgtgaagggctttagggcaaataatttgaggagaaaggggcaaaaataatgtgaaaagagaaaagacggatggataaagggggggggggggaatacggaagagagcaaaagagaaatgggagaggagagagaggagaagccatgaaattactcggtagatggaataagcactggaaagccggcggagctatttttagcagtgagttttatcctca

SEQ ID NO: 39030 - DNA, 1136 bp, Heterodera glycines
gagatgttttcacctcggaggatgatctaaagaatgatgatcaactcaatacatttttcggattgcatttgatcggcatggatgattcatcaacaccaatcgatcgcgacgaagtaatggttaacttcaagagaaacctcgcattcatcaacaaccggtaccaaattgcactgccatggaacgacagagtcggaactttgccgacaaactaccatcaagccaaagctcgactgatcagcctgatcaacaagctccgcgcactcaacttggtcaacgaataccaagcaattttggatgagcaactgcagaagtccgtcatcgaattggtcgactctcccgagcaatcaattggaccagttcactatctgccgcaccgtgccgtcgttcgtaccgacaaaacaacaacaaaaatccgcattgtgatggacgcctcggcaaaacccaaacacagcccatcagcgccgtcactcaacgaatgtctgcacaccggacctcttttgctaaaggacttaactggaattttgttacgcttccgccgtatggaacatgtcctattggcagacatcgagaaagccttcctacaacttggcgtacgtgaacaagacagagacgcaactcgtttcctatggctaaggaatccaacaaacaacgacttgaactcgctgaaacgagaagacattttggtcttccgtttttgtcgtgtcagttttggcctgacagtctcaccatttctgctcaatgctacagttcgtgaacacctggcattattcgacagcaccttagcaaaaaggattgatgagaacctttatgtcgacaacattttgatcgaaatgtggccaaacgagcaacttcaacccgtcgtggaagaagtcaagtccattttcaaagccgctggaatgaacatccgcgaattctacggcagcaacatcgatggtataaagcaattgccatctgaagaccaggccaaagaactcgaaaacacgaaagttcttggcatcacttggaagccaaaattcaaccgaatcgtcttcaaaatgccaacattcgacggaaaaatcacaaaacgaacaattctgtcacacatcgcgcaagtctacgaccccgctcggttttaatgtcaccccgcgctactcccc

SEQ ID NO: 39031 - DNA, 1028 bp, Heterodera glycines
  unsure (1)..(1028): unsure at all n locations
tttgctacgcactgtatgaaatacctaatgcgcaatttggatacaaaaaagagatagctatttttgggcacgttacgatttttctgtcggtgtccaacaccctactaatgcttcgtttggccggataagaaaaggcaacctgtgctacgcactgtatgaaatacctaatgcgcaatttggatacaaaaaagagatagccatttttgggcacgttacgatttttctgtctgtgtccaacaccctactaatgcttcgtttggccggataagaaaaggcaacctttgctacgcactgtatgaaatacctaatgcgcaatttggatacaaaaaagagatagccatttttgggcacgttacgatttttctgtcggtgtccaacaccctactaatgcttcgtttggccggataagaaaaggcaacctgtgctacgcactgtatgaaatacctaatgcgcaatttggatacaaaaaagagatagctatttttgggcacgttacgatttttctgtcggtgtccaacaccctactaatgcttcgtttggccggataagaaaaggcaacctgtgctacgcactgtatgaagtacctaatgcgcaatttggatacaaaaaagagatagccatttttgggcacgttacgatttttctgtctgtgtccaacaccctactaatgcttcgtttggccggataagaaaaggcaacctgtgctacgcactgtatgaaatacctaatgcgcaatttggatacaaaaaagagatagccatttttgggcacgttacgatttttctgtctgtgtccaacaccctactaatgcttcgtttggccggataagaaaaggcaacctgtgctacgcactgtatgaaatacctaatgcgcaatttggatacaanaaagagatagccatttttgggcacgttacgatttttctgtcggtgtccaacaccctactaatgcttcagttggccggataagaaagggcacctgtgctacgcactgtatgaaatacctaatgcgcaatttggatacaaaaa

SEQ ID NO: 39032 - DNA, 969 bp, Heterodera glycines
  unsure (1)..(969): unsure at all n locations
tattgcgcaccgccctccctatcatgctcgagagcatttgtatgtgtataaaatttatcaaaaaaagagatagccatttttctgggatagagtataaatttaaaaattccctcaaaaataaaaggtctattgcgcaccgccctccctatcatgctcgagagcatttgtatgtgtataaaatttatcaaaaaaagagatagccatttttctgggataacctctaaatataaaaatcctctgtgaaataaaatggcgattgtgcacagccctccgtctcatacgcaagcgcttttgtgaggtataaaatttctcaaaaaaagagatagacatttttctgggatagagtataaatttaaaaattccctcaaaaataaaaggtctattgcgcaccgccctccctatcatgctcgagagcatttgtatgtgtataaaatttatcaaaaaaagagatagccatttttctgggatagagtataaatttaaaaattccctcaaaaataaaaggtctattgcgcaccgccctccctatcatgctcgagagcatttgtatgtgtataaaatttatcaaaaaaagagatagccatttttctgggataacctctaaatataaaaatcctctgtgaaataaaatggcgattgtgcacagccctccgtctcatacgcaagcgcttttgtgaggtataaaatttctcaaaaaaagagatagccatttttctgggatagagtataaatttaaaaattccctcaaaaataaaaggtctattgcgcaccgccctccctatcatgctcgagagcatttgtatgtgtataaaatttatcanaaaaagagatagccatttttctgggatagagtataaatttaaaaattccctcaaaaataaaaggtctattgcgcaccgccctccctatcatgctcgagagcatttgtatgtgtataaaattatcaaaaaagagatagccatttttctg

SEQ ID NO: 39033 - DNA, 1708 bp, Heterodera glycines
  unsure (1)..(1708): unsure at all n locations
aaaattttattttgaagttattgaacaaaaaaaaaaaaattcaaaaaccgggccgtttgattacggtactaccgtatacccttcgctttatgggtgtttaccttttttatttatcnnttaccatacaaataaaagaataatttgatacaaaaataaaattaaaaattattaaagaatgatgatagatagngaattgggggaagagatcgtcgtcagaggacagttgaaatgattaatgaggatgttcataattttcaattaaaaactgatatccaatcattgaggcctccttaaaatttcaaggtccgaaaatggattttttggggaattttaatataaatttttatctaagaaatggtcttatttggaattgagtttttcattggctttcgttggttttttttttaaaatttccaaaaaattatgggaggcctcaaattttctaaagtgtaaggcattggcttattatcaaatcaattcaacaattttgcagctatcgctttcttgccgcgatgatgatctttcgcacacagaaaatggcagttagggtgaagagaattgcttaaatttgtaggaaattattagaaatttttcaaaaattaaaaattttttaaaaaataatacggcatcatatttacccaagagaatgacaaagatcagctgcgctgtcataatggcgacgcccaatttgactttgaacagacactgtaaaaaagagtagattaaataaatctgatcagtttaaagtgatcaggaatcaataaataattaatgagcaaggatggtgatcaattggattgaaaatattgtctcgaaagaaattttggttggccaaagtgatcagacttcaaaaaaatgtttgaaataatttgatcgtcactttttgtgtaatgccaaagtgatcagggactataattttgaaataatttgatcaaatgtctttattttattattttcaattcccaaaaagcctgctaaagtgattagacattagaaaaatttggaaagaatttgatcaaaagtttctttttttaatttaataccccaaaaaccctgacaaagtgattagaaaaattttgaaacaatttgatcagaaatctcttttttttcaattttaacatcgcaataaaaaccctgcctcattgaaatacgctttgtgctgcttttgactgtgcttcatccggtccatgtcatattcaccaatcaagcaatagtaacggtcacggcgcgaaattggattatgaatgcctttgtaaaggccggtcaattgccagttcctgcaaattatggcacatttttttgaaattatgggttgggagaagtctaagacatcggtatttcgtgtacaggcagttaagatgctagagtaagtaagacgcaaatttccaaggacgcccttgacatggatcaaggatgcagaattaagtgcatatttggcgacgattaaaaaaaaattaagaaaaaataaacaaaaaaattttcagtgttaaaattttttgaagtaatttcatcataaaattttttgaaaatcgccagaaaaatttttaaaatatttatttaaatttttttctaaaattttttaatgaaaaatttctgtttgaaattttaaaaagattgggcggaggggggggggggggaacgagctgttttcccggctggcacctgtgcgagattattgcgcaaccaatgcacaacaaaatggagacca

SEQ ID NO: 39034 - DNA, 1641 bp, Heterodera glycines
  unsure (1)..(1641): unsure at all n locations
taggggaagtgagttgtgttcaanaaccctttcagaaaaaaatatttatgnaattaattttcaaaaaaaatagaaaaatttttttaaaataaataatcgtttttcaggttaagttagttctggtaccggggagtaagcctataaaacttggtgcaattttattaattatagcaagagttaagttcgataaaacttttaaaatttaagcctaaaactaggcatattcaaaattttgaaaaccaataagcgttgaaatattttaatttaaatactcaaataattttttttattacatttactacggcatttgtatacggtaggaatggtcgatgctccaagccgatggccgaacaaagccaatcggaataatcctcagcattttgttcattttttggtaaaagtcctttttcaattgcatattcctaaatttaaaaattaaaataatttttttttcaaatttttatgcctttaattcgttgtgtaattttgtctgaatttgttgatgcaaaatcatgtaaatgaccataaagtgcaaagtatttgaattggtttcctagcaatataaaataaattaattaattaaaacataaaaaaaaattaaataatatatacgaatacatttgctgccaaaaagaagtcaaaacagagcgatcgaagtgaatccatactgaaatgattagttttttttatatgcaaataatcggacaaatttaaaatttttagaaaatccaaaacgatattaattattactgattaattaaaaacagattaacatcagggttgcgtcatcattcagaatgaaaataccgtaattattcaaaactggcaatcgaaaaacaagaaaatttatcgaccgttttttacgattaaatatcaaaaaatataaatcgaaaactcgatttaccgataaaatcgaccgtgcccatctctaaaaacacatatgcatgccaaataccatttcacgtgggcatgaatactctttggacatttaattaatttggtatctatttaatttgtattagattgatcttttgacaatttaatgttttgccccgagttcctccttccattttctagtatcagtataatgattattaagttttactgatgatatttgtcctgattgaatggcatttcgacatgcatatggcgctcctccattcgctggacggcatccacgaaattgtccatgcagagatgctcgatccccatcgccgagaccattgtggcgataccattcactacgcgttaaaaggacaccaattttcatgaataacagaaataattagtgaagttataataataactatcattaattattattttttatttaaatgccactacaatagcagaccactttttttatcgattgattttcaccgccaacctattggcttctttttgggcgagagagtgcaccgtctaacctctccagcgacgagagagtgcacagtctgacccaccagcagacccgtgcctatgggctgctcggtcccgcctcgacacgaattggctgctcggtcccgatagtatccgagatctcgacacgagatctcggctattatgggttcgagatcccggtctctgtcgtgtggtgcgcgagaattcagcagaaatttaacaactgaagtggactcgaac

SEQ ID NO: 39035 - DNA, 1368 bp, Heterodera glycines
  unsure (1)..(1368): unsure at all n locations
ccttatcagtcttatgcaatatttcaattggactcgcttcggctttgtgcttcaaagtgacagcaacggagtcagcggaggttaacgcactcaaaaggcgaaagaaatttccatgtgaataattctaattttaggctgcaatttattcgcccgcgacatcgatgtactgtaaaaccgtatagcattgactgttttttttttaaatttattttttagaaagcgatgggtgaaaagtcttcggtcagtatcacttacaaggtacgcattttcaacacccaaacgtccgatttgaacacaattgtcactggactgcgcaatagggcacggagtgagtggccggggagggggggggcggtaaaaagggaatttgggagagagcgagttaaaataaaaagggattaaaaaacgaaacgggatttaattaaataaaagtaaattaaaaaacataaatatgcaaaaacacacatttccattgaaaatgtcagtcattttgctttgcttcgatgacgtcactcagttacgcactttctttgtttgacggtggactgaaaacaaaggtgcgtgggttgccaaattacgctaattggtcaattaatcgatcattaaggattatttgtacatcatcccggataatgatctgatcctttcatgtttgtccaattaatataataattttattcatttatttgtcctttgtatgcatatttagtcaatttgtcgcgaatgcctttttggaagcagggggcacggtgaattgtacaaattgtgcaaatgttatttactaaaagcatttagcgatttggtgaatgtaacaattgtgaatgacggaagagatgccgatgccgaagtgattggccgattgacatttcgggtcggtctgacaaatttttgtgagagtgtggatttatttctgtcggattttatgctatttcaaatcaaaatggcatttaaaataaaaattgaagttctatgactgaattaattttggcatatcttactgtatttactgttntaatgaacaaatntagtggcattatgacatcactcagtccgcgctgtccaatcggaattatttgggctatttcgggcgagtgatcaatcggacgcgcgattggcccttttattgccccgagtcggactgtagcaatgttgcgaatgtgctttgaatttttttttttgctctaaattagtattttggcactttaccagtttaggggtccgtatattcgcttcttttgtacgacgcaatttacaattacggaatggcactgaacgaaactttccgccaatttggcattcggcccgaagtgtaccgaaacggcactcttttggcacagaacaatagaaagacattcatgggcaagaaat

SEQ ID NO: 39036 - DNA, 872 bp, Heterodera glycines
ctagggaaaagaaggcaggggatgagaaattggctagggaaaagaaggcaggggatgagaaattggctaggaaaagaaggaagtgagaaagaatccttgggaaaaaagcctgcggttgcgagaatggcaaaggttgaagagtagagagtggcaaaggcagatgaaaaagcacaattaatgtgacacatttttttaaaaataattttcatttatttgtttttccccaaacttaatgatgaaaaacggctcgaaaagggtttggacagtttctcaaatgtgggcgaaaaaactcagcgaaggttagaatgaagtaaaaaatcagcgagcagtccgtcatttttctgtctaacgatggttgtccccaaggccgcggagaaggcacaactgttcgttggtgttgacaaagtggtgtcggttcttctcgcgcagggccccccaagcttcgcgatggggtcaagaaagtggatgccctggaaaattttaggaaaatataattaaatagcaagggtacgaataaatgaaatatagtcaaaccgtggggtttgttggacaacaaaccggaacagcttacccaattttacatgcattattattcactgttaggtgaaaaaaaaatttttgtgtgggtgggaagattcagcctttttaggccggaagcaaaaacgcgcaacggaaagcaaaaatttttttgtagtgcctgttaaggacaaaatttttaaaaaaaggccggcccgggctgattattttagaagtaaaacacatggtcgacgaatgagcgtgaaatgcgatccatgaccgcctcgtgcatttcgaacgtgtccacaacagctcgggaaccgcagcgacatgtgtacgcaaccgcgccaaatgga

SEQ ID NO: 39037 - DNA, 1028 bp, Heterodera glycines
  unsure (1)..(1028): unsure at all n locations
agagaagtgtcgttcnaactctgcctttttgctattgtgcactcttttgccgaaaacagacgatcccaatgatttttttgaaaagcaaaccttctgactcaaaacacctcaaaccctagagaagtgtctttcaaactctgccatttttgctattgtgcactcttttgccgaaaacagacgatcccaatgagttttttgaaaagcgaaccttctgacccaaaacacctcaaaccctagagaagtgtcgttcaaactctgccatttttgctattgtgcactcttttgccgaaaacagacgatcccaatgagttttttgaaaagcaaaccttctgacccaaaacacctcaaaccctagagaagtgtcgttcaaactctgccatttttgctattgtgcactcttttgccgaaaacagacgatcccaatgatttttttgaaaagcaaaccttctgacccaaaacacctcaaaccctagagaagtgtcgttcaaactctgccatttttgctattgtgcactcttttgccgaaaacagacgatcccaatgagttttttgaaaagcgaaccttctgacccaaaacacctcaaaccctagagaagtgtcgttcaaactctgccatttttgctattgtgcactcttttgccgaaaacagacgatcccaatgatttttttgaaaagcaaaccttctgacccaaaacacctcaaaccctagagaagtgtcgttcaaactctgccatttttgctattgtgcactcttttgccgaaaacagacgatcccaatgatttttttgaaagcaaaccttctgacccaaaacacctcaaaccctagagaaagtgtcgttcaaactctgccatttttgctattgtgcactcttttgccgaaaacagacgatcccaatgattttttttgaaagcaaaccttctgactcaaaacacctcnaaccctagagaagtgtctttcaaactctgccatttttgctattgtgcactcttttgccgaaaacagacgatccccaatgagttttttgaaa

SEQ ID NO: 39038 - DNA, 372 bp, Heterodera glycines
cttttttcattttcactcacaaattcccttttctcctcgccctcttccacaacaattgtctctccgttgtttctacactcttccgcgcttctcagctgcccatctccgcctttttctgttccgtcttcccaaaatgtgccgttcatttcattcgctgccgaaggcgaagaaagaaatttgtgaagcattcgcacgttttattggaaataatttagtaaaaataaattaaaataaatttattcatttttatgacccctccaattaaaattctttttccatctgagaatttgagcggtggggcgaggggtgggagtgggcgatcggtgacggcagcgccgccgaatcggacggacagcggcggggggggggggg

SEQ ID NO: 39039 - DNA, 973 bp, Heterodera glycines
tatttaatggctgggattaaaagctaactttgatacccatcttcttctgcgttaatacattcaatttccaaaattcttccgagttttacgcttttttccccaatttttgtcccatttgaaaatttggtgcctttcgcgtcgatgagcacccggtcgttgctgagcagcttcttctccgcctccatctcggccatcgcgtgctcatagtcgatgccaatcaccaccaaattgggcagcgtttcctccagcaaaagcgcactctttgcgattccctccgttttgccgagtccgtccaagcgcaaaaagcgcagtttggagagcgaacggaggccgagcagtcctttggggacggagggggaaatcaacggttgtcagggggagatggccttgaattttttagatacttaaaattttgttttctcaggaaatgcagcaaattttatttttcagtaacacctaggtttttttttaaatttttatggcaattttgaaaaaagttttatttaattttttttgcggcgacgttacgtccccgcgaagccggcgacgttttgggggtgtacccacacacgagggcccgggttttgaacaatcccagacagcaactgttgctgctgcattcggaccgggttcccggatcactattctcgaactgacctttggccgatattctgtgacagttgctcaggtccaacatttccaaagtgttggcgaacattccgccaattcggctcagcacccaatcgtcgatccatcgacagtccctcaggctgagcatccgaaggaattccaagtcgtacaaattgtcgaagccttcgtgtgagggaagtaaaaatgtttttttggaaggggataagtgccatataaaaaaaacaaaaacaatcgcgtaaaaaataaaattattagttaaagccaagctcagaaatggggggtgcatttcattccctcctctgccccgtcgttttccccacat

SEQ ID NO: 39040 - DNA, 944 bp, Heterodera glycines
gtcatcttccgccaaatattcgcctctcgcgtctaagcgccgttatagtcaaaatgccgcgtctaaaacgcaaaaagctgcaataataaacacaatgtcgagactattgtgagtctcggctcattttgctgtccctatgccttttggacccgctcatgtgcactgcaactgcgtctgtgccgacatcgtccggaatggccacagtccgtcgaaaacggcggatcaccgaagtgcgctcgtctaaaagcacttccctttcggcattgaccacaagccgaccctcactcatcagcacctggaaatgccaaaaaggaggtgaagctgaagcagtgcttggccagtgaccacctcaatgtcctccgggcggaagatgttcatgtcgatgctgagcgcgaacttgcccggcccactgaccgtcttcacctcgacggatgtaacagttagcacagtttgaccccttcatgccttttatttatctttattggcactttgttctttttagtcccaacaattgtccccatcgctcttacagccctgtcccccccccgctttagtctcccgctgctctccactattcaaccccgcccaattcagtcccgtctcttcagtaccgtcaccggcgcctccctgagcctggccaactcttcgtccattcttcgcactttttcatcctcccccgtactttctcggctcctcctccttctccacggttcgtcctcctcctcctcctcccccctcgtccgcttcttccatgtccctcccccatcctcctcttcgtcagtccatcgattgctgccggttgagccccacgaggatggagaggcggcggcactcagtcgggaatactgcccaagcgcacacaacgggccgaagcttttcatggcggtccgtggcattaattgcgacggaaatgcatatctttggcacttttgcactatgctgac

SEQ ID NO: 39041 - DNA, 727 bp, Heterodera glycines
agaaagggtagactaatggctaaatatatgagtgaagaaaggacttgtaaaaggaataaatgaagagtgaagagaacatatgaggatattgaccaattagtgcgtcattgaatggaaggataattaattgtggaagtaagcgataatgaaaaaagtcagaaatggatagaggaatggtataaaaatcagagttagatgaagaaagacaattttagatagagatagagaccaacagtgaaaataagcagatatagaaagagtagaaaaaatatattaagaaataggaaaataattcaaataaacttaacccctataaataggccaaaaactaaatactggagtttgtaacaaaaaccaaggaatgtagctttcttccatatgttatcttttagaggaatggatttataggataaagggatgccgtgacctcaccccctttctcctcaagtttttttttttggttacactcttcctcatctttgcccttcctctccaacatattctcattcttactccttaccggcgaaaactcactctacccggtcccgttttcagcttcctttaacaattcaatgggaaatgtgtttttactaaaaactctatgaaaaaatcgaattgtttgccagcacaaccataccttgtgggacatggctactggagggacaagcctaatcagatattggctaccggagagccgagccttgtgccgggaattggtttctggatg

SEQ ID NO: 39042 - DNA, 818 bp, Heterodera glycines
  unsure (1)..(818): unsure at all n locations
cgttcgacagaagctttttgcagtttttcaagntaaccctcccttgagccccccaccccctattcataaattcagaaaaacccccgccccaccacaaaatggttattaaatacaatagatactaaatttggcttgaatcagcttagcacatttttaaaatgcctattttatttaagaattacattttacaaattaatgacaacaactaatatactaacaatattttaattttaaggaaaaacaaactccaaatgaatccttaaaataatactgtgggcataaattattttaattatttcaaagttaaaaactgatatagaggaataaaataaaataataaactaataaaataattttggcacgatattctatagacataggttcatataaaaaaagagaagcaaaagatcgtttgctcaaagatttctccaagttatgttttattttttagatccggttttgcgaaatctgaatgatttaatcaaagtacgaaaaaagcatttatgcttagatataaaagttttggcttgaatcagcgggactcctttcttgaattcatgttttcttcaaaaaccttgttttaaaactttttctgaatttatgaataaaaagccctaaaaatcaaaaattaacttgaaaaactgcaaaaagcttctgacgaacgacgttgtgcccttacttttagtaaggatctgttccaccagaatgttgggcagagattattttattatgctcgatagttcttctccattaaattattacactaacaataactgaacattttcaccaatgttgctaaatatttacatgataattta

SEQ ID NO: 39043 - DNA, 895 bp, Heterodera glycines
  unsure (1)..(895): unsure at all n locations
attaaatctttttaatgattaattgcttattttaacgaaaacaaaaggtgaaaaaaatcttttgggtttcattcgaaaatcttttagaaaaagttgcaaatcaaaaagggcccccattttgttactgttagcaccatatgctataaaagtgccattcccatccgttcgttttggtctcaaatcaaaggaaaaagttcaaatttatttttggccgaacttcccaatatcaaaaggtaatttttaatgatttaaagaaatatcaatgatcagattgttatattttagtcactgtttgcatttgttgaatgaaacgaataatttatttttaattatttgttttggacttaaatgacagcagcgaaatgtggacaaaaagtggccgagttattcaaaaaatgaacccaaaatggccatttgactaatcttggttagtttcttttgctgagacattctccaaattagccaattggccaacattaagcggattaagcgccaataataagagaagcactgtttgatggtaagcacaatgatcagacaatgatcagaatgttaagccaatgtcagtggtcactaaaggctaagaaggcacaattttaatgatttcggcatggtaaaaaattaaattcaaaaataattaaaatatttaaattaaaatattcaattcttttatgtatgaaaaatcattcaaataaaatatttttgtaaaggataaaaataatatttttattaagaaacaaaacttggatcattcacattttttccttctatcaaaattaaggaaaataaatttgtatttgcattttctttanaattcccattttaacctttgcttttttttttaaatgtatattttgtctttttacccaattntgtcattntcttttttttgtca

SEQ ID NO: 39044 - DNA, 893 bp, Heterodera glycines
  unsure (1)..(893): unsure at all n locations
aaaattgaatccataattaaaggtaaacggactatggaagaggcggaattccaacgggttggactttcgccccaacatgcctattcgctgttggatgttcgccaaaccaacgatgggcatcggtaacttgggaaacaggcaaaataatggtctatctctgtccaagtagactggtactgttgcgcaacncatggggagaaaactttgtttggcgcggcgaattcagcagcgaatggcttggttggactcaccagctgagaagggaactcgccgcggatgccgtgtttggtccgggcacattttggatgccttttgaacaatttgtgttttatttcgacgcggtcgacattacgcagctgagagaacatcatgggtggacagcgacgcgctattcggtggacatcggatgggaccagcaaaattcatggtgaccaaaagcattcggtgccaatgtatatgttttcatttagcatgattcgactgataatcgacgaaccaaccgaactctgtgcgactcttttccaacaacatgctcgtaccatgttggaccaagttgacattatgctgctgctccatagacaggacggcgaggctacgcctggtaacttcagacggtgttttccaccgactgccattcattcctttattatcaggtgaattgatttgccggtcatcgcgtcgagttttgccgtgtgtgcgaattgatgacacttttttgccttgtggagagtatttgctctgtgcccattcattttcaaaatttggagaacaaatggtttcggggactattgtcatacacaggtgacgagaattttagagtatttataaaattagatacccattgatttctcatacaatttaagttcacgggaaattcaaaccatgaaacttcg

SEQ ID NO: 39045 - DNA, 784 bp, Heterodera glycines
atgttagtttaggcactctgatgctttttctatcaataatggaggtgaataaaattttaattgctttttaactttgggaaaaagtttaggcttaactttttagtgaaagtttgaattctcatatttttctagtctaatctactcaaaacggttcagaattcaataaaaataacattcacggtgcgaaaaatggggtttgaaaagtttattggggaaaaaaagactttacaaaataatacccctgggagaagggagtgggaaacatgatttcaaaattttcaattttttctagtctaatctactcaaaccggttcagaattcaataaaaataacattcacggtgcgaaaaatggggtttgaaaagtttattttgaaaaaaagactttacaaaataatacccctgggagaagggagtgggaaacatgatttcaaaattttcaattttttctagtctaatctactcaaaacggctcagaattcaataaaaataacattcacggtgcgaaaaatggggtttgacaagtttattggggaaaaaagactttacaaaataatacccctgggagaagggagtgggaaacatgatttcaaaattttcaattttttatagtctaatctactcaaaccggttcagaattcaataaaaataacattcacggtgcgaaaaatggggtttgacaagtttattggggaaaaaaagactttacaaaataatacccctgggagaagggagtgggaaacatgatttcaaaatttttgttgaaatatttgtcgtgctctgaag

SEQ ID NO: 39046 - DNA, 985 bp, Heterodera glycines
atggagtttttccggtgccaaatttttgtgaattttctttcggcccgtcataagcggattgtttgggggcaaatgaaaacaaattttgtgttattcgaatgcgctagccgagctctacattttcaaatgtaacaacaaagggtctatctccactctctggcgagttatgtccagccaaagcagagtgggccataaacacgaattttttaatctttggtatttcctctattttgagcctgctctacatttatgtattgtgccaatatgcctattgcaactgaaatttattcaactttcccgacaaattgttgagataattattctagacgatttttttatatctcaaagcttaactattgcctttttgtatgataactggtagatattgggagtaaaaaaaagtttttttgtgactatttacaataaaaatttatgcagcatttctaaaaaggatctaaaaataatttcttgcgtaatattttttacattatgttgttgaagaatttgaggctgcttctgatgcgattgaaaatttttcagcttttcttgaaaagttttttcccagaatttatacagctttcccgacaaattgtttagataattattctagacgatttttttatatctcagtgcttaactattgcctttttgtatgataactggtagatattgggagtgaaaaaaagtttgtttgtgactatttacaataaaaatttatgcagcatttctaaaaaggatgtaaaaataatttcttgcgtaatattttttacattatgttgttgaagaatttgagtctgcttctgatgcaattggaaaatttttcagcttttctcgaaaagttttttcccagaaaacggatgggtcaaataaaaaactaaacatctcacatgaccaatttaattcacttacattttggtttactttattatgctggcccataaaaaaatggaagttttcccggggccaaatttttgtgaattttctt

SEQ ID NO: 39047 - DNA, 1421 bp, Heterodera glycines
gtcggcccagggggagggggagggaggaaaaggaggccgaggcaatcctctcagaacccgtgggtgttactgatgggtggggggtttgtggcctccttttataccggcagtttctgcttgaacaattgttgccaacttggcatgtccaaatttctgtccctaacatttgccaattttactaaccttttctcattttccagtttgtgccactttagccttttccagttttcttaacattttacaatttctttaatatcattcacattttgtctcattttaacatttgtttaaaatctgttatttcttttaacgttcaaattattcataattaaagtttaacatttgacaatttttctaatggaaaaattgtgacagaaaatgactaatgatttttctttctttcaattcattcatttcgttcacatttaattaattaatgtttagctgtttaatttaacattaatttaaatgttttttgtttttaatgtttttattttttaaattaaaaatcctatttcgcgtagtcgcgacattaccccgaaaaaagagatagtcgttttttgaaaaaaaattataacgagcaaaaccaatccaggtattcgttagggagtcagcaattattttttccaaggacgtccatttattttggcattatttcgtattaccccgaaaaaagagatagtcgttttttgaaaaaaattataacaagcaaaaccaatccaggtattcgttagggagtcagcaattattttttccaaggacgtccatttattttggcattatttcgtattaccccgaaaaaagagatagtcgttttttgaaaaaaattataacgagcaaaaccaatccaggtattcgttagggagtcagcaattattttttccaaggacgtccatttattttggcattatatcgtattaccccgaaaaaagagatagtcgttttttgaaaaaaaattataacgagcaaaaccaatccaggtattcgttagggagtcagcaattattttttccaaggacgtccatttattttggcattatttcgtattaccccgaaaaaagagatagtcgttttttgaaaaaaattataacgagcaaaaccaatccaggtattcgttagggagtcagcaattattttttccaaggacgtccatttattttggcattatttcgtattaccccgaaaaaagagatagtcgttttttgaaaaaaattataacgagcaaaaccaatccaggtattcgttagggagtcagcaattattttttccaaggacgtccatttattttggcattatatcgtattaccccgaaaaaagagatagtcgttttttgaaaaaaaattataacgagcaaaaccaatccaggtattcgttagggagtcagcaattattttttccaaggacgtccatttattttggca

SEQ ID NO: 39048 - DNA, 795 bp, Heterodera glycines
tccttctgcggcgtgcggtcgcgttgttggtcccatcttttgcggccacctttagggacggaaagagcataaaaggtgccttttttaatcattccgttgggatttcgccacctccgaggacgaaactgtccacttcgcgcagcttcgacagcccggcaattcgactttccgcccgactgctggggagcagtgagctgactgaagcaatgaattgaaaattgcttttttaatattttattttgttcattttcgaccgttcgccgccgctgccgagcgacggtcggccgaactccgtccgccgtaattcggtcggctgcctttccgtgtcgtctgttgttgcattttctcattttctttcttcctttcatgctgaaagaaacaattattttcaaaatgcatttttaccatttaaaaatgagtgtaaaattccatcatttatttaaattcgtttctctttatttagtaattaaatgttcaatttaattcattgttttccctcacctcaatacgttccatttcgttcacttgctgttccttctccgcttcttcgtgtacttcttcgatggttttcggccccttttcgcccccgcggggcatccatttgttactgcgcaattcctttgaaaaagtgatgaatcatttttgaatttccaattaatttttgaattattctcccccccccccccccgctgacctccacttccaaaatggcaaaacgaattcggttggacatttcctttttcagcgtcgaagatgcgagaaaatcttgtcgaggctgaagctgtcctaaacatg

SEQ ID NO: 39049 - DNA, 869 bp, Heterodera glycines
aaagttcctagtcgtatgtgctttgcgttggttggttggcgtgggtgactgtggtggttgggccgtttttgcgatattatggctggaaaaaagatgcgatttcgctatggggagcgcggccgtctgggttcaagtgcttgcttgcgcttgtgctcggcattgaacggtgatggctgctgctggggtgccacctttgtcgtggcctcagtttctccagcgattggcagctgtcgaaatgaataaacatgcagctcgtctgtgtgttaaagaaatttggcgagttaattgacttgtgtaaatgtggcctaaggcacaaatgctgtggggaactcagcactggggatgctgaacctaaagttggtggtggtgttggtatacgagtgagtggcgtattgccatggttgacaagccctatgagttcgtggatcggaactccttgcctggggaccagtgtgcttgcattcgaaaaaacacgagacataagcgcccgaaggcctttggcctgaggaagtgtcctaaccgggaaatccggagtgctcgtgtgagtgcctgtgcactgccctcggagctgtgtccagcggcgagatggttcttcccaagtccgggaagctcggatgcctggccagcgctgtgtcattaccacttgctcggtctccttcgctgcccatgcgcacgcttgcgctaaaccggaagtttgtttctgctgaaactatccgtctttacaagacggctgtattaagcggcgcttggcaacgctcgctagcagtaacctggttgatcctgcctgaactgattgtgtcatttcaaagattaagccatgcatgtgtaagttttaacctgccagacagggaaactgcgtacggctcatt

SEQ ID NO: 39050 - DNA, 1143 bp, Heterodera glycines
tgttgctgccacgttcaaagagatttaaatttatgaaaactgctaaaaccattatgcgatattgttatagaaatctaagagctttgaaaatggcattcacagattggaagatgaaatgtgaatgacttcccccccccccatttaactcttttcatcaaattttttcactgtgattttagcaaaatgattcttaatgactctttaggtgtgtgatttgtgcaatttaagccaatgtgattgaatcgcttttctctctgttttattttggcgcctttaaattctttgagtaaatttcagcagcattttgtagtcatttttgtgccaatcttatctcaataatttttggcctgaatatacaagggtcaatggcaactcgtacaaaagacagttcttagaatgttgtacaagggcaatatgtttttcgtgcttatctgtgcgtatgaagtgtgaagtgcgcaaaaattttaggcttttgcctaaaaatcacagccctagtcattacacaaatatacaaggattaagcagaccgaatctacgagagctaactgtccggtcaaacagacccaaatcccccccccccctacacaaccatttcaattgaagcacagagcatttagatacaacaatttatattatgggggacaaaatgacaattttgggacggtgggatgggatcctatcatgtccatgttgagctgacgaagcgttcttccatcagatgttgtactcgatgacgagttgcttcttgcgcttcggtttggtggtcttgaaggcgtagccgatgcgcttcgtcccaggttgatcaccttaatttaaaaactttattccgcatgccatgtggaacgcgtccaaacgtacccgcacgtagtaggtggccttgttgtcgaacggtgcgttgaagacgcccttctgcgtgggcagtgttgcgatgtcctccagcggaagttgcgccattgctgttgtcgggctagctttgtgggcgcttaatgtgtgatcgttgagaagtacaaagcaccagtattaccataaactcgtcgtccggccaagcgttggcccaccattcctcctgctcctcctcgttctcaggagctggcggtggtggtggtggttgtggaggatgaaatctgcaaacatttatattta

SEQ ID NO: 39051 - DNA, 1007 bp, Heterodera glycines
  unsure (1)..(1007): unsure at all n locations
gtcggtcgctaaattgtgcagcggttgcaaaaataaaaataaaaataaatgatcagtaataaaatgtgatcacatgattaacatgatcagtagagcagaacatactccangggccaaaaatttgcgcaaattttgaaatttttggcgaacaaattaattcatctaattaagaaatttaagtacaaactaggaccgggaccgggatgtagagataatttttgaacaattgtatgaaaaattaaattaaagtggtaattttcgaaaaaataaaattgcttttagacaccattttaaaatatcgaaaataatttttttttttttgtcaagaatttataggcttaaatattattgcaagcaatttttgacattgaattttaatcaaatttaatcacagactaccgtataacaacaacagaaaaatacgtttataccgtatagaaagaaaaaaaaaatatgaagaaatgttgggcatggaaaatgggaccaatttaagcatcatcacagtcattttttttttttttgttaattgaactcattcctccgatcagcgatttgagtgtgccaaaaatcattttgaagccttctcgtccacatttgccgtcccatttttggtggcgccagccgccaaattattagtgacagccgtttccgacgacgacgacgacgacggcaacggcaacggcacagccttttgccgttccacccaatcgttcatcacctgtggcagcaattaataaatatatggaaaaaaaaatttttgttgttaactgttgcgcaatttccataaaatcttcaaattattttatagtgaatttttagaaattttttgaaaaaactttaagtgggataaacagttggccaaaaacaaggacaaaaaaatggcacaacaacaaattttttggattttaattttgaattaaattatattccagggcgggccagttttttttttcaaaaaaaaagacaaacgaggctaaaacaaagatttggaccccaaaaaaaaaaaa

SEQ ID NO: 39052 - DNA, 1470 bp, Heterodera glycines
  unsure (1)..(1470): unsure at all n locations
cacttttacagtatctcaagatgatatataataaaattattcgttagttttttaatagaaaaacgtttnttgtcaatntaaaaattnttatattcacaaaagctaaatataatttatattaatgtagaaaacacaaatatttgttttataaattgttaatttcataaattatttattagatttaacttttaaaacaatttttattttttttttatatttctttcataaatcctaattgttcttcatcccttctaattacaagtttatggaaggaagaaaacggcactttcttgcagccaaaaattagaaataattttttcggtagaattaccgaaaaaatatttatataataaaataggaaaatgactaaatcaaattaataaattcaattcaacttttaaaaatttttcgccttcggcatcgccggactaaatattgaaattcttttgtttttcatcataatctcaaaatcaaaatttaaagggaagtcaatttcgagtcattattatgtgaaagtttaacgaataaatgagaatttgaaaaagatgttttttacatttttattatttattgcaataaaataatgctctgctttataaaattggtaatttgccaattaatatttaatacatttaattaatcaaataaataaaagaacacccaaatatagattaaaaatggtcgataacttagcatttaataaatgaatttaaattatatttttattttcataatattgatttaaaaatgattttaaaagtttaaatatttgtcgatttaaaaacaatttttatacttataaaatggaatatcgatggcttttcgtcgtcccccccccccgaattattgttgtacttttttttaatcataaaatgctggcctgtcatttttatgttatttttgactaatatacaattttattatttgtttgccaattagtcatatcggagaaaaacatttatttcttcatttttccactttttcagttttttcttccatacagaatttttgttactaatggcccttcaatgcttttatttgtcaatcagtcacattcgtcgaaacatttacgttgccattttcacgcatattaattcgttcaccaaaattaatgtattactaattgcatgggtgtgagagcaaacgccaaaacagccctttaaaaagcgcacaaattggagcaccaaatcattcattccgctcaaaaattaccaatttcctccccacaaaattacccaattctcattaacaaacctacgaaaaaaatgcattctttcaagctttttgcatcgctctttcttgtactttgtgtggtaggttttaaattttttaaaaataattttttcccattttattgaattatcttttgttttttagatttcacttgtcatctgccaggacaagccagcagcagtaaaacgggggcatcttcttaattagaacaattagttaacctaaagaaaaaccaaa

SEQ ID NO: 39053 - DNA, 1747 bp, Heterodera glycines
  unsure (1)..(1747): unsure at all n locations
gagctcccttgttatgctcacccgcccgaaatagctaatatctctttagtttatttattattatataaaattatataaatattttgttcaatcaattgtttttttctttgctgtcatttggtgactggaataataaaattgtaattgtttctcgtaccggagttcagcgtattatgcacttgagttgtgataaaaaaaggattattttgctaatttttacaaacaaaattagttttttcgttttaaaataatttaataaatatttttgaaacttatttcagcgtatgttttataggcacttattccattcctgtcacatgaattgctgggttaaacgtatgagcgtgttttattttctttaaataattatgtgattttggtaaaatttaaaactatcttaagcattattcatttttctttattgttatttgaatttattactgaaaatgatttttcctttcaactataaattgaacaagtaatgtatgagaattactcttattattagatgttttattgtatttttttaataatataaaataatttatattattcttaatggtttattttttagcttagagtcaacatttaattctttttttttacctttatagtgtgaattgcattgcgtttggttcgttgttcagcaagtgcattattttttcactttttgagttaagttcaatttttattttatttatatttttacatattttcggatttttctaaatatatatttacatattttctacatgtttttagcagtaaattaattaattgaattgattaaactagagttgagcggtaatcggtaattgtaaaaaaaccggtaccggtactgaccggtaatgcaaaaaccggtaccggtaccggtaccaactttttccaccggtaccggtaccggtaccggtaaaaaccggtaattttccaacgtaaaaatttttggacaaaatttttcaaatacaaaatttttattcagttttcgcgcgagtgcctgtttattagcattagaattgttcagaagtatatgtatattcaggttgaccaagttttttttttcaaattcaggacatagaacactaaaattcagatatagacctcaaaattcagattattgcaaaacaagggatcagcggccaattttccaattttgcgaaggggtctccggccatgtaaattaatgtaaatcaatgaccttttttttgctttcaacaccgctttttacgcggcacgtttttccaagacttttgggggacaaggagggccggcggtgccgataggcgccgccggggaaaaaatttgtaatttttaatgcgatttgttaacagaatttgtaaaaaaaatgaccaattgattaagttttgggtttttaggatgcttaacatgaaagaaaaaagttggaatattttttaaaattaaaattttaattaaaataatggtaaagaaaatgtgaggaatattctatccaagtggggaattgaacccaggcgaaaaattatgaaaggtagaaagtttaaccactacaccacatgtgcatgtgtgtactcccatgactaaatgaaataaaatttaattttttctcaaaaatttctccttcttcaccaatttcctactcttttctcgaccagacccccattcttaccagtgcaaatttttaccggcggtaccggtactagacaaaccggtaacggtaatttcatttttgaaaaaaccgngtaccgngtaccgngtaccgngtaccgctcaa

SEQ ID NO: 39054 - DNA, 1038 bp, Heterodera glycines
  unsure (1)..(1038): unsure at all n locations
tttgtaattttaatgcgatttgttaacagatttgngtaaaaaatgaccaaattttgccacaaatcttacattttcttgttaaatagtgacattatgtcataaaatttcaaatttttaattattaaaatgtgattgaattcccaccgaaaaaggaataattttgaaaattagaagaaaaaataactacttgaaggggaactgatccaacgcaaaaatgaataaaataaccaactgcacaacacactagaccacgcatataaacaagtaaatggagcaaaaagtttctaaaattacattaattttaaatttacaaaaaaccaatcattagggctgtaaaaaagtctcggtctcgagtctcgaaaatcgagaccgagacttaaaaaccgagactcgagaccgaaaccaaaaaaaacctgagacttttctcgagtcgagactcgagaccgagactctcggacagcactaataatcgtatcgcacattcagacttttttccaagtgtttttggtgtctctgatcaacactttgaccggctccctttacgtgtacatgcaaagctactcagttaatcagtgggtgatcactctcgccgaatttgcgtggtcagttttggcacttaatccgaagctaaatttcccaaaaacactttcaggttgaatgttcatggtaatatttttaaattgaaaaacaaaaaacgattggtttgctttattttttgtttgtttttcccaaggattccccgccgtaatttatttggcactgaacaaaaccattcgcgacgattgccgcatgctgtacatgaaagtgttcaggaagaaccgtgtcagctttatcggcggggttactgtaatccgtcggacaaccgacagaaaattggccaccattatgtcggcaccattatagcgaattccgaattctggaaagacgacggatgcccatttcaccaccatttcttccattcattttnaaaagacatatagccaaaacctatgtcgttttagacaattttatatttttttaattatctattctatcatg

SEQ ID NO: 39055 - DNA, 1130 bp, Heterodera glycines
  unsure (1)..(1130): unsure at all n locations
tgttccgatacgtatctctgcaaaatttggtgagccccctgatcaattacaaaataatttatggacgatcaaattttttgaaatttttttaagtgcaaaagtggtgggttgtctgcaaaaattttcaccggggtttaataaatctaggaaaattagtaagcttttgtagtgttccgatacgtatctctgcaaaatttagtcagcccctgatcaattacaaattatttatggacgatcaaattttttgaaatttttttaagtgcaaaagtggtgggtgtctgcaaaaaattttcaccgggtttaaaaaatctaggaaaattagtaagcatttgtagtgctccgatacgtatctctgcaaaatttggtgagccgctgatcaattacaaattatttatggacgatcaaattttttgaaatttttttaagtgcaaaagtggtgggtgtgtctgcaaaaaattttcaccgggtttaataaatctaggaaaattagtaagcttttgtagtgttccgatacgtatctctgcaaaatttggtgagcccctgatcaattacaaattatttatggacgatcaaattttttgaaatttttttaagtgcaaaagtggtgggtgtctgcaaaaaattttcaccgggtttaataaatctaggaaaattagtaagcatttgtagtgctccgatacgtatccctgcaaaaattggtgagccgctgatcaattacaaattatttatggacgatcaaattttttgaaatttttttaagtgaaaaagtggtgggtgtctgcaaaaaattttcaccgggtttaataaatctaggaaaattagtaagcttttgtagtgttccgatacgtatctctgcaaaatttggtgagcccctgatcaattacaaattatttatggacgatcaaattttttgaaattttttaagtgcaaaagtggtgggtgtctgcaaaaaattttcaccgggtttaataaatctaggaaaattagtaagcttttgtagtgttccgatacgtatctctgcaaaatttggtgagccgctgatcaattacaaattatntatggacgatcaaattntttgaaaattttttaagtgaaaaaggtggtgggtgtctgcaaaaaattttcaccgg

SEQ ID NO: 39056 - DNA, 1040 bp, Heterodera glycines
  unsure (1)..(1040): unsure at all n locations
aagaaagagcgccgacaccaccgcgaaganntttcgatgatgccgcgggggagttctgtcgccaacagcgacagatccaatcgatgctgttttcccacgcttttttgttagtgatagtccaattaagtttgttttgctccgcccccctcgcatttttcggcctataaaaagggcaccatttccacccttgcctcactcaccccttccacatttccattcatccattttctttgctgctttaataaatatatatttgtgcgtaatcgggggatttggtcgggacggtttcccctcccccttctgctgctctcgtctctcgccgtcgtcgttgtccgacccaccaccgcttcgtcggtcttccaccgcaggagtcttccactcctgcgggccttcgcttcttcggctcgtccgtcccttccctccatttgggaaggcacggccgagaaagggaaaggagggaaaccacagctgattttgcctttggcaaagtcggctcccgtctccctccctccccacaaagtttttgtcgcctccttggctgcgacaagaagcttaataaatttaaaggttatatcgtgaaataataatgaaatttacattttaatttttatttaacaacagttcaacccccaaaaaaataaattaggatttatatattttgtcgataaatttatgtaattcatttacagccttcctcttgattgtttcctcagtatatgatatgaacgagaggtcgtacttctttgttttggttttgttgaataaaaattgttgaaaagccgcgttataatcttaattagtcattgggtatatgcccattgggggagtcattgggtatatgcctaatggggggagtcattgtgtatatgcacaatggggggagtcattgggtatatgcccactgggaaggagtcattgggtatatgcctaatggggggagtcattgtgtatatgcacaatggggggagtcattgggtatatgcccattgggagggagtcattgggtatatgcccaacgggggagtcattgggtatatgcc

SEQ ID NO: 39057 - DNA, 695 bp, Heterodera glycines
ttcttatttttgttggaatttgttgacattttttacatatttttaattaaaaaggcaaatattttctgaaagaaaaggtaaatgattttaagcaaataaattcaattaaatgcactgaatatttttattgatatattcaattattttttagtttattatacgataagaaaatgaaataaaaatttgtttgttggaaaatttaaaaaaaaattttaaatttagttgaactaacggacaaaggaatttgccttttataggaattatacccccgcctatttgtcattgccttccccaccccattttcttgcatttcatctcatttcctttcaaattgggacagtgaaatgaatctcgacgagggatgagagtcgagaattggcacagaagggggggggggggggggaaatctctggctcgagagattttggaacgcataacatctctcgaaacacgaaatagtcatacgtctgggatataacatacactgtcaaattctcccagagattaaatgccgattgcgcaccgcccttcctatcgagctcgcgaggatatgtaccgtataaaatttctcacaacaagagatagtcaacgtcacggatataagataaattttaaaatgctctgagacaataaatggggattgcgcaccgccctccatctcacgctcgaccgcttttgcatcgcataaaattgct

SEQ ID NO: 39058 - DNA, 1307 bp, Heterodera glycines
  unsure (1)..(1307): unsure at all n locations
gcaaatgggaatggacgaaggctcacattttgcgcatttctcccaaaaattccattttcgtgcatttaaattttttttttgtttcccatgncggtaaattccataaaataaatntaaaattaatttggctcgctacaaaaacgccctattagcccnccattncttggaaggccaaaaatggnccatttgcagtgccaaaaccattttccaaggattcgtctagctttatgaaaccattcgccattgattcccccattcttctcccatgccaatgccattggatgatccctccaaatgcngcagctgctaattttggagcccaattggcgcaatgtttccttcccccggtccacgccccgtcggtttaagctgatggattcatggaaagttgagcgccgtcattttaattttattcctcccaaaagccaaaggatcaatgatcagtacagcaatgtttgctgatcaatggcacaacacaaaaatgaggggagatttttgttttattttttgaaaattaagaattgctttggaacatttagtccactataattattttaaatttttacagataaattatacatattcaatttttaaatttttattttaaattgccctttaattcaatttcaattttaaaaataccatttttgaacattgaaaaccatttacccaccaatcctttctgactcattatcattcattaaaagatgccacgacgaccctttggccgcttgttttgccaaattcagtgaagggtgcacaaaaattattgccatgccggtccctcgccccacgtgactgtccgtcttggcactttgtctgtgccagtcattcaaaagccacctgctgctgttgtgccaacccctcctcctccctaattaacctctttattggggcaaggggcaggtggccggccagcggaaagaacccgatgaaaaaacacccacggcagggagcgacgctacgctaattagtctcattaaaaataatagtactaatgctgctgcgcacatttggcagcaacgggagcacactagccaaataacgaaggtggaaaatctcgtttgagataattttatgcctgatttttttatttttgtctcgcttttttttgcttttattctttttggcaccaattaagccgcctgccttcggcgtgggatatcctcctagcaaatgccaagcattgtttagctaatttgccatttattggccgacaattagcttttgttccatgtatttggcactttggcgcgtggtgatcatgacaaaaaaaatgctgtcataaaatgggaaggaagcagggg

SEQ ID NO: 39059 - DNA, 515 bp, Heterodera glycines
aatcagttaggttttagtgactacatatgttcttaaaacaaatttagaagatttgcttgttgcttagaatttgcaagacacttacttattctacattttgtgacgccaatcaattgaaaaaggccaaagttcgctaattatcgcaaaaatgaatcgacggtatgaatttttttcaaaaaacttgttttttacctattttttcatgtttcatttgtccagttgggtgtgcaacgacgtgtggatggacattttcccgctgtttgaccgtcctcaacttggcctcaaaatggcactgatttcgccccgtttcgaagcgctggtggacaaacattttgaaggcaaaagcgaggtaatactgaaaaatctgggctccgcccaaaaaaatttttttctgttatgaaaagaccaactcgggggttttcggggcttctgatcacgaatatgatatcagatttgcaaaaatcattgattttgaaaatcagattttttaaattttgtcaatatgttcaaatgtt

SEQ ID NO: 39060 - DNA, 1176 bp, Heterodera glycines
cagtgccaacaaattgccgtgcggcaagcagcaaatgcgaatgtgcagcagagatttcggacagaaaatggactcgatgttttcgtgcagagacgacgaagtgcccttggcattgtgccctttttgttggctttgtttggcacggcaaagcaacaccaaaggcatcagttgttggagcagcagtgactcgtccaattgggaggagtgtccgacctaaagcggacaaatgatcccattagtaaattcgaatttggcgaccctttccgctacctccgccccatttttctctctcaaaaagtcccttctctcttcgttttttctctcttttccttcgtttcctttgcccctctttttatcattttctgtcgccgctggtgatgagcaagtggtcgacgtggaggaggaaatgccgctgctgctcgacgacgaagtcggcctgaccgtctccggtgccgtcgtcgtgtcgaattcacttaacgcatcgttggcacttttcgatgctgcgatggaagtgaaacggtcgcggaattcgtcgttgccgaacgcatggataagctcgttgtattcggagagaaacacaacgcctaacattttaaaacgaatttattttatatcgctaaaattaatttaaaaatacatttagtaattacattctgtaatagcattccaattttggcctgccatttccaaaagtatttgcatgtgtttttgtctgatagtaaaggggaaagggtggaggttcgagcccgctcaacaacattactaaatacataatacttaaattaacatatttttatttcctagaaatgaaaatggcatttacaaaaatgatttttgaagctttttggtttttgtcaaccaataagacattcctggttggtaagcaattggaaaacacagaagaggggaaactttttctaagcaaatcataaaaaattggttggattagaaaaaaaatatgggccgtgtgataattattaatgaataatttttcgaaattttcgaaataatttatttaaaataattcgacctatcattagattcagaaaaccaaatttgtgtgattttgacccctttaaaagcttaggtgcctccattttcactcaaattttcaagttttaaaccggttcaaaaaccggtttaaacgctttgccgcgcagttttttttgatggttt

SEQ ID NO: 39061 - DNA, 622 bp, Heterodera glycines
ctcactcccataattattaaatccgtgtaattgtcaccatacggcgcatcattcattcattcatcgtccatttttgtcactatttattgtatttttattttccttccgtccgtttttctcccttttttcattcattccgggtgagtcttttgctttgttttgctgaacctattcacattcgaatcctttcacttacataataaatgatttattctaatttataaatgctcagagcaattaattgtttaattaactctttggcagtttaatcgatttgaaaagaaaatgttttcatcgactccccattaattattttatcctaaaagttccacaaattgtgtcaagaaataaattcgactttgtttccatggtaatttaatggtgatttatccgagtggtgaaggaaggattttttattggatgattcgcttttaatttgtggagtgaatgatttgttaatgcgccaattaagctaatggaattgaagcaaagagaaggaatctcaacggagaatattaaagaaaacgatggaattttattatttttttttttggaaacgattgaaaaatgagataatccgacaaagttttggtggggaaaaacggaaaagcatttcaccccc

SEQ ID NO: 39062 - DNA, 898 bp, Heterodera glycines
tgccgaagggcgtggtcgactacgacaaaatttccccttatgtggtgcgttacaaagtcgatgacggtgaaggagcggcggactcagctgtcggtggaggcccgtggaaattcgtgagcaaggtgttgcactttgtagggaaggtggtgctcgagagtgacgactcgagaaaactcaagttttctcggtctcggggtcaactcttgggaggtattatgtcccgagtatcactggtggccagaggtttttggtgatgaaattcaccatttaaccgccatatttccttttcgggagtgcgacagactaccaatctgaaacttgaaaaagaaaaaaaaaattagtcaaaattttaggcaaaaactctcagagatgctcccggcattttggcttggagggttgaaagggtaccaataaggaaaattggaaatctaattcttgtcatttttggggttaaaattccaaaaaagaatgtaaactggggtccggcgatgccgtaggaaccaactggaatgcatttggttaagtaaattgatttttaaaaaaattttaaattaccactcttactgaaaaaatttttctcattcggcgggcggcaactgcccccgggcctgggagtacgtgtcctgcgtacccccatccctggtaccgtctctgtaatgtgtgtatatctcactccaactttcgaaattctgttctattatggcacaaattggcgccgtcggatccccaataattaatgcttatgatggtgccatttccagcgtcaacatgttgcagcgaaagaatatgaagacatttgcaagccattgtgccctggcacgtcatacaaaatttgcatttgggtggaggaccgccacggggaaccgcttcatactcataaactcaatgcgcggaccaa

SEQ ID NO: 39063 - DNA, 1024 bp, Heterodera glycines
  unsure (1)..(1024): unsure at all n locations
gacccgaaatattgggaagtgaaatttatttatgcaaaattaattncaataaaacaaaatgtgttnagaaaaaaattctaataantatatattactactaattaccataaaaattcaaatcaaaaattcccctagcgaaatagttaaaaaagtatatataagatactgttctatatattataaaaaagggcaatagcggaaaaataaaacaagtaatcattaacttatagaaaaaacaaagaatattaaatgaatgtgatcttaagcatacacttaaattcaaaaaaaaaatgtgaaaaaattaatttaaaatgataacttttaaataaattcactgaatgaattattgattaatttgaaagtaaaagttaaaagccagaaaacaaatacaatcaattaatcgtaaattaaactcagtaaattgctcacataaaatataaattaagctggtatttggcattatgttaaataaatattaatatatttcaaccacacgcgagaaaaaaaaaaatttttattatatactcttaattattgatattttatataaaaataatatgtaaatcattaattgtaattaatatttattgagtatgaatttaaaatgatatgataatagaaaactaattcatgcaattaattatcgaaatttatttaattttctgttacttttaaaattaaaaaatttaatatttgtaattgaactttaaacaaaaaatatttaaattattcccacaataaaaattaaattttaattttcactttcatagcatgtcataataaataatttataaataagcttatatttgcaaaggaattcttcggttcagtggcgagtaattaagaaatttataaaatattaacaaatccgtaaagaatattacaaaagttgtttaaaaattcttattttttattaaaattggaaaaaattgatttttcgctaaaaataaaaaaccatttataaaactaaacaaactaaaagctgaaactaataaaatgaataacaaacaataaaataatgtaa

SEQ ID NO: 39064 - DNA, 1359 bp, Heterodera glycines
  unsure (1)..(1359): unsure at all n locations
tgatcaattacaaattatttatggacgatcaaattttttaaattgtttatagatttttaaatgtttgcattttttntggcttaccaaaacttcatcgacctgggttctttctattctctttcaaatcgccccaaattttttttacagccacgaggccgcgaagcggccgagtgagtaccttgggcgcaggaaaattattaaggaggagggttcattatttatttatttttgcaaaattaattcataaatttttttcagaaactgctctgaaacgcaccaaaatttatttacaagttgaataaggcactctgactcttatattatcaaaaagggagatgaataaatattttaaaaatttctaattcctttttaaacaggccgaaaaagtttaggcttaactttttcagcgggtttaaaaaatctagaaaaattagtaagcatttgtagtgctccgatacgtatctctgcaaaatttggtgagccgctgatcaattacaaattatttatggacgatcaaattttttgaaatttttttaagtgcaaaagtggtgggtgtcttacagcttaactaggcccaattaagcttatttccagaaaatctcgcatgaattgtcatttttaaattttttatagatttttaaatatttggatatttttttggcttaccaaaacttcatcgaacctggctctttctattctcattcaaatcgctccaaattttttttacagcttaactaggcccaattaagcttatttccagaaaatctcgcatgaattctaatttttaaattttttatagatttttaaatgtttggatttttttttggcttaacaaaacttcatcgaacctggctatttctattctcattcaaatcgccccaaattttttttacagcttaactaggccctattaagcttatttccagaaaatctcgcatgaattctcattttaaaaattttttaattgctttttaaatatgccaaaaaatgtaggcttaacttttttagtgaaaattcgatcactcatattttttgctaattgagcagaagcgtaccaaactttgcagggatactccccggtaaaggactaacttacactgaaatgagcgccgagctagctggctcaaaaaaattttcgaaaatctgagtctttcgtttttatttattttttgcaaaattaattcttaaatattttttcagaaagggttctgaaacgcaccaaattttatttacatgttagtttaggcactctgatgctttttctatcaaaaagggagatgaataaaatttttaaaaatttttaattcctttttaaacaggccaaaaagtttaggcttaacttttttttcagaaactgat

SEQ ID NO: 39065 - DNA, 1035 bp, Heterodera glycines
ccggaattacggcaaaaaaatcattttgcaaatgatttttaattgttttagacaaagcctcatcctcgaatgtcgttgaattcgcgtctcagcaaccacactggcgacgaagttgttgacaatgagagtcattcgccggcggtggcgacgccgccggtgccgaaaagcaaaaagcgaaccgccgcctcgctcaagcagaacgacagcggcaacaacaagtcacttagcacattgattgaggcggccaaaatgatggagggcggctcttcatcggaagagcatcaccaggacggagtcagcatgcccaactcgccggcggggagcagtggttgaagttttcaatacctcggataaaactgacaattttgacgatgactgaaccggattatgcaggattttttctcaaattcgcttgcttcaagcgaggattctctcccttattttatttgtttccgttatccaaattttccattttatgctgcatcataaccttgaccaagtacagactataacttaaaaattgctttctttgatatgaacattgtttagccaaaccattgaaataaaacattgcttgactcttatcacagttttagtttttctatcacttgttaattaaaatatagtcaaaagattagcaaattcatcagttgttgacgctatgattgtggtctttgttgccggtgttcctccatttcgccactttcctcgagaaaagtaagagcgagtggaaggaacacgaaaatgaccaggactacggcgacaataagccaaacatctgtagaatatttgaaaaacagtttaattttgccgtgaaaagctcactcgatgaattgtcgggcacaccggcatcgacgaaatgaaaagcgcccccctcaagggaaggggagggcaaattctgtcgaacggtcgccacattccgatccgtctcatccaaaatgccctcaatcgcttccttcgcgtaggctgccaaactttcatcggagctccgcagcgcgtcgttttgtcgaccattgagtaaagcaccgaaatccc

SEQ ID NO: 39066 - DNA, 932 bp, Heterodera glycines
acatattcgctggaggcggtcatttgcgcgaccgctttgaactgtgccaaaaagcccttttggtgggcgacggatgagcgtctctccgtggcccaaatttggccaaaacaggtggcccagtcgctggcgtttcgcaccgcgcattggtttatctgctgaatgtgtgcacccgtgtgcagtccgctgggcccgaacagccccgacttggggtcaacgtcttaaatgaaatattgggaaaacgcattggaccgtaataaatgttaaaaaatcaacgaaaaaagggagggctaaatgctttgaatctacctaattaaatattgaaattccaaaaccggacctacgaccacaacgccaccattgtttgcgtagaaagggagggaaaggacggggagcagcgagagaatgagcactccgaccagcgccagcagaacattgtgccaaatgccggcgccaaaaatgcgcaacttttgagcacacgaacaacggtctgaaaataattaataatttgtaagcaataagtgggaaaagatccaaattaaaatattagaagttttttataagagaattttttaaaatttttctcactagtttttaaaatttttctaactattttttaaaattttatgaagatttactttgttattaaaaaaatacccaaaaattcgctgaagagggaatcgtagtgcaccttgttatttgtgcctcgaataatttatgccgaagacatttttaattgtcgcaaatggtcaaaaaaatatgaatcgcaaatgtttgaatgaaatcccggattaaaattggattggaactttagatacaaatgagaaactgacagacgacgcacccaattgttcgggttcgacctcagtgaaagcgccggggtaaatggcgaacagaaacacaccccaaccggtcacccgcacattggcgttggc

SEQ ID NO: 39067 - DNA, 1146 bp, Heterodera glycines
tgtccgctcggaagcagaattcaccgggtgcaagatgttttcttggacttcattttctggcctagcaactgaaagaattgagaagaaacgtcagaactcatgggggataaacgccgacttcgaattgggcaaaggcagtgcatcggctgttttcaggcacgggtttgggcctttcctgaacaatgttttttctctctctgttctctttatctctctctcaccgcgttgcaaaagtcgccctgacacacgcacgactccgtcctcagcagatcctccgcccgcttcgccactgtgtgatgcattgcgccggtgatcggtggcatcatacacgcgccagccgaccgtcgctccaccaaaggcacggacgaattgacgcagccgcgttccctctctttgctgcggtgattggtcacgaaggtgcaaagttcgcttgggaaagagtgccattctctgtttattctccgccaattggtcgcttaccccgtgcacgtcttcttctcccggcaatgggtcccttcacaaatgcaagtgaatctaaagggacacagacggatcagcagctgattgatcagtgccacatacaactgaatcggctccatttccgtctttcgcgacggacgcttattacagtaatcctttccgtcacagaaacacgtgaaaggctcctgacagttcaagcagttctttttttggttccgttccaccaattctctcgtcactctctgcacttttccttctctctcacctttccctctccgtccgccgtttcgcagtgcgacttcaccccacgacgaagcattgttccgctcagacagcctttgaccaatgtcggctctccccacacactcgtcccccaacgcggcgcataatacgactgaatggagcaccaatcacaagaacaagtcaagtcatggtaacgaggtttacagtgcctcacaaatataaattgattttggttggttttatgcgtacagaatgtttttgttcttttgcaattttgtttttcgaaacatcaatcggtcggagacttaacaactcccgaatcgcccaaatggctctttagttcttcgatttccgtaatgtgcaaaagccggaacccgtcagttgggccctcacgttgggccccagcaggtttttggactaact

SEQ ID NO: 39068 - DNA, 680 bp, Heterodera glycines
tgcataaaaatcaaaagaacagaaaggaaaacatacactgactcaacgccaacaattctttcgacgagcaaaaacaatttgtccgagtcgtttctgtccaacgcgtggcaaagcgacgaccgacggcaaaacaacgaaagctaaaacgttggcatgtgccatatttgtaataattggtttgtttctgtgtgtctgtcacctccgcattttccacactgtcttgcccaccctctgtcgcccccgggccattcattttcttttcgattgattgcacaaattggcggaggcgaaaagtgacgaaattggtgccgaacatttgctgttgttgctgtgcatcaaaatccgagcaaaaaaatgtgaaaatctgaagaaaaaaacaaatggtaggaatgagcgataggaaaaacgcaaagtgaaaaatttacagaatggacgtaacaattgaacaaagcgacaatcgactcgacggagagttcagcggacgaccgcaaaacggtggccatttgaaggaaacggcctaagggggggggggcaggggcgtatctagaaacatttttcgggggcggggacccgacctgaagacctttttctattaaattttcgtttggggggggaattcgaaaaaatttccattatttgctggaaaatttttaaaaattttcatttcggggggggggggg

SEQ ID NO: 39069 - DNA, 1640 bp, Heterodera glycines
  unsure (1)..(1640): unsure at all n locations
cttttgccagaggcgaaaattctcaattgtaagtaacaaatatgtaagaagagacatgggagtgttaatggcattgtttgaagtttcccacggcatcgcccgaaacaaacgacggacggaccaacgaacgaatgatgcgggggtgggggagaggaggacaagcggagaccggccaagggacattaatattaaaataaattaattggatttgtaatttaaaaccgttaaaatttccaatttatttggcactgaactttttgccagatcaattgtcacttcgcaatttggatgatctcactttcattaagttgttgattctttcgtttattttttgtttgtttcccctttttttgtccgttttcctttcgttgcgccatcgccggtcaaagggtttggtgcccttaagggatttgtgtaattccttaggcgattaaccctctgacccctaattaactccccgccgccgcatcaaagggcggcagaattggtagtcggattcggatgattatgcgatggattgggcattaataatatttggggggagggaactcttttagacgaatgattgctttttgccatatgttttggttcattcccttctttgtttcgggaaacacaaccatctcttaagtggaattaaagcttacttgaattgtttataaagtcaatttatgcccttttaatcaatggatttccattggaatttccattttctctcattttcctcatattccctccccccgtccccctttttttgccaacttcgcccccggcccttttcccgtgccgtccgtccctttttccctttgcgcccattctgtgccactctctccgatgaatgaattgttttcgcgtcgtgccacaatcggatgagttgcaggacgacgaatcttccgccacaatgagttcattcagccaatgccgtcgaaagtgatgagaattatggcaatggtcggcgataagcaaaattggatggagagaaaaggggggagagggaattgggaaacattgtggcgacaagggattattatgccaaactcatttcgagtccatttaaatattattttggatttgaatgtttgagtaaatccctttcttccattgtctgtcttcgatctgttcttcttctgctgtccactctttcaacagattgccaatatttgcattaaattagtccgtccgtttgcctttgcgtggcggtaaatcccccgaagggacaaacaatgggcgtccgaaacaaaaggccaccgaatgacccgcgcccaattgagtccaatttcctttgtcactcagtggaagcttttcatgaaagaaaaatcccaaaaatgtccatgacaacggaaattgggagaaggaagggaaaataaaatggaaatggaaaaaatgatcaagggaaagaaaaaatggaaaaaagtgatcaggngaagaanaacgggaanaatgatcggggcgaaagaccctcccgcccccctcagaaatctctgtatgttgaatcaacccnttgcggcattgacaacgaatgagtgccatccccttccgacttccaattgcgtgcaaattgacgaaaatgggcagaaaaaggaacattaagacggaaaatgggggatgaaaaaggaaacggggaaaaagaaaagggaaaa

SEQ ID NO: 39070 - DNA, 1454 bp, Heterodera glycines
actgatgtacctcttctaatcacttttgtacctcttcccccgtggttgtacctcttctaatcactttgtacctcccgtggttgtaactctccagcattcgatttctatccttattttttaataaataaattccttattttatttaattttgaataatgttgtcctgtttcaataatgttgtacctcttcccccgtggttgtacatcttccccgttgttgtacctcttccccgttgttgtacctctgcccccgttgttgtacctcttccccgtggttgtacctcttcacccgttgttgtacctcttccccgtggttgtacctcttcccccgttgttgtacctcttccccgtggttgtacctcttcccccgttgttgtacctcttccccctggttgtacctcttcccccgttgttgtacctcttccccgtggttgtacctctgcccccgttgttgtacctcttccccgtggttgtacctcttccccgtggttgtaccccttcccccgttgttgtacctcttccccgtggttgtacctcttcccccgtggttgtacctcttcccccgtggttgtacctctttccccgttgtcgtacctcttccccgttgttgtacctcttccccgttgttgtacctcttccccgtggttgtacctcttcccccgtggttgtacctcttccccgtggttgtacctcttcccccgttgttgtacctcttccccgtggttgtacctcttcccccatggttgtacctcttccccatggttgtacctctttctccgtggttgtacctatatcccgttaaaatctcttaacaatccatagcttgttaattgcatttgcaaagtattatttcgatttatttacataaagagtaatttaaaaaccttccacaatgaagtaaagtaattatgaaaatgaaaaataactcgcaattatttataatgatgattgcacatcagtaggattatccaaatctattttttacttcacataatttgcatatttttttaaatatgcaattatttaaaattgtaattgatcatcagtaggattatccaaatctatttttcacttcatataatttgtatattatattaaataatgacgcagatatttaaaattgtaattgatcatcagtaggattatccaaatcaatttttcacttcatataatttgcatattatattaaataatgacgcagatatttaaaatgatgattgatcatcagtaggattatccaaatctattttttacttcacataatttgcatatttttttaaatatgatgcaattatttataatgatgattgcacatcagtaggattatccaaatctatttttcacttcatataatttgcatattatattaaataatgacgcagatatttaaaatgatgattgatcatcagtaggattatccaaatctattttttacttcacgataatttgcatatt

SEQ ID NO: 39071 - DNA, 624 bp, Heterodera glycines
  unsure (1)..(624): unsure at all n locations
cgcgagtttcgctgctcaactctcggtgtgcgcgagggggcggggcgtcgggaatgtgccgctcaaaatggctctagaggaaaaattcttttgccgttcggcttagggggtggtggatagatgtcctgtgaaatttaaagtcaatcggataaggggtgcgcgagttttgctgcgcaagtcttggggtgcgcgagggggcggggcgcgggaatgtgccgctcaaaatggagctagagaagaaattctttcgccgttcggctttgggggtggcgaattgacgtaccgtaaaatttgaggtcaatcggacaaggggtgcgcgagttttgctgttcaagtcttggggtgagcgagggggcggggcgttgggaatgtgccactcaaaatggcgctagagaaaaaattcttttgccgttcggcttaggagatggtggattgattgccccttaaatttggtgaaatcggacaagggttgcgcgagttttgctgcgcatgggggagggggcggggcgtcgtaaatgtattgctcaaaatggtgctagagactaaattctttcgccgttcagcttagggggtggtgaattgatgactgcaaaatttgaggtcaatcggaaaaggngtgtgcga

SEQ ID NO: 39072 - DNA, 1095 bp, Heterodera glycines
  unsure (1)..(1095): unsure at all n locations
aaaaattgttattactccattcagagaagagatgaaaaaaaataaaaataggtttagagagccccgtgaacagctgcattggatgcaagtgccgccgttgctgtacgcctaacagttggtgagcaatgacggaaaattgcttaaaaaagaaaccaaacaaactcatcaattgttagctcccgttgacaaaccgaagggtacattggggcaatggatgttgggctaccgtatcagttattaaaatttttgtttttcaaaaaggatactaaaactgggataaccccattcagagacaagtcaaaaaaaaaataataggcttggactaccatactaattagaaattttagaatgtgtctgttaaatgcaaaactgttgtgaaaaattgttataactccattcagagaagagatagaaaaaaaataaaaataggtttagagagcccgtgaacagctgcatcggatgcaagtgccgccgttgctgtacgcctaacatttggtgagcaatgagggaaaattgcttaaaaaagaaaccaaacaaactcatcaattgttagctcccgttgacaaaccgaagggtacattggggcaatggatgttgggctaccgtatcagttattaaaattgttgtttttcaaaaaggatactaaaactgggataacccattcagagactagtcaaaaaaaataataataggcttggactaccatactaattagaatttttagaatgtgtctgttaaatgcaaaactgttgtgaaaaattgttataactccattcagagaagagatagaaaaaaaaaaaataggtttagagagcccatgaacagctgcatcggatgcaagtaccgccgttgctgtacgcctaacagttggtgagcaatgacggaaaattgcttaaaaaagaaaccaaacaaactcatcaattgttagctcccgttggcaaaccgaagggtacattgnggcaatggatgttgngctaccgtatcagttattaaaattgatgtttttcaaaaaggatactaaaactgngataccccattcagagnacagtcaaaaaaataataataggcttggactaccatactaattagaatttt

SEQ ID NO: 39073 - DNA, 1089 bp, Heterodera glycines
taattaatttaatgtccgcttcgctttgcgcttcgctcgtttctctccctcacggcactgctcgtcgtccgatgctccgccgatgagtcatcgtcgtctgaggaagagcaaaagcgtcccattagcgatgccgccgtgccatcgtcaagcaatgaaatgccgcaagttgtacctgctgcggttgctcgtcgaaagcgaagcattttcggtaatttctttgcggggcttttccatcgcaacaatgagacttcgacggaaggtcgtcgcccgtcgaacggcacagagtcagcggaagaagcggaaaaggtaaaggaaaaggaggaggagaaggaggaggaggaaaaggaggaggagaagaaggagaaggaggaggaagaaaaggaggagaagaaggaggaggaggaaaaggaggaggaggaaaaggaggagaagaagaaggagaaggaggaggaagaaaaggaggagaagaaggaggaggaagaaaaggaggaggagaaggaggaggatgaggaaaaggaggaggaaaaggagaaggacaatgcgactgatcagtccgccgttgggcgcgagaagcgcagcccatttggcattttcatgaaatacaaaaagaacggaaagcaattgagcattggtcaacacgcaacaaattaaaaggaataaattttaattgacttgtctaatttgataattagttttttaatgattgattattattttaaaaaaattaaacacacgaaaatatttccacaaataattcttctatttaattgtatataaatattacgaaaattgccattttaaaataaattatttgtgaatattttttttcgtaccacttgacggatttaagctaatttaaaaatgcgctagcattctctttaagttaaatattaatttttataattttcacatgtagcaaatttcgacattaagcaattttaaaatgccaccttaaatctaatcattggcgcttcgaaaagcctcaactttcaaaacccgatacaaaacttaaaccttagacgcgagaatctccagccattttatttatccaaagattatcccactatggtttttgacatttcttttatt

SEQ ID NO: 39074 - DNA, 1048 bp, Heterodera glycines
  unsure (1)..(1048): unsure at all n locations
tctagagtcgttcgcgcagttcgattcccttttccattgctttacttttttgcttcttcttctccttcttctgctgccggtggagtcaatggcctaaaatttaataaaacaatttgaatgggataaacactttggatcaaaaagcaatactgaaaacctgtaaagctatttttagctcgaaaaagtttttgatcagtcattacttaactaattaattagagattggcacaatctaaagccggtagtaaaatcggaccggaaatcccgtaaaaagtcgggtccgagactttcacaaaattcccgagggagtcccattcaccccatagggctagtagtcaaattttggttgccagatttttaaaattggaataaaaatatatttaaaattccgtaaaaaataaaaatagaaaatccgtcttaaaaaaatttactcacccaatacaattgatgttgccgtttaaataaaaggaaatgctgttcaatttgttgttccaacctccccaccgaaccgccgccgtcccctcagaaattgagcatcgattcattatccatgagctaataataagctcctcatttcctccccattttttcttcaatgtcagcttttcgttggtccgtccgtttaccaattcaaatggctcaattgtcgttgggcttctcagtttaagaaaaatattgaaactgacagaagaatcggtggcacgaagaaatgcctaaaaacaatgccaaattgagcaaatcaaaaaaaagcaaatgcggcggaccaatttgctaggaaattttcgaaaagtttaaccaaaaacagacgaaaattattatttcagcaaatttgaaaaattgctttataactttgtgctaaatggccgttttcggaatgtgcatttacgacctccttgaagttgttgacccattccttcggttcctcataaatttggaaagccaattgcttcggccgtccatcggttgtcggatgtgcaccattcgaacanncgttggcatataatcttgcccattatatcaccagtatccctcgggaacagatcatgga

SEQ ID NO: 39075 - DNA, 1374 bp, Heterodera glycines
attttagtataaaaatgacttttttcttctcctctgcctcattccattcattcattcgtccatttccgttcattttgttgctgcaaatgtcttcagaaattctgtacgtttattatttctttttttctgatattttgcatttcttttgctcagtttttgatcaatttcgatattaaaatttcaaaaccaattttggatttcctcgctttgacctttcattgcttttcccttcctttttccattaattcatttccccaatttattttcagttggtgtgccgtgtttcttctgctgttgatcgtttgtgccaccattctttggttcttttttggctatgtcaaaaaacgacgacgccctcacaaaaaagaaatgtaaaattaaattaatcaaaaaatttgaaaatttgaaaattttcagctttatctgcagcgatggttgggttttggtgttcgattttcttgcgcttctcagctcggccttgaaattgcgctggtcaaccgtctctttgaccgcatcgtcgacgaacatttaaagacacgcaaatggaaattgggcaaaatgcgaattgccacacaattgaagagaatggcaccaagcaaatgcaaattgtcaattccgatggaaatccattaccaattccgcaaaatccgctgccgaacaaagtcaccggattccgaggcattcagatcaagtaaaatttcgattagattggaatttttcgtcatttctgattttcaggtacatcgatcaaaatgtcgtcacatttctccgccgttttcatcgtttttttgccgtttgttcaacggatttgtaccttaccacgggcaatggtcacattttggactttgttttgctcaacatttggccaatgtttcgccattcaatgcatgtgatgtttttgagttccatcgcttttcgtcgtctgcgccaattggccccgtcacttctcaacgattgtccatcacttcacactattttgtttgatggcgacattctccctgaatttccgcccgatgaaagtgccaatgcgtcggatggccaagcgcaaatggttgtttacgcctcgtccgaatggtatgcccaagtggctcagatgctttgtgaattctccggttggtcaatggtcgtcaacgatggaacagattaaagcggtgattatccctatttaatttgtttttctctaattttttttaatcccatttttaggcattccaatgcttcttctcctgttactttttacattgactttctgatgtcttctcagattgactcgttatgctatttgatcggatcaacgaagttactggagagaaattggcactggaacaagaagacacagatgtttggctcacgcgttgtccaattgtatgggat

SEQ ID NO: 39076 - DNA, 629 bp, Heterodera glycines
aaaggcacgaaaatcccgaaaaaggcaaaaaaaggcataataaaagtcaacatagaagcctcaaacaaagtggaaaatgcgttatttatgcttaatatatcgaaacaagtgcgcagaaaaaaaggcatatgcctcaaaatgcgagctctagtcataatttagactaattgaccaaattttttaataaaattattgataattttaaagattttttgaaaatttttgtgaaaacctttgagcttctgaagaaattctcgagaaaaacacagtaataatcattcacataattaattatccttttgaattttatatcattagaaagaggagacttcattggtataaaacgaaatttttttataatttatattaaaatttaaattttttgtgaattttttaattttacatggacgggacaaaatacattgggttggcaccacggatgaatttacgatttcttcccttagtttcatcgtatatatgatgtcggatatacgagggtcggttggtaattgaaacaaaatatacgacatcggacgttttgtccatgatggtacgatgatcgtatatacgacatcgggacgatgaattgaaacagaaatatacgacatcgctgtttttgattgaaacag

SEQ ID NO: 39077 - DNA, 352 bp, Heterodera glycines
tttctgaaaaaatatttaagaattaattttgcaaaaacttctaaaaacgaaagactcagattttcgaaaatttttttgcgccagctagctcggcgctcatttcagtgtaagttagtcctttaccggggagtatccctgcaaagtttggtacgcttctgctcaattagcaaaaaatatgagtgatcgaattttcactaaaaaagttaagcctacattttttggcatatttaaaaagcaattaaaaaatttttaaaatttaataattttcctgcaccgaaggtactcactcggcctcttcgcggcctcgtggtgggccttcgccccccccccccgcgtgcggatgaatgtattt

SEQ ID NO: 39078 - DNA, 994 bp, Heterodera glycines
tttccctgtaaaaaatggtgcgccccggggatgcccacggcaccttcccaatgggctgccgaagtgagacggccacttgtttccacgcatttgacacgtcggggccggagcggccacgctgagtccgcaccgccgtcgtccggcgaaggttgaagccttagaaaggcgcaaaactcagattggcatgacacgcgaacacaatgccaaatgccaattttgactcgcctctccagtgcccattccaactgagcacggcacattgaggcccgggaagcgacggccaaatcggcgctgcttatcaacacattgttggcatttgtcctgctgctcgttctgccgtacacattggggacgcacaacggcactgatgttgttgtggcacgtacggtgttcaaaatgagcgccaaattgcgacagaacgccaaatgctctcggcgtcggaggtcgcggctgagtgcgagcagtgcacaacggatgaactcgctgcgcacgaggaaatggtattgccacaagctctgaaaatgaattcccaaaatttttgaatccatggattcaaattcctgacatttcgatatgccggttccggcatttcttgaacccatgggcttccatttcccgacattttttggttcggctgccaattcccgacattcttgaatcgacgggttgaaattcccgacaattttttattcggcatgccgattcccgacacttttggattcatggactcccaattcccgaaatttgctgtgatcggtgccaattcgtgaaatttgaagcttcggattttaatttcccatttttcccggctgatcatatccgatttcgacatgccttcaggctgttcatgtgcaaatcgttgtcgtcgtccaccgccgccgtttcgccggcgtcgcaaagagtgcgcatttcgtcgcccacaaaattgaacaacaaactgtcccgttctttgctgaaaacgtgccaaaattgttaaatagacatttgaccaaag

SEQ ID NO: 39079 - DNA, 1001 bp, Heterodera glycines
cgtcctgtccaagccaatcttcgttccccattcagcagaagtgcttgatcattgtccctctgtcgatccgatgtcgtcttctgtccatccggtcactgcttgtgaaaaattcgcaaataatccgcagaaatgccaaaaacaaacgcagccaaacggggcacagcaaaacttccgctggtttctctcctatcgaatgttgaccgcctcaatgctttgcttgtgctttgcctccgtgcatatgatgaacggaaacatgggcatggcgatggtacggcggcccattggtctttgaaagacggggagacattccttccccacccattttaaaggtgtgtatggtggagaatggggggaccggaagaggaggcaatgggacgacggaggacggaggaaaggcacaaaacagcggacggaacggtgcacccaaggcgaaatggtcggccgaggtcggtttggtgccgagttggccattcattggcactcactgctcaggatcagggatggatcttcgccgcattcaatgccggactgttgtgcatgcttttgaccggttttatggccgacaaattcaatgccaaatgtccgttcgcttttcctcccccagcccaaatgcttctcgctcctccgctgttcagatatgatcatcgtcagtgtgctgctcgcttcccttgccaacattgtcattccgctgactgtcacttggcagtgagtcaacgaaatgccaaaaatggcaaattgtttcttcattttcttttttcagcgttggctttgccatcgctgcgcgtttctttgttggtttggccgaggcattgctgcacccggcaataaattctttggtctgtccatttttagaaaatgtcaaaaaatttggtacattttttgccaaattagcttttaattaaaacataacttacaactttgaacatttaccctccctttctttcttttactcctcccgttggtaatgaattctgaacgttcttacgccctcggctggccac

SEQ ID NO: 39080 - DNA, 1008 bp, Heterodera glycines
gcctgggtatcctttttaaaatcaagaacaaggggcgtgtgttaatgtggagcacggacagcagcagccaatgtctactgctacaccttacatagagaacaaaatagagccaaggtccacaaatcacacactgctgctgtgaatgtttctcaagtgtcgtctgctgacagtacagcatccaaaaatgtttcttccaatattaacagtgcaaaaccaaaaaagcaacaacagcacaacgactaccaagaactgattgattctttgactgtagcgtcaacattgctcccttcccaacccgaacagcatcctcccattattgcacaaacaatggatactcaacccatggactttgttgacacaatgtctgcaatgacgacatttcttccctcccagtctacaaccaactcggccccagttccaaaatctcagcagtcagaaactttggttgatgttttgtcggcagctgtcagctttctaccatcggaaggtgagaaaacaaaggagcaacagcatcaaacagatgatgatgtgtccaccgtaaaagcaaaccttgacgtaaaggaggaagattaagcaatagagtcaataatgaaacattaaactgattagatgtatttgtgtgcacgagtgtatataaagtagtaattttccgttatttgtaaccgtaaaaatgaacacttctacagcattcacagataaagacttgcaattaaaactgccttttggtatgataatttcgggtccctcatcatcgggaaaaagcacctttctcttaaaacttattgcggaatccaaagacttaattgatccatcaccggttgagattctctactgctttggtgaaatgagttctactgtcccggtgttgcaaaaggcaggcatatccgtgtatgctggagtcccaccagaagaatttattcgtcgccaatcaaagccgcttctgctcatccttgacgatctgttgacgtctatagatgagaagtatctgtcagaattgttcaccaaaaa

SEQ ID NO: 39081 - DNA, 1096 bp, Heterodera glycines
taggtgttgtcaatgtactgttagagtggcttatactgtcccaacgagccaaaagatgaacacagcaaagcggtgttgttgctgcatattgttccagtgatcaacaatgagaggcacgaaagtatctgcgtcgtagccatccaagtccattggtgctttcacctgcttcatgagctcaactgcatcatgatggagttgtccctgttgtccatgctggttattcaagtagcggccaaactgccatcgtggccatcctctggttttggcgatcattgttgctagtaaagcgtaaaacaagcaatagttgtcaccggtatgattgttaatcttgattaggcattgatcattgatgcgatgatggacagaagctatttttcggcgtgttcctcctttgacacgtcgtttaaattgaagtccggagcgatcgactgttgttattgtcaccgtgaacggatcaccccacagtgaaacgtttttctgttgtttactttgagccaccttcagaaacaaattgaggatggtgtcgatagtgttgtcggagatttttcgagtaggaattgttatagctccttccgacaaaagaggactgcttatcaaacatccaaggtgagttggctcgatttcatgttcacggctgtcttttgtagcactatcaatacaatgttgaaatattccagccaaaagcctctcggggttagaaggaacatccgaaatactgaagcgagatttcattttggtgtagtggaatttggcgacatgttcaacagaactacccaatttctgcacgtaatcctttggagcttcttttgaagatgatgtctctcctcctccttgttggacgacacccaaaatttgattgatgactaagccttggcggggctttttggagggaatatgatcaatacggtagttggaaggacgtttaggtgaacggttttccattgatatcgaattatattttaaaaattgctatggtgtgatggatggattttatatatttttataatgaaaatatatggggagcaatagaaattttcgttaaaaacacaataataaacagagaaactgaaaagaagaaagaaaatagtgtataaat

SEQ ID NO: 39082 - DNA, 765 bp, Heterodera glycines
  unsure (1)..(765): unsure at all n locations
cggaaaaaattttcaaaaaagtgttccgaaaaaaagagatagtcgtttttacatacgaatattgaaaagaaggcgtaaatggctctgaagcgtccataggccgcagaccacaaagtaaaatgggacaacattcataaaaaaggttggcctcaaaagggcccattcccaagctaatttcggaatttgctgataaaatcaaatagcctaaattatatacgcattataaaaaggaaatgacagaagcctcgaatgttagttatattgcgtgtcacaaaatctcttccggaaaaaattttcaaaaaagtgttccgaaaaaaagagatagtcgtttttacatacgaatattgaaaagaaggcgtaaatggctctgaagcatccataggccgcagaccacaacgtaaaatgggacaacattcataaaaaaaggttggcctcaaaagggcccattcccaagctaatttcggaatttgctgataaaatcaaatagcctaaattatatacgcattataaaaaggaaatgacagaagcctcgaatgttagttatattgcgtgtcacaaaatctcttccggaaaaaattttcaaaaaagtgttccgaaaaaaagagatagtcgtttttactacgaatattgaaaagaaggcgtaaatggctctgaagcgtccataggccgcagaccacaaagtaaatgggacaacattcataaaaaaggttggcctcaaaagggcccattcccaagctaatttcggnaatttgctgataaaatcaa

SEQ ID NO: 39083 - DNA, 1032 bp, Heterodera glycines
  unsure (1)..(1032): unsure at all n locations
tgcgtttccttcacgcaaatattagttttagaaaaatcttattttntggggtcagaatcagtttttaggccattttgtcttattttgaaaaaaaaaaacttgggaactttgccattaagagaaaattgaattattatttttagtgtttttgcttttctgccgattggtgcagcaatgctcgggggctgaagcgcccaatctcccaatgcgtataatgacggacggcgcagtttgctggtattacgacaaatttggagcaaacgtcatcgttgaatgcccacactcaacaacaacaacgacgacaacaacaacgacgacaacaacaacgacgacaacaacaacgacgacaacgacaacaacaactccatcgcctccaaacaaagaacccacttctttggatgtggcaattgtggtcggcggctgtctggcggccattgctatcattgcgatagcggccgataacttgaggcgttttaaaaaaaagtaagctatggcttcccttaacatttttccaatcgacaagcgggcacaaaattaatgctgggcaaattaagcgattatttttagagggaatttatttattttttgtaaatttctgggagcaggcccttttcctctcccggttcgccacccccccccccccccccgaaatggtttcaaacctagaaactttttagtaaaaaaaatccttagaaatttcttaataagaaaagttcaagaaataaatttttgaaaaagttttcaccgatttttgaaaaaacttagtagttcatcataaacttttggaaaaatcgctgaaaaaattttcaaaatttttttttttaaattttcttacaaagaaatttcttaggaatttttttataaaaaatttagatttanaaattttttttgaaatttttttttgggggaacgacggggcggggggggggaggacgacttgctccctccccatataggtatgcatttttaatggattatttcagttttcaaaaagtattcgtttaattgattatcagattttgaacttttttt

SEQ ID NO: 39084 - DNA, 650 bp, Heterodera glycines
ttttttcaagtgtccgtttggggtactcaaacaattatggggagcaaaaatccaacgcagaattaaagtacagactatcgggaagctattcccgaaggattcggtctccccataaatctgggcgcatcggttcggggggactgccccgaaaacaaaaaaaatcgattttttcaagtgtccgtttggggtactcaaacaattatggggagcaaaaatccaacgcagaattaaagtacaagctatagggaagctattccggaaggattcggtctccccataaatctgggcgcatcggttcggggggactgccccgaaaacaaaaaaatcgattttttcaagagtccgtttggggtactcaaacaattatggggagcaaaaatccaacgcagaattaaagtacaggctatagggaagctattcccgaaggattcggtctccccataaatctgggcgcatcggttcagggggactgccccgaaaacaaaaaaaaaaaattttttcaagataaaaattgggctaaatgaactggggagataatatttaaaataggttatttctcttcctttcagtatccctgcaaagtttggtgcgcttctgaccagtttctgaaaaaaaagaggagcctcaactttttggcctgtttaaaaagg

SEQ ID NO: 39085 - DNA, 1539 bp, Heterodera glycines
ttttcaaaatataagcagcttttcctcattttgtagcaacacccgccgaaaaacgccactaccaattcgattggcttagttccaccgcccgcttcgtcctcctcagcttattccgcttccgcttcgtccgcttccgtttcttccgcttttgcgccccctccgttgccattttggctgttaccgtctttttctcaatctctcgcggccgctgctgctagtctgtcctcttccgctgcgtcttccgttgttgccacttctgctttccactctcatctgctacagtaccctctggtcggcaacagtcagtggctttttcagtccacaacacctaccgtacccccaccgctgaccggctgccacggaacatttccttgtgccaatggtactgtaccgtaacaaggatgtctactgtttgtcatcccatattttttcctaattcattataccgtattccttagtgttggttggactacgtttacttttcagtgtccccccccccccctccgtttttgctttttgtcttcaaattgtcccttttttgcgcagtttgaaattttaaattcattttttgaagtgcctttttcgttttcaaaggtgccaatgcgtccgtctcgcctttccctcctccgtcttcttcttcttccgcttttgcgtcgccttcgctttcttcggcgactctttcggcttcaaataatgaatttgtggaccgaagtaaagaataagcttatgtttgtttctcatcattcggctcattttatcttttaaatttccaaattaattaaaatttaagtcggcgagtcggcccgcaaccgttttggccgcccttacatttcgggacggccgctgctgttgtgcgaccggcagaaaatcatcaaaatgtaccgggagggacgccgaaagattgcaatcgcacgcgaaattggcgtcacacattcatgcgtttccaaagtgatcagaaggtaagtgagtgatcggagatgaccacggaagagaaaagacggccaattgagacggattcccgcagatttgaagagaccgggatgttggagagcaaaaactcgcggaccgcctcttgcgcatgccccggcgacgcggaagggcacggtgagcgattaaaggcaaattgggaattggcatttgcattaagccagctttttatccgtacattttttgtccttccttctttgattaaattttcttccgtcccttcgatttttgcaaattttactgttttaatccatttttttaaaccaaataaatccccgcttagacccgcgcatttgtcggcacgcccgcttcgtccatttcgccgcttcgtcctcctccacccaattgccttcgtacgaaatgaataaaatggcacccaacagaaaaccaatcattcgaagcgatttgccgaagaagttcagcatcgaatggtttttgatcacttgaattgcttagtaattaataacttattaactcaattaatttggcttattaaacgttaaattctttttttaggattctcagtgatcattgagcacctaccgtaagcat

SEQ ID NO: 39086 - DNA, 1248 bp, Heterodera glycines
tagacgggggacagttctcgacggggcccaacttggttgaggggggtcgggttgaagacgtggtcggggggcgaattggggaaggggtttcgggcgatagtgcggatgcgtgcagaagaggaggaagatgaaacagttcgactcatgtttcgacgttgtggagggaagtacgaacgattggaaaagggaggaggaggaggaacgaggggggaagggttcgacggagtgatgtcacgagagggggagcgggaacggtggatggggcggtgaagcggttgacgacgggactcaacgggcggtcccgcgggacggccgtggcggtttcccacatttgtcggttggcgcgccagcggcggctgattgttcggaacttcgccgtcggggggaggctggcttgagaccaactccccgaccctcggaatgtgataattgggcaggggattataaatttgccgaggaacttcgtcgtcgctttcgtggccggggggaggacgaattatgggacgtttagacatatcttctaaattgacaaaggcgtattgtgaagttaatggttggggggcagaaaaagggggaaggatgaagacatgcggaagggtaatcgtaggaggttggaagaggtgtgaaatgggaggggggctgatgattacgccgggggggaaaaccggggggcacacatgggcaatgcggggagcagaagccacgggcccttcggtgccaagatctggatgatctcctcccaagtccggggccggggcccgcccctcggatggaggagccaattgttcgaaacgacggtacaaggggacggagtggcggttctctgcatcgtccccgggtgaagagttacggggggagggggtgtaattagacggacttctcgacctcggtgctctgtaccgacttgttggggggaactcgacaacgatcagcgtctcaagcggaaaatagtcgtgatgaggtgcgccgcactgccagggcggaaacccattccgtatccgccgggcgcgacttcgggcggaagtgccccgcgttcccctgtgctggacgagtgctgggagttccggccgtgtcagaggtctgcgcagagctgcccaatgatcagcgactgaacgactgggcgcaacgagacgggaactggccgggaccgagtccatcttgtgccaaattacaacttggtcgccggagatgcggtggaggcgagtttggatacagcacttcttcggcctgttggcgtccatggtcact

SEQ ID NO: 39087 - DNA, 904 bp, Heterodera glycines
ggtatttaaccggctcacagaaaatgcgtcagtgatacaatctctttaaaaataaagtttctgtagcattatgtgttgtagtaatacaaaagttgttcgaattcggatccgtggttcggaattggcctaaatggatgccggattcatgtcagcgactcgaaaaacccacaggctaacttgttttatgacataaacttttgaaaaaaaatttcgaataagggaggctatagtattaccaattcagaacgaggtttttataatattttgaccttttgttctacaatacttaatgctaaaagcactttattttaaagtatttgtatcactgacgcattttccggttacatatttaatagggactgtattcgtgatttttagcctaaacacagatttagccaagtacaaattcatctggaaaaccgcaaaataaaataccgaattttaaatttgttcacagtttgaaattagaaaagttgggtacaaccagttaagtgaaagtttgaaaaaatcgagcaattttcttgcatttattttaaatctcattttcgatttacaaaaatttaagaccaacggaggaaaataacaaaataaaatgaatgaggggaaagaccaggagggagggaatgaccgtctatttatgggcgagtgacaacaacaaaatggcggggatttgaatagacagatcgccaatataattcaaataggctcatccgaacacctccccttttgagcggctcacggcgaagtacctttgtggggcacgtctattccgttgcgggtatcggcgtggctgaacttgctgatctgcttcttcggcactgaatttcgtcgttgtctgactgactcagatcattctcgagtcctgctcttggcgggaattggttgggctcatcctgagcttcca

SEQ ID NO: 39088 - DNA, 465 bp, Heterodera glycines
tgcatgcgctatgacgagctgcgcttcccatgccggcgccagggcggcgacggtagcagcggcacgttctgccaacactgccgcttcgtgttcccgaacgcgaactgctttgaggcgcaccgccggcgcgtggatgttccgccggcaccgcctccggccgccgccgccgccgccgccgctgctgtgcctcacggtggtgaggaagcaacgggtggagacggtgacgaccactgtttctttagttgctgctgttgacgcggctgtcgcgccagcgtttgcggaccgacgtcgcgggcggccccaccgttcaatgtgtgaggagaggcgcctgtgtgagtggtgcaatgtggttgtgtgtgcgcgaagcggtccgcacgtgtgtcgccgccgtccgcagcagcaacagcagcagcagcaggaggatcgcgcagttatgcagcagcaacagcagcagaaccaccacca

SEQ ID NO: 39089 - DNA, 967 bp, Heterodera glycines
  unsure (1)..(967): unsure at all n locations
taatataattaattttaccnnaataaattcacgtgacgatgcggaataataattaaacgtggaatcattgaattagcaaaaatactgtgttaattttcattgaaaagattgaattttatattagctgattttcaaaatcaaataatcctgctgaactcctgaaattattatttaatatatgtaattttttaattagtttatgctcaatggaatataaaatttttgcatgatgacattttatttttatgcttgcaaaaaataatttaattataatttttgtttgatttattaaaacattcttgtaacatattataattaattttaataggtccattcatttatttgaagctaaattatcctatttcctaatagatggcgaatttataatttcttgattaaaattgatatttaatttgtattgaatattgatctttagtttctttatataagttttattgttcaaaatcatatatcaaaatataaataatttaataaaaaatattttttatattaaatgatttatatttaaaaagaggttctatcattttatgcattacactaattcataaaattaattttatgtgtaaacaatatatattattcttatctaatatgcacaataaatatggctccttttatatatactttgattaataattattgtttttactttcatgccattttaagggaaacccattcacataactcttcaaaaaatataaaaaatattttgaattttgaacatattattattatttttttaatattgtttacataagcactgtttataataaattataaattatcaaaataaagaaaaaaaaacataatttttcgacatcataaatgattagacaaataatttattttaaatttttttaatgtttacgatatttattcttaaattcaatataaatcaacaaaaaatccagaaaacaatttcgaataatgtatgcaaagatctttt

SEQ ID NO: 39090 - DNA, 962 bp, Heterodera glycines
  unsure (1)..(962): unsure at all n locations
tctctgctatttcatttgctttttatctctgccttctctgttctctctctctttctctctctccctttctctctccctctcttttctctctatcatcgtgctttaatcattattttgccgcccccaccggtggcacaaaaaagaaaaaagtacacacactgatagcgcatttaaagcaactagacaaacagagtaaatggcaaaataacacagtgccagaggcggaaaagggcaggaaatagtgtgcatttttggggtgagtgaatgcgtatgtttttttctctgctgcccattgtcagcagcaacagctgcagcaggtgtcttctgtatgtcttacaattcaaaaacaaaaaattttctcaaattttccgccgccgccgcagggtataaatttcgctgctcggcgctgcgcccattgtgtctttttgcatattttatcaatgggccgaaggccaagcgccatccgtcccccccccccgggggaaaccgagaagaatttgtgattttggagggacatctgtggcgctttattctgctgatgtgctctgttgcgaaaaataggggagacaaagcaatctttgatttttttttttgatcattttccgttccttagggcaacgcaaaaaattatggtaatttttagagctaacattttgaaaaaaaaaccgggacctggattttcttcatatttgacctggatctgaatttcctggacaaaaatccaggtccaggaaaattccaggttgccgaaaaatggcctggacatggacctgggaacccaggaaaaatccaggcctatatgtatctaggcccaggtcgagcattttaatttataatttttttattcggttccataattgaaatttanatgggaaaagcattgacaaaaagtaagtatacatttattttatcaattgctaattagcctgaaaaagagtagtctaaagttctaaagcaaaaat

SEQ ID NO: 39091 - DNA, 989 bp, Heterodera glycines
caacatatgtccatgggcatggacaaaggcgaagcgactcaatgaccgaccaactcattaatataattgcagaaaaaaatgctattgagcacctgaacaataccaattgtgtggacagcagcaggacaacacattgttcaatgtgtgtgaattggaatggaataatggagaatcggcaattggttgttgggtgggtaaatgaataaatgaaaagaatggggaatatgtaatgattgatgacgacgatgcactcactgaactgagagggaaatggacgagaaaaaagttgccaaacatttaatgaaaatgatttaatttaccgaacccaaaaaatgcccaaaaagagagagagaattccttcgccaaaaaacaaaggaaacgaaaatgcgtaaaaatgtaattgttgttcatttgcactcaaaattctgattaatgtgacttttgcgacgaaatgtcacaaaatttgtgtgcattttggctaaggaaatgccattaacgagattggaagtggcgaaccgttcttcccgccccacccttcattaaattgacatgcttacaacggattaacacttggttgccgcgcgcaatcagtgaataatacacttaacgcatatcccaatttcatatcccacatcccttttcttgggcctattattctttgttcaatccaattccaaagtgggttaggagggaagggggagagagagagaggaaaaagagagagagagaggaaaaagagagagagagaggaaaaagagaggagagaggaaaaagagagagagaggaaaaagagaggagagaggaaaaagagagagagaggaaaaagagagagagagaggagaaagagagagagaggaaaagagagagagagagaggaaaagagagagagagaggaaaaagagagagagagagagaggaaaagagagagagaggaagagaggagagaggaaaagagatgagagagaagatatagcaggggaaaaacgcag

SEQ ID NO: 39092 - DNA, 1154 bp, Heterodera glycines
aaaatttgcgtaaattagtataataatttgatgtatacgattaatgtttgctaagtaaatttcgacataaatatcattggaggatggggggatacagtattaccatatcccccgacaatttgtttaccataccctccgccaaattttaagtagcatatgaaaatttggttcagccaatggactaccgtaccaccacacattggtgtgggaagaggtaccgtaacgcgtaccgtaaccccacccacaaataaatttcactgcccccgatgctaacacaacaaaacgaaaacgtacagcaggaggggcggcgggaggtggactcgccggcagcttagcagtagtcactgcctttttggcggtggtctttttgccctttgtcgccgtcgacgatggcacgggcgctttcttcgccgccggcgctggcggcggtggtgcggccactttgcgcgcgatggctttcggcgccttcttcggtgtcggctttttcactgccacttttttgaccgccgctggtgctggcacttttggactcgtcttttttggcaccgccgcgggcgctggaggcgccgctttcttcgcctttttgaccggacttttcttcttcgctggcgacgccttggccaacgttggctgcgtgccgtcgcccaatttgaaggagccggacgcgccgatgcctctgacctgtacacacaatattaaacggtaattaaacaggcattaaacatttattttcggaatttttgaataggcatgaaatctcgccgaaacattttttaacttttcgtagtggaagattttcaaaaaaaaagcaacaatgcgagactctaaaaatttgaagtttcgactttgtagcatcggtactattaccgaatgccattggctttgtgccatcattcatcatttctcacctgtttcaggtcgccggacgaaacgccccgcttcagtgcctgcttcagctgcatattggccttcaaaaaaaaaacgattgatttacacatttagccaaaaaaaaggcgcgccaatcaaatccattcttacgcgaagttggttgccgccgacgtcaaagttggacatgatgtacttcagaatggcacctttgctggcccccttcttctccttcaactcgccaagcgccttcttgatcatctgaaaaa

SEQ ID NO: 39093 - DNA, 985 bp, Heterodera glycines
  unsure (1)..(985): unsure at all n locations
gtgcgcaatcgccatttaatttcacagagaattttcctttttatcttatatccaagaaaaatgactatctcttattttgagaaattttatacgttacaaaagcgctcgagcgtgagagggagggcggtgcgcaatcgccatttaatttctcagagaatttttaaatttatcttatatccaagaaaaatgactatctcttattttgagaaattttatacgttacaaatgctctcgagcatgataggaagtgcggtgcgcaatcgccatttaatttcacagagaatttaaaaatttatcttatatccaagaaaaatgactatctcttattttgagaaattttatacgttacaaaagcgctcgagcgtgagagggagggcggtgcgcaatcgccatttaatttctcagagaatttttaaatttatcttatatccaagaaaaatgactatctcttattttgagaaattttatacgttacaaaagcgctcgagcgtgagagggagggcggtgcgcaatcgccatttaatttcacagagaatttttaaatttatctatatccaagaaaaatgactatctcttattttgagaaattttatacgttacaaatgctctcgagcatgataggaagtgcggtgcgcaatcgccatttaatttcacagagaatttttaaatttatcttatatccaagaaaaatgactatctcttattttgagaaattttatacgttacaaaagcgctcgagcgtgagagggagggcggtgcgcaatcgccatttaattcctcagagaatttttaaatttatcttatatccaagaaaaatgactatctcttattttgagaaattttatacgttacaaatgctctcgagcatgataggaagtgcggtgcgcaatcgccatttaatttcacagagaatttttaatttatcttatatcncangaaaatgactatctcttattttgagaaaatttatacgtacaaaagcgct

SEQ ID NO: 39094 - DNA, 924 bp, Heterodera glycines
aaaatattaccttccaaagggcttactctaattttcaaaacaaaaaaattcccaaccccataaattttttttatttgatttttcatataaattatatatatcattcgatcgtctcgatgagacaaatcgaatgaaagagtgacctgatcaagttgccgaaaagatttttttgatcaacatggaaattgattagcaagaattttcaggtctttcctacaaaaaatgtcaaaacattttgacgcttaatttttttctgttaaaatttcaaaaaagtttatgattataaacataaccttgacggtatatttaagaaattagaacaaaatttggtcactactccaagatttggaccctccaaattaaaacagttctgataaaacaaaacagatacaatccctgatctatatgttcaaaaaccctttttgttcgaaatcgagtccgggcttcgcagttgtcaaaatgaataccatattcatgattagcgacccagaaacccaaagaatatattttcataatattcaaacatagacaaaatttaaaaacccgactttgaaactttaatgatttaaacgaaagggtccgattttcccgcggctgaaaacccatttaaaataaacagaaatatttaaaaaaaattattaacaaattttacctaattcgttatgcactatcaaattgcagaacataaggcgaagaaattggggcagggtcgtttttgtacgagcacaaagaattcaaaaaaccagattttccaacttttttggctctaacttttttttaaactgaacaaaattttttggaattttgcaggctaatagagcatcttaagggctctcgaatgataccaagatcgttggattttggttggaaaataaaaaagttatagtcaaaaaacatgtgctcgtacgaaagcggcctggtccg

SEQ ID NO: 39095 - DNA, 547 bp, Heterodera glycines
aaacaggggaggaagtggaatgtaataaacgagacggaagtgggtgaatattctcgttttattgtatagacgaaattacattagtacaatgtctttgtagacaatcggacgtttatcaatgatcatgatcatcatcattcatcttcatttgttagtccactctgacccacctaaaagtatgtgaaaacaattttcgaaatgggaaaaacaacctaccctaactgcgctgaagacgctccgcgccgtaataactcaacgcatcccaaggtgcgaccggatggttctggacgacgatcaatggaccaccattgacgggctttgcaacagctttctccaactgttcatcacagtaaagaacgcagcattacctaacaatcatgttcaaaaatgatgtcgctgggcgaaagatatgtacccccccccccccctaaaaaatgtatgtccctgatagcctaaacagaattaaaattaagaaaatacagacttctagtttactaggaacattaattaagttgtttgaataattgactatttttcaaaaatttac

SEQ ID NO: 39096 - DNA, 950 bp, Heterodera glycines
ctgatttggcaatatatttggttttattttcagcataaaaaataataaaaattcgcataaattcaccgatttctaaatgtatgccgacaaccctcggggggtcagcaccaactctgcctgcgggcaaaatacagaatttgattggagcaaccccgcctgcgggcaaaatacagatttaaaggtgaaaagtgaggatcaaaatgtagtgatcaatcgacctgtgtggcgcataaacatgctgagccacctgaattcgaacttggaattatttggagaagagtcagtccacgcttttgatgattgggctgaccgatttaaggactatctgtcactaacagggaaaaattggaccgaagatgaaaaggtcactcgccttaagctggccctcaaggacacgccgagggaactattcaaagaactcaagtctaatcaaatcactacattcaccagcgctttggaagcactgagggccaaattggactcgcctcaaagacgagaagtggcgaagcggaccctttcagtttgccggcaacgtgaggacgaaactgttgcccaatttttgagacgtcttatgccattaattgactcaacaaatccttctctaacgggtgatttgcgcaaagaaaaaatttgtgaggaatttctgggcagattaagaccaaacatgagctttttgattcgtttggtcgggcttacgcaacccaaaaatttggaaatggtaaaggcccaagcagaggaacttgaggcacttcttctcagtactggaggcggtgttacgcaaatcacacaactcatcaattcaatgacggaacaacgcggaaatgaagaaccgaatgaacaaaacgaagaaaattcgaacaacaatggagcgacaatggtggggaattcagaaatgccacttcacatgacgcgcagtgctcgtacttagaaaacgaaggagtgaaggtaac

SEQ ID NO: 39097 - DNA, 1142 bp, Heterodera glycines
caatgattttttgaaaaacgaaacttctgactcaaaacacctcaacacctagagtagtgtcgtacaaactccgccattttcgctatggtgcgctcatttgccgagatcgtacgatctcaatgattattttgaaaagcgaaacttctgactcaaaacacctcaaaccctagagaagtgtcgttcaaactactccatttttgctatggtgcgctcatttgccgaaaacgtacgatcccaatgatttttttgaaaagcgaaacttctgactcaaaacacctcaaaccctagagtagtgtcgttcaacctccgccatttttgctatggtgcgctcttttgccgaaaacgtacgatcccaatgatttttttgaaaagcgaaacttctgactcaaaacacctcaaaccctagagaagtgtcgttcaacctccgccctttttgctatggtgcgctcttttgccgaaaacgtacgatcccaatgatttttttgaaaagcgaaacatctgactcaaaacacctcaaaccctagagaagtgtcgttcaacctccgccctttttgctatggtgcgctcttttgccgaaaacgtacgatcccaatgatttttttgaaaagcgaaacttctgactcaaaacacctcaaaccctagagaagtgtcgttcaacctccgccatttttgctatggtgcgctcttttgccgaaaacgtacgatcccaatgatttttttgaaaagcgaaacttctgactcaaaacacctcaaaccctagagaagtgtcgttcaacctccgccatttttgctatggtgcgctcatttgccgaaaacgtacgatcccaatgatttttttgaaaagcgaaacttctgactcaaaacacctcaaaccctagagtagtgtcgttcaacctccgccatttttactatggtgcgctcttttgccgaaaacgtacgatcccaatgatttttttgaaaagcgaaacttctgactcaaaacacctcaaaccctagagaagtgtcgttcaacctccgccatttttgctatggtgcgctcttttgccgaaacgtacgatcccaatgatttttttgaaagcgaaacttctgactcaaacacctcaaaccctagagaagtgtcgttcaaactacgccattttgct

SEQ ID NO: 39098 - DNA, 1072 bp, Heterodera glycines
  unsure (1)..(1072): unsure at all n locations
ccatattttttttcaaaatttcatgaaattctatgctatttttgatncatatttgggcgcaaatctgtgtacaattacgctcaaatttttaatgtttttccggcgccacttaacggcaccgacggcggatcaataaaaacaaatttcttaacaaatcgcacctaaattcctagcgtaaccatcataattttttggataggaaaataataattagagggtttattgaaaaaatttttttgaaaaccctcataggatccgggtcctaaaagttgaacaggacccggaatcctgttaaaacaggaagttttgtacggagtcttgttctggtccgattttcgagtttttcttcaaaactccgggatcgttggagttaccaaaaaaaatagttatacgtttaatgggtttttcatccttttttctttcataacatttttattgctaaattttaaagatttgtattgacattgatgaatgtgaacaaaatgcgacaatttgtggtcagttcgcagaatgtcaaaacacaattgggtcatatcaggttcgtttttttggttcattaattaactcattaatgaattattatttcaaaatttcgtttttattaattaattaattaagtgtctgtgcaatgttggtttcattgcgagacctgacggccaaggctgcatcggtaaaaaaataaaataaaaaataatatcattttaattttctatttcatatttttgttgcgcaatgaatcaattttatttttttattttttttgttaatttcattaattaattatttatttggaaatcgtattccttaaaatacttttcaataccgtatttcataaaatacagtctcccacacaaattaggaccatccctcctataataaagcgccctattttcgagtaggggggggggtaaaaacgggtccacctcgtttcggcgccgctcgtttcggcgccagcccagtttttggactataacttttttctttttccaccaaatctaacattgttggtatcattcgagagcccttctgatgctcagatgttttgcataattacaaaaaatttgatcaattt

SEQ ID NO: 39099 - DNA, 733 bp, Heterodera glycines
  unsure (1)..(733): unsure at all n locations
cgaaacnttttcgccaagtacaagcaattgggctgtggtggacatggccatttggcaattggactgtctgatcacccctttctttctccctctctctctcctctccccatctctctctctctcttttcccctttgttcattacttttgagtctgatcagttcaacattttgaccctttccgatcatttatttccactctgatcagcagttcatttcccaatgtttccctcccatttaaccccccccccctccgatcattcttttttttgaccttcgttcatcctttccaaattgtccggcacttggggaattcgttcgtgcagcactttttggcgctcctccgcacgctgctgttgctgcaacttcaggtcctccgtggccttcagcatcaacagcttctgtaaaaggccctgaaggccattacgggcgatcccttcgcccgtcgaccctttggccgtcacttacgcgcagctttttcttccgctccggcgtcaggaagcccttcttggcctttttggccctgcccgcctcctccaatcgcttgcgcacctccgccttcttgcgctccctgtctgccttcagcacgcgcttcaaactttgtttgattgccatggttggctttaacttaccccccccccctttccgtacgcttgtccccccccattctctcaccttctcctccctctcttgatagattccactgactaaggaaaacgactatctgttaaccatc

SEQ ID NO: 39100 - DNA, 1130 bp, Heterodera glycines
  unsure (1)..(1130): unsure at all n locations
ccattttgcatggtttttgtctgactttctcatggctctttacaggttgcactgatcacttatctgatggaggtgaagaaagtgaacggcccctatctgatcattgtgcagttgtcgaccatttggattgtctattaattgtgtgatactaaattctttttgacgtttagttgattcaacaacttaaagtggccatttgtccatacaaaataattcttattacacatttatataatgatattggatgtttattgtttgttttcgttgctaataattttttgttttcaattaaattggaatggatcaactgactgaaggtggggaacgtgcccaaattaacgccgacaccggtcaacgagtatgttttaagaaggatgccattttggttgaaagttaaacctaggcgcttattgctttgggtttggtcgattcgttgtaatttagtgcgagacgcgaagcacgaaatttgtgttgtgggcacgacgtcaaattggacagacatcaacgccgctgaaccatttgaaagggccgttggactctcagacccgtttgaagttgaccgttacgaaatgtttgcacaataaaaacaatacattaaaaaaaatacttgctcatatcaaaattcttttcattacagtcgcttcgcagccgagctcgacatcactttggatagccattcattgacttatttggcttctcagtcaaactctctgaccggaggcggtacatcgcgtgcttgataattttataatttttgtccagacattaagcgtatcattcaactgtcacgtaatgaaggcgattcccgaaaagtgtctgtcgatttgaacattgttgacgagacgagaagtattgcttttttctgttcatttgtaattatgttcaatcacagtgacatatttgagcggatcgaacgtggccttggaaataattttgtcattgccggacagatggctggcgggtgagacttgtcttaatgttataaacttgagtgtgaacaatcaattaagtgctccacgaagtgnggcacgcgtactattcactgctgaacccccacgccaagaaaatgagctttgtcacgtgcgaacctttgttttggaaagcttggacatgtaagttaactgacacga

SEQ ID NO: 39101 - DNA, 911 bp, Heterodera glycines
  unsure (1)..(911): unsure at all n locations
aaaaaaattttttgggtaaaaattatttaaatgaactgactagataatatttaaaataggttatttctcttcctttcagtatccctgcaaagtttggtgcgcttctgatcagtttctgaattaaaaaagttaagcctaaactttttggcctgtttaaaaaggaattaaaaatttttaaaaattttattcatctccctttttgatagaaaaagcatcagagtgcctaaactaacatgtaaataaaatttggtgcgtttcagaaccctttctgaaaaaatatttaagaattaattttgcaaaaaataaataaaaacgaaagactcagattttcgaaaatttttttgagccagctagctcggcgctcatttcagtgtaagttagtcctttaccggggagtatccctgcaaagtttggtacgcttctgctcaattagcaaaaaatataagtgatcgaattttcactaaaaagttaagcctaaactttttggcctgtttaaaaaggaattaaaaatttttaaaaattttattcatctccctttttgatagaaaaagcatcagagtgcctaatctaacatgtaaataaaatttggtgcgtttcagaaccctttctgaaaaaatatttaagaattaattttgcaaaaaataaataaaaacgaaagactcagattttcgaaaatttttttgagccagctagctcggcgntcatttcagtgtaagttagtcctttaccggggagtatccctgcaaagtttggtacgcttctgctcaattagcaaaaaatatgagtgatcgaattttcactaaaaaagttaagcctacattttttggcatatttaaaaagcaattaaaaaatttttaaaatttaataattttcctgcaccgaaggtactcactcggcctcttcgcggcctc

SEQ ID NO: 39102 - DNA, 1122 bp, Heterodera glycines
cccggacaaatgttctcacctcttttctcttcgtttttaatgtccctttagttttcgactagcccggacagaaatttaaaatgtcagacttctttacttgcgtgtacacgtctttgtttctagccctcatgccagggagatctcccacaaacttctgccggcttacccaattctcagcttcgtcgtcaatgatgggtcgtcgtttcccaaaatgggaaccatccggtgctaccagtgagggatgcgcactgtgcacccagaccaactatgcaccgtttatctcggatggagtttgggagggaatggggaaaagccaaggcgcctttgaccaagccccgaacccccaaacgactcattgactgttaaagatgtgtttattcattcgatgttggatttgaacgaagtgagaaatcggaataataattgaagtctgttccatcacaactaccgactaactgatcactggggaaggagaaatgtgaagagaatgggcggagaaacattacaatgagaaaaggaaaaacgtgtgaaaaggataaatgtgattgaattgataatggctaatgggaaataattaaatgagggaaatgcgtcgaataatccttacaacttcccccttcccttaggatcgtccccgatccttaaatgaaaaatgaagtgaaagtgaatgaatggaccaaactctcggcttcgcccttcgtctctccaatccgaacttccacggccaagctgcgcacaaaattttttacaggacaggatccggcaggattaatcctgcaaatcctgcaatcctgcaaatcctgcatttaaaatctgcaggatcctgcgcaggattgcggattttaggaaatttcaaaaaattctgtattaataaaaaaaagtccttcaaagtataaaaaagtgttcaaatatatttttaaaccaaaaactgatgaagatgaaaaaattaataagagaaattgacatcaggaatagaattgtgtaaaaagatcaacatttcggccgtttctggggagatatttgaccgacggtagtcatatacgtctcttgccacactaaaaagctgttcactggaaatgcttgtgcatggtggtgccaaataacgacacgcaatctttgaaa

SEQ ID NO: 39103 - DNA, 944 bp, Heterodera glycines
cagtttgatgcgctgttacgccgtcctcacatttttcgaggtgtttttttttgtaaaaatgccacgattcgattgtctctcatccattcaatgtccgttttatcttcctattcctgctgctgttcagcttgacaatcgcggcaaccatttcctccccgtctaacgttctctgcccaatgttcccgccgtcgcgttgtgccgtcgcccatttgtcctttcgtcgcctcccaatcagatcatcttcggttttccaggcatttttttattgcaattttttgaaattttcattagccttcgcgtgggtgacattgtgtcggtggtggaaattattgagacggaatgtgatgaaaaatggatgcgcgggaaattgacggtgccgtctaatgacagtgaggagaggccaaacgacaacagccgaagggtgagtgccgtcattgatcatgctagaagaatgggtactgtaatttctgtaatttagaagggggcgggggcttaaagagaccaaattttgggatacagtacccttatttcaccatcccgcttatacagtatcattctgttatttctttggtatataatcgtatcccccccccttccctcccctctttggcgttagtttggcatttttcccgcccattgcgtccgtttgttttccgaccgtctttcattgggagaacagctttggatggcttcaaattccgctgcgtcgacaacggcacattcgcttgtgcgccgatcgttggcttcgttttcgccatgccaacgcccaaatggagccatcggcagcccctctctgttcagctatgctttgatcaggcattttttgataagaaaaaaaggaaaaacccaaggaaacggcgggccagccccatttgagtaccaaaaacaatcttttgcctttcaggtccttcatcgtacgacttttcaaacatgcttcttcttct

SEQ ID NO: 39104 - DNA, 923 bp, Heterodera glycines
aaattttaaaaaaaattttcaaaaaaatcgctggaagttttttatttttttcccttgaattttctaagaataatttttaaagattttttcatgaaatttttttaaattttttccaggatgtgttatgtctcggctgtgtttctgcggctgtgttttggggtgcaccgggggggggggggatcatcacctaattttatgaaggggataagtcatgtaaatcgccgacaatagcgcactttttccaaaacttttggagacaagggagatgcgatgccgataggcgccgtcggtgaattagaaagtttgggtgtaatttgttaaaagattttcaccaaaaactgctagattttcgcttttgagctaataaagggaaaaggggaatcaaagtgcgcatggattgggatttaacattcccagctgtaagtcggagaacgtcttaaaagatataccattggatagagcagatccaactgcaaagttggggaattaataaaaataaacaaaactggcaatagactttacggtttttgaggccccataactttctcatttcttaatatgggcaggtatgtatttatatacgttttccgacttgcatgttcccttgtgagttgccaggaagcctaaccctgggcttgggccgccccggggaaatgccttagcaattgctcgcgcgtgctatgcatcagcaatgcgtgtccgttgtgcaccgggttgcgcaattggaaggcgaatacgcagtcactctgtcgcgcggcaaattcgcgtcggagttccgcaggcgtttttctgtacgcgtccaatccgtccccatagacaattcgttcaaaaacctaaagaatacgggaaaagaaatggtcggatataggcggatccaacatgaacttctccgcccagcagccaatcgccgctgtccaaatctg

SEQ ID NO: 39105 - DNA, 919 bp, Heterodera glycines
  unsure (1)..(919): unsure at all n locations
tttcgcgcgagtgcctgctttttagcattagaattgttcagaagtatatgtatattgagggtgaccaagttttttttttcaaattcaggataaagaacactaaaattcagattattgcaaaacaagggatcagcggccaattttccaattttgcgaaggggtctccggccatgtaaattaatgtaaatcaatgaccttttttgctttcaacaccgcttttttcgcggcacgtttttctcaagacttttggggaacaaggagggccggcggtgccgataggcgccgccgggaaaaattttgtattttttaattcgatttgttaacagaatttgtaaaaaaagacaaattgattaatttttgggtttttaggatgcttaaaatgaaagaaaaaaagttggaatattttttttaattaaaatttcaattaaaataatggtaaagaaaatatgaagaatattctatcccagtggggaattgtacccaagcgagaaataataaaatcagaaggtttagccacttgaccacttatgcatatgaacaaatgctttaaatgaaaataaataatttaattttttttttctcaaaaaatttctccttcttcaccattccctactcttttctcacccagacccccattcttaccagtgcaaatttttaccggcggtaccggtactagacaaaccggtaccgatactttgatttttgaaaaaaccggtaccggtaccaaaaaacccggtaattaccggtcggtaccggtaccgctcaaccctactatatttagctatttttgagattttttgagattttttgcttaaatttaacaaatttgaagaatttgtaaaattttgcccttanattggaaaaatttatatgcatatttttcactttttatgtgcatataattggatgccctactgat

SEQ ID NO: 39106 - DNA, 1514 bp, Heterodera glycines
tgccatgtcaattttagggcaatggccgtgccaatcttttattttagggcaatggcagtgccaatgtcaatgttttgagcaatggccgtgccaatgtcaatgttttgagcaatggcagtgccaatgtcaaattttagggcaatggccgtgccaatgtcaatgttttgagcaatggaagtgccaatgtcaaattttagggcaatggccgtgccaatgtcaaattttagggcaatggccgtgccaatttcaaattttagggcaatggccgtgccaatgtcaaattttagggcaatggccgtgccaatgtcaaattttagggcaatggccgtgccaatgtcaatgttttgagcaatggcagtgccaatgtcaatgttttgagcaatggccgtgccaatgtcaaattttagggcaatggccgtgccaatgtcaaattttagggcaatggccgtgccaatgtcaatgttttgagcaatggccgtgccaatgtcaatgttttgagcaatggcagtgccaatgtcaaattttagggcaatggccgtgccaatttcaaattttagggcaatggccgtgccaatgtcaaattttagggcaatggccgtgccaatgtcaaattttagggcaatggccgtgccaatgtcaatgttttgagcaatggcagtgccaatgtcaaattttagggcaatggccgtgccaatgtcaatgttttgagcaatgacagtgccaatgtcaatgttttgagcaatggcagtgccaatgtcaaattttagggcaatggccgtgccaatgtcaatgttttgagcaatggccgtgccaatgtcaatgttttgagcaatggcagtgccaatgtcaaattttagggcaatggccgtgcctatgccccggcgactgacccttcagcaatttgcgtctgtcccgtttggcactgtcaaattacaaaatgtttaaaaatcattgagtgtttgaggaatcaaccataacagatcaatgtacgaataagatgttgtcgatcggtcgagcattttcacattggcgtggagggggcggagagtggccacaaatgagcgacaactgtacaccgtattaggacgacaactgtggtctgtacaatcggcgagtgactaccgtactcgctaatgacccaccgtatgcgcacaggtccaaatacaatcctttgccaatttccttaaattttaaatttttaacttttttttgccgttctttccgtgccattgcctacctactcacccttaagtaatgcttgtcgctgatggcatgccgattgatgaaatcgcggcagtgcagctcaaacaccacgtccttcggcagcaatgcttttggctcgtaaaatcggatgagtcggccgaatatttctgtgagtgtccgccgttgtttgtcaaattgtccaaatccccccccccattcgcttaccctcaaattttcccattgcgaagctgtctttctcgatgttttttgtgtgtgcccaaatgtccatgatattccgtctccattgtctg

SEQ ID NO: 39107 - DNA, 1021 bp, Heterodera glycines
ttttatgacaatattaatttaatatctatatgaaaatcttttttatgcataaacaatattagttggataacaaaaaaaaataaattaaataaaaaataatgccaaaaagagtcatggtatgaacagcatcggaaagaaattgatttgaaaaaattgtaagtcgtttttaataaatagggagactgagagagataatatgggagagagagagatgagaggaaagaagattgataaagggaaagataaattttttgagcacatttcttcatagcttacattcagaaaaaatatataaatctgtatattttataaccctatttataaaggaagagacattcccaaaaattcattatgattcgtattaatctcattatattaccgtatggaggcttttgagtttattattagttttaaaagaaaattattcgcaaatcgatttatttatgaaatcaataaatttaaaattcatatatttttggaaaaattttcaagtattaaaaaatattaaatcattttttggtttaatttaattttacttgtatacttctctcaaaagaaacatgctaactaccgtaatttaataagaatagtcaatttatgtaatttatttattaaaatttaattattatttaatagttgtttgcattaaaatttttgattattagttctctttcttagcttacttttctcgcccattctcctcctttctcccattcttttcttcggtccctctccgtttgtctcttctcatttgtcttacttttctcactcaattactcttcttctctttttgggtcggggtcggtttagtacgagcgcaagtttttggctataacttttttctttgccaacaaaatccaacatttttagtatcgttcgatagccctaagtgtcctctattaatctgaaaaattgcgaaaaattttgttaagcttcaaaaaagttatggccagaaaaactcaaaaaaccagattttcaaactatgttggctcaaactttttttaaacttaataaaattttt

SEQ ID NO: 39108 - DNA, 1350 bp, Heterodera glycines
gaaaatggcaccgaattaggcaaatggcgaacaaaatgggtccatcgaattcaacctgtacaattattggataaaaaaattggttgatgaacaacatgaagaaattgaaagaattcaaagtaatttcaattattatacagtttgacatggcggcctttaaaaaatttttgaattcaccagggattttatgtgaatattttttcgggaattttcaccccgatccgagacttttatatcctcgaataacggtgatgaaacaagattaaaaaaattaaaaaattaatgccaggattgattttgtgtgaatgttgtgaatgttttgtcgggaaaatttatcaccgatccatgacttttctctcccaatgtcggggatgaaatctaagttaaaaaaattaatacccggatttatgtgaatattttgtcgggatttttctccccaatccgtgacttttatctccccgaataacggggaagaaccctaaaaaaaaattgttatgaaaattctataaaaaaatttataaaataaagtagtttgttattcaaaactcgaaaatagggacagtcatagaaattttaggcatttgggaagctctgctcttaaatttttaaaattaatttacaattaaaaacaaattatttaaaaatagtttttttatgcattgaaaaagatgatttaaaaatcgcaaaagcgcaacaaattggaataaaaatggcatttatggcaattataatggatttttggtgcaatattagccgaatattttggtataatgagaaaaaaattcggcaacgaattgagcaattattaagcaaaattaaaggcaaaaaattagatgatatcgcaaaagcaatggtcaacatcaatgtggatgaagacgaaaatcaaaaaggcaaaaatgtaaaattaaatattatgtaaattaattttaattaattttaaaatataaaatttgaaaaaattcatttaccgggccagggttttgtctctcttttaaatttgtataaattatactaattttcaagttagtttgatttaaataaatcagactacaaaatttattttatttttcaatttttaaagtttttaatttgccaaaattagaaaaacaaaaataaaattagccaaattatttaaaaaaattttttattaatgaatgtcaatccgatttatgttcttttagttgaaagaattgttattgtgggagaacggacccgagaacatgtcaatttatagagcactaacaatctgcattaaaaatgccatctctgaattcaataaaaggttaattaagcaaaaagtgtaaaaaataaaataaattatattcgatttaaataaattttacggtaatt

SEQ ID NO: 39109 - DNA, 882 bp, Heterodera glycines
cgccgttcgtcagttgtccatttgttgcagaacgtccgtcttttcattgagcaagcggaaaaatttgaaaaggaattgtccatggagaaggaaacgccgaaattggcacgggcaaacgcgcgactgcgcaagttggaccaatgttttgtgaacccgacgatgggtttggcacgagaagagccggagaagtaaggggacgatttggggaggggaggggagtctttttgaatgcttgtccatattttcgatcatcacattggtcccacatttctttgttttatttcgctttttccccatttttttgtcaggcgccacgtgctcttttcaatggccaaaggtgactcttaccaagtggacgtgatggccgcagttcagcagaaggtaaatgtacacaccaatcagcttcggttccattgcctctgattatttgctcaaataaattaattggccgactttttgggaaaatttgaaattcattcggttggcttttgttacgacagattgtgcaattggcgaatgccaaaagtgagaagcaaagggccaacagaggacgcgaattggcattggaactgacagtcattcagcaggccacgctttgtgcggtgagaacactcagagagacaatttgagcagcgaaagaatggcgaagaaacagacaaataaatgaccctaattaactaattaatggaaagtgacacattttgagatggaattgctgacgattgagaggcttttagccacaaatatttattccagtggataccctcgactaatttcactttctttccctttccgatcattttcaccgatcaaaaggatttgcccttttatttaataatccgtcaaaaaacccatttttattcaaatgttttgattggtttt

SEQ ID NO: 39110 - DNA, 1213 bp, Heterodera glycines
  unsure (1)..(1213): unsure at all n locations
gatgcagccaggcgcgcaaattacccactctcacngcgaggaggtagtgacgagaaataacgagaccgatctcttatgaggccggtcatcggaatgggtacaatttaaaccctttaacgagtatctatgagagggcaagtctggtgccaccagccgcggtaattccagctctcaaaatgcatagaattattgctgcggttaaaaagctcgtagttggatctgtgctagccgtccggtgcacactttgtgtgttactggttcggttggcttttctgccggtctctccccggcgttggcctttaccggtcggcgtcggtgggctggcgagtttactttgaacaaatcagagtgcttcaaacaggcgtttcgcttgaatgttcgtgcatggaataatagaagaggatttcggtccgattttattggttttgctgaccgagataatggttaacagagacaaacggggccattcgtattgctacgtgagaggtgaaattcttggaccgtagcaagacggactacagcgaaagcatttggcaagaatgtcttcattaatcaagaacgaaagtcagaggttcgaaggcgatcagataccgccctagttctgaccgtaaacgatgccaactagcgatccgccggcggatttattcgccctggtggggagcttcccggaaacgaaagtcttccggttccgggggaagtatggttgcaaagctgaaacttaaggaattgacggaagggcaccaccaggagtggagcctgcggcttaatttgactcaacacggggaaactcacccggcccggacaccgtaaggattgacagattgatagctttttcatgattcggtggatggtggtgcatggccgttcttagatcgtggagcgatttgtctggtttattccgataacgagcgagactctagcctactaaatagttggctcattgcttctgtgggcacaacttcttagagggattttcggcgctcagccgcacgaaattgagcaataacaggtctgtgatgcccttagatgcccggggctgcacgcgcgctacactggcaaaatccgcgtgcttgtccttccccgaaaggggttgttaaaccggtgaaaatttgccttgattgggatcggacattgctattattgtccgtgaacgaggaattccttgcaggggcgagtcctcaactcgctctgaatacgtccctgccctttgtac

SEQ ID NO: 39111 - DNA, 1122 bp, Heterodera glycines
  unsure (1)..(1122): unsure at all n locations
tgatgagaattaaatttaaataaaaaaatttatggtaaaaagaaaatgatggaaaatttaactcctgaaaatgtacaaccgttaattgagcggaaaaatggaaaactttgcaagaaaatgtntagtgaaattggcgtcaacaaattagcaggcaataatttttcttattcgtttttttaaattttttattttgtttctatttataagattttaattttaaataattttttattagaaagatagatgttaaatttaattttttttttaatttttagatttgctggatgaatcaattttcaaaaagatttttgaaaattttttggaaaaacattgggaaccccaaagcatggagaagcaatgcttggaatatttaggcacaattacattatttgccagagcaattcaagcaaaaatgaattttattgaacaaatgtcgaaacattgggcaaataaatcggtgaatggaattgccaaaaaatgggaacattttatttttaatcaaaatattgtattcgaattcgaacagtttgtacaaatcaaattgtattttttgcaaaatcagcttgatgaatacgcttttgagttaatattaataattcacaaattaattcattaaattacaattaattttatttgctttttacgtagttaaaaggtttttttaattaaaaatattattatttaagtaaattattaattttgtctaatctattttatttaatccaatttatttttattcaggcaatcaataaattttgttgaaaattttattcaaataattgacgaaaatgagacagacaaaatcaaaaattatgggaattattcacctcaatcaccaaatgatcaccaaacaacccaatttggcacatataattctgatgaattcaatgcaatttttgccacattggaaatgcatgaatgttcgatgctaattgcaaaaggagtgatcaattttgaaatgatcaaacaaataaaattggcccattatttaaacggtgaaacattttcaaatgcgggaaatccgccgcccaaaaaatgcttgtgtgttgatgctaaaattgagcagcaatatgtcaacaagctgcagaaaatgctgaatcagaaaaaattgggtaatttttt

SEQ ID NO: 39112 - DNA, 1838 bp, Heterodera glycines
  unsure (1)..(1838): unsure at all n locations
ggcattaggtaattaattattaagggatgcgtttaaattgggaataaaaagaataaataataattaatggtcgaaatcaaacaatattttttcttcctttatctttatcatattttttagttccgttcaccttttttattttttgatttgggtctgtttnttcgcttcttttcagtttttttaaaaatttaatggtatcattttgccaatatttttttattgaaatgttttgtccacctccgtctccatgtgttgcgatatgcttgtggtggtagccgaacggcacaggcgaccgcccatctgctggtggttgttaggtctggcactgtttccgaccncagtgccaagccaacagtcctcctcgaagaagatgccgctttcgggcgagcctatcgcatcgctcccggttactgtatgctcagtactgtactgctggcccgcctcagcctcatcagtttcgtccgtggagtcctcatgctcggtccacagtcgcttttcctcggccaatttggcacggtttgcacggcactccttcttgtccatttctgtcctcgacagttcacaagcgaactgaaataggacgaaaatggaattgaatatgataagcatttttggatcggaggttatcatgaattttcccaccgaaatgattaaaaaaaagagtcaattttagcccacctgttggatgagttgtcgtgaaagtgcgttctgttcggatgccagcaattcgcgcacaacacgctccaagttggacaacgactcgtcattgttcgggaacatcaaatactgcttgatcttcggcagtgtccggcacagttggagccttaaaattattgaaattaaaattagtaaaaaattacaaaaaaggtgtaataaagacaaaatacgaatgatggaggggggggggattttcactgaatattttttagcaatttgcatttttaaactaataaaaaagggaacaagcataaaatttgaaaagaatcaattatagtattaattctaacagaatctaacatttttagtttttttaattttttttatttgtgtgctgtaaatgtacagtataccaaccgtatgtttgagattgggtcagcggacagtttgagcaccgcgggcaaaaatttgtcgataaaaaattcacggctgaagtactgtagaagcaacggtacaatgtccaacaaaaggcgccggcgatagcaactcgaatggtggccaatgtcatggacgaaaaagtcgacgatggtttgccgggcgcgacttgtcgcgaactcgcgcatcatcaacaacaatgtttgggcagcagcaattcgacaaggtaaggcacgctgaaaaaaatatcgtaaattatttaaaaaaatatatattctatttaaaaaaagtcgaaatatttctttttggaaaaaaggatttatatttctttaaattttataaagatatgaagaaataaaattaaaaaataatttgttaattaagacatttttaatgataaatttttttaagcacgagtaattatttttgtatttcttattgaaaaaaacgatttaattgggtactcaattaataaataatttatttggcaattaccgcggttagcacttcctgcttgagcaatggcacaaagttggacagcaaatccttggtgctgaccaaatttcgcaacactgcaatgccattcaaatacgcctcgtgggctcgccatgagccggtggaccctttcatcaaattgttgcaactgaccaaaatgcgatccaatttagcaaatatcaaatgctaaaaaggggaaaataattaataaaagggaaaaaatattgaaagaaaagaatttcaattgtaat

SEQ ID NO: 39113 - DNA, 1112 bp, Heterodera glycines
cttctgttccccaaaagttttttttgaaaaagagcgccgcaaaaaatggtggtcaaattcgatgttgagacgagttcgcaaaaatttcggttaaaccccacccttttccacgtatttttaagccagggcttccatcgaaaatttttaaatattaaccaagccagaaaaataagattttagtattaaaaatatgaacattttgcaacatgtttctaatcagttatttttataatttagatcaaattttatatttttagtctcctattatcaatttgggtaattttggggaggaaagtgcaacattataaatttcagtaaattcgggatcaaaagatcaaaaaaattttgcggcagaccttaaaatttcttgaaaaatagtgacattatgccatataatttcaaaactataagtatatttaagaaatcagaataattttagtcgctacacaaaaatcagaacattcttaaaaataagaacaaatggaagccctggtttttaggccaactttgactcattcttactggcgctaacgaaatcagatgattaaagtgaaaaaaggaagatttacgagcatttaaaaagaaaattggtttttgggttaaaataaaatttggtcattccccgatcggggtccccgaccccctacaattgtgctcctccccgccccgacccccaacatgtcgccccccgacattttgccccccgccgaggggtcgggaagcaaccctaattcaaattgtcaatgtggttatcccccagcgccccccccccgccgaaagtcgggccataatcagcaattactcgatgcagtcgaggatagtgagtcgatagaagattgctgttgctgaaagcgctgcctaaatcggttaaattgttgttgatgcagcggagtggtgccaatcggatgttgcggaatgttattggccggcgaagaagaattagaatggacggagttccaaaaattacgcgctgactgcgcaagcggtgcagtgccaggaggcgatttcaaacgtggattagggtccagaggagatggggactttccatagtcaacggattgagatttgggtcgatcctggggcaattgttggcgcagtctctgacaatgagt

SEQ ID NO: 39114 - DNA, 1068 bp, Heterodera glycines
ttggtatcattcgaaagctgtaaatctcctctattagcctgcaaaattttgaaaaattatgtaatggttcaaaaaattatggcccgaacaactcaaaaaaccagattttccaacttttatggccataaatttgttcaaaattgacgaaattttttggaatttgcaggctaatagagcatctgaagggctttcgaatgataccaataatgtttgatttggatgacaaagaaaaaaagttatagtccaaaaacatgctggggcccaactgacatagaccggacggcggggggggggggggcgagcggcactttgcccaataaaatgtcattttttgatttttcgttcgaattccctatggttggccatgcttttcttctctcggcacttcccattggatctgttgatcattgcttttgctctttcagtttgattattggttgaacaatgcttttttactttacttccgttcccttttttctttgtgtccctctcttttcccctctttttccaattgtttattcccattttatgtatgtttatcaatcaatagaattttccaattatttcgatatcaatttccccgtgaattttgcatacaaagcacacctttgccaatttactaattgacaagcaaagccccggccaaattcatccttaattagtgttgtaattatgtgctaatcgtcgtccccatgcgctttgtccctttcttcttcttctgccgctgtgcttgtccttctcatccgcttgccttctctgttcagttctgccaattcaaagtccgattttgtcttccctttcgttttcgcattttctcctccattttttgtgattttaacagaattcggcccttttgattggcacctctcaacaccaaagataattccactttggccataatcgctgggcaacaaattggaggcaattgacgagagtgaaaggcgaagcgatgtttagcgcgtgggcagtgcccttttggtgggggagttccttaaattggcatctgtcccacctcaagatcagaaatctctccgtttattggcaggacaataagctctagaggtcccc

SEQ ID NO: 39115 - DNA, 1398 bp, Heterodera glycines
tgtattctttattaaaattaaaaataatattcattgatatttaataataataatttccatttaaatttaattaattttacattattacacaatttgattttcactttcacgatgtcggatacgcggacatcacatcacgcaaattgaattgaaacagaattacatcatattcacgatttttcgtcgtatttacgatttttctcccatcttataaaagatgatcctaaatacgatgagacgtcgtgaaatgatgggaattgaaacaaaattttacacgatatgacgtcatatcggagatacgacgggaattgaaataggcccctggtatcgtttgaaagtacttgaaaaaagatataactgcaaatatagaatttttttgttcatgtacaaaataatcaaggtaaaatagttcgaaaaactatgtttttgattttttttttctctttttaataaatgaccaagtgaaaaaaggttggctctattgcactttatgaggacaaccgattcgaaagcacaaagatttcatcgtttaggcaattgccaaaaaaattcattaattaaataattggtttctcggttttttggatctcgagtctcgtggtcaaatctcggtctcccggctaggttctaaagtctcctgagaattttgaccctctagcagccctagagcttagaaatcctaaaatccatttattcatcatccaaatacaatacaatgataaaatgaaaatgtctccccagaatttcttcccattcccatccttttcaattcttcaaaaggtccctgtccccgtcatttttcaaccaccaagcattcatttttcagtcatcccttcgtccacctcccccccccccccgtacattctcattcattcataaaaatgggtggtgcggaatttattgatcgtcggcggatccgtccgtccatccgtccggcgcggcggcggcggtgtccgtgcgaggccgcgatgagcagtgagtgccctgctctgctggagtggtgctgctggtagtggtggtgattttgatctgtgtgtgtgtgtgtgtgtgcggaaaatgaagatgatgaacggcgaaagtattgggactgaagcggccgggcgcacttggaattggtcgatcgtcgtttcagtttccccgttttttgggccaaaaaaaccaaaatttatagaaatttttcgttttcccccctccccgcccccgacatctctgaaaatatgactgactcctcatacatcctgctctcgatcccatacattttacgactcattcttggcgggacgcaatcgaccagataccaaattcaccggcggtccccgcggattgagtggtgcccccccgtccccctcccgctttttgagtgggtggtgaaatgagggtccggcccgcgggaggggg

SEQ ID NO: 39116 - DNA, 642 bp, Heterodera glycines
aagcattgttgctttgattttctaaaaattgttttcatttcgccgtcccctttaggaaggtgtgccaagaaatgtctccaaaagtgccgttttcccaagaatcaaggcgccctttttgggcacattttttgaattttctacgcgggggcggggcggacgcagagcggctgatgaagttgtacatggaccaactggtgatgcttgaccacccggtggacgaacatgacgcgttccatctgaaaaccgcgttggagtgggttaaatgggcgccaaattccagtgcaaaatggtgtcacttttcctttcaggtgctatggcaagtggaaattcgaaatcggcgcccgtgtcaaccaccggtgtgtgtctgaataatcaaatgggggggtattctatctttataagcaaattattatacattacgacaaaattttgtaaaaggatctgcgattttaaaagtgaataatttaaaatcaaacttttcctcggcggtgtctacaaaatgcttaattttccttataaattggtttagaactttttccttttcccctactatttcctttatcagttctttggaatgctcacattgttctctcgaattgattccgtcgaccattgaaccgcacaaattcaacgaattgcgcg

SEQ ID NO: 39117 - DNA, 998 bp, Heterodera glycines
ctctttccttcccccccccccccactttttctctgctttttgggacaaaacaggaaaagatccttcccttcttccatattctcagtcagtccgtccgatcggccccccccccctcctcctccgcttctttcccttagggccttcttcgctctcaaactttgtggctttccgcagccggtggcgtggggatgtacgcccccatggagcggagggtgcagcattcgttgcctctccgttctttttcgtcccctcgcccatctaccgattttatcgaactttgccatctccatcggggtgacgaacacttccccccctccccaaagatccgtcctattttttctcctatttttgtcaatttttaaatgagcagcacataaattctcgaaaaaacaccattttacaacggtcaaaatatgcaacattcgcacaaactgtggacgcacaaaaaataacaacgaaaacaatattgatcagatcagctcggagagattctcagaaaacgatatttagtacagtttaaagtcgatttgctctttttaaaattattagactgcgttcatttcaatgattaatgtttcgacaaaaaaattgtcggagagcaacggatgcctttccctttcaaggctatcgtccccgccgggtgtcggcatgaagacattggttctgtctgtcccgtttttttgacagctcacaaaagcttatttttaatgcgatttgctaacagaatctgtccaaaaaatgacaaaattttgattttttgagcaaattttgcaagaaaattaaatatttttagggtccggcggtgccgataggcgccgccaggaaatttttaaaaatttcagtttaatttattaaaagaaattattaaaattataaattttttgaaaaaaaaatttgaaaaaatttgcgaaaatttccgacttttcaccaaaaatttcggaagtcggaattccgacgtccaaaattttttcggaaatcggaattccgtgccatccctg

SEQ ID NO: 39118 - DNA, 714 bp, Heterodera glycines
atactctctctcttctttcgctgtctgcgctctcactgaaactaatgcagagacgctaaaatttgtttttattttagtgtttctatgtaaaaaacttttgcatggcaaaaatgtttaaatttaacttttacactttaattatttaattttttcttgcagagcaaatgaaaattattgtacgaaaaaaaatggcagcaagatcttcgcatgcagaccggccataaaccattgtctgatgagggttcgtgtccctttacggaaaacttggatacagtattggaggaaatttgcaagcagaaaaacaaaacttcagtatgccaaactggagatgactggaaagcacgcgctaaaagtattattactaaagtgggtacgttgtcaatacctcctattgaagcgtatgttgataaaacccgtaaacaggtatgaattgcaaacaaaaccaatttagtgtattcttatatttctaatttaagcttggagctatgcgaatgttgcaacggcacttgctatagttaaaaaccgatacgcatgaaaactcttcaagaaaaagataaacttaaatctaatgaaagtttaaaaaactgcgcacaattctccaaattcttttcactcgacaagaaaaataaattaaaatagacaattacgagttgatttcaagagaataaaatttaaaacaaaagtttaaatggtccttcataatacaaaatctaa

SEQ ID NO: 39119 - DNA, 1088 bp, Heterodera glycines
ggaatttctttctgggcgagtttgattgtgaaaattttggaaaaacgcctatctctttttctgctcaacactctagacaattccaaccccatttacggaatgatagcgccaaccctaatttttccggaacggaatttctttctgggcgagtttgattttgaaaattttggaaaaacgcctatctctttttctgctcaacactctagacaattccaaccccatttacggaataatagcgccaaccctaatttttccggaatttctttctgggcgagtttgattgtgaaaattttggaaaaacgcctatctctttttctgctcaacactctagacaattccaaccccatttacggaataatagcgccaaccctaatttttccggaatttctttctgggcgagtttgattgtgaaaattttggaaaaacgcctatctctttttctgctcaacactctagacaattccaaccccatttacggaatgatagcgccaaccctaatttttccggaacggaatttctttctgggcgagtttgattttgaaaattttggaaaaacgcctatctctttttctgctcaacactctagacaattccaaccccatttacggaataatagcgccaaccctaatttttccggaatttctttctgggcgagtttgattgtgaaaattttggaaaaacgcctatctctttttctgctcaacactctagacaattccaaccccatttacggaatgatagcgccaaccctaatttttccggaacggaatttctttctgggcgagtttgattttgaaaattttggaaaaacgcctatctctttttctgctcaacactctagacaattccaaccccatttacggaatgatagcgccaaccctaatttttccggaatttctttctgggcgagtttgattgtgaaaattttggaaaaacgcctatctctttttctgctcaacactctagacaattccaaccccatttacggaataatagcgccaaccctaatttttccggaaattctttctgggcgagtttgattgtgaaaatttagaaaaaacgctatctctttttctgctcaacactct

SEQ ID NO: 39120 - DNA, 1266 bp, Heterodera glycines
ttaaattaaaattaaaatgtcaaagaatccatattttggcttcttctccttgctatcatcaaacaatcatcaattcattgctgattgtgagcaatttcttcaagcagttttggcattccttttatggtcgtcgttggaccatccgaaagtgttgccaattctgaggaattgaacggatggccaacaagctgaataattttaaaaaataaataaacaaatttgaaaattcaaaaattaaccgcgtttaaatatgaggggtcccacacgcgcgtgtaaaagtaggagaacagaaggccgggcaaagacacaacgcaaaagtaggcaattacagtcagacagcgaatccaactgaacaaaaacaataaataaaagatttactgaaatttttcaaagatttagtaaatatttttttacattgagtcacggcacgccattttcaggggacaaacaaaattacagagggttggccaatttggccagcaaaatgaaaagttgggatgggcatgggttggatgggccatcgatttgcaagtttcaatttcccaattcccccccccccccattaaaatggctgtccttccgtctttttcgtcaattacttccttttaccgtttccaattttcccatttaattgcgcaataaaatcaaattttctcaaaaaaacttcattatattaaatgccattgttaaattgaatgacattaaattttgccagttcttttcttctgttttttgtcttcaaaattagtccctgaattttgcttttttttcttttaaagtggccgggggaaaggacaaaaaggtcaaaaaaggtccattaaaactgaatttcctacgtctgcaactctttgttcttccgtcctccgcgcaccccaaaaccgtaagtgaacggccgcgagcgtcgcggttggccgccgctataataaaaaacggtcgacgcgttggagcgcagcgttgcggaggagtgaagcggacgatgcgacggaggcgccccgccgaggggacatttgccgctgttacggatgcacggcggatgaacagaagcggaagaagcggtggcataaggcggcgcagtgttcggcacaaccgatgccaccgccggattagcggaggccgaggagctgccaaaggacggcgaagtggacgaattgcgcatgacgggagatcaaagagtgaagaaaattgttgaatgattgaaggaataatttatgtataaacacccaggaagttttaggttaaaaaaagccaaaattaattaattaatta

SEQ ID NO: 39121 - DNA, 1110 bp, Heterodera glycines
actgccccgaaaacaaaaaaatcgatttttcaagtgtcgtttggggtactcaaacatttatggggagcaagaatccaacgcacgaattaaagtacagactatagggaagctattcccgaaggattcggtctctccataaatctgggcgcatcggttcggggggactgccccgaaaacaaaaaaatcgattttttcaagtgagtgtccgtttggggtactcaaacaattatggggagcaaaaatccaacgcagaattaaagtacaggctatagggaagctattccggaaggattcggtctccccataaatctgggcgcatcggttcggggagactgccccgaaaacaaaaaaatcgattttttcaagtgtccgtttggggtactcaaacaattatggggagcaaaaatccaacgcagaattaaagtacaggctatagggaagctattcccgaaggattcggtctccccataaatctgggcgcatcggttcggggggactgccccgaaaacaaaaaaatcgattttttcaagtgtccgtttggggtactcaaacatttatggggagcaaaaatccaacgcagaattaaagtacagactatagggaagctattcccgaaggattcggtctccccataaatctgggcgcatcggttcggggggactgccccgaaaacaaaaaaatcgattttttcaagtgtccgtttggggtactcaaacatttatggggagcaaaaatccaacgcagaattaaagtacagactatagggaagctattcccgaaggattcggtctccccataaatctgggcgcatcggttcagggggactgccccgaaaacccaaaaaaaaattttttggataaaaattatttaaatgaactgactagataatatttaaaataggttatttctcttcctttcagtatccctgcaaagtttggtgcgcttctgatcagtttctgaaaaaaaagttaagcctaaactttttggcctgtttaaaaaggaattaaaaatttttaaaaattttattcatctcccatgttgatagaaaaagcatcagagtgcctaaactaccagtgagagaaaatttggtgcgtttcagaaccctttctg

SEQ ID NO: 39122 - DNA, 925 bp, Heterodera glycines
  unsure (1)..(925): unsure at all n locations
ccggtatttcccgaaactatgagatgcgaccctagtctcacccatgttgttattgttaaatttatgcattttttacatcctatttatgaatgggaaattaaaaaatgataaaattttggttcgattagttagtcataagtttttctaattgaatctgacgcttgtacaagaactcgtacgaaaatgtcccccgtacgaaaacggcggtacgaaaacgtcccccgtacgaaaacggcggtacgaaaacgtcccccgcacaaaaacggcggtacgaaaacggcggtacgaaaatggcggtacgaaaacgtccctgaccgatcattttcagtctgtccgttgaatacgaccatacgtattcacggcagccgttgtagtttggcatcaattcacccgccccatcaccaaaatcaaaatttgtatacaattttcccaatccctaggggtttttctcctacccctgcaatacggtagaacaatatcaaaaatttcagtgctggacctttcgccactggaatgagagtttgcagatgccccttttgtagaagtctgtgccattctttgaggcgaggtactgccccaccgcctcctcgaccttggcatgttcttttatgtttctaccccataaggaatttttgagagaaagactttagcggtaattttagtctatagggaccagcgggtggggtatcacgccctagcagttgttttccatagagttagggccaatgaaatttggtgccaattggggtcttggccataactaaaaattgaaggaaaacttctttcgaattttttgtaatacataacatagttaagattttaagagctcattttcaactttnaaatatgtaaaaccgaacggactaattactagggctgccaaagtatgcaaatgcatatttttttcctggcttctcatgctcta

SEQ ID NO: 39123 - DNA, 1000 bp, Heterodera glycines
  unsure (1)..(1000): unsure at all n locations
ggtcttgtaagcgagggacaattggggtgctactttgaaaccatttttcttcaaaacaaatcatttaatctcttcaggggtatattttccggtttttaagcatttttataaaatccaaaaagccaaaatattgaaaaaaaagttgaaatattttcgtataatattttatttatgaaagttcaaaataagacgtcaaaataaaatattttcggctaaaaattatgtttttttgagcatttctcatcaaaataaagcttcagaaaaaatatattaaataacctatttattattaaattaaatctaaacattttgtgcatattttatttcaaaagcatttttagcaaaaaatttaagttttaaaattctgatttctttatttctgcatgggtatatttttggttttttaagtatttttgtaaaatccaaaaaagccaaaatactgaaaaaaagataaaaatattttcgtataatattttatttacggaactcaatttaagtttaaaattcttatttttaaaattcatattaaattgatttctttatttctgcatttattctatttattatataaaatatttataaaaacttcgcttaaaaccatgcaaaaatacaactaagcacgttcagcagttttcttgttgcttcggttttcgaaggtggataaaaatgaataataatttttttataaaaatatctaattataagtaataaaaataaatgaaaatcaatcgttggttgtgccgttcttggctcgtgaaggtgtatcaatcacatggctggagcatggacggacgacttctccattccgctcatggatggtggtaatggaggggntatggaggggtcgatggggcatcttctggcaatattaaccccacaanaatacaaaaatagcacatggtgcacaatcattctttcacattcattttcctattttcgtccatcatttttcattcatttttctttgaaataactttcattcattacataattaattgac

SEQ ID NO: 39124 - DNA, 807 bp, Heterodera glycines
  unsure (1)..(807): unsure at all n locations
ctctagtctcggctctaccaatacactcagcacgatatttaccatttaatagttgaaaaaaattattgangaaaaaatgggtatgtcttttttctcttggggatttgaccgcaaacttggtaccaacatttgccttctctagtctggctctaccaaacactcacacgatatttgaaatgctaacgaaaaaaattcttgccgaaaaaatggctatctcttttttctcctggggatttgaccgcaaacttggtaccaacattttccttctctagtctggctctaccaaacactcacacgatatttgaaatgctaacgaaaaaaattcttgcccaaaaaatggctatctcttttttctcttggggatttgaccgcaaacttggtaccaacattactacataaggcacctatctttttttttttttggtagcctacagtacccttttggggggcgtgcgccggggggggggcgcggtcggcgtcgcgggggggggacgcggtcgtcgtcgtcgtcgtcgtctgtgggggggggggacgcgggcggcggctgtcgcttggggggggggggcggctgcgacgcgtcgggcgggcgggcggcgctctgctgtgtgcggttggtggcggcggcgtctcttgcggcgtacgcttgagctacgcgtccgaggcgtacgcattgattttttttttttttggggggggggttgacgctttggggggcgtgcgccggtgagggggcgagtggcggcggcggcgctggtggcgtacgccctgtcgaagcgcctgctaccggtggcgtgagcgtacgcctcc

SEQ ID NO: 39125 - DNA, 1268 bp, Heterodera glycines
  unsure (1)..(1268): unsure at all n locations
ttggcgatgacgcgtggttcacgtcggatanggactctctcctcctcctcttctctttctggtcgccaaactcaaaaaagcgatcgttgaaaatctctgcattctcgggtatgttcacccgacgagccgagaagaaaggaccttctcgaaagggaataggcatttcccttatgtttgaaaaaaatgtggttgggtgggaaagctcccaccccttttatacaatcatccatcacgtaaatcacgtgatcagactttgaattgaaaattttcgatgaatcattcgtgtgagttcgtgatgactcatgtttgaagaattttttcgtggtggggaagatgagacgtgattccgcattaccacatccgaaggatcctccccccgccaagtacagtattaacaatactgtaacaagattgtgctctcctctcatcagagaccaggaaattaatttccaaagtctatagaagggtgaaattttaatgaagatgatgaggcaaataatgcctacaccaataatcattaagaatgttaaggatgattggaggccaattaaggaccaaagtgtggccttccaatcaaaattccaattcagccaatttgaatggccgatttgttttttggaaagattagaattaaaatcttccaattgttgatactggacataatgcaatgttccagcaatttcaaatgatgtttttcctgccaaacattttgtttggcacttagtttgaattctggctttatcgaaagccaaaattgtttggtaaattgtggcgttggaatcacattttgtggaaaaatgtgttccatcgtcgcatgtaatttcagcaagtgcattgccaaagttggttgagcacacatacttaaattgtgctccggttgaacagctgtaacagccagaaatgttcaatggcaaaattgtgcaaagactttggtgtaattccaaagccatttgaagaccttcgatctgaaggttcaattgaacaggactaaatcctgtcaaagcgagaatttttcgcccaccgtttctcagttgataatttttgatgtttaatggaagtcttcgctcaggactttccattaatttttccagattgtgtgaacggcaattgcagttcactaatcctcccgagtgatcgggtaggcaatctgtgcatgcttgtaagccaagactgcaattgaattcaattgcttcttggcgatttctgcacttgaagtcaatttctatgggaggtctcgttaaggccattgtgttcccgtcataaacaaa

SEQ ID NO: 39126 - DNA, 1030 bp, Heterodera glycines
ttttatttaggttgaaaatgcgcttaaattttcaccaaatgttgggccaatttgtttgttcggcctcggttgacttaatcaataaataatgaatatgcgttttaatgttttttttcttttccattaagatgcatccggaaacgacaaatttggcacattttcaccattaattaattcccaatttattattgctggttggggcttaactcagccaatgtgccaaaaatatccaactccaaaactaagtgaccaattaatggttggcaaaatgcgaatgatttcaatggaaaaatgcattgaatatactagcaaagatagcaacaaagaatgtaaaaaataaataaattatggaaaaatgaattaattatttcatttagtcactaatttgtctaatgtccttccttttgtgaacaacacccgtgctttgttaactgaatttaattcagcacatttgaaggacaaactttgcgtgatagctgaacccagcttggctgagaaggtgtatttggaaatacgccattactcaattaatcaataaaactcaaggattaaaacacattagtgaattaaatgtaaaaattctcgaaatgaatttcggaaaatgctcttctttttatgaataaaacactttcgctgcacaaagaatttattatcgaaaactcgaaagataaaatttgtgtgatacctgaacccagcttggcggaaaagttacaataaacatcattaacattacttaaatcacttaatcataatttttttttcagggagacagcggtggccctttgatgtttaaaactggcaaaaataataattgggcacaagtgggcgtcgctagcacatcgacgtgtaacccggaaaagcccaaaagcaccgacggtcttacaagtaattatttctataaaaaaatttgtatcattatataaattatttttagtccaaaaagtttagatttcgtaaccaaaacaaaaaaatgtataatttggtaaatcctaaggaagaaaattgcgtagttttttgaaatagcgggatt

SEQ ID NO: 39127 - DNA, 991 bp, Heterodera glycines
tttcggagaaaaccctctcgttggagactgtagataaaagagatagccacttttctgagactatctattgttagtaacggagccattttccaaccgaccatttgtagggctcaaccgcatatagtaatgcgttttcggggaaaaccctctcgttggaggctgtagaaaaaagagttagccatttttctgagaatatctattcttagtaatggagccattttccaaccgaccatttgtagggctcaaccgcatatagtaatgcgttttcggggaaaaccctctcgttggaggctgtagaaaaaagagttagccatttttctgagactatctattcttagtaatggagccattttccaaccgaccatttgtagggctcaaccgcatatagtaatgcgttttcggggaaaaccttctcgttggaggctgtagaaaaaagagttagccatttttctgagaatatctttcggggaaaaccctctcgttggaggctgtagaaaaaagagttagccatttttctgagactatctattcttagtaatggagccattttccaaccgaccatttgtagggctcaaagccattttccaaccgaccatttgtagggctcaaccgcatatagtaatgcgttttcggggaaaaccttctcgttggaggctgtagaaaaaagagttagccatttttctgagactatctattattagtaatggagccattttccaacagaccatttgtagggctcaaaggcattttccaaccgaccatttgtagggctcaaccgcatatagtaatgcgttttcggggaaaaccctctcgtttgaggctgtagaaaaaagagttagccatttttctgagactatctattcttagtaatggagccattttccaaccgaccatttgtagggctcaaccgcatatagtaatgcgttttcggggaaaaccctctcgttggaggctgtagaaaaaagagttagccatttttctgagaatatct

SEQ ID NO: 39128 - DNA, 1181 bp, Heterodera glycines
tttgttggcaaaatgtgtaccgtgatggaaggactgccttgcagagcgaaggaactgatcaaaacgcgaattcaaatcactacaagcggcaacggagggagtccattcattgaccaagtgcccccggctttgcatttacggcattttcattccccacccatttacagatgttgagcgatgctataaccgatcgaattaactctcttgaggtcagtcaattttttgtagcgttaatgcaacaattttttttaatactatgaattaattttttttttgtttttcagaaattgtcggacaatttgttgctcattctccacttggagctgcgcttccattgctttttccatttgatcacaattacacaaaaccaaagtgcgcattcgctgctgtcccaagacgagatcgaccgtgacgtcatggaatttgggcgtgaccttagccaactccatggcactttgcacgcgcatctctctccaaccaaactgaaatatttgttcgatgggctcggctacctttgctcgtccattttcatccattcctggtcactcaaacaatttaaaatcttacaatttacactttcttcttgcagccaataccttacaaaattgtccgacatgggccgtaaaagaatctgcagagccatattttctgtacaaaaatacttaagccaaatgtccgggtaaagataaactgaacgttgatgaaaaaacgaaaaagtaaatttagacgccccgaaactgaacttcaacgggctcaaatattcttcgacttccttaataaggtataagtatccttgatgggtcggtccttccaatttcttcattcccaggacttggaccaattatttgcgacaattatcgaacgcggcgccgtcttttccttcatcgaatattccattttactctcgctcctcattcggtcacatccaacactgaattcgcaggtaaagccgcggtttaactcgttcagtgtttcctagtttagcccggggttctggaagcggcaacaaatcaattgagggacattctttctcagcaaaaagaaaagcaaaatatgaagcaagcataaaagatttggtcaccctcatacatatttattttttgtttgtatatcggtcatcctcatattcgtattaatttattgtataattttttgattgactttgacttacggcttaatat

SEQ ID NO: 39129 - DNA, 998 bp, Heterodera glycines
atggagacgttccttcagggggaagggatacgccattctccatctccgacataccatccttcatcaaacggcgaagccgatcggtttgttcgcaccttcaaagaaggaattggcaaaatgttggaagatggaaagagcatcaaaattgcgcaatttattttcctgcaggagtacagagcgaccccttgctttgcggcagaaggacaaagcccttctcaaaaatttttgggaagagaattgcgtacggagttggacaaaataaaaatgtcagcaagtgccattgagcgaaaaaggcgtctgttgcccgaggcaaatcgtgaaaagaatttggttacgaaaaactttgagcccggagacttggtttggataaaagagccaaatggcaaatggacgcctggtgttttattgcgcccaattggtgaaagaatttgggaggtggagcatgagggatgctccattagaaaagtgcccatttggaccagttaaaagcgcgacgcgcagtcactcgacatcattaatacagcacgtaaatgcaatttgtatatattcaattcccccccccccaaaaaaaatataaataaatataaaaaaaataaatttaaaaaaaataaataaaaagaaaaaaatttttgtttttgtgttccaattttaaagcaaaagcatttctccaatttgaaaactaattaaatgagcaacgaaaacactccgccaagaatgacctggaggccatggaaaagaagctcttggaggggaaaaagctgcgcggaacgcatttggggagttgaagcgcaatttggagcaaatgagcagtgaaattcgagccgcaatgaaagaacaatttgagacgatgtgggaaaaattggagccacgtttggttggccaagaaaggtcacagctgcgttatccgatgccctggatgagttcatggccgagaagccggtgacagtgaacagcgggagagacgacaaggacaaaagtcaatcgtttggaggatgacc

SEQ ID NO: 39130 - DNA, 1250 bp, Heterodera glycines
  unsure (1)..(1250): unsure at all n locations
tatcgttcatttttgggcatatattttctattcaattattatacaattcgaaatcacctcccttccttattcagcattttgccaactaaaaatgttaaaattttcaataatacatcaatatntacacctcaaaatattctaaaagtcttatatatttcccgaaaaaatttttgaatttacttttttttaataaaaattcattttaaagctaaatttggtccaatcaatgttggcttcatcccgggccccaattaaaattttcattaaatttagaacaattgtagtcccattatctatgctgaccctttttccacaattaaaataattaaacattttagtatattaataaatttcattggctaacctgaggcccccatttacctacctaaaatttaaatgaatatttaaaaacaattctttttctataatattatatttcatttaaacatcacaaatttggaacaaccaaccatcagcagccaaataatacacatattaatcaactgccgcttttgcgttgcttaaatattttcataaaattttttttgataaattctcattttaaaaagcaaattggctttaacccgggccctaattaatttttatgctcaaaactttcatttttgggcatatattttctactcattattatacaattcgaatcatctcttgcccatgcattttccaactaaaaatattaaattgttcaataatacatcatttttaccacatcaatatattccaatagtcttatacattttgccgaaaaaatttttaattttattttttttgataaaaaatttttattttaaaagctaaattcgttccaaccatttttggtggcttcatcccaggccctaatttttccttaaatttaagagaattttagtagcataattttatgctgatccatttttccacaattaaaataattaaatgttttagtatattaataaacttcgttggctaaccctgaggcgtttccattttcccacctaattcaataaaatttttaaataattctttttctataatattatatttcatttaatcatcaccaaatttggaacaaccatttccagcagccatcctcccccatctccaccgatgtctcatcccttcccccctgcccccgtcttcgtcccgtccgtcccttcccgtcgtcaattcgcttttttttgtcccctctccccgttttgcaacaattctttcttctcatccagggccattcattcattcatacattcttc

SEQ ID NO: 39131 - DNA, 837 bp, Heterodera glycines
  unsure (1)..(837): unsure at all n locations
tatttataatttataaaattacaaggctcagtctgttcaagacttaaaattttatcagtttaaattaaatagaatttgacgagtctcttgttattttgggccaaactaagccgcgtaatcaagtctaagtccaaacagaaaccagtacatgtttaattctacgtttaaacatccgtaagaattgactaaatataagattgccaggtctccatataaaaaatttttaattttcaagaacatagaaatttttgagcacaagggttgttaaatttactaaattttaatgatttatataacattttatatatttatattgttttatttttttgaaatccctccctctggtgcccaagcttcccggcgcccaaatttctggtgcccaaacttcatgtcgcctaaaaaattgccttaaatttttaaaatttaaaaaaaatcccgcgcatcaaaaccaaaaacaggacgtggaaccgatcattctgtccgttgaccctagtagtaacacccccgtgaccgtcgccagctgacgctaattagaagtgacaggtggagggggaggggtgtcaattagtcactaattggggggggggtactaattggtcagcggtcaagagggcactaattggtcagccgtagggtgtggggtggggggtggcaattaattaattaattagggaaacccaaacctatngggaggggtgtgtcaaattgtcatgtacttgtttgacagaaaatttgattgatttaaaaagtgacagccgaggaggagggggaatttgattggtcagcgaagtgacagatgagggaaaattcaaatttcggatgggcgggggggatcgg

SEQ ID NO: 39132 - DNA, 1011 bp, Heterodera glycines
caaaagacaaaaagttgatgtccaattccccggtagggatttaatagtgactttcagagatagccattttttgtcaagaactatttttcgtgcgttttcaaacacactattagtgctttattcaccgatacaacagaagacaaaagttggtgtccaattcccggtagggatttaatagtgactttcagagatagccattttttgtctagaactatttttcgtgcgttttcaaacacactattagtgctttattcagcgctacaacagaagacaaaagttgatgtccaattcccggtagggatttaatagtgactttcagagatagccattttttgtcaagaactatttttcgtgcgttttcaaacacactattagtgctttattcagcgctacaacagaagacaaaagttggtgtccaattccaggtagggatttaatagtgactttcagagatagccattttttgtcaataactatttttcgtgcgttttcaaacacactattagtgctttattcagcgctacaacaaaagacaaaagttgatgtccaattcacggtagggatttaatagtgactttcagagatagccattttttgtcaataactatttttcgtgcgttttcaaacacactattagtgctttattcagcgctacaacaaaagacaaaagttgatgtccaattcacggtagggatttaatcgtgactttcagagatagccattttttgtcaagaactatttttcgtgcgttttcaaacacactattagtgctttattcaccgctacaatagaagacaaaagttggtgtccaattcccggtagggatttaatcgtgactttcagagatagccattttttgtcaagaactatttttcgtgcgttttcaaacacactattagtgctttattcagcgctacaatagaagacaaaagttggtgtccaattcccggtagggatttaatcgtgactttcagagatagccattttttgtcaataactatttttcgtgcg

SEQ ID NO: 39133 - DNA, 1052 bp, Heterodera glycines
  unsure (1)..(1052): unsure at all n locations
attcttttagaatattantttggttgttaatacatttctttaataatagaatttgaaaaaatctaaaaattaaagtattcaaaaattaatttatcatatatattaatgtaaagaattaattttaaaaatataaaagcaaatgcaaaatgttctaagttgatggtcacgacagtagttaacattgaaggcagagtgctttggtgaacattatctcgatgaaaattatgttttgttaaactatcaattatagaaactaatttattaatagcagcaattgttttcagagagatcaaataaaatctttatataaactatctattctataatttaaaaaaaagactgcattacctcccaaaattcctgcgtcattccatgagaaaaaaagacaaaatatggtagataaataaaataaaatataatttacagatcaacaaaagattaattaaaaggtctaaatgttattaaaataatcttaaaataataaaagaaaaatatgttaaaaatagtttgtttatgttaaatgaaatccaaattttcaaatataaattacttattattaatattcttttttattattaaattaatgatgaaatgaattaaaaataacattcccattaaaataccaagaaatacaatcatcgataaattataataaatgaaaaactaaaagctttgtattcatttccaaatagacaaaaaattgaataataatcaacatcatcagtgaattaaatagcattagtttaaaaagaatttattatgatcttaataacttcgaataaataaatatctaaacaagaagggctaattaatttcatctaaaataaattcactttgttttaaaaatgacactgaaaaaagtatattataaaattaaaaaaaaatttttttcaaaaactcaggccaccttttgaatcatcagttattccaactctttaacaaaaaaaataataaataacaattcataagatattaataaaaagtatcttcacactacaatgcgatggcgcatttataaatccaacataaaatttttaaattaatttattttt

SEQ ID NO: 39134 - DNA, 1035 bp, Heterodera glycines
  unsure (1)..(1035): unsure at all n locations
attttaataactgatacggtagcccaacatccattgccccaatgtacccttcggtttgtcaacgggagcaaacaattgatgagtttgtttggtttcttttttaagcaattttccgtcattgctcaccaactgttaggcgtacagcaacggcggtacttgcatccgattcagctgttcatggtctctctaaacctatttttatttttttttttctatctcttctctgaatggagttataacaatttttcacaacagttttgcatttaacagacacattctaaaaattctaattagtatggtagtccaagcctattattattttttttgactaatctctgaatggggttatcccagttttagtatcctttttgaaaaacaaaaattttaataactgatacggtagcccaacatccattgccccaatgtacccttcggtttgtcaacgggagcaaacaattgatgagtttgtttggtttcttttttaagcaattttccgtcattgctcaccaactgttaggcgtacagcaacggcggcacttgcatccgatgcagctgttcacgggctctctaaacctatttttattttttttttctatctcttctctgaatggagttataacaatttttcacaacagttttgcatttaacagacacattctaaaaattctaattagtatggtagtccaagcctattattattttttttgactaatctctgaatggggttatcccagttttagtatcctttttgaaaaacaaaaattttaataactgatacggtagcccaacatccattgccccaatgtacccttcggtttgtcaacgggagcaaacaattgatgagtttgtttggtttcttttttaagcaattttccgtcattgctcaccaactgttaggcgtacagcaacggcggtacttgcatccgattcagctgttcacgggctctctaaacctattttttttttttttctatctcttctctgaatggagttataacaatttttcacaaccaagttttgcagaccnntgcaggc

SEQ ID NO: 39135 - DNA, 541 bp, Heterodera glycines
  unsure (1)..(541): unsure at all n locations
ggatgatatcctcattgccatcttgcccgngaggcttttttggtacaggaagcctatcaattctttttccctgtacagctcatgtagtgaatggtagcgctgatctgagcccttgctgtattcgtgatcagcgacccccaataccccttaaaacttattttcattaatttctaaaacacatttataggcatttgaaaatgcatgttaaaagtatcatgtaaactgcacaagtaccacccccccccacctcttttacaccggcccccctcgatgcgaaatggtcccacattttgggcctttgcgggcgaaatggggcggggctcccaaatgaaagtgatgatgaaaaaataaaaccaaattttgatcgaaatttatactaaatgctatttaatttatcttttggaaatgaaaatgaaagaccaattttcaaattagtttttcatgtattataaggagatgccaattctcagcatcgaaggatttcttccaattccctgaccaaatttccgagacttttttttgcatatctgtgagaaaatac

SEQ ID NO: 39136 - DNA, 1433 bp, Heterodera glycines
  unsure (1)..(1433): unsure at all n locations
cccaaaagttttttagtaaaagcgccgcaaaaaaatcaacgatttttcacgctcatcagtagggagtgtaattatatggatataaaatcgcgaaatatggccataaaatatggaccaaaaatcgcaaaatatggacataaatttttcaaaattgagtgcaaaatttcttcaaatttattggttgaaattgcatatgagatacatttccaaattttttgactcggtaaggcgctttgacaaagacggctttcgttttgcaattagtcggtcaacattcggaaattggtctcgaattttttcggcaattacgtgcaatcattttaaaagaaaaaaaacataaaagccaaaatttattaatttttttagcgcaaaatcaacaacaaaagcgaaattttcgcttttttgcttatttttgacataatttattaatttttaagaaaatttaaatttattcaatattctcgagaaattttggcgaaaaaatgattttttgaaaaatttttcgggttttgggctcaaaaaggctaatttagctgctggggccgttctaatagaggtttttttgaaaaatgccaaaatatggacataacatatggaccaaaatgccaaaatatggacataaatcgcgaaatattgaaaaatatggatatagaaatccttcctagaagcttcaaaccaagctaaaaacatgtttttcgtgcgtttcaggcctcccacattccaggaaaaaaatatggatttccatgtaattctattccctactcatcgaatttcacaaaatgcttatttcgaacaaaaaattgatcaaattgaacatggacaatcaaaaatataacatttgaacattttaaacgtgttttgaataaactttataaaaatgaggcttttggcatttgaaaattttgatctgggaaccactgattttgactgtgttttttcgataactttcacttcatttggctgccacaaaattattttttttattaaattttattttttcatttttatttcgactgtcattattccatcactgtcatttttttttcatttttcattgtttccatttccatttgcacaaatctatgctttaaaattttgaatatttaaatctgagaaaacaatgtccctatacagtaaacatgccgtgtaaaagtacaataatattttggtgccgggacgtttccaaaaattccatcaaaatgggggcgcttattcgaaaaaatgctgaaaagtactttcaagaaaaaacgacggaagtgcaattcttgtaaattatttcactgaagaaattaatagtaacgaaacaatcaatgacgaaataagggttaaaccccgacccttgggagcgaaaagtcaggaaattctacgacaanaatttgtcggggatgggtgaaataatttaaaaaatgtcatnttcggtagttttataaatt

SEQ ID NO: 39137 - DNA, 197 bp, Heterodera glycines
ctttgcaactgattgttctgctgattaaattgtgctgtttgttgttgaagccatgggaactgcgtattttgggcatttggcacggagtgcggcgatggaaattgccatggcgcagcggaaacggcggtttgccgggggaggggctgaaaatcgaaaatgcggatgataaaagctttgttttccgatgtttcggctct

SEQ ID NO: 39138 - DNA, 1193 bp, Heterodera glycines
  unsure (1)..(1193): unsure at all n locations
attaaagccatacagcacgantcgggctgaacacacattcgcacaaaacacatcataattgtaggacaaaacttaagacgaaacaacaacatattttattggaaaattttcgcaaaaattaatcgccaaaatttcatttttttttcttgataaaaattttaggtctaaaatttttcctttttcgaaaaacataataaagtatataaatatgatttaaatgaccaaaataagttacttcgttaagttttaagtgttttgctcacctaaattttcaaaaaaatcgaataagaatgacgaaaaatagtcaattaaaataatcttttttacaaaaaaaatccgcagatccaaaatcggcataaccaaaaaccgggggtacggtaacggttaataacgggtcgtgtaacctaccttaattttagacaatttttcatttattctagcaaaatggaattttatttatgtaatttttcattttttctggcaaaatggaattttacttatgtaatttttcattttttctggcaaaatggaattttatttatatatcatgttttttatattcaaggttcataaataaattagaataaaatatattttttaatctaatggattttttgtttgttgcccataactttagcctaacgaactaagtatgtacataataaaatgctcaccttgctgaccataatgtacaaagtgagccgttctcgagccaatttgaccatgggaaaagcgcaaattatgagaaaaatgatgaaaaatagcaaaaaagtgttctgaaagcaatcgcgcactttcccaagagacgatttcatatcaaagcaagcggacaccattttctgttgccgaaatttgaaaaaattggtgaatagataaaattaaattagatgcccatcggcactagagaccggacgggatcgggatcccgcgggattaaattcgggatcccgacctcgggatccatcccaagcgattttttaaattcatcgggattgatctggatcgggattcagtcgggatcccgactcgggatcccgccgatctcagttgtccggtctctattcggcaccagggatgggcgagaaacttcggcttcgaagagttcgggttttttgggcttcgagttttggagttcggctcgaataaaaattgggcttcgccttcggcttcgagtgctaagccgagcttcgccc

SEQ ID NO: 39139 - DNA, 1383 bp, Heterodera glycines
agcggtgtgtttgtgcttgctgctacgtccgtggccgtgatgagacgacgcggtagggcccgtgcttggcctagcacgtggcttaagactcaatgagtgtcagctcgggcaccgccagctttttctttttttcattatttttttacacttctgttgaagaatgaattctagtcttatcggtggatcactcggctcgtggatcgatgaagaacgcagccaactgcgataattagtgcgaactgcagaaaccttgaacacaaaacattcgaatgcacattgcgccattggagttacatccattggcacgcctggttcagggtcgttaccataaaatgcactgcttgtgcgttgcttcgtgggatcatgtacttgtacgtgttcttacgttacttgctcggctcggctgtggggttttggtgtgcaggcgcgaacttgtggttctaattcgcgttttacggaccgtaactcgggcgcaccaatgcttcgcatgctgtggcggagtgcctggattactggcattcctgctttgatttttcgacctgaactcagacgtgaacacccgctgaacttaagcatatcagtaagcggaggaaaagaaactaacgaggattcccgtagtaacggcgagtgaactgggaagagtccagcgctgaatcgcagctcctctggggttgcgaggtgtagcgtatagaccgtgagcatgggttggcccgcttgttcaagtttcccttgaccggggctccagagaaggtgcaagacctgtccaactggcggtgcctacccatctttacgtgtcttggagtcgggttgtttgggatcgcagcccaaatcaggtggtaaacttcatctaagactaaatacggccacgagtccgatagcgaacaagtaccgtgagggaaagttgcaaagcactttgaagagagagttaaagaggacgtgaaaccgatgaggtggaaacggacagagctggcgtatctggtctgcattcacccgtttgttgctgtacgttgggctgctagcctccagactggggtttgctgtccttctttctgttcagtggcgaatggggcatttgcaggcggagtgcgctgagatgctcggagtagctgcgtgagctcggtcttgaggccagcctttcggggtctggtacccggatcgggggagtgctgtttactctgggtgaattgtgcaatggtttcgggtccgtgttgactcgagctgggggtcggtggcggtcgcgtgcgacacgtaccagcaaccagttcggtccagctcgggctctcagttgtgcgttctcggtgtaaaagccggtcatctgttcgacccgtcttgaaacacggaccaaggagtttagcgtatgcgcaagtcattgggtgttcaaaa

SEQ ID NO: 39140 - DNA, 1041 bp, Heterodera glycines
  unsure (1)..(1041): unsure at all n locations
tttcagtttgtttcaataataaaaaaattaaaatttttttntaaatttttttaaaatgtataaaattcttacgtttttctacaggacgcgaaaacagtcaagaaagtaaaaatttcattatttttataaatttttaccattatcattaaaggaaaacaccgtaacaatggtcgtagaagtaaattttattaaaaattattattattaaaaactttttttccttattttaaggaagcggaagcggaagccgtagccgtcagaatgaggaatcggactaaagaaactgagaagcaatttgtggatttttggaaatgattttagcgtttttcaaggaaaaaaaacgaaaatccaatattttattttacgaattttgacactttgttttcattgtttcaattcattttcaaaaaatgtgcaaattcaaaaaattcatttatttgctatcgaaaaattttgtgagtaaagggatatatatatagaaaaggtgaaaggatcttttggcaccagcccagttttttttttggctatgacttttttcagggtccaccaaatcaaagaatcttggtatcatttgaaagccgttcacatgttctattagtcttacaaaaaaaaacacaaagattttcaagcatataaaaaagttataaagaaaaacttcaaaatttcgactttttttttgcaattttcttgtcttaactttttgataatggtctaatcgcaaagcaatagcttaaacatagtttctaaacatggtaagctttcaaatgataacagattgttgtgtttggttgacaatgaaaaaagttatagcccaaaaacttgggctggcgcagaaacgaccccagggggggggggggggattttaagagattcaggttatatttggtggaaaattatactaaaacgatttaattgaattgccttgcttcctttggaagtagaatgatttttgactagaagattacaaaaaccgtaattgacgaagtgcaagaagagcgaatgacccaatattatataacattataatattctaattacaaa

SEQ ID NO: 39141 - DNA, 556 bp, Heterodera glycines
  unsure (1)..(556): unsure at all n locations
gttccccccgcgccactggaaataaagccgctcgtggatttgtgtttaaaaacaaaatccacgggggctctattttagaaaatacgatatttgaaattaaaattttaaaatagataaaactcttttttaaagaatttattttatttttagcaacaaaaattggaattgcaaaagtatgagagcatttggggaagggattaacggaggagcctaataccttatgaaaaaggacacttttctgagtgttccgcgccagggggcgaaggcccaccacgaggccgcgaagaggccgagtgagtaccttcggtgcaggaaaattattaaggaagagagttcattatttatttgttttttgcaaaattaattcttaaatattttttcagaaagggttctgaaacgcaccgaattttatttacatgttagtttaggcactctgatgctttttctatcaaaaagggagatgaataaaatttttaaagatttttaattcctttttaaacaggccaaaaagtctagactgaacttttttttcangaaactgatcagaagcgcacca

SEQ ID NO: 39142 - DNA, 892 bp, Heterodera glycines
taagattgtttgatagggccagacaagagaaggcaactgttggtaccaattttgcgttaaaaaaatgagaaaaaagagatagccattttttggtcaagaattttttttgtttgcgtttcaaatatcgtaagattgtttgatagggccagacaagagaaggcaactgttggtaccaagtttgcggtaaaaaaatgagaaaaaagagataaccatttttggtcaagaattttttttgtttgcgtttcagatatattgtttgatagggccagacaagagaaggcaactgttggtaccaagtttgcggtaaaaaaatgagaaaaaagagatagccattttttggtcaagaattttttttgtttgcgtttcaaatatcgtaagattgtttgatagggccagacaagagaaggcaactgttggtaccaattttgcgttaaaaaatgagaaaaaagagatagccattttttggtcaagaattttttttgtttgcgtttcaaatatcgtaagattgtttgatagggccagacaagagaaggcaactgttggtaccaagtttgcggtaaaaaaatgagaaaaaagagataaccatttttggtcaagaattttttttgtttgcgtttcaaatatattgtttgatagggccagacaagagaaggcaactgttggtaccaagtttgcggtaaaaaaatgagaaaaaagagatagccattttttggtcaagaattttttttgtttgcgtttcaaatatcgtaagattgtttgatagggccagacaagagaaggcaactgttggtaccaattttgcgttaaaaaaatgagaaaaaagagatagccattttttggtcaagaattttttttgtttgcgtttcagatatattgtttgatagggccagac

SEQ ID NO: 39143 - DNA, 1585 bp, Heterodera glycines
  unsure (1)..(1585): unsure at all n locations
aaaaacgcgnnnggggggaaaattgcgctaagttttgcgggggttcgcgcgatnaaaattcnaataaaaaatataatttataacnaatgtttcntgattcancaattagctganncattaatacaaatgaaagattttcacgtttgtttaaaaaaactcaaataatttataaaaaaaaatgagggcgaattatttattttcccgtaatcattttttcctattggaaatanaattatgaaaaagcaaatgtttgtttgnaaacttattaaaaataatcataagcagcagtagcagtagcagctgaatgatgaatgcaaattgtttgcctcattctttggttccgctgctcctccgtttggctntatttntgctgtcttttgcttttcactttttttctaatggatttgcctttngataaatgttttgtggattaaaagaagtgaatgaaaggagagagagagagagaacgaataataattgtacaaatgagtgaagtgggggcaaaaagtgaaaaagtgatggccaacagcaaaaagaaagaagcacagaatgacagagacaaacagaaaaaaaaacaaatgaaaccggacggatggccaaaagaaagaaagggaaaggaataaatttaaatgccttgcggggacacttttgaaaaatgtaaaaaaagggaaggggtgatttgaatggcccttcagcaacagaagaggcgcaaggatgtgtaaatgtattcaaaaattacaatggcaggaaaatgaaaaaaggtttaataaactgcataattaataatggatgaaaaataaagaaaatggaagaaataagaagaatgattacaattgtaaatatcaactaaatgtggagattcttataaaaaattacaattgtaaatatcaattaaaatataattttccggtagtaaaatacaattgtaaatatcaactaaatgtggagattctgataaaaaaattacaattgtaaatatcaattaaaatatgaattttccggtaatgaattacaattgtaaatatcaactaaatgtggagattctgataaaaaattacaattgtaaatatcaattaaaatatgaattttccggtaataaattacaattgtaaatatcaactaaatgtggagattctgataaaaaattacaattgtaaatatcaattaaaatatgaattttctggtaatgaattacaattgtaaatagcaagtaaatgtggagattctgataaaaaaattttccggtaataaattacaattgtgaatatcaactaaatgtggagattctgataaaaaaattacaattgtaaatatcaattaaaatatgaattttccggtaataaattacaattgtaaatatcaactaaatgtggagattctgataaaaaaattacaattgtaaatatcaattaaaatatgaattttccggtaatgaattacaattgtaaatatcaactaaatgtggagattctgataaaaaattacaattgtaaatatcaattaaaatatgaattttccggtaatgaattacaattgtgaatatcaaataaatgtggagattctgataaaaaaattacaatttaaa

SEQ ID NO: 39144 - DNA, 1013 bp, Heterodera glycines
gagagaatataatatcatttgaatcaatcaattataaaaatcgaaaatgtcctgacttgttcaaaatttgtcctgattatatggaacaaattgaaaatcccaaaaaaaattttcctttcaaaaaattgcacaaaaaaaagaaaacttattttgttataagttttgtcagttttttttattgcattttcagcaacatttttaattggtgtttcgaaatatcttgaaatttaaattggtaaatttctaggcttactaaaggggtatttgaccagaaattttgttaaccctgatcatagttgtcctttatcccttttaaatcaagagaaatttgttttcttcaaaaacttttaacaaaaaagcacattaataattttgaaaatgttcaaattccccttttatgaaatttaaaagattgaaatcctaggatttttatggaaattttttcaattcatcaccggacaattttcatttttaatattatttgaagctcccagaacccaagcatatcttctcatccttctttattgcttcattttttgagcaattaattctcattttttgctaatcattttggtcccttttctttaaaggaaaaacaaaaaattaatttttaaaatttttcaatatttttttaaaattaaaattgcaggtccaacgtaatgaggtggaacggcatggcctcccgttgacggacaaagagcacgagcagtgggaaacaatggccatcggtggtggtggtgctgatcagcaacagcagcaacagccgctgcaggaccatttggatcgactggcacgaagccgtgaagcgatggtaattgacggagagccgcagcaaatgatcagccatgacgagcatgggcagcccattggcatgacgacagtgcaggtgggggtcatcaacaaattcataattacaaattaaaaataagtaatttttaataaaaaaaattttattaaaaatttcaagaaatccaaataatttttcggttttttgttcgtttttttttgcattt

SEQ ID NO: 39145 - DNA, 1108 bp, Heterodera glycines
atcagtgattttatccgccaaattttagccagtgtgtcgaagactgtccatcggcggaacggctgcaaccaccatgtcattctgggaaaatttttcgcccacccaatgaattgttatgctaaatttttcatttaaaattttatgaaaaaattaatatgcctttcaagtggttgggaatgggttggttggctccatccatccgatgtaattgcataaaaatgagaacacaccccgattcgcattttggcacatatctcatccgccattttcggtattacaatgcgcctaccgactgccaagcgcataaaataatttagttagatttccattttggtctcattaaaaacctacaaattcggatatgcctttgcgtaaagcgctttcaggtccttatcctgaaaaaaaaagaaaataattgttttgtcggatcataattcgggcaatttgttcttcggcttcaattgtggcatccttttttggcacaatgaatggcttaattaattcctgtaaaataataagattatcaataaacctttgttccctttagaacagaccttttcctttttttgctctccatttccttttcagcatacgaactcttcatgtgcaatccttccaaatgccaccacatacttttagctgatccatctttcctgcctatctttcctgcacacattttacaattaaacttcgtcagcaaatttttcaaagtatttccaaatattaatgataattaaaaaatccacaattaaattttaaattttcataaattaataaaaaacgtacaaatttgtaaattaccattaaaaattttaatctatttatctttccctcaattttggtcaactttttcctgacccccattcttaacagtgtatttttctaggtggcgcaaatatccatttttgctaggtggcttaaatgtccattttcgcagcggtgcgcaaatgtccatttttgctaggtggcttaaatgtccattttttctaggtggagcaaatatccatttttgttaacggcacaaatatccggtttcgctgtgcggcgcaaatgtacgtttttggaaattgaatggcaagcgaagtgaaaaggagaaaagttaggaaaa

SEQ ID NO: 39146 - DNA, 1005 bp, Heterodera glycines
aaatggcttccaattacttggggtttggttttacaccgttatacgaaaaggatgaacccgcctcgttctatacagacaaaaagaaaaccgaagaaaaggctagtcgctttaagtattcccatatcattcatcatagtcatcttacaccattttctaatccaggctaagctcggcctcatgctcggcgtgtaccttccgaccatccagcacattcttggcgtcaccatgttcatccgtttggcgtggatcgttggtgtcgctggcgtatcgcacacttttatgatgctcttcatttgctgtctttgtgtagctgcgtttttttaactcgattttttcacatgtccttcagacgttcctcacctgcattagtgtgtcagcggtggcgaccaatggcgtcgtggaaggcggaggagcatatttcatcatatcacgcaatttgggacctgcatttggaagtgcggttggcattctattctatctggccaacacagttgcaacttccatgtatttggttggaggaattgaaattcttctggtgaattcttccggtcaatccattgactttttatccgtaaattttcagttgtacctttatcccgggatgacaattggcggtaaaaatgcgcacacggacactggtgagttacatcagcacaaggctaaggcaccaaaggggtaccgacagaaaccaccctgggggagggcgacgcaaattccccccttgaaaagtcgcttattttagtagcataaatacttaccctcgacagatttcttggggatgatgtccaacaacatgcgtctgtatgctacttttctgctcattgttcagttcaccatcgttgcgatgggtgttcgttttgtccaacttcttgcacctgtaacttcttcgatttctttccccctaactttgtccccctaatttccctaaggtttcgctcgtctgtgtcattctcttcccgttttggcttgttacgctggagccgctgaaaaaacgatttccggaag

SEQ ID NO: 39147 - DNA, 1276 bp, Heterodera glycines
tgttgggctcgaagtcaactggcctaagccctggtcttctaagcagcattcaaattggagggcgcggggggaatccccataaaaatatttaactctaaaaaacaattttcaggttcagaaaatcctgttaagtgttttcctagaggtttttgaaaaaaatttctggaatttaagtaggcccaattgtaaagggcacaaaattctctaccgaattaaaccatcaaaaagtgcaacaaaaaaattaggaaaaagtgctaaaaagtccaaaatatttaccaaatatgcttaaaatccagaaatatgtaaataaaagtcccaacaaatgttcgcaaactcaaaaaagaaagtgtttttcctattgtttagacatggaagcacccaagaaaaaatatgtatttacataaaattagcacgacgaccaactaagccaaattcggacgtttcgccaactcatcaacaaaaaaaaagacattccgccaactgacatttcaccaactggacagcaatgactgactatttcttggtgagaatatcagaattagtgcaagacgggtggggcgcggacggaaaaataccgcggtcgcggattcaaatctcgcggtcgcacatcgcggaaaagaaacgtcgcaaatcgcggtcgcgtcccatccctggtgcaagaatccctactagggctccaatttttaggcaaaaggctattttttcctgagctccccgtggcctaaaacgtacgaaaaacatgttgttttttttgggctgttgttaagctacttttcgagttattagtgcctattttctaggctttcatttttagcgcctaaaaaacctaaaaaaattttgaaagagcctatttttgcctattttggcgttttgccgaaaatttgttaacaaaaatgcaataaaaacaaaaaaaatacacccctaagcagagattcaaaaatttctgaaaataaatcccctaagaaatgaaaattttctcaaaaatcgtctttacaattttttttggacaattttttcgatttaaaaaaataatgtaactcaatactgattttgtataatttttttttagcggtttttagtgcctataaattggagccctaatccctacgtagcagggatgttgcaaaaagaaaaagaaaaagcgaaaccaaaataaaaagcgaaagagaaaagacgaaagcgaaatgcccaaaaaagcgaaaagcgcaaaggtgaaattttttttccaaaaatattcataattgaaatcataaatttggatattgtggtgcaaaaa

SEQ ID NO: 39148 - DNA, 1088 bp, Heterodera glycines
gtcccaatttgcgtgatatcataaaatatgctcctccgccttccacgacgccattggtcgccaccgctgacacactaatacaggtgagaaacgtctgaaggacacgtgaaaaagtgaattgaaagacgcaaagttacacaaaggcagcaaatgaagagcatcagaaaagtatgcgatacgccagcgacaccgacgatccacgccaaacggatgaacatggtgacgccaagaatgtgctggatggtcggaaggtacacgccgagcatgacgccgagcttagcctgtatcagaaatgacgacaatgaatgaaatgtgtgcgaatggcttagagagactaacccgttcttcgattttctttttgtctacatagaacgaggcgggttcttccttttcgtataatggtgtaaaaccaaacccttggtaattggaggccatttctactaccgttttttctgtaaaaatttgtagaacccgaaattttgaactcttgagaatcgacccggggggggggaattgggggcaggacaggcacttttaaaaaattatgaaaaaaactgaaagccaaaaaaataataaaaaaatattttaaaaataaatttgaattttaacacactatcccgaaaatgagctcctgtacaaaaaagaattaattgcatgtatggctaaatgttttttgaagatagaaaagggagaaaggcgtaggttcgagtccgttcaaaaatgttttacttattttttaacaaaaaatttgtctttgtctctgttcatttctacctttttgtgtttgctcgcctcgcgttccattgggcccggcgtcgtatagccgctgatatacggagcaataaaattgtgtgccggctcgttgtcgtaaagggcaaaatcgccgttttccgttgtttctgtgtttgcctttttacgcaaggaactccacgagagaaagccatgctctccaactggaaacaatcggactttagcggaaaagcaatgtttttgattagcattcggagaaagggacgggaaggggatgtacggcatttggtggcaattttctgtcttttatgctttaccaagtgctgaggatgagcgag

SEQ ID NO: 39149 - DNA, 669 bp, Heterodera glycines
ttttttagatcatttcttaggggtgtattttctgaaatttttttagatcatttcttatggatgttttttctgaaattttttagatcatttcttatggatgttttttctgaaattttttagatcatttcttaggtgtgtatttctgaaatttttttagatcatttcttaggggtgtattttctgaaatttttttagatcatttcttatgggtgttttttctgaaatttttttagatcatttcttaggggttattttctgaaatttttttagatcatttcttaggggtgtattttctgaaatttttttagatcatttcttatggatgttttttctgaaattttttagatcatttcttatggatgttttttctgaaattttttagatcatttcttaggtgtgtatttctgaaatttttttagatcatttcttaggggtgtattttctgaaatttttttagatcatttcttatgggtgttttttctgaaatttttttagatcatttcttaggggttattttctgaaatttttttagatcatttcttaggggtgtattttctgaaatttttttagatcatttcttaggggtgtattttctgaaatttttttagatcatttcttatggatgtttttttctgaaaattttttagatcatttcttaggtgtgtattt

SEQ ID NO: 39150 - DNA, 1233 bp, Heterodera glycines
aaatttggagatcatgtttcccccttccttctcccaccgggtattattttgtaaagttcttttttccccaataaacttgtacaaaccccattttgcgcaccgggaatgatatttattctctctttcgcaaacgctgtgattattaccagacacagaaaagtatctttttccaactactgtttcccacgcccttctccccagggtgtaatgtaggaaagactatttatcatctctagactttcctctccccattattttcagcgtgactgatattctcatccaaatctgaaccgcctcgagaatattatagtatgacatatcgaccacttcgacatcttggaccccactccctgctcccaccggaattatgatggaccgttactttatctatccacttatattctcaccctatttcaccgcatgtgaaggatatgtttactcacggcacaatggcaactatgaaatgaaagtgcaaagaggtgaaatcttcagacaatgcatcccactcccgtctcccaggggtattattttgtaaagtctttatttccccaataaacttttcaaaccccatttttcgcaccgtgaatgttatttttatcgaattctgaaccgttttgagtagattagactagaaaaaattgaaaattttgaaatcatgtttcccactcccttctcccaggggtattattttgtaaagtctttttttccccaataaacttttcaaaccccatttttcgcaccgtgaatgttatttttatcgaattctgaaccgttttgagtagattagactagaaaaaattgaaaattttgaaatcatgtttcccactcccttctcccaggggtattattttgtaaagtcttttttccccaataaacttgtcaaaccccatttttcgcaccgtgaatgttatttttattgaattctgaaccggtttgagtagattagactagaaaaaattgaaaattttgaaatcatgtttcccactcccttctcccaggggtattattttgtaaagtcttttttccccaataaacttgtcaaaccccatttttcgcaccgtgaatgttatttttattgaattctgagccgttttgagtagattagactagaaaaaattgaaaattttgaaatcatgtttcccactcccttctcccaggggtattattttgtaaagtctttttttccccaataaactttttcataccccatttttcgcaccgtgaatgttattt

SEQ ID NO: 39151 - DNA, 729 bp, Heterodera glycines
cctcgcttagtgcattcaataaatcattactactttcttttactttatcactgcgatttctcaaagaccctcattttcctatcacactttcctcttccggatcgcttcccttctccacccatattgatcactctgatcacttaaatgaaaacttttgttggcatgccaattcgatcggcacattggtgccacttccccgggcaagcaccacctccgccactttttggctggcccgccaacgacggagcgccggcgctgtcccctgccgccggtggtgccgttgatgaatcggatttttttgccaacttttttgtgccacggcgcactcgtcgcgagaagcggttggcacgttgcagtgagaaacgcagcgtggcaggaaacattttgacagtttagcagaaggaacgtctcagtttgggaaaggcaaaaaatatgggcgcaatgccaatgttcaaaataatttttaaaaatggaggaacaataaaaaaaataatagaaaaaatttgaaattaatggaaaatttcaaaaatttcatttcgttttttttgcaacaaatttttgaaccgatttaaaatgcaattggattagggcgctaattcgtaagtctctgttaaaaaaaactcggaatttccgcttcatcttaaaagcttggtgtaatatttaaattttgggctcaacactcgaccgcgtctcttaaaaattaacgataaccagcccttgccagcgggg

SEQ ID NO: 39152 - DNA, 1079 bp, Heterodera glycines
  unsure (1)..(1079): unsure at all n locations
gcgaagcggccgagtgagtaccttcggtgcaggaaaattattaaggaagagagttcattatttatttgttttttgcataattaattcataaatatttttttcagaaactgctctgaaacgcaccaaaattttatttgcaagttattttaggcactcagatgctttcactatcaaaaagggagatgaataaaaaatctaaaaatttttaattgctttttaaatatgcgaaaaattttaggcttaactttttttttataaactggtcagaagcgaaccagattttgcgagagcatcaaaaagacaaggaaaagcactgctatgatgctaactccagtaattctgaatttaaaattttttattaatttttaaagcttcactattttatttttttagcaaaatcaattcataaatattttttcagaaactgctctgaaacgcaccaaatgttaattaaaagttaaataaggctctctgatgctttttctatcaaaagggagatgaataaaatttttaaaaatttttaattcctttttaaacaggccaaaaagtttaggcttatattttaaaaagtttcatcgaacctagcgcactaaaatcgatataatctctccaaattttgcaggccttctccattgtaaaggactaacttaacctgaaaaaatgccaacgcttgttgtttttaaaatttttcgaaattctgactttttcattacttatttattttttgcaaaattaattcataagtattttttcagaaagtgctctgaaacgcaccaaatgttaattaaaagttaaataaggctctctgatgctttttctatcaaaagggagatgaataaatattttaaaaatttttaattcctttttaaacaggccaaaaagtttaggcttatattttaaaaagtttcatcgaacctagcgcactaaaatcgatataatctctccaaattttgcaggccttctccattgtaaaggactaacttaacctgaaaaaatgccaacgcttgttgtttttaaaatttttcgaaattctgacttaatcattacttatttattattttgcaaanattaattcataa

SEQ ID NO: 39153 - DNA, 1120 bp, Heterodera glycines
acatatgttaggggtattttttgtaaatgggaagcgctttattaaagtgaaaatttagaaatgagacaaccaaaaactgtcatgaaattagcatttgtacatattaccaaaataattttctataacaatcagttttttgtgcttttcaattaattaggctctttatgcatgtggcgaattcctgcgttagccgaacaaatcttagtggtgcacatcattttcttaagcagcatttccacggagataactgtcgacaaggatgtcgaaaagggaagggtcaatgagcggaatacgttttttggctacggacgggcggaatatggcgaaaaggtaggcgaacgaaggccagcttcaacgctggatgcaaatcttaatgtgaacgcattggcagatggatgagtttaagaagatacaaaaagaaaaatggtgggcaaacaggtgagtgaattcctggggttggacataacagcccgtttttgtcctctgttcaggacgtgttccaaaggctactcggacaccttatttcctggggtcagttattcaaacaaaagtcggtactttcctgatttggtgtcgcatgccaaaaatgtaaaaaagcgcacaaattctgaatgcgcggcatacagcattctaaaatcacgtcaaatgaatcatcagcaccttgagaatattagttgtatgaatttgcacttttcttgattttaaaattttgatctccgaccccaaaacggaaaagtacccaaaagtcatgactcatgagttcgaaatgacgtcttttgtttatcttaatccaattaagcattgtagccaaaagctcctttcttaattaagtgccctgagacaaagccgcaaaagtgttttggcattgaaatcagttactcgcaccgggtcgaaactgacgaaccatttccgcattgggctgaatttttacaacactttcccaagtttgtatggtactttgtcctgttttgtatccctttttgccagttaaaaagttaaaagtctttaaaatgttttcacttacttttacaaactgaactaacactgtttcgttttctactttaggtgttggagtatgttcgctcctttggtttgttttgtgcattaccgaccatgcgat

SEQ ID NO: 39154 - DNA, 827 bp, Heterodera glycines
ggtcattaattaaccccacaaaggctaattatgcgtgacgaattccaagcggaaacaaagcgaacagcgcaaaaaggtggcgcgaaaagggcggacgcggaagaggcattccttcgcagttggagaagggacccatcgcccgccatggacaatggccacaaacaatcctatggtccgtggcaagactcaccccaaagcgctgtttctttctcaaccaatattctgctatttaactttcagcatttgatcagatcggacagttgcgtggtgtcgattacccgtggggcgaatacacgggctatagcgaaatggtgggggaggggggggggagcagggaatcgctggaggggactttccatcagccgttggtgccttttggtaattttaggttcgttatatgcgaactttggagttttattacccgaatctggttggttttgctgtgacacttttgtttcccgttgcaccttctccggtccatcacaggtccaactcgtccaattgggcagcacccacgagggacgctccattgagggagtcaaagtgcgcctgggaggggcgaagcgaacgcactcattttgccccccccctcctccatccattcgtttagattggctataacggacagattttcccacagccgtcaaattcggagcataaaccgaaaaactcgagaaaaatgcgcaacaaacgtgtgttttggattgacgggaatatgcacgcgcgggaggttcattaattgctttgattggcccccaaaggctttctcgtccctccctttgtcagtgggcaagtggacacacagctttggtcatcgtttgttttct

SEQ ID NO: 39155 - DNA, 1003 bp, Heterodera glycines
taccaagattaaaaaattcgtgtttatcccccactctgcttttggctggccataactcgccagagagtggagatagaccctttgttgatacatttgaaaatgtagagctcggctagcgcattcgaataacacaaaatttgttttcatttgcccccaaacaatccgcttatgacgcgccgaaagaaaattcacaaaaatttggcaccggaaaaactccatttttttatgggccagcatagtaaagtaaacccaaaatgtaagggaatttaaattggtgatgagagatgtttagttttttatttgccccatcctttttctgggaaaaaaaagctgaaaaattttccaattgcatcagatgcagactcaaattcttcaacaacataatgtaaaaaatattacgcaagaaattatttttacatcctttttagaaatgctgcataaatttttattgtaaatagtcacaaacaaactttttttcactcccaatatctaccatttatcattacaaaaggcaatggttaagcactgagatataaaaaaattgtctagaataattatctcaacaatttgtcgggaaagatgaataaatttcagttgcaataggcatattggctcaatacataaatgtagagcaggctcaaaatagaggaaataccaagattaaaaaattcgtgtttatcccccactctgctttggctggccataactcgccagagagtggagatagaccctttgttgatacatttgaaaatgtagagctcggctagcgcattcgaataacacaaaatttgttttcatttgcccccaaacaatccgcttatgacgcgccgaaagaaaattcacaaaaatttggcaccggaaaaactccatttttttatgggccagcatagtaaagtaaacccaaaatgtaagggaatttaaattggtgatgagagatgtttagttttttatttgcccccatctttttctgggaaaaaaagctgaaaaatttccaaattgcatc

SEQ ID NO: 39156 - DNA, 884 bp, Heterodera glycines
ttttaaatgtctttttatttctttgacagagacgcctcccaaaatagtcagagtgatggacagttcgtcgacggacagaagccgagggatggacaacggcagaagagggaacggaaggggcggcttcggcagagcgaacagaggcggcggagggggcgcagcgggcggaagcggcgcattggcatttattgggggaggcggtggcggatttggcgagggccgaggcaggggtcgctttttccgaggcggaggaggcgcggggggagcacaaatgtgaggggagagggataagatggaaggggaaaagaagaggaaaatgccgaggaaaagcaaaaattaaaggaaaagcgaggaaaagccatggcaaattaaaaaattgaagctaacggaaaagaaaggggaaaaatatgacgccaattaataatcccacgagtgagaaaagctaagtagttataacccgactcaattgcattatttaggaaaaccaaactcaaaaattacttagcaaaaatactaaaaaattatctcgggagaaaaattcaaagggcaatttttataattcgacttaattactcatgttgaaaagaaaataataatgaaattttgccgtattaattttatgaataaggaaaaattgcaaaaacaaagaaaagcttaagaaaaaataaaaaaggaaaacgaaacataaaatgtattgtgctaattaaattgtaaatgcgtttcaataaaaaagaattaataaattaattattgatggaaaaagaaaagaaagaattaaaaggaaattgtttatttcggaaaggcaaaaatgagaaaagaaaagaaaaagtgaaattcaagttttgtttgatttttttgtcattaatgtaaaaatttaaaaagcg

SEQ ID NO: 39157 - DNA, 905 bp, Heterodera glycines
aattaaagtacaggctatagtgaagctattccggaacgttacggtctccccataaatctgggcgcatcgggtcagggcttctgccccgaaaacccaaaaaaaaattttttggataaaaattatttaaatgaactgactagataatatttaaaataggttatttctcttcctttcagtatccctgcaaagtttggtgcgcttctgatcagtttctgaaaaaaaagttaagcctaaactttttggcctgtttaaaaaggaattaaaaatttttaaaaattttattcatctccctttttgatagaaaaagcatcagagtgcctaaactaacatgtaaataaaatttggtgcgtttcagaaccctttctgaaaaaatatttaagaattaattttgcaaaaaataaataaaaacgaaagactcagattttcgaaaaattttttagagcaagctagctcggcgctcatttcagtgtaagttagtcctttaccggggagtatccctgcaaagtttggtatgcttctgctcaattagcaaaaaatatgagtgatcaaactttcactaaaaagttaagcctaaattttttggcatatttaaaaagcaattaaaaaatttttaaaattttattcacctccattattgatagaaaaagcatcagagagccttattaacttgtaaataaaatttggtgcgtttcagaaccctttctgaaaaaatatttatgaattaattttgcaaaaaataaataaaaacgaaagactcagattttcgaaaattttttttgagtcagctagctcggcgctcatttcagagtaagttagtgcctttaccggggagtatccctgcatagattgggacgcttctgctcaattaagaaataatatgactgatcgaatttttactaaaaaag

SEQ ID NO: 39158 - DNA, 905 bp, Heterodera glycines
  unsure (1)..(905): unsure at all n locations
gcaggtccacnncttaattgagcgaaaccaatcacaaattattattcggcgtttctctgcgctcacttgggacccaattgagcccgagccgtcgatcagaaatatcagatcagtcctctgcttgggacagctcgtctgcactgcaattgaacaatgtgcaggccaatcacatcatgccaagtttggcttttctacctgtgcagactctgcccgggggcaaatgcgcatttgaggacacgtcgacgtagccggcaaagcattggcaactgtacccctggggcgtatcgatacagtccgcgttctcatcgcatgtgttcagtgaacgttccgcgcattcgttacttgctaaaattacatattttcagagtcaaagcaaatggagttagacaggaaacagacattaattaatttgaatcattacgaatttgaaacgacaatttttgctcattttaaatgtttcccaaaatcaatttctatacaattaaattttattttttaaatttatttttcgttttatttttattttcttttccgtcatttaaattttctttttttcttttgaaggtaacaacaaatagtatattatgctatttttaaaattgaatatcttcaattattttaatatttcaaataatatttgttaattattaatcattttccttttccatttttttttgatttaatcaaattgttctaaatcaaattaaccaaaaacgagttgttgcaaacgaagggtccgcccgtactaattagcggatgcaaaacccatcataatccccaatttgctaatggtccaattatttctaattcgattacgttagaaaatcagaaccttttgcggtctcttaatacgcacggcattttcattgtgcattatttaatttgctttacatttacacattttt

SEQ ID NO: 39159 - DNA, 1056 bp, Heterodera glycines
tttcggcgattccttgccatccttcttatcgctgacttctactattgaccgtccaatgtgagcagctggagggagtcttttgggtgacggatgggcggagacgaaacggaccgggtcgaataggccccgctgattgggccccaggaaggttttttggttaactcctttcataattgacataactgaatgaattaaaattcatttatagccctaaatgttctctattagcttgccaaataaaatttcgttgtggtgagttttattcattcagttaggtcaattacgaaaggtgctatacccaaaaaaccggcatgggacccattttgagcggggcccattcggcccccacccgagacgaaatgaggtaatacggttgaatgaaacaagggttttactccaaaaaacttattgttagagtaataattttgggaatgaaaaaacaaaccttgataactttgttgatggtgtagagccactcaatgatgcagtgggcacactcatggccacacgtgacagcgatattatctttgccggtcgttttacaaattttgatcaatgtccaaaatttgttttcacgccaattctttttttgagccgtcgatagtttgcgattaaccattttgctaagataacttgctgaaagggaaacattgcgaaatgtcattgctcaaattacttcaaatctcttttatcgtgtagagcatggacaatttgctaactctttccccaaattgatcacaaaatttgacataaaaaacatgtaattttcccttttacattttaatgtccatttttatgggttcgggtccgctcgaccgcgttcatttactacatatttgatggggaatttttttctgaacatttatattcgattttttaaaaatttgaaaaattgcgctttttagcggttttcagaattttactttttttttctgatcagttcgggggggggtcgggaaaaatgccgaaaattcacaataccaaatcggccatgctcgatacgataaaaaagcttttaaaatggtttgggtggattgacggacatttattactgcg

SEQ ID NO: 39160 - DNA, 981 bp, Heterodera glycines
tacccaaaagttttttacaaccacttattgccaatctaatttcttgcagattaaagccatccattgcctgccggttctcggcacagcaaagcactaatacggtgtttgactcacttcaaaaaataattcattacccaaaagttttttacaaccacttattgccaatctaatttcttgcagatttaaagccatccattgcctgccggttctcggcacagcaaagcactaatagggtgtttgactcacttcaaaaaataattccttacacaaaagttttttacaaccacttattgccaatctaatttcttgcagatttaaagccatccattgcctgccggttctcggcacagcaaagcactaatagggtgtttgactcacttcaaaaaataattcattacccaaaagttttttacaaccacttattgccaatataatttcttgcagatttaaagctatccattgcctgccggttctcggcacagcaaagcactaatagggtgtttgactcacttcaaaaaataattccttacacaaaagttttttacaaccacatattgccaatctaatttcttgcagattaaaagccatccattgcctgccggttctcggcacagcaaagcactaatagggtgtttgactcacttcaaaaaataattccttacacaaaagttttttacaaccacttattgccaatctaatttcttgcagatttaaagccatccattgcctgccggttctcggcacagcaaagcactaatacggtgtttgactcacttcaaaaaataattcattacccaaaagttttttacaaccacttattgccaatctaatttcttgcagatttaaagccatccattgcctgccggttctcggcacagcaaagcactaatagggtgtttgacacacttcaaaaaataattccttacacaaaagtttttttggaagacttattgccaatctaatttcttgcagatttaaagc

SEQ ID NO: 39161 - DNA, 1001 bp, Heterodera glycines
  unsure (1)..(1001): unsure at all n locations
gaaaatgaaacaaattcgcggctttgctctcgcgttggagaaagcaatgcgcagaataactggggagacttagggttagcgcatcaattatttttttcagaatgtgatcggggtacaaaaatacgggtccaaaaatgggtgtaactccgcttggagatgcgttagaaaagaaagaaaaatatgttcggacagcttttgaagagctgcattgaatgctgcagtcgccgctgctgtacgcccacccgttgctgagttagggtcgagagcggcatgaaaaaagacaaaaaggaggaaaatgaaacaaattcgcggctttgccctcgcgttggagaaagcaatgcgcagaataactggggagacttagggttagcgcatcaattatttttttcagaatgtgatcggggtacaaaaatacgggtccaaaaatgggtgtaaatccgcttggagatgcgttagaaaagaaagaaaaatatgttcggacagcttttgaagagctgcattgaatgctgcagtcgccgctgctgtacgcccacccgttgctgagttagggtcgagagcggcatgaaaaaagacaaaaaggaggaaaatgaaacaaattcgcggctttgccctcgcgttggagaaagcaatgcgcagaataactggggagacttagggttagcgcatcaattatttttttcagaatgtgatcggggtacaaacaatacgggtccaaaaatgggtgtaactccgcttggagatgcgttagaaaagaaagaaaaatatgttcggacagcatttgaagagctgcattgaatgctgcagtcgccgctgctgtacgcccacgcgttgctgagttagggtcgagagcggcatgaaaaaagacaaaaaggaggaaaatgaaacaaattcgcggctttgccctcgcngtggagaaaagcatgcgcagaataactggggagacttagggttagcgcatcaattatttttttcggaatgtgatcggggtacaaaaaatacgg

SEQ ID NO: 39162 - DNA, 1466 bp, Heterodera glycines
  unsure (1)..(1466): unsure at all n locations
actgcagcgcaattcaatttatgtatcctgctagaacgaggacacttcaactatattggacgaattgcacagctcttcaaggttcctggatactgcattgactgtgaacggagagcagacgcgcgttaccatgcgattggttgcaaggcggcatgtcgtctttgttttcgattcgggggtggatacccgtgtcaacgagaacgggttttaatttgagcttatttttttcagttataaaatttttttagttgtctgatggtcagatcagttcacgaaaatgtaccgaatgtggtttcattttcccaaatgacaactgttatgatgcgcaactccaacaatatatcaataatgagaatggggtaggacaaattcgccttgtaatcttcgaaaaggagcaagaataccgtattgtcttcaaggggagagggggtaatatttttttgttatctnaattaaaaaaaaacatttgaagaactgcagcgcaattcaatttatgtatcctgctagaacgaggacacttcaactatattggacgaattgcacagctcttcaaggttcctggatactgcattgactgtgaacggagagcagacgcgcgttaccatgcgattggttgcaaggcggcatgtcgtctttgttttcgattcgggggtggatacccgtgtcaacgagaacgggttttaatttgagcttatttttttcagttataaaatttttttagttgtctgatggtcagatcagttcacgaaaatgtaccgaatgtggtttcattttcccaaatgacaactgttatgaatatcatttggcgaatgatgcccctgctccaattgatgggcgcggacatagacaacggcgttcactttgtcaatggcgacgtttttgtcccacatgcggtcgtgttgcctattttggaatccatcaatgcccctcgatacgtcgtgctattgggccagttgattgctttcgttgcaaaggtccacatatgttggatgaaccttgctacatccaaccgattggtgttgcaccacctttaccaatgcttggtcctgttcacaacaacgacgacaacaacaacaacaacaacaacaacaacaacaacaacaacaacaacaatgaggatgaaaatgatattgatttcataatcaacaatctgggaggagaaggtgatgaagatgaagatgatgttgaaaacggggatgatattaatgatgatgatgatgatgatgagcgagatgaactgctaccacttcgtctttgcttcttcgatgccgaaacatcccaggagcgcccactacagcttaacaaccaagtcgcccataaacatgtacctttgctaatagttgctgaattcatttgtgaaccttgcattcgagctggaatcaacatcaacgatgggcaaggtcagcgcgcacccggttgcgtttgcctatgtggaagagtgagaggtcaacagatgcgtcaatgga

SEQ ID NO: 39163 - DNA, 1296 bp, Heterodera glycines
  unsure (1)..(1296): unsure at all n locations
ttaattacccattccgaatgccgatagcaatttaattgttactgccaaacgatactcaatgaaattctggcctgaaaatgcggtgtacacaaaaagaaaattgccatgttgatgaaagcagttccataaatgaattaagtgccaaaatattattgaatgtgccatcaaaagtcagttcaattaatccatttttcagagcttttccatctacaatctgtctggcacattgttggacgacgacgcaaaacggcaaaaggtattatgtatgtgaatcgagtaagaatgtattcatttgacgaaatcacgcggagaaaagtgccaatgaaagggcattttatgcggacatatattataatttaattaaattcacgatattgcgtctctgggtgtcattaaataaataggtaaatgttgtctaataactaaaagcaattcgtttaaattgtaattgaaataaaatatcaaaatacatttaataaattcgataaattcatatgactaaaatttaagtcaacatcacgtcttttgctgactttanatggccttaaatgatttacaaaaattttatactttctttgatatcttctatcatatatttttacttttttggattttttttttaaatttttttatgactatttatcgtttttatattgctttttcatgactttttggcgatttttgtgactttttaatcgactttttggtaatttttggtgacttaagttcacagtcctattaattaattattttttggttcgcggaatcgaaccattgcagaaaccaaataaagactggagatttagccagtagactaaatgtttctgctttctttttatttaaaagaatagatcaatttaattattatttttttactttttctttttctcttaattttcccaaaagattttctctcaattgagtaacgaccagccaccctttgaacaactttaaacccattaaaatataaaattttattaatttaattatttataaacacattaaaaattgttcattaaaagcagaacattcacaataaaaattaataattacaattttttttatttcttgtttaactacacctgaatcttttctttattatttttttcttctcattttataaaatttttttattttaacaggttttaaccaattattttttttttttaattttaatcaccttttaaaatcaaatcaattcatttatcacatctaggggcacaaacccacaaactcaacatccaacaattgtttagatggaaggcagaaaaatgaacggaatgatttctatttcta

SEQ ID NO: 39164 - DNA, 897 bp, Heterodera glycines
tctctttttctgctcaacactcacatgaattccaaccttcctttcggaatagtagcgacgaccctaatttttctggattttctttctgggcgagtttggctctgaaaattttgaaaaaacgtctatctctttttctgctcaacactcaaatgaattccaaccacattttcggaatagtagcgacgaccctaatttttctggattttctttctgggcgagtttggctctgaaaattttgaaaaaacgtctatctctttttctgctcaacactcacatgaattccaaccacattttcggaataatagcgacgaccctaatttttctggattttctttctgggcgagtttggctctgaaaattttgaaaaaacgtctatctctttttctgctcaacactcaaatgaactccaaccacattttcggaataatagcgacgaccctaatttttctggattttctttctgggcgagtttggctccgaaaattttgaaaaaacgtctatctctttttctgctcaacactcaaatgaattccaaccacattttcggaatagtagcgacgaccctaatttttctggattttctttctgggcgagtttggctctgaaaattttgaaaaaacgtctatctctttttctgctcaacactcacatgaattccaaccacattttcggaatagtagcgacgaccctaatttttctggattttctttctgggcgagtttggctctgaaaattttgaaaaaacgtctatctctttttctgctcaacactcaaatgaattccaaccacattttcggaatagtagcgacgaccctaatttttctggattttctttctgggcgagtttggctctgaaaattttgaaaaaacgtctatctctttttctgctctacactc

SEQ ID NO: 39165 - DNA, 663 bp, Heterodera glycines
  unsure (1)..(663): unsure at all n locations
cttagatcacatgcgattttcggcactctgataattttagcgttcataatgggatgtataaaggcgattgtagaaggaattggatgcgctaaaattggttgagaagctttttgagcgtaattacgatttttacttacaccattttttgctaggcttagatcacatgagattttcggcactctgataattttagcgctcataatgggatgtataaaggcgattgtagaaggaattggatgcgctaaaattggttgagaagctttttgagcgtaattacgatttttacttacaccattttttgctaggcttagatcacatgcgattttcggcactctgataattttagcgttcataatgggatgtataaaggcgattgtagaaggaattggatgcgctaaaattggttgagaagctttttgagcgtagttacgatttttacttacaccattttttgctaggcttagatcacatgcgattttcggcactctgatcattttagcgttcataatgggatgtataaaggcgattgtagaaggaattggatgcgctaaaattggttgagaagctttttgagcgtagttacgatttttacttacacctttttttgctaggcttagatcacatgcgattttcggcactctgataattntagcgttcataatg

SEQ ID NO: 39166 - DNA, 814 bp, Heterodera glycines
  unsure (1)..(814): unsure at all n locations
cccattttttagagtttattttggggggtttttaagaccttaaagcctacctattttggcagtttttagagcctaaaactctcgagctctaattacgaacattgatacttttgtcacttcgtcttagccttagcaccaaattatttaattttgttaggtttaagaaattagatgattttttttgaaaaatttgtaaaattgcagtttttacgaaacgactcattcaacacggattttcatgcaacgcacctgaataagcttttgccgaacacttgcacttgctgcgcttcaatttcataaattgtttgtccaattgaccaaaattttccgtccaaattgttgttttggttcattaatgagtcaataagacattggaacacgtgattagcattaaattggttaaataattgttggaatgtccctaattgtatcgttgcaccagcaacaattgtgtgcacattttttatgccaatacattccatggtcagtgccaaaaagtgttgtacaatattgacttaagcaaatgtgctcgattttaatatacaaaataaaatacaaatataatatatattagggttgtgtattcanntatcgannataaatttntgannattggtaaaatgaccggtttcaagagctcgaatttgaaaagcgagactcggttggatangctagatagatactatatcaacagtagtttccagacattctatcagctatggatcaaccncgtagaccgatagtactatatcatcgtggtttcggactatcagtgtgattaatccgctctccgtctatcccgacactgatgctc

SEQ ID NO: 39167 - DNA, 922 bp, Heterodera glycines
  unsure (1)..(922): unsure at all n locations
gcttgaaccggtaataatgagaatgtcattttttaaacaattctactagacaaatactggacctcctatcagttagacaaaatatgaacgtttgttgtccaattgagagcgctttcggaaatgataattgcttgaaccggtaataatgagaatgtcattttttaaacaattctacgagacaaatactggacctcctatcaattaggcaaaatatgaacgcttgttgtccaattgagagcgctttcgtaaatgataattgcttgaaccggtaataatgagaatgtcattttttaaacaattctacgagacaaatactggacctcttatcattaggcaaaatatgaacgcttgttgtccaattgagagcgctttcgtaaatgataattgcttgaaccggtaataatgagaatgtcattttttaaacaattctacgagacaaatactggacctcctatcaattaggcaaaatatgaacgcttgttgtccaattaaaagcgctttcggaaataattgcttgaaccggtaataatgagaatgtcattttttaaacaattctacgagacaaatactggacctcctatcaattaggcaaaatatgaacgcttgttgtccaattgagagcgctttcggaaataattgcttgaaccggtaataatgagaatgccattttttaaacaattctacgagacaaatactggacctcctatcaattaggcaaaatatgaacgcttgttgtccaattgagagcgctttcgtaaatgataattgcttgaaccggtaataatgagaatgccattttttaaacaattctacgagacaaatactggacctcctatcaattaggcaaaatatgaacgcttgttgtccaattgagagcgctttcgtaaatgataattgcttgaaccnggtaataatgagaatg

SEQ ID NO: 39168 - DNA, 877 bp, Heterodera glycines
ttcagaactcggttctgaaaagtcattctgtaaaagtctttcactacaaaaatccgcaattttttcctctataatataaattttattttaaatttttatcacatttttaaaaaaagatataaaaataaaagtgattttgtgattcgggtccaaaggggggtgcacatggtttttaagtggaaaatttttttttcacaaaattcttccaaaaatatgtctttagagctattttagggttctgatcacaaatctgaaatcagatttcagttattacatcgttaagccctcagaatccctgtgtgattggggattctgagtcatcttctgaggggggggcggcaggttcgaatccggccggtgtaaattattttatatgcctttttacgtcattttcaatgtttttaattaatttaaaatattttgttgagttaataaataaaaaattatatttaaattattttttttttgatgaggttcggacccggacggtgtacattatttttctatgcatttttgggttattttcactgtttttaattaatttgaagattcgttttaatttatttaaactagcgggtgcgtgaaccgtcggctatttagctgggaaaaagcgcttcgcgctttgggagcttcgctacctagactgtgaagcgattcaaattgatcgaattggttggtgatttttttttgaatttttaaaaaattattatgagtgaaaaaatattttcgacaaaaatcttccaaaaacatgtctttaggggttatttgggccgctgatcacgaatacgtgatcagattttacttttgacatcgttaagccctcagaatccctgtgtgattagggattctgagtcatcttctgagggggggggggggg

SEQ ID NO: 39169 - DNA, 1043 bp, Heterodera glycines
atgaatttttccaaaaaaaccgctgaaaaatattcatttttttcaaattttataaaaattattttcgggggaaaacgtcctgctctgcctttcatagtagcccgaattgtatgaattctattcatttgatagcattgagtgttctttattaattgcatgggaaatttctaaaaattgcgttgagtttcaaaaggaaattccgaaaaaggcttccgatgtaagacgaaggacattttcaaattaaaaaaaaatcaaacgaatgtcacaaagatttttaaagcatcatttgacaaaaatgatgacaccaaaaaagagcgaatggaaaagagaacacaaatgtaggaccaccgtaggggacggcactaccttggccaccgccagcgccgccgccgcactcattgctggggtggtgggaccgatctgtgcaatgaaatgcgattttggaaagaattcaaaaaaaattctaagaaaatttcaaataaaaaagaccatttcactatgatcgaataaaatgactgtcggatggacaaatcgcaaaaaaaaaaaaaaatcgttgaaattctctcggccatgacgcgtctcgattcatgctttgccaaacatccgaatttgggtggatgagagcatgaaaatgggtggccaaccccacacgatgccctaaattataccatttttcagcgcttccaccgcgaacaccaacgcgtagccgccctccgccagcagggaacggaccgcgtacgaatggtggccaatggtcagcgtttggcccacgaggggatgcgatttgggatctggacagaaaaggtggaacaaaataatatatttgaattgggcaaatttgtaattagtggtaaacccggcaaaaatctaaacccccccccccagcacgaagtctactcccagaaaaacaaatccgcaaattctctgggtcttgtacaatttatgcgtccaatcattgattatctcctcaatttccaagaacataacattttccttactggtcaatgccttggcttttggtcatacattaaagaggggggggg

SEQ ID NO: 39170 - DNA, 688 bp, Heterodera glycines
taaaaacgcaaaaatgactaaatatttatttttctcgacttcctccaaaaattaattatacacgaaaaaccttcatgataataaaatattttaacacataaatgcttttttgagcccctttctttatagcatacgcgcagaaaaaaaaacttaccacaagctttaacgggtgacttatcaacattttttacattatcttgtgcctacggcgaatggcaatcgtgtctctaattagcacattaaattctggctgttgtcccgcaagcggcactatgtaattagttttacacctggttatgtaatttctaatgggcgaaaatctgacttagctatcccattaagcttttgctggtattgtaaatcggttggaaccataagaatgatttttgtttgaaatatatatttttttaaatatttatttttgccatttttctttttttttgaaaaataattattccaaaaatcttgccccaaaaaagccaaaatgcgtcattttaaatgattaattattattttggtttttattattcaattataattaatatttattttattttttatttaatttttacacttaacaaaagttattggcttcgtttcacttgccgttggcacaatcatttaaaataacttgaattaattgccatagaaacaaaaagaaaagcggtacattcgcataaacttttca

SEQ ID NO: 39171 - DNA, 1006 bp, Heterodera glycines
ttctttgtttgcttttttttggtttttcccattgctcttcttcgtcataatgcttcgaccttaaatgatcccataatcctttagtcgacgatttcttacacgaaaaagaattatgacaaaggacataaagccgtttccgacgtttgtgattttttataaaaagaccatatttcagacattttatctaaattagaaaaattcataggtaatattaacctgaaaaatgcaaatgcaggaagaagaacatttttcgatttacatttttagataattttattgttaaaattggcgaaatgttctaatttcaaaattttttgtcatttcaaagacaaaattcaaatttcttataacttttttgccttttcccacaaaaatgccattcttaggggtgtatatttaaccccgaccccgagtcggggttgagggtcggggtcggggttgtcggggttggaagcgtcggggttcggggtcggggttttccccgaaaatggccaaaaatgtcggggttcggggtggggtcggggacgcaaccctatttttaacatctaaaatctctaattatgatgcccaaatgttttgctaatattttttggcatttttcctttttccatccaatttttcattgaaaattttccacaaattctcttttctttttatcaatttcatttgaaaaattgtcaaaaaatttttcaaaatttgtttccaattgttctaattggtcacaatttatcgtactttcttgtttcacttgcaaattttgatcagtttcattctctccatttcctcggctttttcgtcccatttttggccaaatatttcatcaaagcttttttcttcgtttttctttcccgcataaatattatcaaatgtatttttgaagattaatattaataatattattttaattttcatatttttgaataaaaaaccataaaatgaatacaaatccttttactaattgattttatttgcgctttattaagcaaatcctacttgtttttatata

SEQ ID NO: 39172 - DNA, 1485 bp, Heterodera glycines
aaatatgccaaaaaatgtaggcttaacttttttagttctcttggatcactcatattttttgctaattgagcagaagcgttccaaactttgcagggatactccccggtaaaggactaacttacactgaaatgagcgccgagctagctggctcaaaaaaattttcgaaaatctgagtctttcgtttttatttattttttgcaaaattaattcttaaatattttttcagaaagggttctgaaacgcaccaaattttatttacatgttagtttaggcactctgatgctttttctatcaaaaagggagatgaataaaatttttaaaaatttttaattcctttttaaacaggccaaaaagtttaggcttaacttttttttcagaaactgatcagaagcgcaccaaactttgcagggatactgaaaggaagagaaataacctattttaaatattatctagtcagttcatttaaataatttttatccaaaaaatttttttttgggttttcggggcagtccccctgaaccgatgcgcccagatttatggggagaccgaatccttccggaatagcttcactatagcctgtactttaattctgcgttggatttttgctcccaataattgtttgagtaccccaaacggacacttgaaaaaatcgatttatttttgttttcggggcagtccccccgaaccgatgcgcccagatttatggggagaccgaatccttcgggaatagcttccctatagcctgtactttaattctgcgttggatttttgctccccataattgtttgagtaccccaaacggacacttgaaaaaatcgatttttttgttttcggggcagtccccccgaaccgatgcgcccagatttatggggagaccgaatccttcgggaatagcttccctatagcctgtactttaattctgcgttggatttttgctccccataaatgtttgagtaccccaaacggacacttgaaaaaatcgatttttttgtttcataaatatttttttcagaaagtgctctaaagcgcaccaaattttatttacaacttaattttagcactctgatgctttagtatcaaaaaggaagatggagaaaaaattttttaaaaaatttttccttatattttggttatatcgttttgcttttggtggggtgcttggaacagtggaatcatgcgcacccgtccgatctggcaagttaagcaacgattgctgactagccaaaaggttcggtgccgtgatgaaacgaaccagcactgcttaccccgcggcacccggcacggtcccccgaaggaatggatttaattaaattctctccttcggggatttttttccattaggtcgtccgttagcgttcgattgctctagtcaatttttcaaaatttttgttgaaatatttgtcgtgctatgaagggcgtgggagggggggggggggcgaaggcccaccgcgggggcgcgaagaggccgagtgagtcccatcggtg

SEQ ID NO: 39173 - DNA, 969 bp, Heterodera glycines
  unsure (1)..(969): unsure at all n locations
tggaaattcttccactaatacnaggaagtagattggactaatgggaaaaataataaagatgaaaataaaaaatttatttttattaacgggcaaattgtcaatggatttaaatttattggcactaatattaatttttaaagacatttatttggtgccatttatttaccgactttcggcaattgcgatttggccaaaatcacttcttcgctttcgtcgccattttgtcttcgtcattttccatgatccatcggcagagatcacccgccatttacaattaatttttgctgtttattcgattgtccgcttcattagtaatgctcgtcattggaattcgcaccatatgcccattaaatggtgcttattatgtcgctaatggggtggtgcttttctttcgtcaccgtttttgccaatgtttgttttgtgttaacatttcatctttttgagcgatcattgagcaaaaaaaaaaaaattgttaagtgaatggcgaaataaatggaaatgcgattgcaaaataagcccacatttagcgcttcgaatgatcggcttaatccgtcgtcggaaaataacaaaaataataccgccgtaaaccaaaacaaacacattaaataatgcgcaattctcgcaattcgtgttttttggcggattatttgtccaataaatttcgcaaaatgtataaaagggaaacgaatgaatggacggaccacgcgcccctttcactttcatttgaaatcactccgccgatcattcacaaaagctcaaaaataatcccccgtaaagcgaacacaaaatgagaatgacccaagacgcaaatttgagcactttttgtgcccttttcactttccttctgattgttgaaggaactttcggcatttttggcattggcagcagtgacaatgacacaacgacgacgacgacacagggagggggagggacatcgacgacgacggcaaaaccaaagggaggagggac

SEQ ID NO: 39174 - DNA, 1015 bp, Heterodera glycines
cagcagccatcaccgttcaaagccgagcacaagcgcaagcaagcacttgaacccagacggccgcgctccccacagcgaaatcgcatctttttccagccacaatatcgcaaaaacggcccaaccaccaccactcacccacgccaaccaaccaacgcaaagcacatacgactaggaactttatacaaattttaaaaaagtaatattttgtatatgcatttaatcaaatttctactttctttataaatgttagctaattagtcagcgtctatttattttctgtaaaaatttgcctctttatttaaaattaaattatatataatttcatgaaataagacactaaatgtatagagaatgaattaacgtggtcgattggaataaatggaaaaaaagcaaagtcaaagacaaaaccttaaagcactagccgattgaaataaatggacaaaaaagcaaagtcaaagacaaaaccttaaagcactagccgattgaaataaatggacaaaaaagcaaagtcaaagacaaaactttaaagcactagccgattgaaataaatggacaaaaaagcaaattcaaagacaaaactttaaagcactagccgattgaaataaatggaaaaaaagcaaagtcaaagacaaaaccttaaagcactaggcgattggaataaatggaaaaaaagcagtcaaagacaaaactttaaagcactagccgattgaaataaatggacaaaaaagcaaattcaaagacaaaactttaaagcactagccgattgaaataaatggacaaaaaagcaaattcaaagacaaaactttaaagcactagccgattgaaataaatggaaaaaaagcaaagtcaaagacaaaaccttaaagcactagtcgattggaataaatggaaaaaaagcaaagtcaagaacttatcctacctaatttcatggtgactgaccaggcatttgactcccttaagagagccttcccttctcatgtacttgttacctaagatgttgatggtacaaacagta

SEQ ID NO: 39175 - DNA, 1313 bp, Heterodera glycines
  unsure (1)..(1313): unsure at all n locations
tgaggccttttaccatatccagcagagttttaatgagatagatcttttgaatgaggaaataacaatgataattacaacttactccgttccaatgggatcaggcatagaggcagttntaaattaacaaattttaacattttaagggtcaaaaatcaatacatcaacatttttcgatgtaaaagaaaatggaagaattgtggtcaaaaattcagacaaatactgtcttttttatagtgttgttttgagtcaactatatcaaacaataggcactgaaatttcgtactcaatgtttcgaagaattctcagtaacgctaaacgacaacgaatttatgtggatgatttgatccgaaatgctaaaattgaaccgaataagaaaaactatggaattgacgagttgagacaaattcaagagtatttgaaccaagaatttcccggaaaatttttaattgcggcttttacaaaggtaaatttttaagattattttttccccaaatatatttaggaatgggggataaaaccaatatacaagggagatggaccaaaaaaatacattgtttgcgtttttcatgagaatgatcactgggatggtaagcgggtttttcaattagattattacaaaaaaaaatttaggattaaaaagcgtaaaacaatttttcaacataaaacattattattgtatatattgtgaacagacattccgagaaaaaattagacacacggtcaactgtgtaattaaatgtcagcgttgtggcggatggggtattattttagggacgggtaataataatttataaaaatttttaggtttaaattttccatgtgaaaaagaagggcgtgagcccattgaatgtttaaaatgtaatcgacttttctttagcgatttctgttttcaaaatcatctaaaattagcttgcaaattatacagaaggtgtacattatgtgatagcgaatacaacactcgtaacaaacatatttgcggtaaaatatttcttttaaaaatgtttttttcacatgtttaggaataaaattctgtaacttttgcaaagtaaaacacgccaaatcagagagttgttacatcaagaaaattaatattcccaagaatttaccaagatatcgtattgttagctatgatatagaatgttcagtaagcatcgaaaaaagctaatttacaaatttttaaattgaatttagacggataattctttttccgagggaaaattcgagcatanagttgtctttttatctgctcgattcacgtgcagcgattgtgacaatgaaaataaaaattgtgatatttgcggtcaaaaaggaat

SEQ ID NO: 39176 - DNA, 1036 bp, Heterodera glycines
ttattcaaaaatttccaccatttttggggtcggatttccgtgtttcgaaaatttgtcatcctaacttacacctcgtgggcgtcctccataatacagatgagaagaagagataatatcgcacaatgatgtttaacaatttaaagccctccattcgtttctatacatgagatttgttcatcggtcaacagttggggtgcctttgctaatgtcccatctgatgagagtaattagtcaaaattgactcttacgaaaaagaagaaatatccctttacagaatacgcccgcttactttattggaataccaatgaaattgaaaactcaaaaaattgagcatttttctgtcggttgttgtcgttggaatgggagcgacgattatttaccttttgaacaaccgttgagtataaagctaaatgtccattttttcacgtgttcgtttttatcggcatattttttgcttgggtataaaaatggagcgtcgtctagaaatgatttttcattagcaattccaaattcgattcaataatcgtgccgcagaaaatattaaaaatctgattttttgattccgattacactgaaatgtacgatttgctaggttccccctccccaaaaaaattgttaaagatgataattgggcgcaaataagacaattagagcacgactaaaaaggcaccaaaaatcacgaaaaaggcacaggcactataataggcacaaaaaattgaaaaaaggcattaaaataggcatttaaattttttattaaggatttttgagatcaaaatacgcaaaactaaatcaaaaaaacttaattttggtcatttaaatgattattaatatttaataattttttcgaataaggaaaatttttaaacctaaaattttttatcaagaaaaaaaaaattttggcgatcaatttttgaggaaaaatccaattcttagggatatattttctcaagttttttgggtcatttcttaggggtgtattttcccgaatttattgcatttttaatggaatttttcgtaaaaaacgccagaaaaggca

SEQ ID NO: 39177 - DNA, 580 bp, Heterodera glycines
ccaggggcctattcaaattagcatagtatcaacgatgcgatgatacgatgatcatatgcgtgttcaaattaaggactttcgccatatgatgagctgtcgtttgcagctcatcatacgatgagatcgtacgatgatccaatcgcacgttctcatcatacgatcgtatggctgttcaaattaattttatggataagatgtgatgatatgatacgatgaatgcatacgatgtttaccacaaatcattttatgtcttaaaaatatttccattggcaattttaaaataattttaaattcgacaaaaatttaataaaaataattacttttaatattcgctgttattttctccatttttattcaacgccagagtcagcagtagttagtaacattctcagcagcagaaatattccaaattttttctatcgacagcgggccatgcaaataaactatctttttgccatttacacccaatttatttaaaatttttgtagataaaatgaaataagccgaaaaaaatttgcgaattctttatgaatgattcggagaagttttcaattatttaaaaactgttaataatatttga

SEQ ID NO: 39178 - DNA, 1072 bp, Heterodera glycines
tttttagtttttttaaatattaatttgtatgaaaatttggctgagatagattttacatttcatcacaaatggaattattctcgcgagatttggataagcccaattggatggtattgaggtgaagagggaggggctgaacgaatgaataactgggaatgagcgagaatatatatggattggaggaatcgatcggagggggggggggggagaattgccccttcccctttcatggccacaaaagctatgcccaaacagaaaaagcttattagcttttctccgcttccgtttgcaccccaaaatttgaacgcgcgccgcacgcatctcaaaaagaggaaaagcggcggtaagggcaaaagggagggagggaaaagcgggggggggggcggggggtgggaaggcaacatcaaaagacgggggccgcacactgagcaaatgcaatggcatggcatggaactgattgattatggagggggtcttttatctgtttttgtttctgtacatctctaaacagttgtaaagcaaataacaaacgaataagtgaaaaagtatcaattggagggggggggggggaatttgcattgaaaagttcatattaaaacaaatgcttgtgccgtaacattcatcattggatcaaaatgggtgaactacaataaatgatcactaaaaatcgaaagttacggcacaaaaaatatacagaaaacgattaaagcgtacaaaaaaatacaaatgggaagaaataattcgtacaattgtaattaattaattgggagagaaagcaatttttttgtgctttttttcttttaatcgaaaaggaaaaaaggaactctaattttatgattgtctgacattgtaataaaataccaagtgtttaaaacagttttcaggatgttgtcaggacattgggctccaaacatagactttttgtcctcccgcggatactcccacaaagtccaaaaaccctcccaaaacctgggggccgttggtgacaacatccccaaaatggatggcaacagtgtaaaagggaatttggcataaaaaggccatttatagttgagcatacgcaattcattgc

SEQ ID NO: 39179 - DNA, 691 bp, Heterodera glycines
ttcacaaatttagataaaaatattaatttaaattattttttttccttgacaatcgacctgaataatttcaagaggttatgatggggtttttaagtaaattttctgatttatattttcttgaaatttaaccttaactttttcaattttattaattcaaaaaatgtaaaatgttttttagcttataaagaagttctttttttaaatattatttgtttaataaagttatatgatcgcgaagatcgcgacgaatttatttaatggaatttaatagttacggtatttatttatttaaaattattcacattttaaatttattgagtttcattttttataattttattacaatgtttactttttaagatcggtattttggtactgttacttatttgcatttctttcattttgataaagataaatgtgaaattttaaagcaaaattgaacatttaaagttcgttaaatagtggtataattttcatttttctgttatttaataaagcttttatttgtattacaaaattatagagatttattaaatattttgaaatagtatcgcagtctccacttaaatagtctgctttttttttgttttaattgtgaactaatttaaatataaatttaattaaagggctattggtttctttacaataacttattttggtataacctatttatttggttattttatttttt

SEQ ID NO: 39180 - DNA, 804 bp, Heterodera glycines
cgcccccccccccgcccttcaaaattttgaaaaataaataaaataataggagactcagaattttgaaaattttttataaaaactgatgacaagctaatgtgataaaacaggttaattcttttcctttcagtatccctgcaaagtttggggcgcttctgataagtttctgaaaaaaaagataagcctaaactttttggcctgtttaaaaaggaattaaaaatttttaaaatttattcagtgtccgtttggggtactcaaacatttattggggagcaaaaatccaacgcagaattaaagtacagactatagggaagctattcccgaaggattcggtctccccataaatctgggcgcatcggttcagggggactgccccgaaaacccaaaaaaaattttttggataaaaattatttaaatgaactgagcatcagagtgcctaaactaacatgtaaataaaatttggtgcgtttcagaaccctttctgaaaaaatatttaagaattaattttgcaaaaaataaataaaaacgaaagactcagattttcgaaaatttttttgagccagctagctcggcgctcatttcagtgtaagttagtcctttaccggggagtatccctgcaaagtttggtacgcttctgctcaattagcaaaaaatatgagtgatcgaattttcactaaaaaagttaagcctacattttttggcatatttaaaaagcaactaaaaaatttttaaaatttaataattttcctgcaccgaaggtactcactcggcctcttcgcggcctcgtggtgggccttcgccccc

SEQ ID NO: 39181 - DNA, 1015 bp, Heterodera glycines
acaaattccacctgggtgagcacacatttcagataccctccctatcattatttcttagaaataactaataatctgttgcacagttatttcaaaataaattcgaatatattagcttattatgcatcttcagtgtgcattctaaaataaaatcattttttgttctaattttatgatttatttgtttctgttgactaaatagtcggttcttatagcaaatattaatttatatttgcgtagcttcaaatgagcattctgccttcaatttcgaagggaagtgaatttttttataataaattgatagagagcaaaaagcacgattgtataatattcaaaaaatttatctatgcatttgttgaatgttcctaaacccgatcaaattttaaaacctttatatgaaaacatttattgcaggaaatgacaaattccaacctgggtgagcacacatttcagataagcttcctatcattatttcttagaaacaactaataatctgttgaacagttatttcaaaataaattcgaatatattagcttattatgcatcttcagtgtgcattctaaaataaaatcattttttgttctaattttatgatttatttgttttctgttgactaaatagtcggttcttatagcaaatattaatttatatttgcgtagcttcaaatgagcattctgccttcaatttcgaagggaagtgaatttttttataataaattgatagagagcaaaaagcacaattgtataatatacaaaaaatttatctatgcatttgttgaacgtttctaaacccgatcgaattttttaaacctttatatgaaaacatttattacaggaaatgacaaattccaacctgggagagcacacatttcagataagcttcctatcattatttctttagaacaactaataatctgttgaacagttatttcaaaataaattcgaatatattagcttattatgcatcttcagtgtgcattctaaaaataaatcatttttttgtctaattttatgattta

SEQ ID NO: 39182 - DNA, 1245 bp, Heterodera glycines
  unsure (1)..(1245): unsure at all n locations
aggtcttttttaattatantttttgattaataaggtagtaccccttcttacaattttgaaaatatttcttacaaattagctttgcataaatgataataattcaaaaataacagcacgtttctcattgcttgaacggataaaagcaagacaaataaataagatatccattttttgttgagaaaatgccaattctggctggatgaagttaataggattgtcatcttaaaaaataaatattaaaataaattaaatagaactatgaaattattttaaaataaaaatttttttatacggactgtcaaaaagtccagtgtcgaaaagtccttccgaataccctttgcagacgactcaatgacaactcgtacaaatggcaaaacaataaacattttgcaagataaagcctaagcgtaagcccaggcctaagcaagcataagcttcggcctagccaaagttcacgctttgttctgtttcctttcaaataatttgttgttgctgctccagaaaaaaatccagttcgcatttatatagagtctaaattatcattcagtagtaacgtttttatgcaaaagaaatcattgaaaaaggaaaccaatggatagataaataggtaaatggaaagagtgtaaatgacagtaaaagcgaaccattgggaagaaaagtgttgagttgtaactcaaaaaccatcaaatggaaaattttgactaaaagtaatatttaattataaacacaactttctgaaactattaaaattttttgaaatttattagaggctaatagagaacactgagtgctatcaattgatattaagttgaaaaatttgttgtttttagcaaagttatgggcaaaaaaaaaaaaaaaatttgtttgatgcttttttgagtaacgccataacaccgtacaaaagagagaaaatggccacactcaaacgacccccaccgtatttttaggtcgtccatttttgtaagaaaaaataggtaaatttttttgcaatatgaatgaaattaataactcaaaaaaattaaatttgtaggctttacttaccaaaatttgatggccaacacaatttgcctgataaattttttttaaacaaattcacacagttttttcataatcacaatccgttttcattattatcaagcatatattctcagattaatttttgaaaattgtcgcatgtgaaaacaaaagtaaacaattattataattatgggtcaaaatcacaaacattttggcgctaagttaata

SEQ ID NO: 39183 - DNA, 1076 bp, Heterodera glycines
tttttgaaaaattttgaaattttctcggaattagaattagtggtttctttttcatttttattcaattttaaaaaaaacttcagaagaaatatgtgcaccctaaatgttgtccacccaatggaatcagatttttagtttaacaagcgaaaattcactattttaaaaaataattttcaattttcacgcatatttttgcaaataatttgcattttttttacccattccttacttttttgtgacgaaaaagcttgattgattggacaaactaacaataattagtggtgaggaatgaccggaaaaaaacgaacaaaatttttgtaaatgattaattaattaattgattaattaattaattacccacttcattaaataattagagagcgtattgatcaaaaatttattaatgaaaggcagagggatgaactgtgaacggaggcggaaaagcggaaataaaagaataaaagaacaggtcacacaaattttggaataagtgaattgatcagaaaatgatcggaaccaaagagattaatgatcagaaagaatagtgctgacagagtgattgatcagaaacgaaaaaggaaaaaggtatataataaattagccaaaaaagcagtcggaaacgccggaagaaatgatcaaacatataagtaaatgatcggaaattggaaaattgaaaccgtttgttcaaaaatttgagtagttgatcagaaagaaaagatggtgaaaaaaataccatatgagtgacattagaaaattgtcgtaaagtgatcggaataattgttgacaggttattgattagaatcagaattcttacaaagtttattggcaattttggactgataaattatgaagggaaggaatcttttccatttttgttgttttttgtttattgctgacagagtgactgatcagaaaagaaaataaataaatttggccaaaaaatgaccgggaacgccggaagaaatgatcaaaaatagaacgaaatgttcggaaattggggtgattgatctcgatcacaaagacaaatgaaaccctttatgaaaaatttgagtaattgatcagaaagaaacactgat

SEQ ID NO: 39184 - DNA, 1319 bp, Heterodera glycines
  unsure (1)..(1319): unsure at all n locations
tttgcagggatactgaaaggaagagaaataacctatttcattattatntagtnagttgatttaaataatttttatnaacaaatttttttttgggttttcggggcagtccccctgaaccgatgcgcccagatttatggggagaccgaatccttccggaatagcttcactatagcctgtactttaattctgcgttggatttttgctccccataattgtttgagtaccccaaacggacacttgaaaaaatcgatttatttttgttttcggggcagtccccccgaaccgatgcgcccagatttatggggagaccgaatccttcgggaatagcttccctatagcctgtactttaattctgcgttggatttttgctccccataattgtttgagtaccccaaacggacacttgaaaaaatcgatttttttgttttcggggcagtccccccgaaccgatgcgcccagatttatggggagaccgaatccttcgggaatagcttccctatagcctgtactttaattctgcgttggatttttgctccccataattgtttgagtaccccaaacggacacttgaaaaaatcgatttttttgttttcggggcagtccccccgagccgatgcgcccagatttatggggagaccgaatccttcgggagtagcttccctatagcctgtactttaattctgcgttggatttttgctccccataattgtttgagtaccccaaacggacacttgaaaaaatcgatttttttgttttcggggcagtccccccgaaccgatgcgccctgagtaccttcggtgcaggaaaattattaaattttaaaaattttttaattgctttttaaatatgccaaaaaatgtaggcttaacttttttagtgaaaattcgatcactcatattttttgctaattgagcagaagcgtaccaaactttgcagggatactccccggtaaaggactaacttacactgaaatgagcgccgagctagctggctcaaaaaaattttcgaaaatctgagtctttcgtttttatttattttttggaaaattaattcttaaatattttttcagaaagggttctgaaacgcaccaaattttatttacatgttagtttaggcactctgatgctttttctatcaaaaagggagatgaataaaatttttaaaaatttttaattcctttttaaacaggccaaaaagtttaggcttaacttttttttcagaaactgatcagaagcgcaccaaactttgcagggatactgaaaggaagagaaataacctataaagatattatctagtcagttcatttaaataatttttat

SEQ ID NO: 39185 - DNA, 1054 bp, Heterodera glycines
gcttgctgcctgcggtctgctggtgtgttgagtcccagagattgaaatgcttctttctatgagtctcagagattgaaatgctgctggtgggttgctttccagagattggaatggcggagatttgagtcccagtgtttggaatgccagagatttgagttccagtgtctggaatgccagagatttgagttccagtgattggaaagcctgagaattgagtcccagagattgaaatgctggtgggttgagtcccagtgtctggaatgccggagatttgagtcaccgagattgaaatgctggtgggttgagtcccagagattgaaatgctggtgggttgagtcccagagattggaatgccaatgaaagttggtgggttgagtcccagtattggaatgctggtggcctgattttcagtgattggaatgtcattgaaagttgttgggctgagtcccaatgtttagaatgccgcagatttgagtcccagtgtttggaatgccggagatttgagtcccagtgtttggaatgccagagatttgagttccagtgattggaaagcctgagaattgagtcccagagattgaaatgctggtgggttgagtcccagtgtctggaatgccggagatttgagtcaccgagattgaaatgctggtgggttgagtcccagagattgaaatgctggtgggttgagtcccagagattggaatgccaatgaaagttggtgggttgagtcccagtgtttggaatgccggagatttgagtcccagagattgaaatgttggtgggttgagtcccagcgattggaaagcctgagaattgagtctcatagcttgaaatgctggttggggtgagtcccagagattggaatgacattgaaatgctggtgggttgagtcccagtgtctggaatgccggagatttgagtcccagagattgaaatgctggggggttgagtcccagagattgaaatgctggtggcttgagtctcagagattgaattgctgctggtggcttgagtcccagagattgaaatgccattgagagttggtagcatgagtccc

SEQ ID NO: 39186 - DNA, 1139 bp, Heterodera glycines
aaacccataataattttttaaaaattcaaaaaaacatttccaattcgatcaatttgaatcgcttcaaagtctaggtagcgaagctcccaaagcgcgaagcgcttttccacagctaaatagccgacggtttacgcacccgctagtttatatataactaaagcaacatcgagtttcattgctaaaactaaaatctcgggaaccgctggcgggaggggctcgggagtgtggcattgcttaagcaactttttgaggcgcatccaggaaaactataggcattccgttccggaggccaactgagcgccagcggcgctgaaacggctttttgaggcaaaatgcatgcagttttggggccataacttttttctggaaacctggagcaaaaaacttctgctgggaggcgactaagttggaatgtttgggaaatttttttcttcttggccgaagccctaggatcaaacgcctggcctgcaaaaattcgcaaaaatttttttccatttttccatttttccggtttttcgggaataactcgctgggtgttgcgctgagcgtgttggcgccgctgaactttttgtacagctcgacgagctctatcttgtcaattttttaaatttctgaaattttcagaaattttcgagctaggccccctcatcacttttgaggtttttgaattttagtattttttgcagatttttttcggcaaaaccaagaccactttcaagcaaccgtttttcacgctctatcgattggtggcattttcagaaaaatttttcaaaatttttttggaaatagaaaattttggttgctaggcctcaatttcagttctggctcaataactcgtcaggagttgattttagcaaaaaatcttcttagacaatttttgtagggaattttaagccctatataatgtgctttatatcatctcattatcacgagtctaaaaaaagttataaaattaattgtgattttgaaattcaaaaccataggggggaccccatggttttgcatttcatgaaaaatttttttgcttctaaattagccaaaatgcatttttatggcctaatttatggtgctgaactcgaatatatactttatttttggtttcagactttttggtaagtgtttaaaattttttcaaaaat

SEQ ID NO: 39187 - DNA, 1225 bp, Heterodera glycines
  unsure (1)..(1225): unsure at all n locations
tgatccggctcaaaagtcgctcataatccttgccgggtcaaaaccacgtggactcgtctaaatcgacatttatctgacagccgacttttctaacaacttcaaacgttccatcaactgccacttcgtctctgtaggcccggagggtgttaatcccaaattgtgaacagaaaataatcattcggcttcctttgagattttggttgtagatgactcgatcaaccaactgatcgggtattacaatatcatgggttggaacagcatccaacccagcgtcgccttcctcaaataaacaataaaaataatttttttctatattttatttttttgaccgccatttgttgctttcggcggtgataattatatgtccatctcatgcaagaagggcctggtgcagacgcaactcgaactttaagaggcaaattcgaacggacgtcactgacaatatttcggcttgaagttgggtattcgctccttgcttcttggcgaagcctttcagctgatactcgaatctgtccaactttgtcttatacccttagaagcaatttatttgtaccaattcagcaccaaatgtagccggatggttgtgttcttttgtaaccctgcccaatttatactgtactccatcagcttcttgatgccattcgatttggacgcacgcacgaccaggacaataaggagaacggcaagggcaccgccaatattcccacccatctttgactttagataaagccttaaaatcactgatcagatttttgacattagtttgttggacctcaaatgcatactcaaacccggcatttgttagcaggattttcccacgcgatgatttagccgcattaaaacgcaataaagccattatttgactaagaaaaaatttagtaaaaatggaactatggattgaggagaatgataatatggacgaagaatgaccacaggtcattcatattataactttactcgaaaatcttatctaggaaattgtttgtcgagaacagcacagcagcaggagatgtttgcgcagaaaaaattaacgcgataagaatattttatatttttacaaaaaataaccatacaattttagttgtttaatattatttatttatttatttnaattaaatttcttataaattttttatgtatatgaaaataatatttaaaattaattcatatgtgcatatacataaaaatataattttaaaaaaaataatttaaaaaattttatact

SEQ ID NO: 39188 - DNA, 988 bp, Heterodera glycines
aaaccccagatttttgaatccggttttcagaaaaaatgccctgtggtgaaaacaatatttcacattccactccataactttgtgagttcggcacggatcgagaccgggataagaccatggaaagagcagctcgagctctacaagaaggtatggaaagaaaaaatagttatttctgggactttttcagaaatcagaattaattctccaatgtggcccaaattttaggcccccagccacagccccttgcttctcccagttttaagtcttggatttgtcaaataaattcaagacttcaaattaataatcaaaaattctcttaaaatttttttgaacccaattcaaaaaaggaaaaaaatttgcagtcaaaaaattattcgaatttctccaattttgtttccataatttccgaaagttattcggtatcataatgccaaaacaaaacgaaatcgttttaaaatattcctttctggacttgacttggtttcttgatatcgaagctgttttctacgctatttctaaaacggttataccaaaccccagatttttgaatccggttttcagaaaaaatgccttgtggtgaaaacaatatttcacatttcactccataactttgtgagttcggcacggatcgagaccgggataagaccattggaaagagcagctcgagctctacaagaaggtatggaaagaaaaaatagttatttctgggactttttcagaaatcagaattaattctccaatgtggcccaaattttaggcccccagccacagccccttgcttctcccagttttaagtcttggatttgtcaaataaattcaagacttcaaattaataatcaaaaattctcttaaaatttttttgaacccaattcaaaaaaggaaaaaaatttgcagtcaaaaaattattcgaatttctccaattttgtttccataatttccgaaagttattcaatatcataatgccaaaacaaaacgaaatcgtttaaaa

SEQ ID NO: 39189 - DNA, 885 bp, Heterodera glycines
  unsure (1)..(885): unsure at all n locations
cattggtgacgaaacatgtcaaaatantttgtgccaatcccttataaaaaataatantttgctaaaaatacaattaaattttgttagtacaaaaatacaaaacggaaactccgttatttttggaatttttctttttaaacaccattaaacaattgttttaaaagggcaattaacaaatgtccggttacgtgccgaccgtggcgatgttcgccgtcgctctgctgctccactgcttcgcgctgtcccgcgtgttcatgatcgtccacttcaagctgaacacgcacaaggatatgtcacccttgctgatggcgctgatcctcaactggacattgttctgccttttggtcatcccctacgaggtgtacagcatcgccaactggcgacccacccaaggcatgtactgttctgcagcattcactctctattgtcgtccgttgttgggagaagtccgagaggcaagagtcccgtcccgatctcctaatcaggctccatctcgggactttttgatttcgggaatcagttcgagagtgaggaagacccactatttttgaaattcttctacaatatgccagtctcgagaacttttcggtctcgaaagccattactgagcagaaatggttatttgttatcagtgttgaagtactttggcattaatctggaggctttgccttttttctagagaagtcagcagtcctttgatcagctagcatttgattaaccaatcaatcctttttggattttgcccattgtttcgtccccccttagagttgtaccaccccggcttggtgctgtttgtcatcgctttgccatgccatctctttcttgccatgatccccgtctcggtgttctttctcactttcgaccgtatctgcatcatttactatg

SEQ ID NO: 39190 - DNA, 430 bp, Heterodera glycines
aaaatttattttttacttttttattgtctctcctccacccgaggcaacgatttttcatttattttctactttttccccattaaatttgtttatgcgtttatccgtccgcccgtcccccttttttatctgtcccccccccccccggggacgaagcgacacacacacaaaaaaaaaatcctattgccccctccgccccccgcgccgtccgcgtcagctttatctcactcaccgccgcccgtcccttccggcgctgtgtcccccgctcctcaaaaacatatgtttatgagaggcgcgccgagaggagacgagacgaaatgtgaagaataatgactccgctcgccccggccccgagggtttaatgtgaaaaagcggcggtgaaaacggacgacggacgacgaaacacttgagcccccaagggacggggggaggt

SEQ ID NO: 39191 - DNA, 1203 bp, Heterodera glycines
  unsure (1)..(1203): unsure at all n locations
atgactgatgtggcaaaagattgttgcgatattcaactgttaatcaattttcggtcagacaaagcggcgaaaaatgtaattctcacaaattgagtatttattacgttcattttaggaattttttttttgaatttagtgaaaatccgtaattatgttaaatcatcaattgttttaaataattaaacttatcacttatgaatatttttaaagtttttaatttttaaataattttgttaaatttgtgaaatttttgatttatatgtatagcattttgtttaaatgatataatattattaaaaaataaaattaaattctaattaggcatttttaaacaattaaattttattctacaaaattgtttaataattcacatttaaaactgagaatattaaaaaaaatttatccctgtacatacaataaactgaaatctgaacaaaaggcagtcaataccgcacattctgatcagtaatgagtaataaatgcttcatctcttcccctccccaaaaaatattacgtgaatgagtgatcaattgctttccactggcattaaactcgcatttggccaacatatccaccaaatcccccgaggggctatgtgttggattaagctatggatggatgaatcacacaaatccgcacttcttcaactgacgattggatggatttggtttctgtctcggctcatctccgaacctcctctctcccatcaatccattcatctttctgtgccacagggggacgaagagatgaagccgcttcatccattcactcattcattgccttggcccccatcgggccaatgctttggcggcgaacaaatgtttagttgagtgggtcttcctcgctccctccctgctgctgttgcttgctcagggccaacatttgctggcatatccgaggagcgtatgatggcccatgaaatatctgcggaaatgcctcttccaaaacacacccatcccaaacttttataatggcaatgatcaaacaaatgatttgcttttgaatttttacgtttgatcaagttttttaaataaccctcattaaagcatttaatttttttgaataggttatttcggcttttaaatgattgggactacaattgaagaaatttttatcttctattttagttttaaatttttctgtttcaatcgttttttttgaattacaaaattataggtaaagttattctcanaaaacaatttt

SEQ ID NO: 39192 - DNA, 1116 bp, Heterodera glycines
  unsure (1)..(1116): unsure at all n locations
aaaaaaaaatttaaaanttaatcatataaaaaaaattattaatttattttaaataaattttacattatatatttagtataggaatttattgttatttggtattttgtagtcactgaantcattttaatattcctttagcnaaccatttaatggcgaactaattaatcaattattgaacagcaggtgttttacgcgaaattttatctatttgttaagccanccgacgggaggattacgtcaaaagccgaaaaaggaggtcgtcgcttttgcgtttctgcgaaaattcgcgtgccaaaaatggacgcaaataaatgcccaacagcaaacatgccgataatacggggaacttattacggcaccagaagtaattcaattagataaacaatattttaaccccggggcggcggcactcatttcgcgtcaccaatggcacaaaaatagaaaaatatacttaaaaattataaaaaaaaatgttgggctatctttggcagtgtcggcacgaaaagatacaaaaaaacggaaagcgaatcatatgatgtcacgaaatatatgcttgaaaactacggtaacaaaaaaaaatgaaaaattagttcagcagattataagctggccgcgcgaaagtcgaaattttcagagacccaaatatatgtgccattttcatcaaatttgtgggccctcggttttttttaaatttcaaaaattttcaattttagttagggtctattcccgaccctggtcatctgtggcatatcaaaatcagatgagagtgccaattaaatgaatgagtttctgtttctatgattttttaaaaatctattgtctttttctctttcctgacgagcgtatttctcgccgacattttttaaagcggagtaggacaaaacgtcgtcagccgaaacgtcgtcgaacgaatttttcgaccataacttttttctttctcaaccaaattaaacattcttggtattattcgaaagcattcgaaaaatgctattagcctgcaaattttcaaaaatttttatttatacacaaaaaaatcagagcaaaaaaaagttcgaattactgggtttttgagttccttctggtcataacttgtttgaaagttgaccaaaatttttg

SEQ ID NO: 39193 - DNA, 1263 bp, Heterodera glycines
tttgtcgaggacctgtaaaaatttgatttttaattgcattgaagtttttatcaaaatttcatcactttttggcgtcgaatcgactctgcgaccatgctcttggcgccattccttccgtttttgtcttgcttctgcactagaagcccaaaatggcttttggtgacttgacattattaaatgaatattaaaatttctggaaaatgagtcaaatgttagtccctttcaaaaaatttttctagctttttaaatttcttgaaattttgcataggcccatattttgaccccctctatcgaattctcttttgttatttgaaagtttcttttttaactcgagatcggctcttcagtttttacaagggaaaatctcggcaaaattttttaattaatggggttttttggcgttttgtctgtgcgcacttttggtcaaattgatgatatatggcccagaattatttgtacaaaaatgatgtgctgaagataatcgattattgaatttttatgaacatttctggcaaaacgcaaaaataggtgaaaataagtttttcaaaaaaaaatagttaaaaatagagtgccacgggaccgggaatttttgccaaaaccgggaccgggacttgccgggacctgagaagccgggaccgggacctcgattttttttcgggaccgggaccgggaccgcaagaaaaaccgggaccaaccgggaaattttaaaaattcaaaaaaattttaaaaattaaaaaaaaattcaaattttaatttatatcaagtgaaaataatacaaaattatttggttttttatttaataaattaaattaatgaaaattttcaaacaaattttcttcaattatttcaaacaattaatcatttttggactaaatcatcgaatattaatagaaattcagatttgattttcacatcactttttttcggagcgctttttcaaaaaacttttgggaaagaaggggtccggcggtgccgataggcgccgcagggggaaattttaaaaatttgggtgcaatttgttaacagattttcaacaaaaaaggttggtttttgcgattattaagctcaattggtaggattttcatttaaaaaatgatagaatatgtatcaatttaaaaaaaaactatgaggaatcatattttctttataggaaacccacgagtatacaaaaaaaaaaaaattgaaaataatctaatttctgtagagggattgaaccaggggaaaggagaagggaaagtcaaggagactagccattaggccatt

SEQ ID NO: 39194 - DNA, 323 bp, Heterodera glycines
cagagaacactaacggaaatttgtggcggaaatgcccctttaaagtccgtccaaatgcgttggcagtgcttccagcgactgaagacgcccctccgccagcattgccagtgccattttgaggcctacaaaattggcgctgagatgggccaccaattggactccgaattcggccacactcggcacattcgccgttgggccgggggaggcgaaaaaactttggcgtctgaattgggcgtgtatccatttgtccaactgaaatgggcataattcaaataattctaaatttgtgttaattctcaaatcgccggactgccattgacgcg

SEQ ID NO: 39195 - DNA, 1025 bp, Heterodera glycines
  unsure (1)..(1025): unsure at all n locations
attaattcttaaatattttttcagaaagggttctgaaccttaccaaattttatttacatgttagtttaggcactctgatgctttttctatcaaaaagggagatgaataaaatttttaaaaatttttaattcctttttaaacaggccaaaaagtttaggcttaacttttttttcagaaactgatcagaagcgcaccaaactttgcagggatactgaaaggaagagaaataacctattttaaatattatctagtcagttcatttaaataatttttatccaaaaaatttttttttgggttttcggggcagtccccctgaaccgatgcgcccagatttatggggagaccgaatccttcgggaatagcttccctatagcctgtactttaattctgcgttggatttttgctccccataattgtttgagtaccccaaacggacacttgaaaaaatcgatttttttgttttcggggcagtccccccgaaccgatgcgcccagatttatggggagaccgaatccttcgggaatagcttccctatagcctgtactttaattctgcgttggatttttgctccccataattgtttgagtaccccaaacggacacttgaaaaaatcgatttttttgttttcggggcagtccccccgaaccgatgcgcccagatttatggggagaccgaatccttccggaatagcttccctatagcctgtactttaattctgcgttggatttttgctccccataattgtttgagtaccccaaacggacacttgaaaaaatcaatttatttttgttttcgggcagtccccctgaaccgatgcgcccagatttatggggagaccgaatccttcgggaatagcttccctatagcctgtactttaattctgcgctggatttttgctccccataattgtttgagtaccccaaacggacacttgaaaaaatcgatttatttttgttttcggggcagtccccctgaaccgatgcgcccagatttatggggagaccgaatnccttcgggaatagctt

SEQ ID NO: 39196 - DNA, 212 bp, Heterodera glycines
tacggacaaaaataaaaaggcgccttttccaatgcctttctttttccatgttttgtttttatcatccattactgatgctgcctcatttctattattgtttttgcgctttaatgtttagataatattttaggggtctgggtcctttcggtgccgtcgtttcggcgtcagcccgagtttttggattgcaacttttccattgtcaacagaatcca

SEQ ID NO: 39197 - DNA, 627 bp, Heterodera glycines
ttttgcgccagaagcaaaatgcggcagctttaaacactttttgcgagtaaaaaataagtaaataaacaaaaataattattattgtaaaattaaaagtcggacgacgtcggagtgctttttcattttgggacggcgtcaaattgggtggggggagaacagtgtggtccaacccatcgcacgatagaaattgatgagaatttcgcgtgtttatggggctaaattaattgaaaaccgaaagttagaaaatacataattcaatttcttttccaaaaattcaatgtcttttaattggcaaaagatttttctaagctttacacaatttttagcctaaatttgcatttttaagttgtttatttctcaaaaatgtaattctttacaaatctgacattaatataaaaaagactgtgttctcttcgctttactgatttagcaaaattatgagaatctcaatcatttttgcaattttcttctgtattttttctgttgcgcttcgtgactcgtccattttggcaatgcaaaacattcatggaagtgagtgtaaattaaattactatttaaataattaatatttcttttcagccgaatgcaaacggcacattcactgccccgacaaactgttttgcctgg

SEQ ID NO: 39198 - DNA, 500 bp, Heterodera glycines
cgccacctcacagcaagtgccgcctccaccgcccggaacagtgaacgaccattttgctatcgttcaaaattctcagaatggcaaagcgcaacaatctgatcgtaagacggacattctggcacggcatttgggcatgactctgtcccaaatcttcggcaattttacgcttgggcattttccagcaaattcggggaaaaaagccacaatggggaatgaaaaacaacagagtcaagaagtgaaaacagattcaaaaatggacagtgagaacgggggaagaacggacggaggaaaagcggatggaggaaaagcggatggaggaaaagcggatggaggaagaacggatggaggaagaacggaccaagttgtgtcggagccgcacagattgacacgcgtttttgagaagaaaagaccgtgaaataaacccaaaccgagaagagataatatgaaaatgcaatatgtacgccaacagaagacattgttgtaattaaaatattaattac

SEQ ID NO: 39199 - DNA, 644 bp, Heterodera glycines
tggattgagtcccagtgattgaaatgttggtggattgagtcccgttgattgaaatgttggagaattgagtcccagtaattgaaatgcggaagaattgagtcccagtgattgaatgctggtggattgagtcccgttgattgaaatgttggtgggttgagtcccagcgattggaatgttggtggattgagtcccagtgattgaaatgtcggagaattgagtcccagtaattgaaatgcagaagaattgagtcccagtgattgaatgctggtggattgagtcccgttgattgaaatgctggtgggttgagtcccagtgattgaaatgttggtgggttgagtcccagtgattggaatgttggtggattgagtcccagtgattgaaatgctggtggatagagtcccgttgattggaatgttcctgcatagggcctcagtgtctcagagacgggctgaatgtgggcctctaattcttcggatgttgagagtttcccaagtttatgtttcttaaatgactaaaccttgaaacaattaaaatattgacaaaattattcgcatttcagaaaaaaatatcttgatcaaaaagttcaacataaattgacttctatagcaagtgattttctatcgccctgttctataatcattgtt

SEQ ID NO: 39200 - DNA, 320 bp, Heterodera glycines
tgcataaacgaaaatttattggcgaaattctctacaagcgccatgtggcatttgcggtcggcagcgcaccgtcacattctcccaccgcgcctatgaacacacacaaaccgatgctcagttcatcactccttgtccaatggcggcctttgctcaatggctgctcagcgaattcgatccgcgctatcccacaatgctcttcgcccatttcggtggtcgctttgacaacattatgctgtttcggcagttcttcctcaacgggttttgtccacagatgatccgacgtggtaacaaattatacgaaatgaaaattgcgaggggcg

SEQ ID NO: 39201 - DNA, 495 bp, Heterodera glycines
aaaaaccaccttatagttcatttaaaaatctgaaataattcatgcttgcttaacttttgatactgatcaaaaaagatttttacaccaacttcatcagatcactccttcatggtgatcaggaaagtcaaaaatggcttgaaattgggaaaattttagaaaaaaattcctaggggactgggaaaatttacccctgggagaagggagtgggaaacatgatttcaaaattttcaatgttttctagtctaatctactcaaaacggttcagaattcaataaaaataacattcacggtgcgaaaaaaggggtttgaaaagtttattttgaaaaaaagactttacaaaataatacccctgggagaagggagtgggaaacatgatttcaaaattttcaattttttctagtctaatctactcaaaacggttcagaattcaataaaaataacattcacggtgcgaaaaatggggtttgacaagtttattgactttacaaaataata

SEQ ID NO: 39202 - DNA, 708 bp, Heterodera glycines
gggggactgcccccgaaaacaaaaaaattcgattttttcaagtgtccgtttgggggtactcaaacaattatggggagcaaaaatccaacgcagattaaagtacaggctatagggaagctattcccgaaggattcggtctccccataaatctgggcgcatcggttcggggggactgccccgaaaacaaaaaaatcgattttttcaagtgtccgtttggggtactcaaacaattatggggagcaaaaatccaacgcagaattaaagtacaggctatagggaagctattccggaaggattcggtctccccataaatctgggcgcatcggttcggggggactgccccgaaaacaaaaaaatcgattttttcaagtgtccgtttggggtactcaaacaattatggggagcaaaaatccaacgcagaattaaagtacaggctatagggaagctattccggaaggattcggtctccccataaatctgggcgcatcggttcggggggactgccccgaaaacaaaaaaatcgattttttcaagtgtccgtttggggtactcaaacaattatggggagcaaaaatccaacgcagaattaaagtacaggctatagtgaagctattccggaaggattcggtctccccataaatctgggcgcatcggttcagggggactgccccgaaaacccaaaaaaaaattttttggataaaaattatt

SEQ ID NO: 39203 - DNA, 656 bp, Heterodera glycines
  unsure (1)..(656): unsure at all n locations
tttcttgtcaattcagaataaaaaaaaatatcaaaaacttataaattactattctataaacaatttatatttttatttgaaaattttatatttgaaaaaacagattcaactcatattttagatttttcaaaatataaaaagaaatcctaaatattgaagaaaatatgaaagtttcatataaagaaaaattcttgaaaacacacaattaatatgaacttatatatatttgcttcttattaaaaaaaaaactttgaaacataaccttaatttaacataaaaaataaattattccgaaaaaaagaatatttttgaagagattaatatttgtcagtttatcatgtatttatgctagaaattttggatgtatgacatacaattttacaaggttatcaaaaaaaattatcactctactaaaaataagctttgttttgcacgattttttaaatactttattaactgtttgataaaccctcaattatttattttactcgaaaatgtttgattgttttaatttcgaattanattataaatccccttttttataagagattcagcaatgtttagttaaagtgtgtcttaaatccttcattcaagattnncatttaataanttgaatttttgttttttatagagtttaaattaaataattttccatg

SEQ ID NO: 39204 - DNA, 524 bp, Heterodera glycines
acatattttttcctggattctccatagcctaatttttgcactttttcgcattttttcgtttttattaaatgttccaaaatttagcaatttttcgtaatattttcatttttttttacatattttaagaatttttgaaaatttagaaaactatcttgtaaaaaaataagttttgcaacccacaaaaaaaaactattttagccatcaacaattcacaccaaataatcaaaattcaaagaaatttgaatgaccatttatttactggctagcttaaggcattaagcatatttagaaaaaaaaaaattatggcccattaattaagcaatttcaataaatggcacagcgtttttcagggcacaaaagtgcgaatcatgagcttttgatctcaacatttaagtttttagagcttacatcctacctattattagcaatttatatgctctaaaaatcgtttggtcctactcaatatgttctttacattttgacaccattcacttttaaaatttaatttgtaattgccccctatt

SEQ ID NO: 39205 - DNA, 467 bp, Heterodera glycines
taaccataaatttttaaaaattttgaaattgattttccatttttgaaagacaaaacttttttaagctggtagcatccaacatttttggtatattcgaaagcttaacatgtttagaagctttttctaaactattgcttcgcgattagacaatcaccaaaaaagttatacatagaattgcaaaaaggtcgaaattttggtttttttctccgctttttgccaactgaaccttcaaacgaaatatcgaagtgggatttttgcgatttgttgaattttttatttaaacatttaaaattcaaatctttaatattccaaaaaataaaagaataattaaaataaaaaacatgttccttttaaataattcaaatttaaatataaaatatttattgttcactatttactactaaaaatgggaatttaatttttttttcccttaaatgtgagaagcatgaattacataaattttactt

SEQ ID NO: 39206 - DNA, 611 bp, Heterodera glycines
ttgaattcatatattttttttcaatttattttttttttacaaaaatttcacattattccatggtggctcaatcggatttgtattaatagttgaatttaaggaatacacctatttcctggcatatgacccattttttacatatattttttttgcaatttaattataatgatcaataattcctatatatttttttaaattaatctttttgttcaagtctgttttggtatgcgaaacggccatggctcgtatacaccggtatacttaaataatcatatattatcatatttaagttaaaaaaaacagtttaatgcatacataattaactaaattaaacaaattaagctattattttgctggccccaaaaaagggatgcagcaaatttttgtggacaatttgcccggtttccctgacaacatccgaatttcgcgcagcgcagattcattttatgtggcgttacctttccatcgaagtgaacagaagccacacatttttgacagacttggcccatggcctttggcaaggaaattcattggcgaagtgtgcttttcaaatgaatggcttagcagaaaaaaaaactcgaattgagagaattatcaattaaaaaaactga

SEQ ID NO: 39207 - DNA, 431 bp, Heterodera glycines
  unsure (1)..(431): unsure at all n locations
ttattcatgagaacggatccaaccaaggacatcctttgaattgaatcctagaagaatcccacccctattaatacatattaatactgcgccctgaaaatgcgtcatattaatttcgtatttcgaaaaaattttttcgaaactatatctatttctaaattggtcaattcaattttctgaaagttaaaaaagttaaacagttggaaaatttccaaaatcagatatcctgtaattaattaagcttaacattacaaactatactactaccgtatctcgttttaaaaaaatcctgattcaatgacgcattttcactgcccattttccggtcatagtttgtgtacatcttgccagtcggatgttgcgatgagaatcgcgcctttgcaagtgtttgtgacnccagcgggggcatatccatccgtttcgacattttcgca

SEQ ID NO: 39208 - DNA, 488 bp, Heterodera glycines
  unsure (1)..(488): unsure at all n locations
tgcaggtcatantttttaaaaaatacataagattaaaatacataagagtagagggagatgacacattgaactttgtcaacacgaacattgataataattatataaagaaagcaaagtctccgcaattaaatttgggaaaaatattggtataacttaactgaaaatataaaaaactattatttaaattaataataaaatgaaaaaatattttttaaaacattggaaaaatccaaaattctttaaaacattaaaaaaagcatttcatacattcatcaaatgttagacatgaaataacagttcaaatgaattaattaatatttaatttcaattaaaacgataataaaacaatatgattttttgtaaatattatttataaataaaataaaaaactattataaagcataattaatataacaacaaataatgtcagatatcaatatgaaaatagaaatacataaaaatttaatttcattttaatttaaatataa

SEQ ID NO: 39209 - DNA, 1369 bp, Heterodera glycines
tgattggtcctattttattacagtatgtttttagtctcattttggcattataaatcagtggagagtgcttcagtgatgaatacaatttaaaataaaatctgcagcattaagtatttcagtagaaaaactcaaaattaaataagaatctcgttcgtcaattcatttgaaaagtttaaaaaattaaataaaatttagtaaaatttagcaaaagtcgtaaaatgtgaatatactggagtatatacttctgggttgccacgggtcgagaaaatgccgggtttcggattcagtcaagggctatctaagggggggggggggggaattgtacccctcccgaaatgaatcttttaatgaattatatcccatttcacgccaagcttctataaagggacacgaaaaaatctggaaaaagcttaatgagatactgaacaaatacaaggctttatataattaaatttatctacgcatagaacattcgatcacaaaatttcacgaatgtgacaaaaaagatttcctaaaacgatcccattagttttttcttaatgatcaaaagaattttttaaccaggggaaaccccattaatttttttaatgaaaaaaaaaattaaaaaaaagacgggggaaaagggcaaacttttggcccaaattttggatggggttttcaaaattccagaaatttaccccaaaccgccccaactttttctcaaaaagtccaaattaacccccttttttaaaataaaatttaagggtttaaacggttttgaaatttttaaaatctcttttaaaaaaaaaaaaacctttccccccaaaaaaaatataattttaaatttttttaaaaattttttccccccccggggggaaaggggggaagggggaatttttataaaaaaaaaaatatttttttttttttttttttttttctcaaaagccttttttaaaacgcccccccggtttttttttataaaaaaaaacacaaaaaccgccgaaaaaaagggggattttttttttttgttggtgttggttttttttttttttaaaaaaaaattttaaaaaaaaagaaaaaaaaaaaataattatttaaaaaatattcttctgcggggaagaggggggcccccccgggggggggggtggtgtggggttttttttttttttttttttttttttttttttgggggtgggggaaaaaacaaaaaaaaaaaaaaaattttttttttttttttttaggagagaaaaaaaaatttttttttttttttttttctttaaccaccccccccggcgcgaaaaagaaataaaaaaaaccattttttttttttttttttttttttttgggtggggggggggggggggggggggggtttttttttttttttttt

SEQ ID NO: 39210 - DNA, 475 bp, Heterodera glycines
gataagcggcggagtgtccggtcgcccagtcccaaaactgcttcgggaataccgaatcgagcctaaagataatagaaaattaaaaaaaaacgattactagtcggtcaccccaattaaaaaaacgattactagtcggtcaccccaattaaaaaaaacgattactagtcggtcaccccaattaaaaaaaacgattactagtcggtcaccccaattaaaaaaaacgattactagtcggtcaccccaattaaaaaaaacgattactagtcagtcaccccctgattccgatgaaaaggaatggccaagtgcgcctccgctcgttccgcttcgcccaattcttggctcaattcccattgaagtcgcctgctgtcgaagtggaactcgcgttatgctattttgcttcctgggcggagtaggtgttctgtttttgacggcagttgcgtcagtcgaatttttgaagggaatggacgaagtgcca

SEQ ID NO: 39211 - DNA, 1177 bp, Heterodera glycines
  unsure (1)..(1177): unsure at all n locations
tacgcatgttataagaggaacaaaagtcgagcaatgcgcatgtttaccgtggggaagagtactgtgcttgtacggtaggcatttgatacggtaaaactgttaagctgtgccatcttttagtacaaaggtcaagtgccgaacgagaaattcggcattgtttttggcacattcaaccgaagtcggccgatttgtctgagggaattgcaaaaatttgcatttgtaaaaaataataaaaataataattgtatttaaattttattttttgtacagatgccaggctgcggtaacaaatattatgaccatgtgaagcattgtgccatggtatgccaatatcatataatttgtttatttatttatttttacaattttaggtcaatttctatganaatgaaccggacaaaaatcctaaagaagatcctccccaatgacgtcgtaattaatgaatatttttgtgcccaattttttgtcccattttncgcactctcgcacttttttgacggatgcatcacccgggcaagcaaaaactgtacgggaaaatgtgaaaattgattacaatgaaacctttccaattggccaaatgctattggggaaaaaggcccccaaaacacttttgaggggaccgaaatccgaaaaacccagtttaaattcccaaaaaacccaattttttccccccccccccaagggggaaaatttttcaaaaccccaaaaaaaatttttttataaaaatttttataaaaaaaaaatttttcgggtttttatttttgttgtataagggggccccttaaaaaaaacaacttttttttgggaaaaattatatttccaaaaaaataaaggggttttaaaataaaaaaaaaatctctttctattttgggggggggagaacctccttttttttttttttttcccccccccccaaaattttgggggggggcccccacaatttttggggaaaaaaccttttttttttttttttctccacaaacaaaacaaacccgtctgggggggggggggggagggagggggggcccccccccccccctttctcccccgggtgtgtaaaaaaaaaacagccggggagcggaaaaaaaaaaaaaaaacacttttttttttttttttttaaaaaaaaaaaaagggggggggggggggggggggaaaaaaaaaaaaaaaaaaaaaaaaa

SEQ ID NO: 39212 - DNA, 289 bp, Heterodera glycines
tgctccgatttcgttgttcctcctccccatttgcattttgctgactgtagtctaccgtaatggtactgatattcctttacagtactcactccccacatggcaattgtcgctggcactccgtcctcacaatgtccaaatcggccgaactttccaccacaattctaaaaaacagacaaaaaattaaactaataaaatatggaccaaaattcaatccaattcagtcaaaattctcaaatctctaaaagttgtctgaaaaacaatcaaaatttgctcataaattaccccgact

SEQ ID NO: 39213 - DNA, 560 bp, Heterodera glycines
acgacggcaaaagcagaagcgaaggcgactcggggaacggcaatttgtcggaggagccgaagagaacggcaccgatcagcagcgaattgagcaaattgaagcagacggacagcgcgaggaacagccgacgctggcggggcagcacaaagaattggtaaagcgtggagatggccctgggggggaaacagcggataaaacggacaaaaggggaggggacatttgaacaccagcagcagcagcagagacaattcgtcactaatgcgttaaaaataaactatccgcttttggcttgcttattgaatgaacgcacccaccctcctcgattgacaaactttgaattttcttgatttttaaaattttaatcgaggctgagaatgaagtgggagaaggggaagtgctgtgcccagcagcgggatgaatggatgtgatgggactgaaatggcggcataatttgccactttaatcccatcacaatttgtctctgattcggcacaaaattgaatttgccagtacattgaggagcaaagtgaggacagttcggcaatgcgttcctgcttaat

SEQ ID NO: 39214 - DNA, 534 bp, Heterodera glycines
tccccccccccgccctcctcctccgccgccgcctttcccaaatattctccgactggcaaaatccaaccgcaaatatttttctaggccataaaattccgagcaaataataataatacaatgggaacaaatatttttggccaaattcgtaactttatgttcctctcatggccattttttgtgaatcattcgcccatttttaaattattacaatttcaaatggtcattcatttgctgattaattaattaattatgtaatggttcattttcccattcaattacatagctgaaatgcttaaattccaagtgacttcctccgcttcttcttgctccaaccgtttttctccctcgccccaaagactcagtcaaatctcttcttcctcctcctcttcctcttcttcttcctctttctcctcttcacatccctcggcaattggggaacacaacgtggaccgatccatcgacgaattggagggatttatcgtacaacaaatggccaccccagcaccgtaccccactgatggcaaatccttttac

SEQ ID NO: 39215 - DNA, 326 bp, Heterodera glycines
ctggtctcttttcggcgtcggctcgcccactagtcgatgctccttcgtctgttgcattttccaatgcttcttcgccttctgctgctggtgttggtggtggtgctggtgttggtggtggtgttgatggtgctgctggtgttggtggtgctggtgatgctgatggtgcatgtggtgttgctggtggtggtgctggtgctggtggtgctggtggtagtggtgctgctgctggtggtgctggtggtagcggtgctgctgctggtggtgttggtggcggtggggtcggtgctagtggtggcgttggtgttggtggcggtggtgtcgatgat

SEQ ID NO: 39216 - DNA, 624 bp, Heterodera glycines
  unsure (1)..(624): unsure at all n locations
atgacagttcattattgtattaattaatttaatattaattaatttattttaaactcttatctaaaattaaaagaaattattttcaattaattaatatttgattaatcttatcgctcaaataaacatatcaaatcttcaattaattaattattccacttaattactaaaaagcatttcaatgaattgtatataaattcttatttaaaataacgtaaagaagaattgaaaagattaaaattcaaaaaaattattaaaaatcattttgatgttacgaaattttccatcgaattgaggataagaagatgatagaaggaaatgaatgaatgcttttcctcaacaattttattcattaaaaattaatcattttgttagcatttgctaaaataaaaatggcattgcgctgcgctgcgccgcattcattgcgctggcgcttcttttttttatgtgcagcttttgcccgtgccactgattttgcccacttacacataaaatatgccatcccacacattcattcatgcacattcaacatgaacaaccccacacaacccacccatgaggtggcatccatgtaaaataataataatgaaattgtgaattnggcatttgtgaggngggggggggggg

SEQ ID NO: 39217 - DNA, 582 bp, Heterodera glycines
  unsure (1)..(582): unsure at all n locations
cattagcaactttatattcaattcaatattgaacaattttcattcttggccacctgtggaaaatggaacatatttctacgcagctttaattttttaatacatgcactgtgtaacaactttcgtgtatataaagtttgaaatcgtttattttgatgtatttattttagttataatgatttttttgttcatttttttaatttgaaattttaaaggaaagaatgtcaaattttcggaaaaatataataataaacttcttgtttaaaacatataataatttatactattttttatattaaagcaagagaattgtgaagtaattattatgtttttcaatgcatttgactaattatttacgaaaaatttaacaaagtcaaaaatataacatataatctgaagattaattgctaaataattataaattcctttttatataattcatatttttaaaatatgtcaatttggtaatacgatatgataatttaattgattcattanaaattagtttttcaatttataaagcattanngtaattgaaatttttcatcgaatgaaaaaaggatgaaactttaacttgtcgtagtt

SEQ ID NO: 39218 - DNA, 601 bp, Heterodera glycines
  unsure (1)..(601): unsure at all n locations
ttttaattgaaaaaatttttgatttaaaaaatgtcaatatttagctaaaaaatattaaaaaggaaatgctcctcattttcaacagcaaccagtgaataaaaaaaatttttgttcaatttttggctttaaattatgtcacttttcctcactattttagttaactagtttgagatttctcgtcaataaaagttgcggccctatttattacatcctattttttcaaaatcctattcgtcaaatcaaaccaacacaccaattttgggtatgacaaaatattaaaccaaaatgtttaaattaaaaattcggtgttaataattataaaagtttttgaaaatacctaattataaaaagaaaccatatctgttcattaaaatatgcaaaaaatagtcatttttggcgaaaaatggctaaaaattcctgtaaaaagactcttccctaatttcggatttcaaaaaactaaaagcacatatgaaaaccaaaatttttgaactcagcccctctacccgaaagccanggntgtctggctacgccactgatataaaaaaaggtgtcgactgccgtgccgaaatatgataaaaagcgatggcaacgtcacaaaaaa

SEQ ID NO: 39219 - DNA, 421 bp, Heterodera glycines
attagaccagggctcggatctgtcctgatttatcagatttgtcctgatttgaagggtccaaatctgataaaattaaaatgtcctgatttgtcagatttgtcctgattttgaggtagcgaccaaattttgtcctgatttgttgattctccgaaaaatctgtcaattttctttataaattctgattggcgtactgtttaagaaaaatatttttaaattttgcattatatttctttttttgctgttaattttggctaattatttttgtatttgttgtttttctcttttgtttttaatttaacagctgcactaatactaacaaatggcaccgcctaagcgcaaaaatgcttttaaaagtgaatatgcaatgaatttcagaggatcacaaaaagccaagcaggagatgaatttgcgcattgcatcc

SEQ ID NO: 39220 - DNA, 363 bp, Heterodera glycines
  unsure (1)..(363): unsure at all n locations
ttgtggttttttcctaataacttttttagaagctaaaatttttgtttgttttttgtaaggctaatagagcatgtgaagagctttcgaatgataccaagattgttagatttggtcaacaagaaaaaaagttataataaaaaaactgaggctggcgccaaaacggcagcgccaaaacgaccgattcccgctaaatagaacctttatgaatctcaataaagcgaattaaaaagtaatagaaagagaaaaaaaacaagactgcaaaaaaaattaatattcgcttcaaaacaaagataaaaaaaattgaatttctctagaatgccaaaataagtacattaggtagganccaagagcgtttgggccccc

SEQ ID NO: 39221 - DNA, 998 bp, Heterodera glycines
aaggaatggatttaattaaattctctccttcggggatttttttccattaggtcgtccgttagcgttcgattgctctagtcaatttttcaaaatttttgttgaaatatttgtcgtgctctgaagggcgtgggagggggggggggggggcgaaggcccaccacgaggccgcgaagaggccgagtgagtaccttcggtgcaggaaaattattaaattttaaaattttttaattgctttttaaatatgccaaaaaatgtaggcttaacttttttagtgaaaattcgatcactcatattttttggtaattgagcagaagggtcgcaagctttgcagggatactctttcggtaaagtactaatgttacattgatatgagcgctgagttagctgtctcaaaacgaatttttgcaaatcttgagtcttttatttttttatttattttttgtaaaatcaatttttaaatattttttcagagagggttgtgaatcgctgccagttgtactaacatctcagtataggctctgtgatgcattttctatcaaaacgtgagatgaataaaatgttcaaacattcgtcattcaattttaagcaggccaaaccgctctaggcttctttcctttttcgtggatctgatcagacgctcgtccaccttttcagggatactgaaagcaagcgccataaccttttttaaatattatctagtcagtccgtttatataattcttatccaaaacaaatacattttgtgttctagcggcacgtcgtcctgaactcgctgcatatcggatttattgggagactgactcaatcaggctttcatttttcatagcccttaatcaccacagaccatgaatgacgatctatatacactctttgtagatcgccaaaggacgcttccaaaaaggactttcgtcggacgaagcagcaaatttggaccgagcggaaaaattgctgacccggagggggaatgctaagaacttcaacagaatgggcgagaatgtg

SEQ ID NO: 39222 - DNA, 284 bp, Heterodera glycines
ctaagcatttttataagtttgaaaaaagatataagcgtttgaaattttattttttgaataactttttagaacaacatttaagctataaaaacaaacatagaaatcgatgcagaatttttttctctatcgatatacaaaatttgaagcggatttaacgtcagggaaaaaagttaaacgtcacgaagtgaattcagtttgtctctattaacagagacaaagaaatagtacgccaaaaagagagatgtttttttctctgcactctctatttattgacacatgtctcg

SEQ ID NO: 39223 - DNA, 545 bp, Heterodera glycines
cccccctccggcggtatttgtcatcatcactcttccaccagcctaccgcccactgacctaaacaaccgctgataatccatcccatcatcacacggccgaaaccctactaaattgcccgtgggatggtttttggaaggaatctttgggaagtgatcaatgaaaatgaccacctaatgggactaattattagggagggattctcaagttgatttatggggtctttcttaaattgcaattttcgagaaaagccaaatgattgctcaatctgtgccgaacattggccattattatgatgaagaggaagtgatggaagacgaggaggaatattcatacgaagagattgacgaagaggaggaggaagaagaagaggaagtggagaaggaagagaagcgaacagtcgccgcaagggcactgccagcggcgcaattggcggagggcggcggacagaaccgcactgcccagggcaatgatcaactttgccatttggcggatgagtgccgcaggcaatttctgaatatattttaaggggcaattcccattaaaat

SEQ ID NO: 39224 - DNA, 1255 bp, Heterodera glycines
  unsure (1)..(1255): unsure at all n locations
catgaaatttgcaaagaaaaatgttaatgattcccgaggcggaatattgngctctacggagtgcgatgaatagtggtgattatctccaaaatgaaaaagcgagtttagacgcaaaaatttctcagaatttacaagaccccgacataagcgaggacctcaaggcgaagagacatgattggctctataaagaaaggcgtacggtaaaggggatacttgaaaatagaccacagaaggtagtgattgagaatcatgtaccaggtccaaatgttgcaccatatctgggcctcaataaccaatccaaaccacaggagaccgaagaaccacggaaaataattattcctaggaaaagacttaaagagcaaactcctgatcctgaatcagataatgatacacttgaggagttaactccggagccccaaacaacatccacactcaaaacacccgttccgatcaaaactattatacacccgacccttttaaacggtctttttaggtacgtgaaggaaaacaaagatttatttaaaattacggcggccggaaaggtacagtcgaacatgaatttgccgattgaaaacagtaattatagagatgttttgttgtatctcgcagggaagaaagatgaaacgccgcgcggtgcaaaatttctcaaagatcggttactgaaggatccaacagtaaaagacatggttgataaatcaaaggtcatgtggggacgtggaaggaaaaaggcaataaaatctataaaaacacccggcatagtgcgagagaagaaacccttcaaaccactaatatgggcaagactgtagagaaaattttatcgaaaatttattttaatttaaaatctccggcaagttttgctggaattcaaaaaattttaaatgaggccaaaaagattgacccgaaaattacgaccgatgacgttaataaattcctagaaaagcagaaaacatacacgattcacaaacccatcaggaaaagattcccgagactaaagacgataccaagtggcttccataccgattggcagtgcgatttgtgcatatttgaccagttgaaaaggcataacgacggttataaatatttattggtctgcatcgacgtgctgagtcgaatgatcttcagtgcaccggccaagtcaaagaagagtgaggacatgatcgaggcttttgatcgggtgttcgaaaagtctaaaattatcccgatgaaaatatataaaggcaagtgggcttgaattccaagcaggaaaaatgaaaaa

SEQ ID NO: 39225 - DNA, 1462 bp, Heterodera glycines
aaaaatttaatttacatattttggttttggtacattttttgggatttttttaaaatatatttatgtaaatattttgagtattttttgtacatatttttgacatccatattacaattttgcagattttcttatatagaattcgcagccctaataattatttcttgaatacatttatttgggtatttaacaatgggtgtttagcaaatgataatataatctccacaattacccttagtaatattacatatggattaattattttttgcctatttatatgtaataaaatttggtttgattgccaattcaaaaaatattacgtacaatccgaaagaagcggagaaagaaatggaaaaagcaatgtaataatttcaaatttgaatttccatgataattattttgcttttacgttttctaccccgaaaaatttgttttttttaaaagatatcaaaaaattttttataaatcccccccccccccccgcccttcaaaattttgaaaaataaataaaataataggagactcagaattttgaaaattttttataaaaactgatgacaagctaatgtgataaaacaggttaattcttttcctttcagtatccctgcaaagtttggggcgcttctgataagtttctgaaaaaaagataagcctaaactttttggcctgtttaaaaaggaattaaaaatttttaaaaatttattcatctccctttttgatagaaaaagcatcagagtgccaagactagcatgtaaataaaatttggtgcgtttcagcgcttttctgaaaaaaatatttatgaattaattatgcaaacttaaataaaaatttctaaaaatttgatcgtccataaataatttgtaattgatcaggggctcaccaaattttgttttggatacgtatcagaacactacaaatgcttactaattttcctagattttttaaacccggtgaaaattttttgcagacaccaccacttttgcacttaaaaaaatttcaaaaaactttaaaaattcatagaaaatttaaattcataggtactactgctaaatcaacgcagagacgcctttccttgacctttttaggcccctgcaaaatctggtgcgcttctgatcactactcgaaaaatgagtgattgaattttcactaaaaagttaagcctaaactttttggcctgtttaaaaaggaattaaaaatttttaaaaatttattcatctccctttttgatagaaaaagcatcagagtgcctaaactagcatgtaaataaaatttggtgcgtttcagagcattttctgaaaaaaatatttatgaattaattatgcaaaaataaataaaatttctaaaaatttgatcgtccataaataatttgtaattgatcaggggctcaccaattttgcagggaacgtatcggaacactacaaatgcttactaattttctagattttttaaacccggtgaaaatttt

SEQ ID NO: 39226 - DNA, 1342 bp, Heterodera glycines
  unsure (1)..(1342): unsure at all n locations
ccccccccccccccccaacgaganacaaaaaattttcaagcaaaaaagggcaaaatttctgaaaattttacacattttcttatcatattgcatttaattttccaaaaattcttcccggcggcgcctatcggcaccgccggggccccaattggatcataattttttgaaaatttgagcccaaaatggaaaatttgtgatttttcggcgcaaaaccgataataattcctgttttttggcgccggcgctgaagaatttcaacataacactggtgcaaaaaatttttgttggcccgaagagcaaaaaaaaaaagctcttcgggtgccctccccgaaatttttttctggatatgggcctgggcagttcctatttatggcaatcaacggaatgagaataaaaaaatgagacccgaaaaatgggttttcccccattctgaaattttttttccaattccgaacccgttccaatcccttcgtccaccttgtccttgtccagattgttcagccattccgggttcgcctcgcgatagtccagtgcgtatgcgcccggtttctcctccgacaagtccatcaggtgcagaatgggctggtagtcgcgctggaaaaatgccaaaaattgggatttttttgaaaaaaatattccaaacccttaggcccatttgggcaaacgcttgggccaaccgctgctcctggcgcattgtgttgaacagttggaccatgtcaagccgctccacatcctcgcccatcgcaatcggaatgccgttgaggaacagagcggactcgcctgcggggacgatgaattttatttgtaaatgaatggactggatcaattcggaggcatcaatcgtagcaatggggcaataacattttggtctgttttaacagtatgtgttcaaaatggcccaatttgtggggcatttagtagaagagccaaccccgggattctgatcccgaactaaatatcgtcggcaaaatttcatgccaaatttgagtcatcacgtaaaatcttatcccggcctaatttcctatcctaaccgactttttcaaaactactaacccacttttttttggtggtgttttgaatatgtcgagcgagggggggggggggagaaatgggaatttatagtaaacttggttcaacaaaatgccaaattaaaagaaaatttgccaaccctcagacatgtccatttgctcggcccagcgcttctgattttgtgccacctcatcgcgaaatgattgccggacttttgtttggaccaatgaactaaaaaagggaaaattaaaagaggttggcattttgtaaaaagaggggagggggggggcgaaaaaaggtaattttaaagaaa

SEQ ID NO: 39227 - DNA, 530 bp, Heterodera glycines
tttaattttagttttaaattgatttaaagaatttattttaatgatttctttatccagctcgattccacaattttgtagccctccccgcaaagggaataaattttttgcctaatttatattttgtgttaaacctataaaaggggacattaaagcgtttagaaggtttgaaaatttttaatatatctagatctgttcggccataaacaatcttatgcgccatgaacagatcaaatagctttcgccttttctcaagtgttggcagttgcaggtattctaatcgattttggtatggaattggcggaaggctgcatttaaaaaatactcttttggtgaaatatttttgacacttttcgatttttttaatatttttttgaagagacggattccaaacctccggagcgtattccaataagggcctaatataagttttatataacgtaatccaaatcttagatgatttggatttaattattcggaaacaggaacgcatacgtaaatacgcattcccttgtatatgatttatatgatcg

SEQ ID NO: 39228 - DNA, 522 bp, Heterodera glycines
  unsure (1)..(522): unsure at all n locations
gagccgctgattgcttggtcaatatgaaagtgggtttaagggcgctttgaatgcccctctcaagctgctgtggcgagagaaaacttccctttggcacacggaaacggtattttcggccgtcgtgcaggtgaacaatcacatattgtcagtctgatatacccagcttgcccaacttaagccaaaaatcgcacccaatagccatgattttcgcccacctgtttgggtaaattatgcctgacagtccaaccatccacccggccccatcgaacaccaacttctttggcaagtgcactttgaatttgtttgttttatttccaacaaagccaggcgtattgctcggcaaaattactaagaaagagtttgtcatttgatcaacaagtataaattcttcaaaatgagatcgttcttatatcgtggtgtgccatctcggttcactttcccccatctttgatccagcggaaactctttgccatcgtcgtcgtcgtcgttgccggttcatccttctttangtgcttcatgatc

SEQ ID NO: 39229 - DNA, 1471 bp, Heterodera glycines
aaaaaatgggaaactgttctggaaaaccaaaaaatatcaaaagaatttgaagaaaacattaagggcatgtgaagaaatcgaaaagaaaaagcaaacattggaaacgaataaacaagaaatggaaaatgaaaatgaaaagagcaaaatggtagcaacaaataaagaatttatagcagtgatagaaaaaataaaaagcaaaaaaacaattacagcgaaagataaaaaagctctgcaaaatttgtgtatattcaacaaattgtacataaagcataatggaacaattgaaggaattgcaacgaatttggagcaaaagatcagcgaacaaaagaagaagcagcctaagctaatggaaaaaatagaaaaaaagttacatcttaaaacaaaggaagaaaaacagttggaacaagtgaaaaacatccagcaaaaattgaagggcattgtggacaaaattcatggaattgaaaaaagttcaggaacggatttgtgggatattgcgaaagaattttgtgctgaggaagaaagtggaaaagaaaaaaaggtggatgaacaaaataaagaaataattgagacaaatgcatcatcatcatcatcattatcggagccgaagcaaaaaaagagcaaaacgaaaaaagaggggacggcggacggaggaaaaaagagaacacatttattgggtaaaattgaccaaatactacatcatgaagaaacggatgaagaaaagctgttaaatgaaataaatcaaattgtaacagacaattttatgaacgaatttgagaaagcaaaaaaggcgtatcagaatgaagcggatattaaagaagccgaggaaaaattggagcagataaagaaaatccttaaaattttgaacaatgaattatttacactaaataaaaaagaaagccaaattagcacagaattagaaagcattgaaacagaaatggaaaaagtgggaaagaaaattgcagatttggacaacgaaatcacaacgaacacagaaaaagcaaaaagacaggcgaaaatcatttgggaagagctcaaaaaaatgaaagagcatttcgccaagaaattggaggcaaacaattcaaatgttggagaaggcgccaaagaaaccgcttgagatttcccacgattgatttgatgcattttgagattttattcttttttcttggggtattatttatcctttggctttatcctcgatttttttttctctctttttgatggggtcttttatttatttttcctatcttttgggacttaacattttgtatttttgatgagtggagctgctggaaaatgaaaaaaagaaaataattttatttaaaaaaaaattgggataaaaaatgagatgttttgggacaaaaaatctttggcaaattcttgttgcccagcagaactctttttgtatcttttttggcgataatggtattatgtcacttttgtacattcattcacatggatttaaacttttaat

SEQ ID NO: 39230 - DNA, 1405 bp, Heterodera glycines
  unsure (1)..(1405): unsure at all n locations
aaaagtgtttgaaaataatcgaaatgtagccttatgtaaattaaatattttcgatttacatattttttatttttttttattcataagaaaaaaaaatataatgaacaaaaatacggtttaaaaaaaagatcaaagtcaaactaaagtaaactctgtgaatgtcaaatcacttatgaaaattaacgtatattttatttttcctgtcttataattaatgcaaagaatttttaatgatcagagtggtcagtagggatacaatttttaggctttaaaaacagctgtctggaaggttttaggttctaaaaatcccaaaaatagtaaataggcactaaaagcctcaactttatgggtgtaaaattacaaaatttattcaaaaataacggaattgtaccaaatcagtattgagataaataattttaaagcaaaaattcttaaaataaataaataaattttgaagatgaatttttgagaattttttcattgcataggattgtattttttatattgcctttttatcaataaattttcggcgaaacgtcaaaataggtttttccgagatttttaggtttttaggctctaaaaataaattcttaaaaatgggcactaataacacgaaaagtagccttaacaaccaccaaagaaacttgtttttcgtgcgtttcaggccactgggagctcaggaaaaataggcaaacccctaaaaatcgtatccctagtgatcagtgagtgatttgctaacggcacattttttagctatacaattatttctttttatttcactattcattgcttttccataatgtattagcttctcctttggtgtgaggggccctctttctgcggttggcaccacgtcaagagaaagggcattttgacgtggcttttccctcaaaaattttcttataaaaggccaaaatcgatataaccaaacacttattcttgaatgttaggtatttccattatttgtaaaactataattcattttcccataattttgttttaaaattcagcggatgaattcgtccgtcgtttcattttcgctgttactttttgggttattcacaattcgcactgcaaaatcgcaatgcgagaaacattgcactaaaagtatgaattttatgttttattaagggttgatttctatgattaatccgaaaaacccttgggggcattgctaatgggaggggtcttaagcagcagtgtccatggattttcaagaatcactttttcgtgggaagaaaatgggataaagaataaagaatatggagaacatctaaaaggggcagccgttgttcagttcgataggaaaattaatcgactgactctcggaattattnaggcaaccgatgggccaatgcaatgaggcggaagaagtgattctgcgcaactccgactgtgccttcat

SEQ ID NO: 39231 - DNA, 772 bp, Heterodera glycines
tttgacgtcagattcttgatcagcgcttaaaactaccatataaaagtgctttccattgtcggggccatgaaatttttatggaggggggggcggtagcaaaacctacaagtacccgttgtcgtcctgtggttctggcgccactggagttagtccgccgtcagcgcgtcgtccagctcacttcattgaaaacttttgttccatcattaatttgccagtcaacgcctccttttcccaattcacatttgttctgattatgcttacctaaccgggcagcagataatgaacattctgcgaggagaagcaacaggcttcagtcgccatttttcgattcttgaaaggatcattttttccttgtccgttcgttaacaatttcaaaaggcggcacagtgacaccaagagccaccgtaaagacaataataaaattgacagcagaagtggcagttgccgcaaaaaattccgggccacaaattcatgtaatcggattcatgaccatgtctcataacattaaaatatctcggaatttattttgcacaaatctgtgaacaaactgcaataaaatttcaattttaaccaagatacaacatattgaccaccattgtcacaaatttacacaaaccttaaattcaataattatttcaaattcagttctgtgtgttagagtgcgacgggaccgggaattttgggcaaacccgggaccgggaccttatccgtttgaaataccgatcaaattacgcttccagaattcagacccgtggcactatactagatatgt

SEQ ID NO: 39232 - DNA, 1468 bp, Heterodera glycines
caaaacaaatttttttatttagcaaaataatgaacatttgtgctttttttttggtttttcctatacccaaatttttgcattttagcaatggattttgatttatttgatagatttaaaattaaaaaaaaagaatttaaaaggggatttttaatagtcgtttaaatttaaacatgaaaacaaggcaacaaaaaaccagttttttgaaaacaacaacctattgacactttttcggttttttaattattttaatagtttttttaagtttttagaacagttcatattttgattttagcacataaatcgaagttttataaacttaaaattaaattacttaataatgacatccaaaaatgatgtcacttttcttcaaaaatctccttcaatgagcgatatgaagcccctccttcgacttcttcgtagaccaagcattgtcagcaccagcagaagcggacttgggaatttgggagtggtaaaatacaaaatattacaaaaaatatatatttaaaattattttaatttatttcattatgatattttacctcttcattagagtttcgaatgttgagtctgtcaacataactacaagtataatgtaaggattgttttcagcaatgtttgaaatcccgacaccgaactttttggttatttttagggttatttccgacctcgagactttttttaaagacgggcttctacaaattaaacattaaaatgtttttaaattccttaataattgaaaattaataatgtgaagctttcctttttttaattaaagatttatctatggatttgggattaattacccagtaattagattaagccattaattaatggttattaattacattaagccattaactcgtcatctatcgattgaaccaccggccaatttggctgatgccttgggaatgcacactccaaattgggctttttatcactacagttcgtccaattatcgatcagcgtggccatggcgaatgtttcgtgaccgtttcgatgtaagaagcaattggcaaaaatgcaaaaccaaattaaatgcatttttggcaaaaaatcgtcataattttctcgaaagtaatcaaaaaatcactatatttttctgttaacctaataaatttatgaaaataaattattttttattaaaattattttaatttgcttaaatttttaattttactttttactttattaatgaattaattaattaaattacaaattttatctagtgtgaacaaatcatgtacaataagcacttctctgtgcagcccatctacagaaatgtgccattgaatgtgccatcgcacagaacgtaaaaaatatttttttaaaatgaataaatttcttatttagcaatttttccaaccaccaaagagctgggtattggtcatttgactacgattatatgtaaattatatgtataatgaaaaagtgtttagttaattaattaatggaaccaccattaaattaa

SEQ ID NO: 39233 - DNA, 1198 bp, Heterodera glycines
  unsure (1)..(1198): unsure at all n locations
cttgcatggnnnctgcaggtaantttttaattggctttttaaatatgccaaaaaatttaggcttaacttttttagtgaaaattcgatcactcatattttttgctaattgagcagaagcgtaccaaactttgcagggatactccccggtaaaggactaacttacactgaaatgagcgccgagttagctggctctaaaaaaattttcgaaaatctgagtctttcgtttttatttattttttgcaaaattaattcataaatattttttcagaaagggctctgaaacgcaccaaattttatttacaagttaaataaggctctctgatgctttttctatcaataagggaggtgaataaaattttaagaattttttaattgctttttaaatatgccaaaaaatttaggcttaacttttttagtgaaaattcaatcactcatattttttgctatttgagcagaagcgtaccaaactttgcagggatactccccggtaaaggactaacttacactgaaatgagcgccgagttagctggctttaaaaaaattttcgaaaatctgagtctttcgttttttatttattttttgcaaaaataaattcataaaaaatttttttccaaaaagcgctctgaaacgcccccaaatttttttttcaaagttaaaaaaggtttccttgaaggttttttctattcaaaaagggggggggaaaaaaaatttaaaaattttttattggttttttaaatagcccaaaaaatttaggtttaatttttttaagggaaaatttcatcccccctatttttttttttttattttgagaaaaaaggccccaaaattttttggggggaaccccccccggaaaagaaaaaatttatcctaaaaaaggggccccgggaggggtggggtctcaaaaaaaaattttcaaaaaaaaaagaggtttttttttttttttttttttttttttttggaaaaaaaaataaaaaaaaaaattttttttaaaaaagggggtgtgtccaaacccccccaaatttttttttataaaaaaaaaaaaaaagaggcctcctctttcggtttttttttctttttaaaaagggggggagggggaaaaaaaaaaaaaaaataatattttttttttttttttttttttttttatataataaaaaaaaaaaaaaaaaaaatattttttttttttttttttttttttatt

SEQ ID NO: 39234 - DNA, 1190 bp, Heterodera glycines
  unsure (1)..(1190): unsure at all n locations
caaaaaaaatttttaaaaattctagggggcttagctcgaaaatttttgaaaattttccgcccatatggcacaacattcgatagagcttaaaaaactctacaattttgccctaaggcattttttgtctaaaaccgacncctgacgagttatgggctcgggactcaaatgtcccgctcaggccaaaaaatttttctatttccggaaaaaaatcgaaattttttcaaaaatatcaccaatcgatagagctcgaaaaactatgttttggaagtggtcttcgtttctctgggaaaaatcgttaaaaaatcctaaaattcaaaaacccgaaaaccgttttttaggcctaactcgaaaatttttgaaaattttcgaaatttttaaatttggaaaaatcgggctttcaaaactctacaataagtctgctggtaactccccgcccagatcaaaccctaatgagttattcaaccgggactgaactggacaaagttggtactgaaaaagttcacgaacctacagcctttcctattgcagatagaggcctggaattttttttgttttttagaaaacacttcaacttagccccctcacagcagacattttttgaatttggaaaaatcgggctttcaaaactctacaataagtctgctggtaactccccgcccagatcaaaccctaatgagttattcaaccgggactgaactggacaaagttggtactgaaaaagtccacgaacctacagcctttcctattgcagatagaggcttggaattttttttgttttttagaaaacacttcaacttagccccctcacagcagacattttttgatttgggttttagaaaaaaagttacgggcccccaaatgcacgaaaaaatgagaaatcacttcccgggactcagtcgtccgcgcagaatttttctctatagttttcccggattctcctcaaaaagttgtaagacccttccaccactttcagggcgctcccggccttcggccgggagattttgttttttgaaacgaaactccttgtcaatataacatatatagtaactagcgtgtcgcgcagtaattgctcggtgtagacagtatgctttgcacagtaattgctcggtgtagacagtatgctttgcacagtaattgctcggtgtagaaaggatacttgtgagagatgaaaagaatatgcattacatgag

SEQ ID NO: 39235 - DNA, 464 bp, Heterodera glycines
ctgtttctaaatattttaatttaatgtttttttgactattgcccatttaaatgggttttgtttcaaaaaatgcgtcaacttacaaaaaattataacctgataaacacaaaaaaccatgtcttttgaacaattttggtcataattttcttgaaacttaattctaaatttccggaattttgttattttaaatctgtaatttcaggaaaatcgaaaatttgaagattattattaatagggcagggaaattatatgcacatagaaaggtaaaatatacgcataaaacaagcagcaaaaattgcaaatatgcacatataatttaaaaaatattcaaatagattttaatccaattgagggcaaaatttttcaaaaattatttaaattttaaaaatcacgaaaaatataacaataaattttttgtgtgtttcagacctcccccagacacaattttttttttgctaattttt

SEQ ID NO: 39236 - DNA, 1007 bp, Heterodera glycines
taagctggtcggcgaaatgaggtgccacacacgggcccatcaacagagggcggatcaaagattgttgccagagcatgagctgaaactggcaaaaatttatccataaaaaatctctgattgcttaagttggactagtcagtgagctgatttgtgaggacactcggctgaggagaaaaattaaaaaaaaaaaaattatttttaaagaaaaaaaatttattctgagtggaaacattttaatttggttggcatcagcaacagaatgacaaagcaaatgatgaagctgaaacagcaggcggaagaacaacatagcaacatttcaactgtggtaagctaagaattttttttaaatattgaaaaatgtaaattttaaatttataaaaatgtggaaaatttaaaattttgttggatttttaaaaagctaaagagtgaggtgtgttctttgataaggcatctaaatatactcattatagttttggttttaacgaccaaagataaattaaatgatacccccaatttttgtacgtctcctaattttatcaattaaaatgtttcaaatttttaaaatttttttctccctaaatacattttttgtaataaaaaaaaatatgaagaatttgtagtttggtcgttatattattaatctgtactcaccacacaatccagaatatattttatatatatttaatttttttacaacatgaattttaaatttttaaaattttttttcaactaaaaatttttttcataattctttcaagattatttttaattgttagccattcttaaaccacaaaagatcatcccacttttttgcccacccaatgcgcactccgttaaatgccctcgggcacattcggaaaatatacggtacttgtgtgttgttatctgtgggtagattttcaaaaatttttatgtttttcgctatgatcttttttctttggcatccaaatccaagattgttggtatcagacgaaagctcttcatatgctctattagccttacaaaaa

SEQ ID NO: 39237 - DNA, 755 bp, Heterodera glycines
tctcactttgggcgtactatctctttatttttaacaatcctcctaagaacttttacttttctccgtctaactttttttctctacgttaaacctacaccaaaatttgcatatcgatagagaaaaaaataaagaatttttcaatcgctttttaaaagaaaataatcgcttttatttcaactaaaattttaatttaacggcgaatttaattagatggcaaaaataaaaattgtgtgtaagcttaacgcaattaaatcggcacaaaagcgggtgataaagcgggatgagagacgcgcgcgaacggccaaagcgacagaagcccgttgggccacgaaattgagtttttacattcatttttcataaaatatgcaattttcccaaatttaagccgctccccagcccaacaccgatgcagaaatggcacaaccatctgaagaagagccgtcgacatcagaagcaccggcgcgggacaacgacggacaaccatcatcaactccaacaccggtgacaccgctggaaatggacgtgccgtcggtggagatggtggacaccgatgtgcaaatccctttcacgcctgccgacgaagaccaacaaattcaccaatgccgtcacatccacggcacgctgtgacctcatgtcgacaccatcgacttcaaaggggcccgtggctttggtctcgatgggggaaaaaaattcaaccaaaattaaatttttttttattcctttcctttttattattttttagtccacctgtttga

SEQ ID NO: 39238 - DNA, 882 bp, Heterodera glycines
ctacattcccccgttgtctcaccttttttagcaattctcccattcccttaatgcactccccccccccccccccaacgtcagcagttccccccttccgccgggggtattatctgctcacatttgctgctgagaagttctctcgcttttcctatagctaagcccaccgattgtaagggataagcagtgagaacaacaactgctgctgcttttccccccgggggtcgtcggtcggttggctcccgtttcatccatccccggagggagggagggaagacggacggatcgagtcgggcggggggagagggggggggttgagactcattgattgaatgctgcagtattggaccccgttgaatgaaatgatagcgagatatgtctcaatgatccggtggagagctcatcgccatcgcctgtctttagcccattccttacagattttggatggtccatatattatcccatctaatacagatatctctatttttttaattatttcacctcgcgatcttcccgctccgtagatctgcccagaatgacttcatccattcttgtagttatgaaagccagaaaatattccccaccattgttcttgaattgaatattcccccgtaatccgtatatacttctattgccttatccatgatggatattttttgtgtcactcaaatatgctgtgtactgactgtatgccctaaaccatttctgtcattaccctcaatattttgtccctctgctccacactgatgccattctcccggtcatccgatttctacatatgtagtgccggattaagcacagtgtctactattaatgacaatttcacgtcacaatgtgcctgatttgaggtggaacaccacacagcgctgatttggcacaatctgt

SEQ ID NO: 39239 - DNA, 948 bp, Heterodera glycines
tggtgtaagtaaaaatcgtaattacgctcaaaaagcttctcaaacaattttagcgcttccaattccttctacaatcgcctttatacatcccattatgagcgctaaaattatcagagtgccgaaaatcgcatgtgatctaagcctagaaaaaatggtgtaagtaaaaatcgtaattacgctcaaaaagcttctcaaacaattttagcgcttccaattccttctacaatcgcctttatacatcccattatgagcgctaaaattatcagagttccgaaaatcgcatgtgatctaagcctagaaaaaaatggtcaagtaaaaatcgtaattacgctcaaaaagcttctcaaacaattttaacgcttccaattccttctacaatcgcctttatacatcccattatgagcgctaaaattatcagagtgccgaaaatcgcatgtgatctaagcctagaaaaaaatggtctaagtaaaaatcgtaattacgctcaaaaagcttctcaaacaattttagcgcttccaattccttctacaatcgcctttatacatcccattatgagcgctaaaattatcagagtgccgaaaatcgcatgtgatctaagcctagaaaaaatggtgtaagtaaaaatcgtaattacgctcaaaaagcttctcaaacaattttagcgcttccaattccttctacaatcgcctttatacatcccattatgagcgctaaaattatcagagtgccgaaaatcgcatgtgatctaagcctagaaaaaatggtgtaagtaaaaatcgtaattacgctcaaaaagcttctcaaacaattttagcgcttccaattccttctacaatcgcctttatacatcccattatgagcgctaaaattgtcagagtgccgaaaatcgcatgtgatctaagcctgagaagatggtcaagtaaaaatcgtaattacgctcaaaaagct

SEQ ID NO: 39240 - DNA, 981 bp, Heterodera glycines
tcccattcattctttttcccaacaattttcctatttatcaaatatataataatgcccaaggcacttttatactttgcagatccatttttaaattaaaataactgtttctcctggttattcatgtgtttcgaagggttatcggggtcgctgaacacgaattaggcatcgtttcgactaatttgaaccccgaaaaaaactcaaaattttccaacttttattctaaaatcagcggacactgacgaagtgattggacgccaaattgcattccttattattttatttaaaaaattgccaaatatttgttattttaagtaattatttaaaaaactgagtagctttttcacatttaataatttttaaattttcgaacatttcgaaatatagtgatgcgaatctccacggctctagtgtactttataagtccaatcggcttatgagtccaataaattaaccatacctgttttatacaataattttttcatgttcgaacaaaccctatttttgggtatcatttgaaagcacaaaagtctaaagaatataaactctcagcgtttagccagcttcggttaattgattgggctaataaaggcagtgcgcttatgttggccaaattgccgctcactttgattttcattttattttttgtccagctcaaaaatttagctttagcaggaattctttcataattttttctctcttggtcgttttttgttcattactttggcaccacaaaaaaatgagtcactttgggttgaccgaatccaatttgttaagtgttggcgaaacaaagctcttttgcaatttttttacttccaaaccaaataattgtctttattttggcatagaaaagattttgaatttgttcgaaattcgtgttttccccacacaaaaaaaaaattcatgaattttctggaaaaccatttaccaaaatatcgataggagagccgacagagaattaacaattccatgaaaacaaaattt

SEQ ID NO: 39241 - DNA, 275 bp, Heterodera glycines
cggcgcgccaacgattcgtcaactcgacgattcgtcaactcagccaaaatgcgacgattcgtcaactcagccaaatgtcaacgattcgtcaactcaacgattcgtcaactcgacgattcgtcaacccagccaaaatgcgacgattcgtcaactcagccaaatgtcaacgattcgtcaactcaacgattcgtcaactcgacgattcgtcaactcaatcaatattacttaaaaaatggaacttaaagcaattgacaagaatttctagggatgcttaa

SEQ ID NO: 39242 - DNA, 178 bp, Heterodera glycines
tagttattttacggcataacgttgatgcgtttcaacaatgtgccatttcatcgcctctttgtttttagttgcaaaacaaaattttgaattgaaaaataatcatcaacgccaaacatttgctaattttgctgtttgtgagaaagttggctgatttttattgctactttatgtaaaactg

SEQ ID NO: 39243 - DNA, 889 bp, Heterodera glycines
aaaaaagaaatataatatataacaataatttatgcatcaaaaatcctatttaataattccagagccctcctcgaaatgattcgatcaggggaattatttaggctttataacttggaaacagaaaaaaagaaatttaattatttaacaataatttatgcatcaaaaatcctaatttaataaattgcagagccctcctcgaaatgatttcgatcaggggaattatttaggctttagaacttggaaacagaaaaaaagaaatttaattatttaacaataatttatgcatcaaaaatcctaatttaataaattccagagccctcctcgaaatgatttcaatcagggaattatttaagctttagaacttggtaacagaaaaaaagaaatttaattattcaacaataatttatgcatcaaaaatcctaatttaataaattccagagccctcctcgaaatgatttcaatcaggggaattatttaggctttagaacttggaaacagaaaaaaagaaatttaattatttaacaataatttatgcatcaaaaatcctaatttaataaattgcagagccctcctcgaaatgatttcgatcaggggaattatttaggctttagaacttgtaaacagaaaaaaagaaatttaattatttaacaataatttatgcatcaaaaatcctaatttaataaattccagagccctcctcgaaatgatttcgatcaggggaattatttaggctttagaacttggaaacagaaaaaaagaaatttaattatttaacaataatttatgcatcaaaaatcctaatttaataaattccagagccctcctcgaaatgatttcgatcaggggaattatttaggctttagaacttggaaacagaaaaaaagaaatt

SEQ ID NO: 39244 - DNA, 1093 bp, Heterodera glycines
  unsure (1)..(1093): unsure at all n locations
ttgcctatgatgccaaggagaacaaaaaacaatgatgctttgatcagacacattcatgcccttcaataccgcctaggaatgaagggatttgaagaatggaactaatttaatcaatttaatttgattaaatatcttgttgaaattaaaattttttaaaagcggcgcaaatgtcgattttgctgggcggcgcaagtgtctgcggcgcaaaaatcgcggcgcaaatgtcgcatcacggtaattaaagcgaattaggggaaaaaagaattaaaaagctaattaatgcaaatttacgggaaaaataaaaattgcaaatttaggggaaaacaaaaattaaaaaagtaattaatgcgatttggaaaaataaataaagcgaattagggaaaaagattaattaatgcaaatttgggtgggggaggggggaacggaggcattgttacacaaatatatatttattttaattatgtataagtaagtatgatctctttaaagtatgccattgcaatacaaagcaaagtttgtcaaaatgaaagctaccctatttaattttgatgatctttgaccatcaaattaaggatggcatcattttgccggattatcaccgctcatcgaccacactcattcagtttatgatgggcaaatgatgaagagtttaatcataagatggaacaaagcgtccattagaagctaatggccaggggaattaatggcgaaggattaagtggagaaaaaaaggctaattagcaaaagcatttgcatttttgaaaatctgtgttttaattgcatagatttttcatagcacaaaaaaattatttaaaaaatggaacaattaaattccaataaattcccgattatctaattcctgaattttatattgacaaatggactacgtgagtttatgatgcccagcagacaatctgtcaagggacaatacgtcactaatatttaagttttatcaatttaatcattgtccaattgtcactgacccccgggcccatccccgtccagcagcagtcaatcagtcccttttcgcttctcattaaccatttaatttgctcaaattgttaattntattatgacacatttattttattta

SEQ ID NO: 39245 - DNA, 1607 bp, Heterodera glycines
  unsure (1)..(1607): unsure at all n locations
ccatcctccgttcaattttntaaaatttatttccaatttgtaaaacatattgattattggactattttctgctcggataacaaaggaaggaaacgtttttaaattttcgatcatttttgaagacattctttcaaagaaatataattaaaaaatgtatttaaataaatctataaataatttttaaaagagcataaagaattaagttaaaatttacaaaagatacaattaatacgaactttttgcaaaaggcacaaaatcatttagttaatcgttttctttctattctaatgaatcagataaaatacataaattaattaatatgattaagtacagagactgataaaaacattaaaaattatataaattacaaaaaattgtaaatttgtaaatatatacgaaaaatttaataattcataatgaaaatacgagaatataatttaagaatgtaaactggagaaaaaattaagtttcaaacaataaatgaatattaatacaaaaaatgatttttttaataaatttataaaatgaagatttgtataacatttaaagataaaaaattgtccaagttaacaaacttattttgaattttacccaagtaaatttattatgcttataatataatattttatactaaaataatttgcaaaattaattattaaaatttaagttttcatctaaaaaatcttaaaagattttagagttttaaaccaaatagaaacaataaaccaaaaagtctattacgctactctttatatacttaatatattattaggaaataagtatttaaaaatgtaaaaatcaaatctttttgaattttcaaaaagtttaaatataatgctgcacgccttcttcttcacgctcaaaccgaaaaaagaatcaaggtatcgaagagaaaaataaaaaaaagactaacatttttaagtacaaacttgacaaattaaacgcataatacatcagttgtaaataggaccagtgttaaaaataataattgttgactgcttaaaaaacaaaaataaaaaagcaaattaacaaatttacatttaatttatgtttgcaatacatgagttatgaaaatattaaacaacaaagctaaattatccagtaattagctaaaatgaccataaacgtacatttcaaattaagatataaaagcaaataataaaattattagtagtttttcacattgctagtctggcgcttcaaagaattatgttgttttattatttaaaatagaatttatataagaatataataattatatagcaatctgttatattcgagttttttgaacaaatattaagattttataattcgtttatattaattcaatttaacccattttcaattattgattttttcaaaataattttttatgaatgcatgaacagaattcgttatattaaaaattggcaattttggtccttttttttgaacaaaatctattttcgaattttctaaaattttccgcgggcaaccgccagaccccctccccctgttgaattacaaatgtacctccgaaaattaatggttttcgttttagaattaccgatgccggttaaagtgaaaaatacaggtaccgtgctactctaagttcacactttcatacg

SEQ ID NO: 39246 - DNA, 930 bp, Heterodera glycines
atcatttttgtttaattcgcaaaattacagctcattctgcgcgaaatataaactgaatcagtgtttgcggaatgaccgagctgataatcgccaataatcttcgattacaattttcttggtcacctttttggaattccaccatttcaactccttatcctctaaatataaactgaatcagtgtttgcggaggaccgagctgataagtcccaataatctccaatttacaattttcatgatcacttttgtgatattctcaatatttcaatttcttatatccaaatgtaatctgtataagtttacagtaggaaattgtaatttgggggttattggcgatttcaaatcgatccttccggaacactgatgctgtttatatttagagcgtaatgagctgaaaatgtcagaattcaaaaagtggggtcgcgaaaatagtaaatctgaggttattggcgcttatcaacctgatccgtctgcaacacttaaacagtttatatttaaagcctaattagcagaatgtgaaattctctcatttgttactttatgatcatttttgtctaattcgcaaaattacagctcattctgcgcgaaatataaactgaatcagtgtttgcggaatgaccgagctgataatcgccaataatcttcgattacaattttcttggtcacctttttggaattccaccatttcaactccttatcctctaaatataaactcaatcagtgtttgcggaggaccgagctgataagtcccaataatctccaatttacaattttcatgatcacttttgtgatattctcaatatttcaatttcttatatccaaatgtaatctgtataagtttacggtaggaaattgtaatttgggggttattggcgatttcaaatcgatccttccggaacactgatgctgtttatatttagagcgtaatgagct

SEQ ID NO: 39247 - DNA, 966 bp, Heterodera glycines
aaatattggaggttccgtggtacggacgcaaagttcctgatcggataagcttagttgcagaagaaacaattagccctgccgatgagaaattggttgggtggcgtttacacggctattacgaaattccaaaactcgtgaatatattgccgacgataacggaaaagatcgactttgtgaacccctacgaaaggccgtggaagcagtcggacctacgttggcacaggccatggatggcaccattgtctaagccacgttcgacatgggtcatcccaccaactccggcttacttggatgtgctcgactttttccaaatatatcaccaagaagcggttgaccaccgatgaggaagccgaaggggaatttgacgcatattataaatgcataaatttgccaaccgccaaatttgaggaacttgttgccgaaagtctggcaattcatttggaaagggaagaaatgcctaaaaaagagaatcaccagtagttaaacatcccgacttgtcgtagtcattagtgcgcgaagttttcgagcactgtcccatgggtttaggtgggatttgttttgaagcccaagggattaggggggtttcgcgcactagcccagggataggggtgtggggctttaccgcacaaacgccagggtttgggatggttttttgttttgaagatgccgccggtgttgggtttgggggtgtttactacaaaaacttctaaacatgtaaggctcaaaatttggtgaaaatcaatgaacaattcacacacaaaattttttcaaggcggtgtccacagccgaacccctttgttgacaaaatgttttttgaaaaatcgcggaaaaggacatacgaatttaaaatcaaattaataattgcacacaaattttatgaagaaaaaattgtatttaaattatcatgaaataaactttttaattcggatttatgaagaagccaaaaatcgagtatttgagttcagc

SEQ ID NO: 39248 - DNA, 956 bp, Heterodera glycines
  unsure (1)..(956): unsure at all n locations
ctttttaattctgccaaagtgccttttcgcgctctccgcgcttttcctcctccaattccatgcgcatccgttgttggacaattcgtctctgataaattaatcagacattttctctcccactcctcttctatccccattttgcacattcttttttcctctccctctctctatcatttctcctcactttatgcgctctttctcctctctctcccaatcacgctgtctctctctcattttcctttgtcgattctcctcaatttgtgccatcaattccatccgatgcctttcttttgccgtcgctttgttcgcctcaatccacgcctctcccaattcacttccaaaagacgctccaaaattggcctaaacaataaaagggaaggggaaactgaattttttttttggttgattgcaaccttcgcctttcccccttcaaatgcttcttgccacgcgttagaaccgcgcagtccgttcttcggctggggatttccacgaagccacggcggattgtcctccccgtcggcggcggtggcggcggcggcgagagattgctggtaaatgaaagggacgcgaggagcgagcggagcatcctgctgagaaattagcatttaaaagcaatgggcgagatggccactgaccttttgctgcttcggatggctttggccattgtcggcagccgaaagtgccaacaaagggcccattgggtcgaccggcggcgccgacgcggacggacagagagcggcggggacactgagcggttggaagaagcgttggcctgagcaaaggcacaaatggaaaagggaggataaaaaaggcaacgggacgacggacggaccatttatgagaacggaacggatgctgatgaaagtggttggctcctcctcaaaacaaaaaagggaattgngaaaaacggacggaacagccgaacacctcgaacatcactttggcgacggtctccg

SEQ ID NO: 39249 - DNA, 830 bp, Heterodera glycines
gctacttttcgatttattagtaactattttatagttttttatttttagcaactaaaaaactataaaaattttgaaaaaaaaactattttcaactatttttgcttgtgaataaaaatttgttatgaaaaatgcaataaaaacgaaaaatataccccctaagattttacacccctaaatttgaaattgttagcaactattttgggggttttttagaaactaaaaacaaaatacctatttttgcagttttagcaactataaatataagccctgctgatgacaacgcccaatttgccttacggtgcaagagaggggagcggccagttcagtacgggcaccaatttcagccccccaccaccgccgtatgacgccggcgccagtagtccatttgaacaaccacaccaacagcatcagtcaccatcgccctacggaatgatgtacagcggtggcaatgtgccgtcgccaccaccgccgtcctctccttaccaccaataccaacagcaggcgccgccgcaaatgtccccgccgttccaaccaccaattggggacccacaacagcaggttgggggcatgccaagccaagccaaccaagagaaaatcgatgcaaatgatgggattgggttggttgggatggcatggaaatggacatatggaggaatttcggattttttaaatgttttgggttccattagggttgtactaatggaattgcacacaggtacagatagatgatcatttaaactgaaagtttcggtaacaaatgccaaaagtttgccctccaccaaattttagaaaaaaaaattgtcaaaaaatggatgaggggcgacaaaatt

SEQ ID NO: 39250 - DNA, 1792 bp, Heterodera glycines
  unsure (1)..(1792): unsure at all n locations
aattttaaaaattattaatttaaaaatacaaaaaccaatgggatataaaaaaatcaatctaanaataattaacanaatataattatgatgagaacctttgaattaattcagattaaataaatattagaaataaaaaaggaaaataatttaaatttaaaacaaaatgtataaaataaccaataaatttaaaattatttttaattcaataaaattcattaaaaagcaaaaattaaaatttatgtaaaaagcaaatagccaaaaataacacttactattaacttattttttaattcaataaaaattaaattaaaagcaaaaaaaataaataaaatttaaaagaaaattgcctcaaaaaataattaaaaattaattattttttaaaccatttaaattaattgttgttttttggatcccttctgtacctgcatcatttttggaatggatttgaagatcatgttcatgtccgggtacggagctggtggaggttcatggattattgccggatccaaataatgtgttgcggtttggtggtgactgtttccgttccccattttggagggaataaaaatataattaacaattatttaaaatttaattgaattaaatggaaaaataaataaataattgtttaaattatttaattgaaggaagtacaaaaaattttgcattatatgtataataaaattaaggtcaacatatgttattttcaataattaaattttattttatttattttttgtaataaaattaaattaaaaacctttttttacattttttatttaaaaaattcaaataatgaatctataaataataaaatttaaaaaataagaatttaattttacatataaaaaaaatataaaattaactttttaataaataaattttatttttaatttttaatttaaattatattttatatgaaaaatttatgaattaagaaataaatataaaaaaatgaaatcaaattaatttttattaactctcgaataaaataaaatatttttaatttttaaaatgaatgaaaaattgtttaatttacttttaatttagaggcataaaatagtaaaaatatacagtttcgaattttttaaaaattttcaacaccaaaaagggaagtaaattcaaaagcattttttaatccaactaaaatgatgctaaaaatggcaatttttccaattttggccctttgtaaaaaaattcgaaagccggcacaacatggacagattttgtaaatgaatgaaatgccgccaccaaaaaacgaacaggaaatgtgtgtggagtgtgtgttgtgccgtcctcctccgtcggcttcttccttttcattttggcggaggcaatttgaccggggggctaggaattgataactcaactccacgacgaatataggttttaaatttagaattttattatttttgaactcattttattttttgaaaatttgcacaattccttatcatatttcatcgaaatttgcacaaaaaaaaaaaattccggcaccgctggaccccataacacataacattctttattgataatgtgaccctaaactacatattctttttatcacccccggcactccaaattaaaaaaaaaacaacattggataaaaatgtttttagcccgaagaagaacaaccaaagttcttcgggggcatccccaatttttttttctggataggggctgatttatagcccatttataccaatttgaactgataaaaaataaaatgggtttattcccaaggaaatacaaatattttaattttttatttcctgaaataaaattcaaaaaa

SEQ ID NO: 39251 - DNA, 967 bp, Heterodera glycines
  unsure (1)..(967): unsure at all n locations
caaaatatgcgaaatgcgaaaagcgaaattttttctacaactttttaatagttaaaatcataaagcaaaaatcattttttaaaattttattcaaaatttaaaaatcaataaaacgcttttttgaggcgcgctttttccaaaaaactttttgggaagagggggcaggcggcgccggcaggcgccgccgggaaaatttttgaaaatttgattaaaatttgttgacagattttcactaaaaaatgatcaaattttgtgatttttatcatttttctaatgagaaataagagttttggcgcgccgctgagaacagtttttcatcaaattaccaaattttgcgattttgggccattttctaagaaaaaataggagttttgtgggcgcggcggtgccgataggcgccgccggggaaataattggaaattttgatcatttataaacagtttttcactgaaaattagccaatttataggtaaaattttgaaaaattttatgggaatttaatccaattcttaggggtgtaaaagtcgcttttcgcgccaaaaagcgaaatgcgaaacgccaaaaaatgcgaataatgcgaaaggcgaaatgcgaaaagcgaaacctcggcccatccctgatctatatctcaccggattcattgaagcaaacgacacactactattcaaatgtctaatattctcaaaaaaattcacgtgtctcgcataaaatttaataaacaaatccttcaattcctcaggaaaatcctgcttaggaatctcgggaacaaaaacttttccatagtggcaacaatccttgaaggaattacctcggccactcattttcttttcaacaaaatgcaaagcatcacaaaattcacatctaacattcataggntccaagtctgttttcatgagcatttgcatgagtccctgctgcantaacattaacaacacattgtctaatcactctatgtctaatctatctt

SEQ ID NO: 39252 - DNA, 1187 bp, Heterodera glycines
catttctaaaaaggatctaaaaataatttcttgcgtacttctttttacattatgttgttgaagaatttgaggctgcttctgatgcgattgaaaatttttcagcttttcttgaaaagttttttcccagaatttatacagctttcccgacaaattgtttagataattattctagacgatttttttatatctcagtgcttaactattgcctttttgtatgataactggtagatattgggagtgaaaaaaagtttgtttgtgactatttacaataaaaatttatgcagcatttctaaaaaggatgtaaaaataatttcttgcgtaatattttttacattatgttgttgaagaatttgagtctgcttctgatgcaattggaaaatttttcagcttttctcgaaaagttttttcccagaaaacggatgggtcaaataaaaaactaaacatctcacatgaccaatttaaattcacttacattttgggtttactttattatgctggcccataaaaaaatggagtttttccggtgccaaatttttgtgaattttctttcggcccgtcataagcagattgtttgggggcaaatgaaaacaaattttgtgttattcgaatgcgctagccgagctctacatattcaaatgtatcaacaaagggtctatctccactctctggcgagttatgtccagccaaagcagagtgggccataaacacgaattttttaatctttggtatttcctctattttgagcctgctctacatttatgtattgtgccaatatgcctattgcaactgaaatttattcaactttcccgacaaattgttgagataattattctagacgatttttttatatctcaaagcttaactattgcctttttgtatgataactggtagatattgggagtaaaaaaaagtttttttgtgactatttacaataaaaatttatgcagcatttctaaaaaggatctaaaaataatttcttgcgtaatattttttacattatgttgttgaagaatttgaggctgcttctgatgcgattgaaaatttttcagcttttcttgaaaagttttttcccagaatttatacagctttcccgacaaattgtttagataattattctagacgatttttttatatctcagtgcttaactattgccttaatgtatgataactggtagatattgggagtg

SEQ ID NO: 39253 - DNA, 672 bp, Heterodera glycines
aagtcaaaaatccaatattaatacaatttctaataatattattacaaaatgtttttcattttactgctccatccgtcggaaggccctaaaaagtttatggcattccctgcggcacgcaaaccctcgggccaatcattttaaaggatccagcgcattatatcctacatattgcggctaatattactttgatggctctgcccgtccactctctcttccccctcccctcaatttcgtctttttcatcgaatcttttgccaccactgcctttaattcgctttgtactcctccccccgtaaattccggtactgatttattgggatttattggccataaaatccgagtcgtcccaattcatcttcaattcatccagtgatttttttctgttattcgtcatttgttgatcaatcgctcgctttcttcgagctcaataagcgaccgatcagaatgcttttcattgctttaccaatcggcggaaaaataaatttttgtttaaattttaatgcctttttcaattcttctgtcattcctttttcggttgtgtctccggccaatgcgacaaatgtccctcaattttggtcccatcttcgctttttgcgagtgttgcgtttcccctctgtctcccctttttttgtttatccccccccctccaaatcccttttcttctccacagat

SEQ ID NO: 39254 - DNA, 1293 bp, Heterodera glycines
  unsure (1)..(1293): unsure at all n locations
aaatattttttaaacagctccaaattgacgcagcatggtggccgaaatctacgcaataaccggcaacctcaggccaaatgaagaaattttgactgaatacactggcggacagaggagtcatgtttttgccagaaatgatgacatggagcagtttttccaagccttggacgaagtccgattcaaaaaaatcaaaaaataaaaatcctaaaatttccattttttcagaaaattaacccttgtgaaagctctaaggctgaacttttgaaaaagaatttgccatctccagcggcaaaacttcgtgatgacaaaaatcggactggcgttgaagtttgtttcaataataatttttctaaattcatttttttataaatatttttaattttttggttttttcagcttttgatactgccccaaaatgacagtaattcaccaaaaaattttgtaaaaaacagccaaaagacagagcaacaacaacaattagtcaacaaccgtgaacagttgccatttttaccaaagaatttgaagttggaatgcaacaacgttggaaaggtgacaaaaatttagattatgtcatgaaaaaaaaaacaaattttccgagaaaatttttattatttgggttttcttcactatgattcattatttttgttaaaaattttaagaaattaaatctgatttttataccaaaagaagcggttttgaagttgtttcggaaaatttaattttcctgaccaatcattgatgattgataattcaaaaatttaattattattttttaggttgacctgatgcttgtgttagacaccagtggctccatttaccattcattcccacagcaacgtcaaataggtgaatttaataagaatttttttatcgaaattaaataaaaaaaatttgaatcgcgacaaatcaaaaaattattcaaaattaattgaacgaggcaaagttccaaataacgattgaatttatcagaatgatattgatattaattttcctgaaattacccaatttttttttataaattacgccaaatggcggcgcactgcccgcaaactttaaaaaattttttaacacaaatttaattttaaaaattaaatatcgatctaatacaataagataatttgttttaatgggttcgaggatgaaagctttttattttgttttttagaactttcgaaaaaatttctagcactgcaaattctgcacgccatcgagcccgcactgcattcattgcaaattgnggtcatccaatttgcacatgagcctaccgtaatccactcgttacgcgagcctacc

SEQ ID NO: 39255 - DNA, 506 bp, Heterodera glycines
  unsure (1)..(506): unsure at all n locations
tttgggtttgcaatcaaacatcaggcaaaattggatgaaccaatttattgcaacagcacctgcggacgctttagcaatggcaatttttggattaacggttcgattgaaggagatgcccaatatgcttacgattgtggtgatactgtaggatttggcgtcaatttgaccaatcaacaattaattttcaccaaaaatggacttctttttggttagttttatttttttatttaattttacaattttttaaattattttctttggttttttcacagatatcactgatttgttcttcgattcttccttttctgccgattcactttttccattcatttctttgcgttcttttggtgacaaaattgaggcaaactttgggcccaatttcaaattcggtgtgaccaatttctgctgaaggaagaaaattaagaaaaatcttgtcatttttgcagatttaaaggtcctttttaacagtatttatcataatnngttgtagtgaaatgtgcaaaatt

SEQ ID NO: 39256 - DNA, 1469 bp, Heterodera glycines
agagttcattatttgtttattttttgcataattaattcataaatattttttccagaaaatgctctgaaacgcaccaaattttatttacatgttagtttaggcactctgatgctttttctatcaaaaagggagatgaataaaatttttaaaaatttttaattcctttttaaacaagccaaaaagtttaggcttaacttttttttcagaaactgatcagaagcgcaccaaactttgcagggatactgaaaggaagagaaataacctattttaaatattatctagtcagttcatttaaataatttttatccaaaaaatttttttttgggttttcggggcagtccccctgaaccgatgcgcccagatttatggggagaccgaatccttccggaatagctccctatagcctgtactttattctgccgtggatttttgctccccataattgtttgagaacccaaaacggacacttgaaaaaatcgattttttttgttttcggggaagcccccccaaaccaaggggccccaatttttggggaaaccaaacccttccgaaaaactttcccaaaaatttggaatttaaatttggggtgggaattttgcctccccaaaatgggttggggcccccccaaggggaccctttgaaaaaaaccttttttttttttttttgggggaacccccccccaaaacaaagggcccccaaattttgggggaaaaccaaaacctcctcaaaaaaaattccccccaaaagcgcggattttttattttggggggggggttttttctcccccccccccccaaatttgttgggggacccccccccaccaacccccccaaaaaaaaaaaaaattttttttttttttttttaaaaaaaatttttttttcaaaaaaaggggcggcccacgggcccccccccaatttttttttttaaacaaaaaatttttattcccccccccccgtggggttttttaaaaaaaaaaaaaaaaaaaaaaaaaggaaaaaaaaaaaaaaaaaaaaaaaaaaaaaaaatatttttcttttttttttttttttttttttttcttctttccctttttttttgggggggggggggggggggggggggggggggggaaaaaaaagaaaaaaaaaaaaaaaaacccccccccccccccccccccggggggtgtgtgggttgcttgccccccccctctctctttttttttttttttttttattttgtcccactctctccggggggggggggggggagggggggaaccccaccccccgggggggggggggggggggggcgccccccccccccccccccccccccccccccccctcctttttttggttgttgtgggggggggggggaaggggaaaaaatcccccccccccccccccccccccccccggggggggggggttataaaaaaaaaaaaaaccggccgccccttttttttttttggggggggggggggggggggg

SEQ ID NO: 39257 - DNA, 1129 bp, Heterodera glycines
cccggacaccacattgtgaacggatgcttgaaaccttaggcacttgttgatggcggagaggttgctcttttgtccgctgctgctgctgcttcattatgccgtttagctcttgtcccaaaatataaactaaaaagacatttgtactcattatatatatatatatatatatatattaaaaagcaacttatccttccccctcccccctcccgcacatttcgcatattgacatatataaagtttttagcttccgaatttttgaataatcattcaatggacatgttccggttcaacgttcataacgctgtcaaagacaccgacgacgccgccgccgactctgctgcacacgatcaatgtcaacaacgccaatagcgcgaggttgcgtctcctcgcacaatgccgttgtcgttgttggttgaagagcaagctcatgtgtcagcagcagctgaggctgctgccgaggcagcgagtgctgttgaccaaaagatgtcggcagcgccaaatgacactcccgccatcactgacacgaaaattgattttatgactgatgaacaaacagtggcggcagcgccgccgcctctattcagtgagattgaaccgacgcagcagcagcagcagaaacaacaacaggtttgctctaaattggtgtcggttatttaattttttatcaagaagattcaggggcgtacagcggaaatcatcgcaccgaaagtggagctgtccgccgaggacaatggtgatgatgatgatgatgatgatgatgatgatgatgatgagactggacaacaggtcaaacaggaggcggacaggaacggcatggatgcacatcattcaaattgtgcaaaagggccccttttgttcattgatgaacaggagaatgaggaggaggagagtgaggaagatgaggacatttcaacaacgcatcgaaggcaaggcatggactcatcatttgactacgaagacgacgacgatgatgatgacaatgacgatgatgatgatgatgacgatgaaatggaatcagtcagcggatgtgcggaatcggacaaatgtggtcactgtcaccacccgcatcagctaccacgaaatgctttggaggtgctcaaaatgccactcattgactacctgtgtgcgc

SEQ ID NO: 39258 - DNA, 815 bp, Heterodera glycines
ctataagttttttattgctcaaccaaataaaacattgttggtaacatgagaaatctcttaatatgctctattagcctgcaaaagtttaaaaatttcgtcaattttgaacacatttttgaccaaaaaggttggaaaatctggttttttgaattcttctggccataactttttgaaccttaatgaaatttttcaaaattttgcagactaatagaggacacttagggcttttgaatgataccaacaatgtttaatttggtcgacaaagaaaaaagttatagctgaaaaggtgctggcgcccaaacgtgtcggcgcccaactcgacgggatccgttgatcactgaattatttatctgttgttgaccattccgaacaccattgttgtctccaatatgaagagttgaaccatgtagccacgttttccaccaagtggtcccaattggaatgtaaaatttagttgagatgccatgcccaataaattgctcattgcccatttatcattgactgccaagccatcttcgaacttaaaaataattatttattattaatttgttttttcaaataaattctttgtaagtagattaaatttaaaattttgcggctctaatgcactttatgagtccaatcggcttttattgtccaatcatcagtttcttttgccataacttttttcttgcttggacaatatccacatttttggcatcaaactaaaacttaaagtctatagatttaaagaactaaaatctgtgctaaaaccaacagataaacaaaaaaatattcaagaatatactcacaaaaatctgctttcccagtttttt

SEQ ID NO: 39259 - DNA, 279 bp, Heterodera glycines
tataataacgctgcggacatctacattcttgaattgcttcctaattggtaattactctttctttttctccacattgaccatcatactcatactccccccaccctttctcctccttcattttttttttcctttccttctccaaccctctcctccctctcttgatagtttaaactgaaggcgggaaacgacaatctgatccccatcaagctagcttctgcaggtcctgctcgagcggccgcccggggatcgatccccgatctagtaacatagatgacaccg

SEQ ID NO: 39260 - DNA, 1090 bp, Heterodera glycines
  unsure (1)..(1090): unsure at all n locations
tataatttaaattattagatttaaaagcaatttatctgcttatataaagcaataataaaaaattattntaaaaatagaaggagtaatctcacgactaagtttaattcatataaaggaattttgtaataaaaatttaaaatatttcatcaattatattttttaaatcaccagctgaattttctagattataaaccacaataatgtttaggataaagtattagcgctgttatttcctaaaattaattaaaaaatcaatcctttctaaattatatgaatatgaaagttattcatttttaattcattatctaaataattaaattgcgtacatgagtaaaaaattttcttctttaatttctttgctctagacaatacaatattttaaaacataaaatactacaaaagcaatttaaaattataaaaaaaataataaaattaattcttctaggttcacaatttttagaaccatttaaatgttgtttaaaaattattatttatatttatgtaaatcgtataaattaccaaaattgaacacgaaaaatatctatttgcaaaatagtcgattttcatataaatccaaactgctgtgaaaacagcgtttgtggaaatttattgtttttcaaattgagcgccagtcaattgagagacatgaaactacgctaatagcaaaactaattttattatattaacttttttaataaaaatgattgtaatttttctaaatgatgtcttaacttaaatttagtaatttcattataaacatatgcaatcaagtgtttgattcactttttatgaatcaatgccacgaatgatgcagtaactaaaaagaataaaaaatgaacttttttcaaaaattaataaaaataattatataattttattttaaaagaatgaagtgaagcgatatataatcaaaaaaatcattaatttgtaaaaactaaattttactgcgcataacttaacatgaaatcggacacgacaagaagaaaaattttaacgctttaattactgtanttgtgaaatanaaataagaaaataataataataacatgaaaaataattacatttgtatttgaattatgatctagaaaaa

SEQ ID NO: 39261 - DNA, 954 bp, Heterodera glycines
ccaaaatcacttttatttttatatctttttttaaaaatgttataaaaatgtaaaataaaatttatattatagaggaaaaaattgcggatttttgtagtattttacttttacagtatgacctttcagaaccgagttatgaatttttttctgaaaaatcgaaaatttccagaaattctggaataactttttttcttttgaacattataaaaccaaataaacctcataaaattctcccgattttttgctatttttaaagctttaattcacttaaattgagcagtccttcattgagttatgaattttcaaattttaacccaaatttccaaggaccaaaaaaattaaaaatatttttgaatttttaaaaaattccaaaaaatctgaaacttaaaataaacatcatatttgtgctcaggaccctaatttaccccagaaaaatatttttcaccctctttttcaacccaaaaaaaaattttgaaaatttctaggtggcctagctcgaaaatttttgaaaatttccgaaaatgaagtacaccattcgatagagcttcaaaagctctacaattttgctctaaggccatttttggctaaaagcaacccctgacgagttatgggcccgggactcaaatgtccggctcaggcccaaattttttctatttccgggaaaaaaccgaattttttcaaaaaaattaccaatcgatagagcatcaaaaacggttgcttgaaagtggtctccgtttgtctgggaaaattcgttaaaaaatcctaaaattcaaaaaccccaaaacctacttttaggcctaactcgaaaatttttgaaaattttcgaaatttttaaatttggaaaaatcgagcttttaaaactctacaatagtcccgctggcacccccttgatcaattcaaaccctgacgtgttattcacccgggactgaactggtcaaagttggtactgaattt

SEQ ID NO: 39262 - DNA, 908 bp, Heterodera glycines
accaatccaagagataaaattgaccaaaaaacaggcccttaagagctggagatgaactggacgggtgtcaagcggttcatcgactcgagaaattggcaaatcactaaaaatgataatttattaaaatcaattaattaggcattatgtatatctctgaattttatttttcattgcgaaaaacaaagattttttgaaataaatagaagtaattaaagaggaaaagcaataaataaattttaaaataatttaaatttttggaaagtgagtaaattttgacttattatctaaaacatcgaatatttacattttatgcatttttaaaatattttttgtcaattttcgctaaccaagaatcagatcgcccatcgtcatgctgattatatacacatgaattgtgtcgcgatttttgcgattaaaaatgcgcagtgcacagtaaatgatcaacacattcatggcgattgcgacaaacgaaccgcaaaccatggaaaattccacctaaaaataatgtatttaaaatattatttattaattaaataagaaaaatcaaatttaaaattaaatacccaattttgtatgttgacaaaaattcttgtcgtgttgcaaattgctgaattagacatggtctgatagatacaatttgtctaaatttaattaaaattaggggaaattatgaacaaatatattaaagggatacaaattcaaaataaattaattttcaattcaaaaaaaataaaaataatattttattgaagctatgtttgaataaaaaaagaaaaaaaattggtgttccgactatttatttgttcagatcaaaataaactgggttttaatatttaaaagataaacaaaatatagaaaattttgattactttatttaaaaatatatataaatgtttaaaaaaatttta

SEQ ID NO: 39263 - DNA, 1783 bp, Heterodera glycines
cgcccctacaaggaattcctcgttcacggacaataattgcaatgtccgatcccaatcacggcaaattttcaccggtttaccaacccctttcggggaaggacaagcacgctgattttgccagtgtagcgcgcgtgcagccccggacatctaagggcatcacagacctgttattgctcaatttcgtgcggctgaacaccgaaaatccctctaagaagttgtgcccacagaagcaatgagccaactatttagtaggctagagtctcgctcgttatcggaataaaccagacaaatcgctccacgaactaagaacggccatgcaccaccatccaccgaatcatgaaaaagctatcaatctgtcaatccttacggtgtccgggccgggtgagtttccccgtgttgagtcaaattaagccgcaggctccactcctggtggtgcccttccgtcaattcctttaagtttcagctttgcaaccatacttcccccggaaccggaagactttcgtttccgggaagctccccaccagggcgaataaatccgccggcggatcgctagttggcatcgtttacggtcagaactagggcggtatctgatcgccttcgaacctctgactttcgttcttgattaatgaagacattcttgccaaatgctttcgctgtagtccgtcttgctacggtccaagaatttcacctctcacgtagcaatacgaatggccccgtttgtctctgttaaccattatctcggtcagcaaaaccaataaaatcggaccgaaatcctcttctattattccatgcacgaacattcaagcgaaaacgcctgtttgaagcactctgatttgttcaaagtaaactcgccagcccaccgacgccgaccggtaaaggccaacgccgggggaaagaccggcagaaaagccaaccaaaccagtaacacacaaagtgtgcaccggacggctagcacagatccaactacgagctttttaaccgcagcaataattctatgcattttgagagctggaattaccgcggctgctggcaccagacttgccctctcatagatactcgttaaagggtttaaattgtacccattccgatgaccggcctcataagagatcggtctcgttatttctcgtcactacctcctcgcgttgagagtgggtaatttgcgcgcctgctgccatccttagacgtagtggccatttctcaggccccttctccggagtcgaacccttatcctccgttacccgtcatcaccatggtagtcagatacactaccatcgaaagttgataaggcagacacttgaaagacacgtcgccggtacaagaccgtgcgatcagcttagttgttctgagtcaacactggacgcccggagggcgcttggttttgtggcgaacaaatgcgctccgctctggggagattggagctttggtgcatgtattagctctagaattaccacagttatccaagtaagaagtcaaggtcaagtaaattatagctggtgtaatgagccgtacgcagtttccctgtctggcaggttaaacttacacatgcatggcttaatctttgaaatgaacacatcagttcaggcaggatcaaccagatagctgctagcgagcgttgccaagcgccgctattacagccgtcttgtaaagacggatagtttcagcagaaacaactccgttcagcgcaagcgtgcgcatgggcagcgaaggagaccgagcaagtggtaatgacacagcgctggccaggcatccgagcttcccggacttgggaagaaccatctcgccg

SEQ ID NO: 39264 - DNA, 1001 bp, Heterodera glycines
  unsure (1)..(1001): unsure at all n locations
ttttctgaccaaaacttcattggaattgattgaacactaaatgctagagtagagccttgggattttgagaagttttcgggatcatggttctccagatggacccggaccgaattccagtatttaaaaaattactgtttttcttggctctcctgtctgattccgagtcctttttccaaaatacaccctgacaaagattcccgtagaggatccggtcctgctgttccggctctctaatcatcacactttttaaaggtcacatgtgtggacgtgtcgccggacgagaattggattgtcagcgcatgctatgaccgcacattcaaactgtggaacttttcagcggatgaatgaatgaatgaataacaactgaactgttttgaatttgttttgtttggcacaatgtttctcacaactatttttttaaatttcattatttttaatttaaaatcaaaaaaaaagaaagcaaaatggcaaatgtttttatgtgagagagagagagttaattaatttaatttagtagtctgcaattagacaaaacaacaacaattaaaaaaaaaatccatggaatttaatgttcgttaataccctcgttggtaaaagccggcacttcaaaaaaatggcggcaccctgctcaattttaattgtgccgcaaaatgatttagtatctgtcggccaatttaaaccaaattggcggaatccacgacttaattactcaaagaccatcattcaatgggcgttactcaaaaagccaccaaaacatacaaacgctacgattatggcttatatgctacgtatattccaattcaaaatgtcagaatcatttcaaacaataaaaaccattatattagcgccgatattagtttaagctcagcagatcaatatatttattttaagagcattgtcgcattanatgaagtgacttttatatttttatattattataatttcaattatatatctgttgtaaaggaaattccanaaatcgtttaccatgaaaatttgat

SEQ ID NO: 39265 - DNA, 1024 bp, Heterodera glycines
accagttcaattttgtcacccctcccccctcccattctcgtccccctttggcgctgatcggatcggtcagcagcatcagacccatcaggacgaacggcgaaagagggggccattccctttacggcacagcgagcggagtgagcagagaaaaaagggacgagagcggtgaagaggagcgggaaccaatcccgcctcagcttggcctaccccaaccccaagcgcgcggcgcaaataaaagattggcgacacatatacttctgaacaattctaatgctaaaaaacaggtactcacgcgaaaactgaataaaaattttgtatttggaaaattttgtccaaaaatttttatgttctaaaattaccggtttttaccggtaccggtaccggtaccggttgaaaaagttggtaccggtaccggtaccggtttttgcagtaccggtcagtaccggtaccggtttttttgcaattaccgattaccgctcaactctaattggaaggtgaaatgttaccatggctttcatggccaagtcagttctttttgacatttttcggcatttttctgctccatgtttttgacattttatatttttattaatctcttttttacaatgtttgtacatttaaatttccctaatcattttatctcggtttattcaatttaattttttttgaataatattcaattcagaaaaaaaacatttcgttttttattgaattacgaatttataacaataaaaaatggatagtgaccaaaaatttacaaaattaagctgtgaaacaactggatcttccatccaattcggcgcccgcccaatagtccagcgcaaaatgtgaatttgtttctatcccttaatctcagggtttatattttgttttgaaaattggcattttccggacttttggagttttttctgaagatccctgtttttaccgggtttataaaactaaaaatatataaaattcaagtaaaaattcttaattttttatttttttagttttcttttaaaaaatatttttttcttttttt

SEQ ID NO: 39266 - DNA, 840 bp, Heterodera glycines
atccaataaaattaggaaatgggcgggaagcgctcgtccggaggccgggagcggctgaaatgatcacataaaattatgaaaatggcgcgaagcgcccgtcctgaggccgcgaagcggccgaattaaaccttaaatataaaaagggcgcggagcgccctttgaggccgcgaggcggccgaattaaaccttaaatataaaaagggcgcggagcgccctttgagtccgcgaagcggccgaaggtcctccacaaaattatgaatgcgtcctcgcgatgactgtagactgaaaattccttatcacatccataaattcatttcaaaatcgcgcatgcactagcaacgaagtcctttgcgcgaagcgctcatgtcagcgcccgcccatatatacaaaaagtatactgtgtacaccgagcaattactgtgcaaagcatactgtctacaccgagcaactactgcgccacacgctagtttatatatactatagaataatgttgcagttcgtagaaaaaattataagtccccgtggtttgcccggaggctcctgaaagtgcggcattgcttaagcaactttttgaggcgcatctgggaaaaataaggatttttcggtccggcggccagttgagcgccagcgacgctgaaacggacaaataaaaaaaatcgtcgcggatttcgggctgtaacttttctcagggaaccgggagcggaaaaagtccgttgagagggcacacccctgacatgttggctacaaatttgccactgatcactttttgataagatcagatgccgagcctgaaaaaattgttgactgaagcgcgctctaaatgtcggatttgacttttcg

SEQ ID NO: 39267 - DNA, 1175 bp, Heterodera glycines
  unsure (1)..(1175): unsure at all n locations
agcagaatgtgaattctctcatttgttactttatgatcattttgtctaattcgcaaatttacagctcattcttcgcgaaatataactgaaatcagtgtttgcggaggaccgagctgataagtcncaataatctccaattacaaattttcatgatcacttttgtgatattctcaatatttcaatttcttatatccaaatgtaatctgtataagtttacagtaggaaattgtaatttgggggttattggcgatttcaaatcgatccttccggaacactgatgctgtttatatttagagcgtaatgagctgaaaatgtcagaattcaaaaagtggggtcgcgaaaatagtaaatctgaggttattggcgcttatcaacctgatccgtctgcaacacttaaacagtttatatttaaagcctaattagcagaatgtgaaattctctcatttgttactttatgatcatttttgtctaattcgcaaaattacagctcattcttcgcgaaatataaactgaatcagtgtttgcggaatgaccgagctgataatcgtcacaatattcgattacaattttcttggtcacctttttggaattccaccatttcaactccttatcctctaaatataaactgaatcagtgtttgcggaggaccgagctgataagtcccaataatctccaatttacaattttcatgatcacttttgtgatattctcaatatttcaatttcttatatccaaatgtaatctgtataagtttacagtaggaaattgtaatttgggggttattggcgatttcaaaccgatccttccggaacactgatgctgtttatatttagagcgtaatgagctgaaaatgtcagaattcaaaaagtggggtcgcgaaaatagtaaatctgaggttattggcgcttatcaacctgatccgtctgcaacacttaaacagcttatatttaaagcctaattagcagaatgtgaaattctctcatttgttactttatgatcatttttgtctaattcgcaaaattacagctcattcttcgcgaaatataaactgaatcagtgtttgcggaggaccgagctgataagtcccaataatctccaatttacaattttcatgatcacttttgtgatattctcaatatttcatttcttatatcccaatgtaatctgtataagtt

SEQ ID NO: 39268 - DNA, 885 bp, Heterodera glycines
ttatcgaggtcaattttcaactttcaagtcttggcttttattactgatccgatttgcgtgtcttatttacctaccgctatactatggaataattaccgtatgaaatttttttttaaaaaatcaattatatgcatttgagtattttattgtaattaaaaatttggctcgcattttcctattcctaaatactatgaatagctctgctagctgcctgtcctcagatgcaccgaatgtggcgaaggggaggggaggggagggccaaattcctcaattaatgtgatggacggggcgatattttaggaaaattcctcatccatacacccccaaaatcatcgccaccacatacataaaaacgctcggcaaacatttggtggacgacaaaaagaggaatttcgtttcgagcggcggcgcttcgtcgccccccccccgccgggccccgcttcttcattgactatcatctcatctcaccccatctcatatatctgttgccacttctctcaaaagcataaggggcttgcttatccagagtctgtactcttgctctggttcagaggtgcacaatgttcccccccccctgctaattgagcataagcgtaccaaactttgcagggatactccccggtaaaggactaacttacactgaaatgagcgccgagctagctggctcaaaaaaattttcgaaaatctgagtctttcgtttttatttattttttgcaaaattaattcttaaatattttttcagaaagggttctgaaacgcaccaaattttatttacatgttagtttaggcactctgatgctttttctatcaaaaagggagatgaataaaatttttaaaaatttttaattcctttttaaacagggcaaaaagtttaggcttaacttt

SEQ ID NO: 39269 - DNA, 760 bp, Heterodera glycines
atgaagccgcacttgccgacgatgacctgtacaatcccataaatacagtcagaaaccacaacaacaaaagggcgccgacgatgatgacctgtacaagccgccgcaacaatacaatcaacagcagcagcggaagatgggccgaccgaaatcgtatgaagatgagcttgacgaagatgatttgtacaagccaaagcaatacaattagaccgagcctatattatatgtctatatgcttatgtaataataatatgtatgttttatgtgtgtgcgataacgagtgtaaatattcatttaataatgtgcaattctggaaaactcatcatttgactgcgatttgacaattgaaaaggattttcattaattgaaaggttttataaagtttgtaaagggcttaacacaaaaaagcggaaatattgaacatttttactgaaaattagtcaaatattttagggcgtggtgctagatcgaaccgaaaatagtctcagtgtgggcgaaccgaaaaattgtctcagtgtgaataaaaatatttaaatttaatatacgattcactaaattatataattatataataaaataataacgtgtgaataaataattcccaacacgtataattttacgagctacgcaaatataaaaattaatatacatatgtatggattttatatgttaaccgcttaaataaatatataattataattattttatctgttagttgtatttatttatcgaatcattatattgatataaattctaaaaatga

SEQ ID NO: 39270 - DNA, 1015 bp, Heterodera glycines
  unsure (1)..(1015): unsure at all n locations
gtaattaggccatatcgaaatattttttatgtttaaaatttttgtnggatttattattaaattttttttatttttcaaaaattgcaaattctctatcaaaaatgagatgtgccaatcttttaggaaattaaatccttaattaacccttaatccatgccagacgaattacaattgccaaataaaaaagacaagtaacgaacaaataagaagtgacattggacgaaaactttccttaaattaagagttgtttccaaaaaaaaatatttccatgaaatgccgaaatttggataaaaaatggactgaaatgtataaatatatggaaaatatgtattcggtgcccttaaagaaatttttactggatataaaaattcgaaaataacttccgcaaaatttttcaaaactttgcacaacatttcaggagtcggaatcccgcaaccgaaaaaaacaaaattttttttctggtgtccaattttccggtgtccaatttaccggtccccattcgtatcgcatcccttccttattttcaccccatctttaatccatgagacacagaagtgaaatttgtcaacgttttttaaaatgtattattttgtgacgcacactattgtgcctctcatgctttagagagagcacatgtgttgaatttgtcaaaaaagttatttgttattgtattgttgtgagatgaccctgattatggtgttatcgtacctttgataagcccaccacagaaagtacaatacgtggaataatatcctttattccgatggtacatgtttaacaatggtgagctttcccgattcggagcggggagggagggggtcgggatccggatccaacggccaggtggagtgacgtgtgtatggacaaaggaaaagcatatacaagcacattgggggaggagacaaagggaaggaccgccccaggcaaattgtcatatggctataagcaaagaagagggagagaagaaaaagagtagagacaatgagaaaaagagtaaatgattagaaattagtca

SEQ ID NO: 39271 - DNA, 1301 bp, Heterodera glycines
  unsure (1)..(1301): unsure at all n locations
catcctcattgcctagtctttctcttttttgtagtcctttctcagcttcagatacttgtctattttcaatatctttacgtttaatatgctcacccaaagcctcattaagcctattcactatcccgctaaaaccctttccngatttatcattatatccctcgagagttgatgtatatttggtctttgcctgtctggcgattccctttgcgacgtcggctgatttctttgcttttttcaagtcattcttttccacatgctccaatgttatgtttttggctttatctacttcttcttgaaaagacttaagttcatttcgggatgtttgaatttcggttcccatctcaaccattttgtcaaaccaaatttttatatcaggctcttctaaaatgtgaggatttgtttctcgtagtgtgtttagttgggtttggatggaattcgagatattgttgatctgattaaaatgtctttctacgtctctcccggcgcgttctgcggccctctttgcgacatcaatttttgagtctttggtatcttcagccttggcttctctccttccacgttgttttttgattttgtaatgatggctgaatgcctcgttaattttatttcccaggcccccggcggttttaaaattcatgtccggtaaataaacttgagtcgggacactgctgtcgttttcccatactttaataaactcttgaccgtttataccgagtgcggtgaatgagtaggggtaaataattgatgagagagctactgaccaatttgtgcccaattccagagtctcggggagtcgaactgtgaattttgatgtactgttccctggtcccggtgtgttcgagggtagtacaatgtaaaaatcatccatctattttcactaattcctggttataaaatatgccttttattaaatttccttccaaatcttcaatcctgtatgaatcgggtgtcgtcggattaacaacaacgattttaaacaattcttcggtaaagtttgggagatacccctttgcaaattttcctttttccttggtaattcgaacgatatcgccaattttaaatttgttctttttcgaaattttaaattccttcgccttatataatttttcccagagcgcacgggcattttcaaaattaattgaagacggtttggctcccaatgttctattcacactgttgttaatgtttgttattattttgtctattacatcgacccatcgtagagtgtctttctttgtaaaatatctgtacaagcgctcttgtattgtccgantttgccctttcaacgactccggcgtgca

SEQ ID NO: 39272 - DNA, 1410 bp, Heterodera glycines
aagggagaaaggggaggggaaaagaaagaggagagaaagggagaaagaggaggggaaagaaagagggaagaaagggagaaagaggaggggaaaagaaggaggagaaggaagggagaaaaaggaggggaaaagaaagaggagaaaggaagggagaaagaggaggggaaagaaggagaggaaggaagggagaaagaggaggggaaagaaagaggagaaggaagggagaaagaggaggggaaacagaggaggaagaagaggacatgtcaacgtcaaatcccaacgcactttgaaccgctcaaagaacccgtaacggttgaacagctcgaagccgatgtacttgagagagtgtccgttggtggcctcgttgaggtcgaaagagtcgaagttccaattgttcacttgctaaagtgggagggaaaatggccaaaaaggaagagaaactgacccgcaaaaatggcaaatattcgtggggaatgggagcctaaaataaaacaaaaattgggatttttaatgttcaaaaatgtctgtccgtttcgccccactgaccaaaacggactgcgtccgacggtaaattctgaacagagtgaattaattgcatcaattgaactgactgatttctgctgctgttgcccgtggggacaaacttttcgaaaaagatgcccgtccgtatggcattggccaccgatttgaattttggtttttccttccgcgattgcaccgtttggcgagtgaatgtcgccgtcagccattcgcgcacttcgtccggcaccgcctctggcgtgacctccgccaagtcgtcgtcctcgtcgcaaatccgcctagagacagacggtaaatcgccgagggcggggaattatcgacacaatttgagacagtcccaccgtgtctcgtccatgtacgccgtctccagcacaagcgccgcatattcgatgttccgtttaaggtcttccaatgacaactgaccgccattaagctggtggagaatgtaacgcaatctgagggggagaagcgattggatggtgaacgaaacaatcttcaaaagccatgccaatgaaagtgattgactattaccattaaacagtgctccaacattcattatcctcattatcccctttccccccgcccgcctcaaagtcacttcttgtcacactatcgcattcctttcacctgcacgcgtgcttccgcaacaccaactgatagaaaccgtactggtccccgatgatcatcatcgtacaaagtaattacagggtaatgcaattgaggaaaacaaactaatttggagggagagatgtcgccaattttacaaatcaaaaagtgcggaggaaaagggaatttcgtagtgaaaacggagaaattagcggcagattttcactttaaaaggttcatttcctcgaggatgatgcttcatct

SEQ ID NO: 39273 - DNA, 622 bp, Heterodera glycines
ctggggtggggggaaatagggttggattggctaaaatgggtgttagcccttggctgattacggttcgggactgggcataatggtcgcgggtgcccgtccctgcatttggaacacacggctggggagggacattggcgtgccggatgtccggtcttgaggcatttgaagcaacggttaagggagcgcaaacgttgtaagcgactttcgggggtgccaaatttgtcacaattactggaaaaatggtcgggggaatcgcagaagagacagggcaatttgggacggattttagacccggggggttgttggggctgagtacgggattgagtatggaaagtgagagtaggctgggggttgaaagaagaaccgaatccgggaggccgtggggatggcttaggacggggcccatggtcggttttgggcaaaagagtgtcgatttgttcctttctcttgagaatagaacggagcttatctcgcagccgatcagtggaccattgtcccgctgattcccgggccaaataaatttcatccaaaatgtaccgtgggagccgctgttcgacttccatttgtatgttgatcgtgttgtgaggttgctgctgctgtcccgtttgcacacaaatcgctt

SEQ ID NO: 39274 - DNA, 672 bp, Heterodera glycines
aaacgatttcgttttgttttggcagtatgataccgaataactttcggaaattatggaaccaaaattggagaaattcgaataattttttgactgcaaatttttttcctttattgaattgggttcaaaaaaattataagagaatttttgattattaatttgaagtcttgaatttatttgacaaatccaagacttaaaactgggagaagcaaggggctgtggctgggggcctaaaatttgggccacattggagaattaattctgatttctgaaaaagtcccagaaataactattttttctttccataccttcatgtagagctcgagctgctctttccagtaggacttatcccaggctcaatccgtgaacgaaatcgcgagattataggaatgaaatgagagatattgatatcaccgctaggaatttttactgataaccactttctaaagtccggcttatgggatctgctctgtatcacttacttctgttccccgttgctgatcgtatctgcgatctccgtcactgatggtcatatttgacgacgattcctccatcttctgaatttgttgtgcctaatttctttcagaagagaggcaaactatgctctatagcatcaaatcctattttgaacgcattatcgcccgacttaatgaatcgggtctgaatcacttactt

SEQ ID NO: 39275 - DNA, 812 bp, Heterodera glycines
cagaaaagatggtgatggacagctgttggcctttgcacaaagcgtgaccctccgggaatttggcctcacattggccgctttgtccggaggcaatgatcgctttccctcttatcccttccccgccctccctaactcttttcttagctttagctctaatgctttttgtctcttctcgcggcaatgatcaatcgcttactctgtcttctctgccacacattctccgccccttttcgcttctctgtcgtgtctgattttgtggcttaagtgccttgggctgcgaatgagtggaatagagaaacataccgagaacagccccgcccgctgacaaagcttaagggccgggcggggggggggctttctttgtgtctgcctctgctttcgtcagcttttcctttccctcccaatcggttttccgccattggcacactctcttcccactctttgttctcccttggtgtcaatctttcgccgtgctgcactgtctgtgctcgcattgtcccccggggcgcggctttttgtttgcttctctgtgttctgcgctgcctctttcagcgggctccgccccttccgctgatcgcccccaaatgcgttgggccccgggagggaacaaaaaggcttggcccggcctccgatccacttcatttttgcttgtcgacgacagcacacacagccgaaaagcgcttcttctcatcgccttcgccttcaaaacttagaagcaccaatcccaaccagaaaaaatgtgcgacgaagaagttgctgctctcgtggtggacaatgggtccggaatgtgcaaggcgagttttgggatttgg

SEQ ID NO: 39276 - DNA, 381 bp, Heterodera glycines
cgcgagaatgtaaaaagcgggtgcgtagcgcccgtctgaggccgcgaagcggcctaaaaatcgctgataattttttaaaaattccaaatcttttcacaacccgatagctaatctaggtagcgaagctcccaaagcgcgaagcgctttatccctgtgccagatccgacggttcacgcacccgctagttatatatatgttatattgacaaggagtttcgttgctaaaaccattttctcccggccgaaggccgggagcgccctgaaagtggtggaagggtcttacaactttttgaggagcatccgggaaaactatagaaaaaaatttagcgcggacgactgagtaaccagggacggatttctcattttttcgtgcatttggggg

SEQ ID NO: 39277 - DNA, 1738 bp, Heterodera glycines
  unsure (1)..(1738): unsure at all n locations
aaggttcatcaaacttttacaaactgcgcctatttgcactgcgnatttctcaataaattggttttttcaagacctggttcgaactggaccctgatcttccggatccagcaccacccggacctgactttttcaaaatacccggactatcctattttgtagtttttaaatttcattaattttaaaggaaattcagtcacttagttttggtaactccctccctcccacttgggcaaaaatgtttgataatttataaataaagaaaactcatttatgaaatatctttttttgaaaggttattcggcaatttgccagtcgaccagttgccaccaccaagcaatttaattggttttaaagagatttacatcaggtagataaatacttttattttgtatataaaaaattcttatcccccatgctgcccctataaaaaatgtaagaaaaattaaaaacaaaataccttattatgtatatagcacatgtttcggaacctaaatgaattcgactcaatccaattttaaatttcaacaataatttttgctagattttttaaaaaggaggacacgtagagctctagctgcctgcttcttacaataccaagattgattatttgattaaatttagctaaattatgatttattattttgcaaacaaataatataataattaaatttaaaatattactatcattgatacttttgtaacttcttctctccacggacaccacaccggtggtccgggggtttggagatttagtaaataaataaactaaattaataacatttaaccggcacgttcagttactttgacaactctgtgctctcattgctccattgcttaacgccgcttttcaaaatgggcatcacattgaaacatatgggagatgggatggataaacagaggagttggggactgttcatccacaaaattcttcctctgatcggcatccccaacatccacaagttgttcgttactttcgggtatgttttggccaacaatgactctttgggcatctcagtgatcaggattaaatagatcagtagggtggggaattagattacaaaaaaagcccgaaatatttaagaaaatattgatgaaatatctattttctatctatttcggtatttttggtacgtgtttttagaaaaacccttaacagaaatgaatttaaagacgaaaaacgcacttatacgaatctacctaaaaaatttctaaagggcctatgtaaaatttcaagaaaatttgaattttttacaagaaaaaagttttttctttttctctcattttggcgtattatttcaattgtacttggagcccaaaattgaatcgccatattttaaatacctaaaatttgcatccttagcaacaattattcccaatttttagtggcgctaaacgactgcgtggactgctcacaagcacttcagcagcttttctgatcgaatgcccaaatctccgatcaatttactatgattggtattgcaatggccatgatcgtcccgttgacgccaacgcaaaagtgcgggaatggcttctgtggccgcgcgcggatggccgtccgaaagtgttgtaccgctccttttgctacgatataagcgacgaatacaatcaggcaagcggcggaaaagcaaatccataaaaatgataattaatcgaaaagtaagagaggttgaaagataacagagagagagagaaagaatgggagagcaaaagagggaggaacggggagggatataaaaag

SEQ ID NO: 39278 - DNA, 1103 bp, Heterodera glycines
  unsure (1)..(1103): unsure at all n locations
tcacttcataatatcgcaatttttttattttgttatctttcgataccagacaaacagacaaccgctccgcaacagnctggtaaatgctccttcccagtagaattcaagcagttttccataatattttcttcgccgagattttgtccatcgattgactcgccattgcggcatttaagtgctgaattaaaacataaaagaatttcttattgaaatataactaataaattttaactgaaccttcaaaattttaactgaatcttcaaaccttttaaatatgtcgaaagggtgagcataataaaaaaaataatattaagcatttgaccaaaaggaaaataagttccagaattcagcaaataatagaagcaaaaatttttatattgtttgataaatttgctgtttatatatatgttatataggttttgagtttcgtttcaaaaactaattccggccggccgaaggccggccggggtctgaaagtggtggaagggtcttacaactttttgaggagaattcgggaaaactataggtttttttctccgagggacaactgagtcccagcggctcgaaaactgactttgccgccagtctcagtgttacgaaattttttgcttttgctttctgagcttagcggaccccaaaagcgaaatgccccaactatggcctacaactttgccagcaaaaaatttttgatcagatcaaaggcctgacctgtaggttaggcaacgtaagaatcactttttttggacacttcagtaccaggcgaatagctcgtaagggtttgaactgagcgagggggtgccagcagacttattgtagagctcaatgagcttgatttttccaaattttaaaatttcgaaaattttcaaaatttttcgagttaggcctaaaattcggtttttcggtttttgaattttatgattttttaacgatttttccagggaaaacgaagaccacttccaaaacatcgtttttcgagctctatcgattagtgatgtttttagaaaattttcgattttttccaggaaaatagaaaaattttttggcctaagcgggacatttgagtcccggggccataactcgtcgggggtgggtctagccaaaaa

SEQ ID NO: 39279 - DNA, 1834 bp, Heterodera glycines
  unsure (1)..(1834): unsure at all n locations
agtggtttcgctgatgaccaattacgttggcactcccacccattccttttccaagtcatcgctttgttcggatgcccctgtgttgcgggcgcattgaaaggccaactgatcggctgctcgaagggcggcgacgcaactcttttggccgacatcgaagcatctcttggcactcattttgctggtaatgatggactaatggatcaaatccattgccaaattagccaattaacttattttatttagtttagttattttatgttttccgccttttagatgagtgtgcccatagcctcggcttcgtccgtgccatgttcgccattgccgcctccgcttcttcccatgccagcaacaacagtgaatggcaggcattgagtgccaagtttggtcagcaaatcagtgaaattgaatcgaatgtgccgagtttggcattggcatttccaaagtgccttttgacggccctaaaggtaaaaccaattagaatttgtcactaattaattatgttgtacgatttaaggagaccactcccaacgtaatgtgcctggcaggaacagtgtgatttccatgcccggattgaccggctcacacaaacactgaatgatgagttgatgagtgactgaatagaatgaaatgattgtggtgagttcgttttggattttgtacagcaattagctgttgtatttctgtatttagaataaaataaataataaattgcaattgcaattgaatttttctaaatgttgaatatgaattttcttttatgagagtctttgtactttattccaattttggcacatttttgtcctcgttttctgtcctaaaattcaaccctttcatgacaagcacatcctgacaacaaaagaagccgcccccccccccccgttcatgttctttcttcccaatcgcatcatttttattctccacccaattcattcgcaattcattcttctgttatggctccataaagtcgcctgggaaagtgctaaaaacgcgatgaaaattggaagacgaagacgaagttgatgatgatgatgtgatgatcaaattcagcgatcggagcaatgagcggacgaatgaatgaatgacccgcgcgacacgccgaagagagtcaataaaaagggcggcgatggcaaaacaaacgaaggcattctcaggagaagaagcagcggaaaggacaattcaccagcaaagactcatttcagacaatcggacaatatgtatcaggggtgggacaactctcgtctctcgcctctcgccatttttggtactctcgcctctcgtctctcgcctctcgttttttgggacgagaggcgagagttgaaaatacacccctaaagattgaacttttgagcagccagaaaaattttcaaatttacgcgaaaaaaaaatctcaaatctctttctttccttccttaatgttttctctatttttggatatctccaattcaaatatggtctactggctaaaccttctgcctttcattatttttctcttgggttcaattccccaacggtacagaatttttttaataatttctttaaattatttttcaattgaaattttaattaataaaaaatatttcaatttaaaaattattattttttctttttttaaacagcctaaaactgcaaatttaaccaaaactnntgatcattntttgacaagttctggtaatatattacactcaaatntagaaaatttttttcccggcggcgtctatcgggcaccgccggaacccnngcaccatgntnccaaaaaaattttttttgaaaaacagcgccacaaaaaaagcgacttaaaaacaaaaataaaaaaaacaaggtttgggcatttttt

SEQ ID NO: 39280 - DNA, 997 bp, Heterodera glycines
gggaatttttaaatttattctttatgccagaaaaaaggctatctcttttttgcgagaaattttgtaccatacaaatgttcccagcgtgggcagaggggcgcggagagcaatggccattctattctacagggcattttttaaatttattctctatgccagaaaaaggctatctcttttttgcgagaaattttgtaccatacaaatgttcccagcatgggcagaggggcgcggagagcaatggctattctattctacagggaatttttaaatttattctctatgccagaaaaatggctatctcttttttgcgagaaattttgtaccatacaaatgttcccagcatgggcagaggggcgcggagagcaatggccattctattctacagggaatttttaaatttattctctatgccagaaaaatggctatctcttttttgcgagaaattttgtaccatacaaatgttcccagcgtgggcagaggggcgcggagagcaatggccattctattctacagggaatttttaaatttattctctatgccagaaaaatggctatctcttttttgcgagaaattttgtaccatacaaatgttcccagcatgagcagaggggcgcggagagcaatggccattctattctacagggaatttttaaatttattctctatgccagaaaaatggctatctcttttttgcgagaaattttgtaccatacaaatgttcccagcatgggcagaggggcgcggagagcaatggccattctattctacagggaatttttaaatttattctctatgccagaaaaatggctatctcttttttgcgagaaattttgtaccatacaaatgttcccagcgtgggcagaggggcgcggagagcaatggccattctattctacagggaatttttaaatttattctctatgccagaaaaaggctatctcttttttgcgagaaatttgaagaatacaaatgttcccagcgtggcagaggggcgcgga

SEQ ID NO: 39281 - DNA, 791 bp, Heterodera glycines
ttccgcgtgttggccgtcaacgaagcgggtccgtccgcaccaccggccctgtcagcatcgcaaatctgcacggcgcgcttcctgaagccgcagatcatcaccgcgcagcgcaagtggaaagtgcgcgcaggcaacacactgacgctgggcatcaattttgttggcacgcctgacccgtccgtgtgctgggtgaaggcaggcgggaccggcactctgccacccgagctgattatggaagaacaccgcccaggcaacacgtcaatcttcttcccagccgcaaagcgctctgaatgcggcacctatgagctacggctgaagaacaacgtgggcgaaacggaaggccactttgaagtgctggtgcaagaccgtccggcaccgccgaagggatcgcttgcggtggacaacgtagcgcgcgactcgtgcacactgtcatggcaaccgccggaggacgacggtggctccgaagtcaccaactacgtggtcgaatgccgtggtgtgggcagccaagtttgggtgccggtcaacaacgttgttggcacaaacagcaccgtgccgaacctgcaggagggccacgaatatgaattccgagtgtgtgccgtgaatgcgtttggctgttccgacccgttgaacaccgactcggccgtggtggccatggacccatacggcccgccgggacgacccgaggtcacggaccacgacaacaatcaaatcagcatcaaatgggcaccgtcgacggacactggcggatcgccaatcgcttattatgatgtgcaacggaaggacgcaaaaac

SEQ ID NO: 39282 - DNA, 462 bp, Heterodera glycines
aaaaaagttattgtcataaaattttaaaaaaatgcagtcagaaatttttgtcctgaacttttttgaaactcaatggaatttttttaattttaaaggtaagtagagagagaattcttagagctatcgaatatattaattattttggctcaattgcattttaaagattttaaattttaaatgtttataattacatatgcatgatcattgaaaaaacataaaatagcatgttcaatgctttataattttttttatatttaaggaaaaatttttttaaatccatattcttatagagatcaattaaagctattaaatgataccttgaaatattaatttgttgaatttgaaccaagttatgaatttgtttgtgtcaccttttttgttttcgaactcattggcggatttacgaaacgcgcatgggtggcggtattaacaaagtacccatttggcggatttacgaaacgc

SEQ ID NO: 39283 - DNA, 1164 bp, Heterodera glycines
aggaatcaatttttgggaaaatttttcatttcgtagaggtgtatatttcgtttttattccaaattttgtaagttttttttacgaaaaccctataataggcattgtaaacgtcatcgtagacacccccaaaccaagcttaaacgtgtttttttgtgcttatttatacgtatcaaatgccgcagaaattttaaaaatctacctaaaaaacgaagccctaatgataaataatatcgaaaaattttaatattaataattattatttttttataaattaccgctatgagcttttcaatggctgcttcaaaggaaggagcatgatgaagatttttcatttcggtattccagaacattgtggccacttgattgcgtttcaaggagtacatgaaacgtcctggaaaaatgtttatacaatatattaccgtatgtcccatagggcatgggacgggacaaaatcccgccgccgaaattgttttaaaaaaaatttcctaacatagaaattttccatcaagaaaaaaaatttttttacatttgaaggacgaatgggaagcctggattatacaaagagtttcacattcaaaacgaaaattaaactagctctaagaattctttatttaactttagaaatttcattgagtttcaagcaaattatagacaaaaaattctaacttaaggagacttattagaattttataatcataacttttttttaccattttaaaaaattttgtaacttaatattcttatagaaaacatctagcattatttaatgataccatgaaatgtttaatttgattgaaataggggcaaattaacaatttttatatgttacacttttttagcgaatttttttgagattttaagcaattttcttaacaaaattacattaaaatactcaaaaaatttcccggcgtcgcctatcggcaccgccggacccccattttaccatatatttttttgaaaaatggagatcaaaatgggaaaaatagtaatttttggcgaaatacgtcgaaaaattttgtaaaatacacccactaattcgggatttcacaaaaaaacaaaaaatacagtcttaaaaatcgacggaaaaaagaaaaatacacccctaaatcctaatttttgacttaagcccccccccgaagccaagggtctagctacgcccctgat

SEQ ID NO: 39284 - DNA, 960 bp, Heterodera glycines
gaagcaggtaaagaagcaatgaatctgattggaggaatgcttcaaagtattcaattaaccaaactgatcaaaagcactcactcggctggcagtttgaccaccacagcgagcagcagcgacgacggaggcgaagtgaacgggtggggcgtcgcgtgctgttccgctgcgtcttcgtccttttccggcaccggcgttcttttccttgccgaagcggtcgtcgattttctcccaaatttcgtgactttgaattttcaggtgtgggaacatgtcgcaatgcttcgtgatgaattgcctttccgtgccggagaggaagttgccgtgctcgactgtccctccccccaactttggtacggcgtttgcggcccgcgcagcggatggtttccagcttcatatgtgcgggtaaatgtgccattcggcattgttcttgggttcttccttcccactcgccctcttttcggcactatcatccctccccccccctcttcccccattttggcattttaaattccaaggtttagcccaggaatagggacttgtgcaaactttgtgctggtggtcaattggaagcgttgcacaagttcgacccttccgaagactttccatcgcccgaaatgcgtttgctgagacgacgaattgtgcaggaactgatcagcactgagagggaatacgttcgactgctgaagaacctcgtccaggcaaaacatcagaccgaatgagcgcataagcccaaaattaatcccattattccttcgtcaagggatttgtggaacagtgccggcgccgtcgagagttattcccggaggaaagggtgcagcgcattttcggcaacttggagctgattctgatgctgcactcgcgactgttccgcgagttggagacggagttggacgagaaggagccggaaaaaagggccgttgccaatgtgttttgagaaatggaattattgctctagaggtcccc

SEQ ID NO: 39285 - DNA, 1621 bp, Heterodera glycines
  unsure (1)..(1621): unsure at all n locations
tttttttgatccgcttgtgcccggtggaacgcggaatttggttgccggtttccgagagagtgccgcctctgccgaatttctggtgcgaattgggcgttggtggcggaatggaagaaagatggtcctgaagaaatgttttaggtgttattttccaataaattatgggcaaggcgtgtgcccgggcaagcaaaaaattatccgaggccagtttccagtgttttgagccttttttaaaaaattttactgttttgggatcgctgtgacttcccctctattttctcattggaaaatgaattctgctactcttctctctacctgattcatgaaagtgttttcacaaccgccgaaatttggttggttctgtaaaatgcaaaacattaatatttctcatttgtttaacctttcaattttcgtttcataatttaaaaagtggaaagcctggtagtgttattaccgtttttaacttaaaactcggcaaacatatcagaaaatgaattccggaatcgaaatttttgtctttgctcgaaaaaaaactattttggtttttgcgtcattttccatcaaatccctctctcccctcaatttcacatgaaatcatcaaaagtggattctgttgcgccctacctgaatctgtttgtgttccactgttggtggagcaaacggcggaacagaagtgtcggagacaatggacggtcctggagaatttggaattacaaaatttcgtaaatttgttttacccggaaaaagttgcagtttttgttcctgttccatttttgcaatctttgcttggaacacgcgcatttcttccaggtgtttcaactttacgttttctagttacagtttggtctaatgaaagaaagttaaatgatttttaaaagattttaaagtaaaacctacgttttgatgttccaatttggcaattgtctaatgaataagttaaatgatttttaaaagattttaaagtaaaacctacgttttgatgttccaatttggcaattgtctaatgaataagttaaatgatttttaaaagattttaaagtaaaacccacgttttgatgttccaatttggtaatttccgtctccaactctttgcaacgttctgcgagtttctaaagaaggaataacctntagtgagatattgctgaaccctgttttcatttaatggtcggattaaactatcattttattccctgtttcttacccgaattattttagtcctaatccaattaaactgttttttctttaaaaaataatcaatggacgaagaaactcgggtaacggcccagcgaaggtcaaagggaagtgcgccagtcatttcgtaaataagctcgggtggcaattgtaattttttaaacaattgcatggctttttggttagaaaaataaaaatcttttagtgaatgaggtggaagagggagtggagtttatgtgtcgtcgtaaataaatctctccctcccctttgactgatttgtgaaggattttcggcatggcatactttgcgtaagctgtaacgactacacagacatatgtattctccgtccttattaaaggtgctcgtcccaatttgaaagggaaacatcaaagacaaatttcaaaaagccgcccaagcttatgatgaaagg

SEQ ID NO: 39286 - DNA, 1078 bp, Heterodera glycines
  unsure (1)..(1078): unsure at all n locations
tttttgctaggcttagatcacatgcgattttcggcactctgataatnntagcgctcataatgggatgtataaaggcgattgtagaaggaattggatgcgctaaaattgtttgagaagctttntgagcgtaattacgatttttacttacaccattttttgctaggcgtagatcacatgcgattttcggcactctgataattttagcgttcataatgggatgtataaaggcgattgtagaaggaattggatgcgctaaaattgtttgagaagctttttgagcgtaattacgatttttacttacaccattttttgctaggcttagatcacatgcgattttcggcactctgataattttagagttcataatgggatgtataaaggcgattgtagaaggaattggatgcgctaaaattggttgagaagctttttgagcgtaattacgatttttacttacaccattttttgctaggcgtagatcacatgcgattttcggcactctgataattttagcgctcataatgggatgtataaaggcgattgtagaaggaattggaagcgctaaaattggttgagaagctttttgagcgtaattacgatttttacttacaccattttttgctaggcgtagatcacatgcgattttcggcactctgataattttagcgctcataatgggatgtataaaggcgattgtagaaggaattggataagctaaaattgtttgagaagctttttgagcgtaattacgatttttacttacaccattttttgctaggcttagatcacatgcgattttcggcactctgataattttagcgctcataatgggatgtataaaggcgattgtagaagtaattggaagcgctaaaattgtttgaggagctttttgagcgtaattacgatttttacttacaccattttttgctaggcgtagatcacatgcgattttcggcactctgataattttagcgttcataatgggatgtataaaggcgattgtagaaggaattggatgcgctaaaattgttttgagaagctttttgagcgtaattacgatttttacttacaccattttttg

SEQ ID NO: 39287 - DNA, 961 bp, Heterodera glycines
  unsure (1)..(961): unsure at all n locations
agttgcatgtgatggcaaaagttgtgaaattcacttccattttacggccatgaattgccgggaagtgaggcgatcaaaattcataatgatagagaatgtgtggctttacctgttttgaagctaagtcgggcatctgacggctaatatgagaataaagtgcagttctctctttaaacgaactgattttatggccactttctataaaggcgatggcggtcgctgtatgaccgtaaacccagttttttgtatagaaaagggttgtcctaattgcaaatggatacagtatctgatttatttcacaacgccaacacgccgttgaaaataaaaacacaagttgcatgcgatggcaaaagttgtgaaattcaaacgcattttacggccatgaattgccgggaagtgaggcgatcaaaattcataatgatagagaatgtgtggctttaactgttttgaagctaagtcgggcatctgacggctaatatgagaataaagtgcagttctctctttaaacgaactgattttatggccactttctataaaggcgatggcggtcgctgtatgaccgtaaacccagttttttgtatagaaaagggttgtcctaattgcaaatggatacagtatctgatttatttcacaacgccaacacgccgttgaaaataaaaacacaagttgcatgtgatggcaaaagttgtgaaattcaaacgcattttacggccatgaattgccgggaagtgaggcgatcaaaattcataatgatagagaatgtgtggctttaactgttttgaagctaagtcgggcatctgacggctaatatgagaataaagtgcagttctctctttanacgaactgattttatggccactttctataaaggcgatggcggtcgctgtatgaccgtaaacccagttttttgtatagaanagggttgtcctaatttgcaatggatacagtatctgatttattt

SEQ ID NO: 39288 - DNA, 566 bp, Heterodera glycines
cattaaaatactcaaaaattttcccggctgcgcctatcggcaccgccggaccccccttttaccatatttttgaaaaatggaggccaaaatgacaaaaaatattaattttttggcgaaaaacggcgaaaaattttgtaaaatacaccccgtaattcgggatttcaaaaaaccaaaaatacacccctaaaaatcgaatttttgacttcaacctccccaaagccaagggtctggctacgcccttggtatatatatactagagatcgacctggatccaggtccaggtccaggccatttttcggcaatctggatttttcctggacctggattttcctggatttttgtccaggaaatcaaggtccaggtcaaatgtgaaaaaaaatccaggtccaggtccaggcaaaacaggaaaaaacctggattttcctggacaaaattttagaatttattttttcaagtgaccgatgttttttcaagttttcaaaaacagattaaataaatttaaaaacacattattattattaattagtaagtttagatgtttctaagcaaataattaattttttcaa

SEQ ID NO: 39289 - DNA, 1129 bp, Heterodera glycines
aaaaaaatcgattttttcaagtgtccgtttggggtactcaaacaattatggggagcaaaaatccaacgcagaattaaagtacagactatagggaagctattcccgaaggattcggtctccccataaatctgggcgcatcggttcggggggactgccccgaaaacaaaaaaatcgattttttcaagtgtccgtttggggtactcaaacaattatggggagcaaaaatccaacgcagaattaaagtacaggctatagggaagctattcccgaaaggattcgtctccccataaatctgggcgcatcggttcggggggactgccccgaaaacaaaaataaatcgatttttttcagtggtccgttggggtactcaaaccattatggggagccaaaatcccacgccaaaattaaagtacaggttatagggaacttttccgggaagatttcgccttccccataaattggggcgatcgtttccggggggacttcccccaaaaacaaaaaaaccatttttttcaggggcccctttgggggaattccaaaaatttttggggaacaaaattccccccccaaaatttaaatacccacttttatggggagattttttcccaaaaggtttccgcctccccccaaaaaatttgggggccctctgggtttgggggggggcctccccccaaaaaccccaaaaaaaaaaattttttttgggaaaaaaaaattttttaaaaggccccgccccacaaaaaattattaaaaaagggtttttttttttttctttctcaaaccccccacaaaaagtgtgggggtctttttaaaaaattttaaaaaaaaaaaaaaacaaaacaaaattttttttttttttgtaaaaaaaaaaaaaaaaaaattttaataaaattttttttttttctcttttttttataaaaaaaaaaaacaaaaaagaaccaaaaaaaaaaaaaaaaaaaaaaaaaaagagggggggggcccccccccccccccccttaaaaaaaaaaaaaattaatttattttttttaaaaaaaaaaaaaaaaaaaaaaaaaaacacccccccccccttttttttttttttttttttttttcccccccccccccccccccacccaaaaaaaaaaaaaaaaaa

SEQ ID NO: 39290 - DNA, 912 bp, Heterodera glycines
atccgttccgcagagcctcttcaaattttttccatcattgcaagagctgcggaaattgtgaattaattctcagaaaaatggctatctctttttaggacaatattctatctcgtaaccccgatgctaatccgttccgcagagcctcttcaaaattttttccattaccgcaagagctgcggaaattgtgaattaattctcagaaaaatggctatctctttttaggacaattttctatctcgtaaccccgatgctaatccgttccgcagagcctcttcaaaattttttccattaccgcaagagctgcggaaattgtgaattaattctcagaaaaatggctatctctttttaggacaatattctatctcgtaaccccgatgctaatccgttccgcagagcctcttcaaaattttttccattaccgcaagagctgcggaaattgtgaattaattctcagaaaaatggccatctctttttaggacaattttctatctcgtaaccccgatgctaatccgttccgcagagcctcttcaaaattttttccattaccgcaagagctgcggaaattgtgaattaattctcagaaaaatggctatctctttttaggacaatattctatctcgtaaccccgatgctaatccgttccgcagagcctcttcaaaattttttccattaccgtaagagctgcggaaattgtgaattaattctcagaaaaatggccatctctttttaggacaattttctatctcgtaaccccgatgctaatccgttccgcagagcctcttcaaaattttttccattaccgcaagagctgcggaaattgtgaattaattctcagaagaatggctatctctttttaggacaatattctatctcgtaaccccgatgctaatccgttccgcagagcctcttcaa

SEQ ID NO: 39291 - DNA, 1024 bp, Heterodera glycines
cggcttatgattttgactattaaaaaagttgcagaaaaatttagctttcgcgttttttggaatttcgcttttcgcatattttctttcgcaaatttcttgtctcgcattttattttccgatttggtcgatccctggtgcggatactaacatttcaaaaaggcataacatataaattatcctttttttaaaatagtgggaaacgaactttttatcaaaatgtgcttttgctatgaaaacaaaaaatcattgtagacatttaaatgaatttcagaaaaattatgataaaaatttaaagaattcttctctaaattgtgactgtgaatggaaggatatggggaatttgatgaaggtaaaaactgaaaaaactgagaggagatgagaaaaagaggataaaaatttgaattaatcgactacaacacacacacacacattcaacgccacagaaaacaaacactactaatccgcaactgttaaggattaattaacaccaaaacggcactaaatgagccaattaatttatcaatttctggtcaaacaatttggtcattgttttgcggggacaaatgaatactaaggctgagcgtaccaaagttcaaacacacttaacatataattttttgcagtttaaaaaaatgcatatcgcataattttccaaaatttttacgcacaatacacgcaattattgaaattcaaactttaaattggaaaaaaatagtgctgaaattttgtaaaaaactgttctttgtttctatgaaaataaattaaaaatcattataaaaagtttcttggtttcaaaaaattatgtcaagaaattttaagacaattgggtctagtgcattttatgagtccaaccaagtttaatggcatttgatgagtctaaccaacaatcgaacccgtattttttggactgtaagctttttcatttctgaacaaactgtattttttggaacacgaaatcattaagtctgaggcagttaataaatacgagaaaacatgagaattctgtcgtttaaagaaattcatt

SEQ ID NO: 39292 - DNA, 693 bp, Heterodera glycines
gaaagaagctttcttttttacccgattttgacgagtgacaaacaaattttgcgccaaaagtcaacacaatttttgtgtgagtgtgaaataattagagggaattgaaggcgtgaaaatccctttctttgctgcgcacatatcgtgcggttcttcggttcagtggagtgtaaacttttgattagtgtgaggcgcgaggggcagcgacagggaaaggcgttgctaccgatggccccaaaaaacggaaaactatgagaatgacgacagtaagacagaagagaagactcttttatggtgtcaatttgggagggggcagagaaagaagtgtcgggaattattaaaaagcatggaaatagggggtatgtatgtctccaactcaagcataatctcggggaaagggattttggcattgatttgtaaaaatcggtaaattgggatcagggatctgcagtccgggtttctcttggtccaaacacctgattcgggggcatagattaaaaaagcatcgaaaagggggatgccgaaaaattaccgaattttatcccagaatgtccggtctgggaatagttcccaaagccccgatccgtgaatttttttagattccgttctccactaaatacatattcactggaactaatgcgttttcgaggagcacttcagcgtctcttcccggcggctccattgattcaccacggc

SEQ ID NO: 39293 - DNA, 1461 bp, Heterodera glycines
  unsure (1)..(1461): unsure at all n locations
ctgccggttctcggcacagcaaagcactaatagggtgtttgactcacttcaaaaaataattccatacccaaaagttttttacaaccacatattgccaatctaatttcttgcagattgaaagccatccattgcctgccggttctcggcacagcaaagcactaatagggtgtttgactcacttcaaaaaataattcattacccaaaagttttttacaaccacttattgccaatctaatttcttgcagatttaaagctatcaattgcctgccggttctcggcacagcaaagcactaatacggtgtttgactcacttcaaaaaataattccatacccaaaagttttttacaaccacatatttgccatctaatttcttgcagattgaaagccatccattgcctgnccnggtctcgcacagcaaagcactaataggggtgttgactcacttcaaaaaataatcatttaccnaaagtttttttacaaccacttattgccatcctattttcttgcagatttaangctatccattgccttgcggttttccggaacgcaaaagactaaaaagggggtttgactcccttcaaaaaaaaattccttaccccaaaatttttttaaacccccttttggccaatcaatttttttggaaatttaaaagtttcctttgcccgccgggtttccggaacaaaaaaaaaaaaaaaagggggttttccccctttaaaaaaaattctttttcccccaaaatttttttcaccccctttttttccccatttttttttttaaaaaaaaaaaattcacttttccgccggggccccccaaaaaaaaaaaaaaaaaaaggggggtttttccccccctaaaaaaaaattttttctccccagatttttttcccccccttttttcgtcctattttttttttttttaaaaaaaataacaccctctccccccccccccccccccccccccccaaacacaaaaaacaaaaggggggggggggccccccccaaaaaaaaaaaaaaaaaaaaaaaccacatatttataacccccccccccctcctcccctttttttttttttttttttttaataaaaaaaaccccccccccccccccccccccccccccccccccccccccccaaaaaaaaaaaaaaggggggggggggggggggggggcggggggggagggggaggaaaaaaaaaaaataaataataatttttttttttttcttcccccccacccccaacaaaaaaaaagagaagggggggggtcccccccccccccccccccccttttcttcgagggaggcgcaccaaaaaaatttttttttttttttttttttcccccccccccccccccccccccccccccccgcgtatatttttttttttttttccgccccccccccccgcgccgggcggcgccccccttttaaaaaaaaaaaaaaatttttcccccccccccccccccccc

SEQ ID NO: 39294 - DNA, 976 bp, Heterodera glycines
cggagtttgaacgacacttctctagggtttgaggtgctcccgagtcagaagtttcgcttttcaaaaaaatcattgggatcgtacgttttcggcaaaagagtgcaccatagcaaaaatggcggagtttgaacgacacttctctagggtttgaggtgttttgagtcagaagtttcgcttttcaaaaaactcgttaggatcgtacgttttcggcaaaagagcgcaccatagcaaaaatggcgtagtttgaacgacacttctctagggtttgaggtgttttgagtcagaagtttcgcttttcaaaaaaatctttgggatcgtacgttttcggcaaaagagtgcaccatagcaaaaatggcggagtttgaacgacacttctctagggtttgaggtgttttgagtcagaagtttcgcttttcaaaaaaatcgttaggatcgtacgttttcggcaaaagagtgcaccatagcaaaaatggcggagtttgaacgacacttctctagggtttgaggtgttttgagtcagaagtttcgcttttcaaaaagctcgttaggatcgtacgttttcggcaaaagagcgcaccatagcaaaaatggcgtagtttgaacgacacttctctagggtttgaggtgttttgagtcagaagtttcgcttttcaaaaagctcgttaggatcgtacgttttcggcaaaagagcgcaccatagcaaaaatggcgtagtttgaacgacacttctctagggtttgaggtgttttgagtcagaagtttcgcttttcaaaaagctcgttaggatcgtacgttttcggcaaaagagcgcaccatagcaaaaaatggcgtagtttgaacgacacttctctagggtttgaggtgttttgagtcagaagtttcgcttttcaaaagctcgttaggatcgtacgttttcggcaaaagagcgcaccatagcaaaaatggcgtagtttgaacgacacttctctagggtttg

SEQ ID NO: 39295 - DNA, 1054 bp, Heterodera glycines
acctggattcaatggtagacctgaaccagggatttccttgacaaaaatccaagaaaacccaggtccaggaaaaatccaggctcgaatcaaggtcaagattgagctctctctcacccattatccctcttgaaagcggacgatttattctctaccccgattcattctagaaatattaataaaataaattacaatttaagtaaaattccacagtggcccaatagggctcttagtatattcggattaaacagcgattagttcacctgcaaaaagatccctttgctgttacagtagtccaccagatccgctcgctgcataaatgggtgcatttcgcattggacaaccgccggcagacggtgcccgtccttgacaaggtgttcaacatggtccgactcgaaattggctgtgccaatggaacgaattgtgccaatatctgaaattgactaatggaattattaaattttttactaaaatttaatttcaaaaatttttttttggaaagtttacccctcaaattgaaaaatccccacttgtcccccgcccgaaattccgaaacatctccttgtccctaccgaccgacctcatttgtccggtccccaagaaattgcatatataatacccaaatagtgttccaacacgccgtacaccactgcacggtcgtccctgtttcctgaacacatgttggacacttcgccaaaaaagtcccttgggtagtgcaccatgcacaggtcaatgtagcttaaaaaggtgtgttgaatgttgttatattgaaaaattgttgctaccctcgtaaaagctaatatgaacaataattgtttaattgaaggtatcaatttttaaggggaaatttgggaattttggaccgattgattttttaacgattttcattaaaaatggcaattttgagtcaaattttaaattttaatgaaatttggtcgagattttcgaaaatttcaataattttcctctttctcctttcgccaagcctcgcaccttgtccgagacaatcacattattattcaggcgataaattttcggtctcgagcatcactcgatt

SEQ ID NO: 39296 - DNA, 1044 bp, Heterodera glycines
  unsure (1)..(1044): unsure at all n locations
aaactataaaaatttgctatggaaaaatttgcataaaacatgaaaattttgtaaaaagggttgaccattaaagccccaccctcgagtataaccccattttgaagggggttttattcgaggaaatacggtataattatgaaaagcccttaatccagacttggaaccattacaggtccaggtccaacaaggaatccaagccaggctcaagcattttcaagatagcaaactctctaatcatcaaaatattattcattaccaacgctttctgtaaaatcctcttttggtatgagtggaaaacgaatgttggacaatattgggtcaagaattttgcctcgattttcagctgaacattcgatgactttttgacggcactgttcgtcggaccaacggagtgccttaattttagaaaataaataattgtaatttaaaatatttaatttaccgcattccaaatttcgatttcactgcttctcagctcatctcttttgagaatttcacacaacaaatcttggtcaatttgtaaaaaggcttctgatttgaccaacgcactgatatttcgatcaatgtagtgcaaacaacgcagagaaaaagcccaaaaataaaaatattataaaaaattatataattattactttaactcgtcggggaccgtaccatagaattttaccgatgttttcggttgagaatttatccttagattatttatagggcccggatttatattgacaaaaaaaaacaccaaaatatagattatattatagacgaaaaacgaaaaatatagacaaaaagctaaaatatggacaacaaattacagttgtacgggaccggaaattttaagaaaaaccgggaccagtacttttcgggttgaaaaaccgggaatttttggctggcaaaacagggaaaaaccgagancttttcccggtcccggtcaaaaccgggacgtaggtactcangtgtacgttctttcagtatcaggtcccggtcgcgtacaaccctataaaaataaaataattgggacaaaaaatttatgaanaattgtcttga

SEQ ID NO: 39297 - DNA, 564 bp, Heterodera glycines
aaattgttacccctgccaaaagtcccgtccgaatctcgggccccttcgtgtccagtgcaatagccacgttgtacttcttggtgcatttggcagctgcttcacgcacatttttgatggtaccgccgtgatactgtaattttttgtaaaaattaatttttggcctgcagaaaattcaaattttttcgaaatttaatcgtttaagccaaaatgaatgccatattcataatcagcgaccctaaaatctctcaaacatgtttacgacttttgaaaatcggcaacagcaaattgaccatgctctacacgataaaagtgtagtttaagtgatctgagcaatcacagttcgggatgttgttcatttataagttttggattgaaaattttacaaaacggtggccgtcggaaattcaaattctcaaaattaaacagtagtgaaaacctcacttcgtggtccccgtgactgaagttcatccgggcgacgttcatcccattttcgatcatttggaccaacatgtccaccgaacgacaaacgggccctgaaaagggaaaacagttcagggccagcct

SEQ ID NO: 39298 - DNA, 879 bp, Heterodera glycines
  unsure (1)..(879): unsure at all n locations
tctgctgcttgtgtagagccgacatcatgcgcgcaacctacccagggaccgccaccgttgnccgaactgcgcggngacccctcttttgactgcgagccgcctgagggaggcggcggcgagggattgggcgacgcgtgacgggaactgtaagcgttcagggaggaggcggacggcgagcgggactgccctcgctgcagttgaccgccaaaaaaggacgagccggctgcaggttccatgagcggcgactgaacgtccactgaggcgtcacgtatcagacgcgcgctgcccgccgatgggcccgcgacaacagacggaatcacagcggtcccgccaagcgagccttccggtagcagcacaaccgctggcagtattgaagaaggcagtgccaccggctgctgaggtcgcactcgctgactgtttgtcatggcatacggctcggcggaagaactgacgacaccgccaccaccgccgctgctgctgttgctgcctgcgattgtggtggctgtagatgaacatggcgtggtgctgaagctgggcggtgccgcggttggcctcggctgagtttgccaagcggcgcttggccgcattatcaaaagacaattttaaatctgtcaaacgaaagaaaaacaggaaataataaaaacaaacacatgaagaaaaaaaaatttaaaaaaagttaatttttggagaaaatggtcacaaaaacacttgaggaatgggaattgtttttaaaaaatatcgtaattttgtgccgtttattgctgccggggggcgcagctgaaaactgtgcaatgcccaggggggtttctcattctcaccacacttcccccccccctccctctgcttaaccgttgcgcatgtgtttnaacgaccgaccga

SEQ ID NO: 39299 - DNA, 1035 bp, Heterodera glycines
  unsure (1)..(1035): unsure at all n locations
agattttttgaaatttcctaaatcnngcaatcctgcgcaggatcctgcagattttaaatgcaggatttgcaggataatcctgccggatcctgtcctgtaaaaaattttgaattccaattctgcaacaggacccgcaaatttgaaatttccggtctctaattttaaatataattaatgttatgatttattctattattcttttgtataatttttaatattaataagaggatttttttctggttaatgtttgtcagcgccaaagtttttacatttatttgcttcctatttcaatgatcaattaatttgataattgacaaaaaaatgtaagagcatttttaaaattttctttaagtttgtttcttttaaattttgtgatgtaaactaatttatttccctaattttcggaaaatcaagctaggagctgcgattctccttggtcgcgtgcaagcaattatcctgataaattaaagtttagagtctaatttttatggctcactagaacgggccaaacaattggcttgctgtttatttatttattgtactttatttttgaaatttttatgtcaattttaaaatttttcaaataaaaaatgtatttaaattttcttaacttttatttgctttataataaattatttttatttaatttcagataatgttattttaatacgcagactatcagcaattttccaagactttagctgttggctattttatttcttataaaaaaagaatcgtccataattttttattttgattaagcaaaagattttttgaaaattaatcatacattaatgtttaataaattaaaaaatggctcttcatttaagtagttgttcttagttattcgagggccataattatatatgttattttaataaacactttaattattacctcatttatacttcaaaattttttgtgtatttgggtcagttttgattcatatctctttagtcgaatganattttcatatatcccatatttattaattatttggtttcaaaattatactanatgatatcaagtattact

SEQ ID NO: 39300 - DNA, 951 bp, Heterodera glycines
aaagtatatattgttcttcaagcaccataaattagggccataaaaatggcattttggctaatttaggagcaaaaaaatttttcatgaaatgcaaaaccatggggtcccccctatggttttgaatttcaaaatcacaattaattttataactttttttagactcgtgataatgagatgatataaagcacattatatagggcttaaaattccctacaaaaattgtctaagaagattttttgctaaaatcaactcctgccaagttatagacccaaaactgaaataagccctcatttccggaaaattttctatttccaaaaaaattttgaaaaatttttctgaaaatgccaccaatcgatagagcgtgaaaaacggttgcttgaaagtggtcttggttttcccgagaaaaatctgcaaaaaataataaaattcaaaaacggaaaattttcgagggggcctagctcgaaaatttctgaaaattttcaaaatccgaaaacatggatggatgcagctcgtcgagctgcacaaaaaagtaattatcagcatcccgctcagatcaaaacacagcgagttatttgcgaaattcaaaaaatgccaaatttggttttcaaaattcgccgaagtgtacaggccaggcctttgatgctagagcctcggccaagaagaaaaaaatttcccaaacattccaacttagtcgcctcccagcagaagttttttgctccgggttcccagaaaaaagttttggcacaaaaactgcatgcattttttcccaaaaagccatttcagcgccgctggcgctcagttggcctccggaccggaatgccattaatgtcctggatgcgcctcaaaaagttgcttaagcaatgtcaacatttcaggtccccccgattagccgttcccggagattttagttttagcaatgaaactcgatgttgctttagttatatctaaact

SEQ ID NO: 39301 - DNA, 197 bp, Heterodera glycines
ctttgcagggatactgaaaggaaaagaattaacctcgttttatcacattagcttgtcatcagtttttataaaaaattttcaaaattctgagtctcctattattttatttatttttcaaaattttgaagggcggggggggggggggggggggggtagaggcttaattaacgagggataatagaaaaattaaagaaaaa

SEQ ID NO: 39302 - DNA, 888 bp, Heterodera glycines
ccaaaattaacgaaaataaagttttttttgtttttaagggtaacaaaacgaaaaaacaaaacgaatgagcaggggaatgacggaagagcgaacggagcaacaaattaacatcaaaatactcgtgcttggacccccacgggttggcaattacccaattaactttcgagaattcgttttcaagagcggcaaaacatcaattgccaattatttggccgattcgcaagacgccgtctccaaggagtacagaccaacccaaggtgaaaaaagagcacaaatgaccagtcaaatggtaattgccattaatgggaaggggtgcgcatcgtcgaattcgaaagcaatcagttggaattggatggggaccgagtgaacgcggaggtgggaaaagcaaatggggggggggggaagctcaagactcgaattagccgagagtccaccaattgcaggtggaattgtgggactgcagcggagacaaaaagttcgaaggctgttggcaggcgatacgacaccgatgcaatggggtgggcgagggaaagacggcacagccgaggaagggatgccgaaaatgtgggagggagtgccgaattatgaaggggagtgatcagcaatgacttttaaatggtccaaggagatgagtgaaaccgaccaaaactgttggaatcaatcacagaaaggactaaagggcacaaatcattcgcggtgatcaacaaatgatcagaaccgttcagatcatttttgtctgcaatcccgaaatatcctccggagacgacctgctcatttggtgttgtgccaatgcattttttgtcctttggaatgaatgccttttcttaggtattccgaatttgctttacgttcccgaatcagttccaaaaatttgcttgtgcttctcca

SEQ ID NO: 39303 - DNA, 1058 bp, Heterodera glycines
attacatcaattcccctaattacccccaaccacttttgtttatcctcattagcgccgagcaacacaacgcgccaacttcttcaagccgtacacacaaaacagccaccgactttgttgtacacattttttcttctttcttaatctctccaatttatgtacaaattgcgaaagattagtccgtttgattgggggcaaaaatgcccttttcccacacaaatcccctcaaatcgtttcgcctccaaaagggtcatcgtcgggtacacacccaacaccactcactcactcacttatccatcttttcccattctttccggctcaattcgcgctcccctgaaatgattaaccctaattttttgatcgtttcgactgattaaaaaaggtaattttataattattttttaggtttttgaaatcatttttaatggtttatttaaataaaagcatttttttttgaaaatatgaacatttaaaatatttagattttatttctttatttgtttttttaaatcatattttgttgaaataattagaatttttattataaaataacttcaccaaaattggcactccacttttttgattaatttaaaatttgataaatggaattcccaaaatatcagaaccattttacatggcaaaaaaaaaattttacaaaatttcaacgccttggaattgttttttccttttttttaatccaattttcttttttggccgatttccaataaaatgtttacatctcataatgttttccattaaactctcgagacaataccttccattaagtcaaaatcttcgagatttaatgaatggacaactttggacttggtttttcctgccttttggggggttacagtattcgcattgtctctcgagtgtccattgttttcgtgccaaaacatccaaaaccgattttcgccttttcattttggcacggcacttctgcaccctctacattaactttcgaaggcaaatccataagtatgtttcgtgccaaaaatgtttttatatttctaaaaaaattttttaatgtaattttttaatcttttttcaatgaaaaa

SEQ ID NO: 39304 - DNA, 1092 bp, Heterodera glycines
  unsure (1)..(1092): unsure at all n locations
ttgtacattttttttttgatttttccaatttttgcctcccttgcagatggaatttccggtgccggagcagttcaaacctaccttagatgtgaccggaaaaaagcttaaaactatggtacttgacattgcttagatagagagggagagagagagaggcatttaacaatttttgatttccacagtacttatttgtccattcattactcatttgtctgtgtccaattttgatgaagaatctgcttgctgtctgtgtcttgtagtgataatttttgcatttttttgaggtttttttctgaataaaagttaaaaaggaaatgcctatttctctggtttcatatttaaaaactttgttgattttttttacttgcatattttgtatgtataatcaactggtaataatggattacattgttaaattttagtccttttcgtgtacagaaatttgcgcccaacacattatcacttttaagaatataaaatctaaattgttttattgaataaaagcccgggcgcaaatgatgggtaaccccttttttacagatttttttttttgtacgatacccgaacaattcccctctcttttttcatggaaactgaaaacgctggtgagccatgcctttaaatttttgatttttttttttaataaatttcatttttcttcaaagaaacagaggaaacacagcaacaacgaccatttgcaattaagcgatggaatttggtgtctacatggagttgggacgtggagtgtgacacgtgcgccatttgtcgtgtccatttaatgggtcattattacctaattgctatattaattaagtaaaaggatggaccaactatatttggaccatatgtaattaaagctcaacattatgaaaaaagactgngcagcttccatgttggacctggatttcattgacaaaaatccaggaaaatcaaggttaccgaaaaacacccgagtctgattcaggagaaaccaattttttccccaaangtgacagactggaaaacatgaattcatcgctcaaaattttcccgtgcccgggatatttttaatttggataagaataaaaagtagaatttttaagtgattgtcca

SEQ ID NO: 39305 - DNA, 1247 bp, Heterodera glycines
  unsure (1)..(1247): unsure at all n locations
agctagctggctcaaaaaaattttcgaaaatctgagccttcctgggttatttattttttgnaaaattaattgataaatattttttcagaaagggttntgaaangnannaaattttatttacaagttaataaggntctctgatgntttttctttcttttatggaggtgaataaaattttaaaaattttttaattggtttttaaatatgncaaaaaatttaggnttaactttttagtgaaagtttgatcactcatattttttgctaattgagcagaagcataccaaactttgcagggatactccccggtaaaggactaacttacactgaaatgagcgccgagctagcttgctctaaaaaatttttcgaaaatctgagtctttcgtttttatttattttttgcaaaattaattcttaaatattttttcagaaagggttctgaaacgcaccaaattttatttacatgttagtttaggcactctgatgctttttctatcaaaaagggagatgaataaaatttttaaaaatttttaattcctttttaaacaggccaaaaagtttaggcttaacttttttttcagaaactgatcagaagcgcaccaaactttgcagggatactgaaaggaagagaaataacctattttaaatattatctagtcagttcatttaaataatttttatccaaaaaatttttttttgggttttcggggcagtcccccctgaaccgatgcgcccagatttatggggagtccgaatccttccggaatagcttcactatagcctctactttaattttaccttggatttttgctccccataattgtttgagtaccccaaacggacacttgaaaaaatcgatttttttgttttcggggcagtccccccgaaccgatgcgcccagatttatggggagaccgaatccttcgggaatagcttccctatagtctgtactttaattctgcgttggatttttgctccccataattgtttgagtaccccaaacggacacttgaaaaaatcgatttttttatttcataaatattttttcagaaaatgctctgaaacgcaccaaattttatttatatgttagtttaggcactctgatgctttttctatcgaaaagggagatgaataaaatttttaaaaatttttaattcctttttaaacaggccaaaaagtttaggcttaacttttttttcagaaactgatcagaagcgccccaaactttgcagggatactgaaaggaaaag

SEQ ID NO: 39306 - DNA, 1112 bp, Heterodera glycines
agctcattatacatgtgcatactgtatgttattgctagatccgtgcgcaagtgatcggattccgcgcggcatttagcgggattccatcccgcaatcctccattattggatattgtcggattgagggattaatctcacgaaatcccgtcatcaaatatttttgagttccaatcggtagccgcagatttgaaattccggtctattgttttaaccaaaaaacaattttagtcagcgcaaagaactctgagcagcaacaacaacattcgacagtcgacagcagtaattgatgaaaaaccagagaactcattaattaatacggcagagaatgtttgatgattgtcggtaaaaaaaatcgtataaaagtgctaaaccccataacctttctgttttattcacctattaaattaacagtagaaaatttatttagaatttttatttgcatatacttatatttacgaactgttcatgttaataaataaattcataaatttattaaattattgtattgaggaataagttctgttatagttgagattttttcaacaaggtctttcgggtgtcatgaattttcaatttatgacaaacaaaagtccccggtatattggacactcgaaaattggacactagaaaattgggttcaatggaaaagtggacactattggatataaaaataaataagctaaaagataaataaataaaattttcgtttggcgtaaagatttttattttaatttacacatatgtttttatgaacgtaaaaatgaaaataaatagtgttgttattaatttaaaacaacagaagaaaactcagtcattttcataaaagaattaaaagttttcttttagatagggttcccatttttcgccactttttagtacatttaccattcatcgtaactattaaatgcctgatccactctaaatgcctcaataatttcattaattcgtttattctacacaaatttattttttatctcattcctgagtttattttttaaaagaaggatttgatctccgcttttaaggtgtccaattttcctttggtgtccaaaattcctgcagtgtccagttttccgcttgatgttcaatgttatcgtgtccaatttcccgtag

SEQ ID NO: 39307 - DNA, 1020 bp, Heterodera glycines
  unsure (1)..(1020): unsure at all n locations
cggtactttcatattcctgtctctactgaataccactctacctggattgtttataccaatagnttttcaataataccactttaaaactgattcaccataaattttaagcaaatggctgaagaccgacaaataaaacttttaatggagaaaatggatgagaaattcgccgatatgaaagctgaactgaaagcggaaatttctgggaaattcgccgaaattgatgggaaattcgccgaaattcaggaccaaatccaggacttaaaagccgaaataaatcaaaaggtttactggaaggggaaaaattttagccattttgtattgcaaaaatggttctagtgctgaatacgcgtcccatggacttttacgcgtcccattaacttttaagcgtcccatgggtttttacgtatcccataattttttatgcgtcccatcaaattccaatttggacataggtgagaatttctgggcacaacttgggacgcgtattctgcactagaaccgaaaaaatatttattttgctagttttttaattccaataatttatcagatttttttggccgaaatttgtcctttaaatttgttaggcggccaaaatcagcattgaagtgcccgctcagggactcaccattcaacaggcgaccaaagcaggcctgttggacttggaaagcgggcaattaacgattatgtgtgacacggcgacaaacttgtcactggcgaaggctatcgaaattggcatgttggacccacactcgatgactgtgtgcgactcgagccatggtgaaaagcgagaactccacctcgataaggcgttgaatgaaggagtaaggaattcgattagtgtggggagaagcgaaattggttggcctctcaaaatcgcaaaatttttggcttcattcgccaagttttagcctcattttgcactaaacgtttgaaaacattatgagaggagaggtccattggtgcccacttgctcctcagtcaaattatggcggcagaaaattttgtcattttctcctaaaa

SEQ ID NO: 39308 - DNA, 1781 bp, Heterodera glycines
  unsure (1)..(1781): unsure at all n locations
tttcccgaagttacgaatctaatttgccgacttcccttacctacattattctatcgactagaggctgttcaccttggagacctgctgcggatatcggtacgatcaggcaggagattcaaatagcttccctcgcattttcaagggccgtgtggagcgcacgagacaccacaggaaccgcggtgctttacgggcgcaacatccctatctcaggctgagccacttccaggcacgcacaccctaaaccagaaaagagaactctggctcggactccacacgacgtctgcgagttcatttgcgttaccgcgcaaaacagctcttgcgaaccgtcatttccctagcctggcgtgggaatgttaacccacttccctttcggcaaccggatggaccaactgcgcaagcacagaaaagtcgtcatccgtagtgtgttacggcgttagccggtgccttaggatcggctgacccacattcaactgctgttcacgtggaacccttctccacttcagtcttcaaggatctcacttgaatatttgctactaccaccaagatctgcactggtggaagctccggccgggcccacgcccaaagccttcaacgcaaccaccacgaccctcctacacgtcatggccagactacgcgacaagcacgtgtacaagccaatgacggtggagtataggtggcccgctccagcgccatccattttcagggctagttgattcggcaggtgagttgttacacactccttagcggattccgacttccatggccaccgtcctgctgtctatatcaaccaacaccttttatggggtctaatgagcgggcactttggcaccttaactccacgtttggttcatcccacatcgccagttctgcttaccaaaaatggcccacttggagctcaaacattcaacggcctggggttcagagtcaagcaaccctggcttcatacnccatntagagtttgagaataggttaaggacatttcgtccncaagtcctctaatcattcgctttaccgagtataactgctaacggagctccagctatcctgggggaaacttcggaggggaccagctactagatggttcgattagtctttcgcccctatacccaagtcagacgatcgatttgcacgtcagaatcgcttcggacttccaccagaagtttcctctggcttcatcctgctcaggaatagttcaccatctttcgggtctcagcgcatacgctctgtctccgccccatcgcatgcgatcgagacgggactatgttgcgccccaacaccgcagtgccagggatcacacatcagctccgtaagaagccttcactttcattgcgcctttgggttttgaacacccaatgacttgcgcatacgctaaactccttggtccgtgtttcaagacgggtcgaacagatgaccggcttttacaccgagaacgcacaactgagagcccgagctggaccgaactggttgctggtacgtgtcgcacgcgaccgccaccgacccccagctcgagtcaacacggacccgaaaccattgcacaattcacccagagtaaacagcactcccccgatccgggtaccagaccccgaaaggctggcctcaagaccgagctcacgcagctactccgagcatctcagcgcactccgcctgcaaatgccccattcgccactgaacagaaggacgagcaaaccccggtctggaggctagcaggccaacgtacagcaacaaacgggtgaatgcagaccagatacgccagctctgtccgtttccacctcatcggttca

SEQ ID NO: 39309 - DNA, 694 bp, Heterodera glycines
cgggcgcgaagcgcccgtcatgaggccgcgaagcggccgaatgttctcaaaaaattaaaagacgggcgcgaagcgcccgtcctgaggccgcgaagcggccgaatgtcccccaaaagtttaaaaaaacgggcacgaagcgcccgtcctgaggccgcgaagcggccgaatgtccccaaaaatttaaaaaaacgggcgcgacgcgcccgtcctgaggtcgcgaagcggccgaatgccccacaaaaaattaaaaaactggcgcaaagcgcccgtcctgaggccgcgaagcggccgaatgtcccccgcaaaattaaaaaacgggcgcaaagcgcccgtcatgaggccgcgaagcggccgaatatccccgtaaaatttaaaaacgggcgcgaagcgcccgtctggccccacaaaattaaaaaacgggcgcgaagcgcccgtcctgaggccgcgaagcggccgaatgtcccccaaaaatttaaaaaaacgggcgcgaagcgcccgtcctgaagccgcgaagcggccgaatatcccccgtaaaatttaaaaacgggcgcgaagcgcccgtcctgagggcgcgaagcggccaaatatcccccataaaatttaaaaacgggcgcgaagcgcccgtcctaacgccgcgaagcggccgaatatcccccataaaatttaaaaacgggtgcgaaactcccgtcctgag

SEQ ID NO: 39310 - DNA, 975 bp, Heterodera glycines
  unsure (1)..(975): unsure at all n locations
tttaatgatttagcgtggagtgccgacagaacgaagggttaagcgatggggcntaagcgtcatggaactcgtgcgcgaccctatcggacggcaggcaaatgaatgaatgacgaaccancggttcctttccattttctcaggttctcgaatcctttttggattccgagttctcgtcagagaacctccgcttctggtgttgcatccaggacctcaaattctctcncaattgtcaagttaaaacaaaaggccaacacattttggacgagtttcttgctcccggtgcgccctgtcaggtcctttcctccgttttttgcttccttcggtcaattttttacattaggttaacgtcgactctagaacgcttgaagaaacattaggatgcttgagggagtcggaccaagcattgcgaaaccagaggttcgctttctcagtttcggaggaacacgtgttcacactgatgagcaaagactcgtacccacgttttctccgatccggcatttacaaggctgttttggacgctgccaaggcaaagggtggcagaaaacggatcattgacctgatcagagagctgtcagggagtgccgtaaacactaagaaagtgcctgccaaataccacaaaacatcgcgggggagtgccgatgtggacaatacacaacaactgtcgttgaacgccaacaacttccccaaacagtgctcctctgactcattgcctgtgaaagtgggcagcttgggcggcacttcgccatcactgcaactgccttcgtccggcacttctagcgccagttctcctgctcttcagacaaaggaaagcaataaaagatagtaaaacacgtctttcttccatgtttgttttcgtacccacgaaaggaatgtctcgactctataaaaatttaaaaaaatgacaagaagcattgattcgattatggaacaaaacccagtggagaaaattaacaaagaaaatttgcaaatggtgac

SEQ ID NO: 39311 - DNA, 660 bp, Heterodera glycines
aatttttaaagcatttcatttttataagtaataatttgagcatagaattcctcaaaaactcaatatagtctaagaaatgttttaatttaaaaattattttgatatttcttaaaaaaacatttttagagacatacgttttttgaaattcttttatattcctatttcaagtccaattttcaataatttgacaaatgtatttctcaaatttagtttgaatacatattttgtatttaattaatattagaacatttttcacttttctttgcttttttcaattattttaataccaaatttaccttttattttttggtgcgcgagtctcggggtgcgcgagggggcggggcgtcgggaaagtaccgctcaaaatggtgccagaggcgaaattctttcgccgttcagcttagggatgggtggattgacagcctgtgaaatttgaagtcaatcggacaaggggtgagcgagttttggtgcgcgagtcccggggtgcgagagggggccgggcgtcgggaaagcaccgctcaaaatggtgccagaggcgaaattctttcgccgttcagcttagggatgggtggattgacagccctgtgaattttgaagtcaatcgggacaaggggtgagcgagttttggtgcgccagtctcggggtgcgcgagggggcggg

SEQ ID NO: 39312 - DNA, 1269 bp, Heterodera glycines
aaaattgtggccacattctaaaagaaatattcattcggcaatatgtgtaagaaatattgcgtaagaattgtataaatatttagaaaagattagtatgctagaaattgttcctagaaggaatctgagcgatttttttattgcatcatgtagagcacaagagcagcattcgattggagtatttaaatattttttatctcaatttgctgaagagttatgcccatctgaatttgcatagaaaaattgtggccacattctaaaggaaatgttgccacattctaaaagaaatattcattcgacaatatgtttaagaaatattgcgtaagaattgtataaatattttagaaaaagtttagaatgctagaaattgttcctagaaggaatctgagcgatttttttattacatcatgtagagcacaagagcagcattcgattggagttatttaaatattttttatctcaatttgctgaagagctatgcccatctgaatttgcatagaaaaattgtggccacattctaaaggaaatgttgccacattctaaaagaaatattcattcggcaatatgtttaagaaatattgcgtaagaattgtataaatattttagaaaaagtttagaatgctagaaattgttccaagaaggaatctgagcgatttttttattgcatcatgtagagcacaagagcagcattcgattggagtatttaaatattttttatctcaatttgctgaagagttatgcccatctgaatttgcatagaaaaattgtggccacattctaaaggaaatgttgccacattctaaaagaaatattcattcggcaatatgtttaagaaatattgcgtaagaattgtataaatattttagaaaaagtttagaatgctagaaattgttcctagaaggaatctgagcgatttttttattgcatcatgtagagcacaagagcagcattcgattggagtatttaaatattttttatcagggatttcaggagataattttcatcagacattcatttggcaggcaagagaagcactctttttgggtcaataatgcactcagttcttttcagtaatgtgttataaaccggtataaaatgatcaaatgttagattaagattgtccatgatcaatttgagcatttttggaatagaaataagcattttttgggattatgtacatcacaagagcagcagatgtttggagtcgcttattccaaaataagttttggggcgcaaggggttcggcgcatccgataggcgccgccgggaaaa

SEQ ID NO: 39313 - DNA, 904 bp, Heterodera glycines
  unsure (1)..(904): unsure at all n locations
atgcgatgggcggagacagagcgtatgcgctgagacccgaaaagatggtganctattcctgagcaggatgaagccagaggaaactctggtgaagtccgaagcgattctgacgtgcaaatcgatcgtctgacttgggtataggggcgaaagactaatcgaaccatctagtagctggttccctccgaagtttcccccaggatagctggagctcgttaagcagttatactcggtaaagcgaatgattagaggacttggggacgaaatgtccttaacctattctcaaactctaaatgggtatgaagccagggttgcttgactctgaacccaggcgttgaatgtttgagctccaagtgggccatttttggtaagcagaactggcgatgtgggatgaaccaaacgtggagttaaggtgccaaagtgcccgctcattagaccccataaaaggtgttggttgatatagacagcaggacggtggccatggaagtcggaatccgctaaggagtgtgtaacaactcacctgccgaatcaactagccctgaaaatggatggcgctggagcgggccacctatactccaccgtcattggcttgtacacgtgcttgtcgcgtagtctggccatgacgtgtaggagggtcgtggtggttgcgttgaaggctttgggcgtgggcccggccggagcttccaccagtgcagatcttggtggtagtagcaaatattcaagtgagatccttgaagactgaagtggagaagggttccacgtgaacagcagttgaatgtgggtcagccgatcctaaggcaccggctaacgccgtaacacactacggatgacgacttttctgtgcttgcgcagttggtccatccggttcagagagggaagtgggttaacattcccacgccaggctagg

SEQ ID NO: 39314 - DNA, 1075 bp, Heterodera glycines
  unsure (1)..(1075): unsure at all n locations
tttcgtggaatcagacgtaanaaggaactataaatctctagaaatgacctaaaatggtctacaaaaaagccaatatgaaaattgtaaatatgtcttcaaaacctatcattttttgattttacatatttaataatgttctcctaaattttcaggttatttttctgcagcatttttttctcatattaccaagttccataatcttatagggagtccatgtaagggccaatctaaacattgaaaggcctttttgtgacaaacaaagccaatgcaacagagccaatgattagctatgaagaattatttctaacccgataattggtgtggtggggactaagcagatcctgaagaaactccaccattgaagacaacgaaactaagctgaccttttcgtggaatcagacgtaaaaggaactataaatctctagaaattacctaaaatggtctacaaaaaagccaatatgaaaattgtaaatatgtcttcaaaacctatcattttttgattttacatatttaataatgttctcctaaattttcaggttatttttctgcagcatttttttctcatattaccaagttccataatcttatagggagtccatgtaagggccaatctaaacattgaaaggcctttttgtgacaaacaaagccaatgcaacagagccaatgattagctatgaagaattatttctaacccgataattggtgtggtggggactaagcagatcctgaagaaactccaccaatgaagacaacgaaatgaagctgaccttttcgtggaatcagacgtaaaaggaactataaatctctagaaatgacctaaaatggtctacaaaaaagccaatatgaaaattgtaaatatgtcttcaaaacctatcattttttttttacatatttaataatgttctcctaaattttcaggttatttttctgcagcatttttttctcatattaccaagttccataatcttatagggagtccatgtaagggccaatctaaacattgaaaggcctttttgtgacaaacaaagccaatgcaacagagccaatgattagctatgaagaattatttctaacc

SEQ ID NO: 39315 - DNA, 967 bp, Heterodera glycines
aattagccctctcaaattttccttcgggcctcagaaaatggctatctcttttcggccaattttgtaccgatcaaagggaaaatggcttattcaggccccaatgtgcgcctgaatcgctaattagcttggcactttcgaatattacatataaattagccctctcaaattttccttcgggcctcagaaaatggctatctctttttcggccaattttgtaccgatcaaagggaaaatggcttaattcaggccccaatgtgcgcctgaatcgctaattagcttggcactttcgaatattacatataaattagccctctcaaattttccttcgggcctcagaaaatggctatctctttttcggtcaattttgtaccgatcaaagggaaaatgtcttaattcaggccccaatgtgcgcctgaatcgctaattagcttggcactttcgaatattacatataaattagccctctcaaattttccttcgggcctcagaaaatggctatctctttttcggccaattttgtaccgatcaaagggaaaatggcttaattcaggccccaatgtgcgcctgaatcgctaattagcttggcactttcgaatattacatataaattagccctctcaaattttccttcgggcctcagaaaatggctatctctttttcggccaattttgtaccgatcaaagggaaaatggcttaattcaggccccaatgtgcgcctgaatcgctaattagcttggcactttcgaatattacatataaattagccctctcaaattttccttcgggcctcagaaaatggctatctctttttcggtcaattttgtaccgatcaaagggaaaatgtcttaattcaggccccaatgtgcgcctgaatcgctaattagcttggcactttcgaagtattacatataaattagccctctcaaattttccttctggcgagggaaaatggctatctctttttcgg

SEQ ID NO: 39316 - DNA, 976 bp, Heterodera glycines
tttagctgccacacaactacaactttgagataccgaagacgatttggaaaatccggacaattgatgccaaaattggtaggttccttgtcaattaaataaaatgtcgaaaatcaattcataatttcgatcacactcttattctaaaatttgggcacattattctttttatctggaacctaggcatttttcataaaaactcaagtgggtcagaatacaggaaacagagaacccgacatttgtgcctatttccaaaatcggattcaaaattgcatttttaaagccctgatagcctaaaccgttttttaaaattaagaaaacccaatcttttagttggagcattattctgttgtttggataatttatgattttttcaaaaaatttactgactattgaattatcaggcacaatcactttctaccagatataaaatgctgttttaggcgatcagaaattgcggaaaacttaattttgaacccgattttgggcaaaggcgcaaatgtcggaacacgggcaaaagtgaaggggattctaagtcaaaaaccataaatggatttttgacaaaaaaatattcagttcttgcccaaaatcaaccacattttaaagccttgatattattctacgaccctctttttctctattagcctgtaaaatttcaaaagaaacaatagtttttgactaagtcataacactgaccctgacttttttatgcaatggaatattttaagaatttttttcttttcagtcgctttgcaatttcccgagggcctcacaatgttcgcctgcgtaatcgtcgacattctcgagaagcacaccggcgccgagttcatcattctcgcgcgacgtcacttatggaaggtgctacaaatattttggaagagaaaatgggggggggggtctaaaagttttcaaaaaaaaaaatccgggagtttggtttaaaaagtttttgcatacccaaaaaagttgttttccatttttt

SEQ ID NO: 39317 - DNA, 173 bp, Heterodera glycines
ccgatgagaagtgcagcaatccgccagaagagaaagtgggcctataaatacacaacgccaccataccattattttctgaggaaaccctttagcccaatgccaaaattaagtggtgccaatttaccgcgatattatgccaaaccaatgcatgggaatttaaacccatccatttt

SEQ ID NO: 39318 - DNA, 925 bp, Heterodera glycines
gaaccgttttgagtagattagactataaaaaattgaaaattttgaaatcatgtttcccactcccaccccccaggggtattattttgtaaagtctttttttccccaataaacttgtcaaaccccatttttcgcaccgtgaatgttatttttattgaattctgaaccgttttgagtagattagactataaaaaattgaaaattttgaaatcatgtttcccactcccttctcccaggggtattattttgtaaagtcttttttccccaataaacttgtcaaaccccatttttcgcaccgtgaatgttatttttattgaattctgaaccggtttgagtagattagactagaaaaaattgaaaattttgaaatcatgtttcccactcccttctcccaggggtattattttgtaaagtcttttttccaaaataaacttttcaaaccccatttttcgcaccgtgaatgttatttttattgaattctgaaccgttttgagtagattagactagaaaaaattgaaaattttgaaatcatgtttcccactcccttctcccaggggtattattttgtaaagtctttttttccccaataaacttttcataccccatttttcgcaccgtgaatgttatttttattgaattctgaaccgttttgagtatattagactagaaaaaattgaaaattttgaaatcatgtttcccactcccttctcccaggggtattattttgtaaagtctttttttcaaaataaacttttcaaaccccatttttcgcaccgtgaatgttatttttattgaattctgaaccgttttgagtagattagactagaaaaaattgaaaattttgaaatcatgtttcccactcccttctcccaggggtattattttgtaaagtctttttttccccaataaacttgtcaaaccccatttt

SEQ ID NO: 39319 - DNA, 1070 bp, Heterodera glycines
  unsure (1)..(1070): unsure at all n locations
agaaaaaatgaaaatttattgggaattaaaaaagaaaatctgaaaatgagtgacacggaaattgcaaaaatattaaaattgatcaatcgagcatttcaaaatggaaaaaacaatttggagaagaaataaatgagcaattaaaacgtttaatccaagagggaaatcgaagagagcagagaaatgagacatcggattctgatttttgaatttctcttttttaaactaaaaataaattatttatggatcttttttgtggggattataagaaaatattctaggaatacataaaaagtgtaaaattacaaaattattcaaaaagtaaaaaaacagaaaattttaggctcgattcttaagggtgcatttttcttatttttattgcatttttgttaacaaattttggaaaaaaagctaaaataggcaaaaataggttctttcagaatttcttaggctttttaggcactaagaataaaagcctagaaaataggcactaataactcgaaaagtagcttaacaacaatataaaaaaacatgtttttgtgcgttttaggccacggggagctcaggaaaaaataggcatttgcctaaaaatattatctatgcacatttatttttgtagaaaagttcaacttagaattgtgcccgaggaatattaaaaaaattcttaaaacgacaaatttaataattttaagttcaattttcctccgtatcattcaccgattagctctatgacgcaaaatctgagcatgtgttttcaatttttttaaatgttcaggctttagaggaacccgtccttttaaaatattaagacaaatctctacgatacataaaagcaattcatctgatgctctctgtataagttgtttggaattttttgcattacaaatactctctaaaaaatttgtattctttgtaattaaattggaaacattcatttttgaacgtaaacagttatcttttcatcatatatatgtgttcttaaccgtaaaatttcaagactttctggatgcatgtcaactaggagataaccanaatttttttgaacatgcgttacggtatgactccataaaatg

SEQ ID NO: 39320 - DNA, 106 bp, Heterodera glycines
gccgcctgtcccggccggcacgtagatcaggccgcgccggtcgacccagacccggctgctgttgagcgtgccggcatcgcgtacgtccggggcatcgcgcagttcg

SEQ ID NO: 39321 - DNA, 1055 bp, Heterodera glycines
aaaacttaatcaattggtcattttttttacaaattctgttaacaaatcgcattaaaaattacaaaatttttcccggcggcgcctatcggcaccgccggccctccttgtcccccaaaagtcttggaaaaaacgtgccgcgtaaaaagcggtgttgaagcaaaaaaggtcattgatttacattaatttacatggccggagaccccttcacaaaattggaaaattggctgctgaccccttgttttgcaataatctgaattttgaggtctatatctgaattttagtgttctttatcctgaatttgaaaaaaaaacttggtcaacctgaatatacatatacttctgaacaattctaatgctaaaaaacaggtactcgcgcgaaaactgaataaaaattttgtatttggagaattttgtccaaaaatttttatgttctaaaattaccggtttttaccggtaccggtcagtaccggtaccggtttttttgcaattaccgattaccgctcaactctatatttaaggcacgaaaatcccgaaaaaggcaaaaaaaggcataataaaagtctaaaacctaaaaatatcatccctagtgatcaacgaccccgaaaacccctaaaatctttttaaaagcatttaaaaaagcatgtgaaatctgccccttaaattgcataagtaccccaaaaaattagcgcaagcgacaaattaaaatttaaaaaaaaactacaaaaccggttcttaccttcttacacattcactttgagcttttcgtttgccagactaaacgaaaatgttttttcaaaataaagtaaaaagaaggaaaggagtctgatcaattgggctgcgacttttaggttttaactaaattttttgctcaattgatttgaagaaaggagctcaaaaaacgcatttctgcattaaaaattttcgattctgttgtcactatcggtcactagaaatcactattttggcgacttcgtcactaaaatagttaaaaatcactattttgacttgttgtcactatttcgacatttttgggaaaaattccttagaagaaatgca

SEQ ID NO: 39322 - DNA, 1177 bp, Heterodera glycines
tttgcatgccctgcacggtctctgtgaataccaatactgctaattcgtgcccttcggcattcgtccaatgcgcgtcgcgtgccttcgacgttcaccagaaaacacttttcacggtccaactgagtgtttgaaatgccgaggatggtaattaattcttgactccctaattattcaattagccattgattgaccaaccgacggtccgccggacattccgtagccggccaagtggaagcacgcgtcgcacccattcagtgccaggcgcaattcatccacatttatgatggatccctgaaaggatgaggggggagtatgtacagtatacccatttgttaaaggaaggggatacgattgcaaagataccgtaatctttaggcaaagtttcgagtccaggcgaatgttgccaaagtgttggaagtggaggtcgaacagcacaacaaaatgtccctcacgctgcaacgacagagcgagtaattgacctgaaacagtcaaacaaagaggcgaatgagaaaagggcacaaaaagagatgaaaaataagaaagaggccaaagttggagcgatgaaaccaattaacgaactaatgatacactaatttataatttaatggactaagcggatccccgtaataatttcaataatttaactcacccaaatagccgccccctcccaacacacaaagccttttcccggaagttgccaagtcagaaggcattggaaatattcataatcataattaaatttaaagaattatgtattagtctgtaaaattttcgggaacagcggcgacacaaaaggaaaaggaactgccgaaagagcaaagcaaaatttgggaatgaatttgcattgagaagagagaaaaaggggggggcaatcggaagagatcgatggaaaaggcgaaagaacaggggaaatggagagaaaaaagagcgaagaaaaagaggaaaacggagagaaaagggggcagagaaaaagagagcggtagagggacattcattcactcatatttatttatccgccgatcagcggaaagcgaaggctgcgtgacgaagcgactaaaaggagggggggggggggggtaattagcaaattgaaaggcttaattgactttgaatgggacggaccaattggacatttttatcactaattgtttaatgcatcaaatttattgttttatga

SEQ ID NO: 39323 - DNA, 1152 bp, Heterodera glycines
attttatatgggtaaaattttttttagaaattttgcgtaaaaattgcgcccctaagtcgttctgaaaaaatgaattacacaaaaaaaaaatcgtggtgggatataagttaagttgacaatgagtcaaatttagaaaatctaagcgaaatttgccaaggatttttaaaatttcggtgggatgcccccccgcagtcctcaatgttcgggagcgaataatacgcatttatagtgtgatcaggaaattactgcatttgtacattatttgatctaaattcgacctgttcttgtcaatgccaccaaaaatggtgccagagatgagcaattaattattagacaaaaattttagcccccccccctagttaagccaagtttttgaaatttaagcgaaaatttagagtgatcaggaaaattagtgctagctctggtcagtgccataaaagaagtgccatgatgagtgcaattaatcattagacacatatttttttgtgccatttacacagacaacacgtggagggagcacatttgcattgaatgtgtggaccaacttggccattgccccatgcgcttcccggcctacacaattgcgaatggggaggaggacgaaggacaacagaagcaggcaaatggaagtggaaacaaaacacggaaaagcaatggacgaagacggaaaaatggacgaggaaatggtaaaaaaaacaaacaacaaaaacatcaatgacgtcaattaaattataagtgttagcactttcaaagggtagccgccctagacccttgggctttgggtgggtggagggggcttacccgcccgcggggcgacctattttaatgagttttcaggtcaagcggtgccgataagcgccgccagcacaaaatggatttttatacattttttagcaaatgttcatcgaaaatttggcaatattgcaattttatggaaattttggaccggtggcgaaaatttgaatataattttttgaagaattttttattgaaaagtcttaatatttttttactaaaaaacccactaagaaaataattttcaatttattagctccccgtagcgatcagaccaatgagaatgatcataatttcttccgaaactttcttaaaattctgaatcacaattcttccacaaaaaatgatctagattaa

SEQ ID NO: 39324 - DNA, 1068 bp, Heterodera glycines
ccaatttaatttcccttacattttgggttttttttattatgctggccctaaaaaaagggggtttttcggggggcccaatttttgggaattttcttttcggcccgtcataaagggattgttggggggcaaaagaaaccaaattttgtggtttttgaatgcgcttaccggcttttcatttttaaatgtttcaacaaaaggggtctaatctccactctctgggggagttatgtcccagccaaagcagagtgggccataaacgcgaatttttttatctttggtatttcctttattttgagcctgctcttcatttatgtaattgtgccaatatgcctattgcaactgaaatttatacagctttccccgacaaattgtttagataattattctagacgatttttttatatctcagtgcttaactattgcctttttgtatgataactggtagatattgggagtgaaaaaaagtttgtttgtgactatttacaataaaaatttatgcagcatttctaaaaaggatgtaaaaataatttcttgcgtaatattttttacattatgttgttgaagaatttgagtctgcttctgatgcaattggaaaatttttcagcttttctcgaaaagttttttcccagaaaacggatgggtcaaataaaaaactaaacatctcacatgaccaatttaaattcacttacattttgggtttactttattatgctggcccataaaaaaatggagtttttccggtgccaaatttttgtgaattttctttcggcccgtcataagcggattgtttgggggcaaatgaaaacaaattttgtgttattcgaatgcgctagccgagctctacattttcaaatgtatcaacaaagggtctatctccactctctggcgagttatgtccagccaaagcagagtgggccataaacacgaattttttaatctttggtatttcctctattttgagcctgctctacatttatgtattgtgccaatatgcctattgcaactgaaatttattcaactttcccgacaaattgttgagataattattctagacgatttttttatatc

SEQ ID NO: 39325 - DNA, 1150 bp, Heterodera glycines
ccctccaaatgtcgtagtcactgtgacgcgtgacggcgacttcggctgttgccgtttttgtcggtgccgtgttctcgtaatgcttccttccgttttgccgtgatgaatcgtctcaaactcgctgtacagttggggaggttgtccctctccattcccttttgttcctcccccttcctcgtcgtcctcttccgttccactcttccgccggatgcttctaactttggtcactctctcggatgactcatccatccgactgtttctcctccgtctcacttcctcctttgtcttaactctttcgtccttttcctcctccaactcctccctcgtcggaatttgtttgaaccattcatccgctgcccatctgtttatttgtgtgcttatgcttgtctgaacgcattgtcctcgtctgccaattgtccctccactgtattccaattccgtgatgttcatatgttccaaaatgatcgtgtcttttggcattgatttgtcgcattcgtcgtcttccaatttccgtcccatcttcatccgttgatgaatttgaaagtaagacgctcttcccggcatctcattttttcttttctcaaaatgcacagagctttcggccttccgtccgactccgtcttcagtttctcgtacggttgtccgtctgttcgcccaatcccttccaaaacacacttccgtcgccgcttccctttccgtccgctctccgcccacaaaatgcaattcgacttccgtctcctcctcccccacttttccccctactcgtgcgttccattcttccaccacatccgttgccttcttctccaattggtccatctcatcgttctctttgcattgtgtcctcctctcttcccatttctcttcttcttcaaactcttccattggcttccaaatcggtactctctctccatcaatttgtccaatttcgcttccattcacttctatccaactgacttgttgttttgctgggcagaaggacgacccttcgtttaattctgaagccaacttttgctgtgcgtcgctttcttttcgtaaagtgtcgtttttggctttgttctgccccagttgcgttctcgtgacttccacctcattttttccctcaatttgtgctttttccgcttcaatttcttctaatggcttccattccgcg

SEQ ID NO: 39326 - DNA, 1191 bp, Heterodera glycines
tgaattgaaattttaaattttaaaatgccaaccttaaaccaattgcttctgccggatagccatcgttttagcagtatgccaccgccactttgctgctcaaattgatcacactccgacattttagctaaatatttatttattcatttattcttttttttttgttttaaggcaataaatttagtatatatgcgaagataaaagaaaaaagcaaagattttttttatttaaattataataatagaatttaaacatttctatattttctaaataaatttttattcatttttcaaaatttattcatttataaaaatgatttttatccacgcatttatggattggcagaagatgaagaagaagcattcaatcatccgatttgataatgttgcttttgcgcacgtaacacaagaaacataaacattcattcattgctcgcgccatgcgcgtccggggaaattgggggaaaagcatgaaaaagtggtggtggtggtggaaccggtccattctctgcccatgcaattacatacaaaaagcccactcagattcagttatacgctttttgaatgctttttgatggctgcgaagaagcggcgggcggagcggttagagaaagaaaagtgaccaaaaaattctcaaagccggacatttgcgcgaaatttttatgtttgtttgatcagttttggaagttagagcgagagagagagaaagagagaaaaagaagtgatcaatttatttatgtgtgtgaaaaatagtgaaaaaaaaattaataagcgaaaattaggtcaataattttgaaaattatttatttatttcatcgcccgaaaatgtttgatcaaatttttttaaggaaaaacaaaattggcttacgaagtaaaaaaaaacaaaatgagtttgattgttaaaataatgaattcgataaaattaaaatcataaatttatatttaaaataatcgtataataaatatattttatacggatgaattattttattattttataaaaataaataggtataaattaaaattattatttttaaatatattttaataaaaataaaaaatatttttttattccatgaaaaaattggttatgcaataattgttcaccttcaccacagactgtacgtggtccaaccaattcatcttcatcttcgtcgtcgtcctcgctgtcgtcgctgtttcgggcgcacaaaag

SEQ ID NO: 39327 - DNA, 629 bp, Heterodera glycines
agcagcgggggggcaaaattctcggggaacagaaaagccatttggatgagtgcgacttacagtggcgcaaatgtttgaattcattcaggtggcattggagaggggggggggaagtgggggatattgccaaaggcacggggaatgactcatcgcatcgggacaatttaatggcccatttcaaatttaaaccaattttaaaagtccctttgaagattttgtccgattcgttggtctctctgaaaattcttgctcccccgtcaaattcttccgactcttctgctgctgatgctcttcaccagtacaaaccgaggccatttcgagcgacaaacgcatgggaaatgttttggaataatccgccgccgttccctccacaacaaatgaaattgaatgggacggcggaaaagggaggaccaaacgaagcggaagacggaacacagcggaggcagaagagcaccacgggatggatgaggggagaaaagtcgaaaaggaaggggacgaagcggacggaggaggcggaaaagcgggggaaagagaaggcggaaaagcggggtgaagaggaggcggaaaagcgatggaaatagaaggcagaaaagcggggtgaagaggaggcggaatagcggtcgaaagag

SEQ ID NO: 39328 - DNA, 403 bp, Heterodera glycines
aaacacacaaaatggacgcaaaattggcacaaaaacgacggagcccaaaaagtcgcacaaagaggaagaagtagtcgaactgggcgaacacgcggttccattccttttccacctgaacaaacgaaacaaaaaagaaacaattggccaaccgccgaaagcattttcaccgtcaaatgccttttccgcttctcaattttcttccgaaatatgcgctgagcaacgacgatttccttcagttgcgaattgacggccaccaaaacgcgcgggtcgacgaaagggctaaaaaatggaaggcaattattcagctaaaacttctttctcaggggatgccgtgccaaaaatggagtcctttgtttttaccccccccccccctctctttcctccctctctcctccatttgtcc

SEQ ID NO: 39329 - DNA, 385 bp, Heterodera glycines
aatgtcctgtaaatttttatttttttgggtttcgggggggggggggctttagccccacgtttgtcagctcccccccccctacctacgcccttgttggggatgggaatttaaggcatgaaaaatcgccaaaaagtcacgaaaaagttttaaaacgcaaaaagtataaaaaagtcaaaaagtcacaaaaaaaatacaagttagaagcttcaaacaaagtttagaacttaattgaaaaagtgttatacatgcgatttaagcaatttttgttaaatgttctcattttttaccctaaaatctttttttagcatgtttcagcaaaatctcgatggaacccctgttttaaggacgtttaaagtcagcaaaaaaaagtcatttgacttaaatt

SEQ ID NO: 39330 - DNA, 1513 bp, Heterodera glycines
ggggccaaaaaaatttcccaaaaaaattaaagaattttttaaaaaaattcccaaaaaattatgaaaacttaaaattgcccatcatatttggttctcagccacatcaaaaataccccagaaaaaatttttttcacccccatttttcgtccgaaaaaaatttccgaaaatttctagggggcctagctcgaaaatttttgaaaattttacatcatgtagtacaccattcgatagagcttaaaaagctctacaattttgctctaaggcactttttggctaaaaccaccccctgaccagttatgggcccgggactcaaatgtcccgctgaggccaaaaaatttttctatttccgggaaaaaatcgaaatttttccgaaaaaattaccaatcgatagagctcgaaaaactatgttttggaagtggtctccgtttttctgggaaaattcgttaaaaaatcctaaaattcaaaaacccgaaaaccgttttttaggcctagctcgaaaaattttgaaaattttcgaaattttaaaatctgtaaaaatcgagctcaccgagctctacaataagtctgctggccaccctgcgctcaggtcaaagcctaatgagttattcaacggggactgaactggaaaaagttggtactgaaaagttgccaatttctgcagcccttccaagtataggtagaggcctggaattttttttgaaaattagaaaacacttcaacttagtttcctaccagcaagcattttttgatcagagttttagaaaaaaagttatgggccatcggtgtagacagtatacttgtgagagatgaaaagaatatgcattacatgagcgcttcgcgcaaaggacttcgttgctagtgcatgcgcgttgataagtgatgagcaagtgcattcggccgcttcgcggcctcagacgggcgctttgcgcttctaaatattgtggactcattcggccgcttcgcggtctcagacgggcgctttgcgcttataaatattgtggactcattcggccgcttcgcggcctcaggacgtgcgttcgcgcccgttttttaatttttcggagaggatcggccgcttcacgaacacacgaagggtacaccggtgatcaaaaatataaagaattcttaaataaagtactgaaattatatgatacttttataccaaatagacctcttaaaacaatcgtatcctcaaaaaataagagatttattttcagagaaattacggttacataagcttgtaagacaatttcctgaaaaaagtgaaatcatttaaaaattacaaaattatttctaaggaaatgaaaaaacaattgtacaaattaagaaatgaacaagagtcaaaaattatttcccaggggcaaaattcaattaacaaatttattagagataaattctcaaaagttaatgacattcctacgattaattgatagtgctggaaatatgttttcccagaaatgagcaaaaatgcgaaatattaacagaaatatttcaaaaaatcttttttagaaaa

SEQ ID NO: 39331 - DNA, 922 bp, Heterodera glycines
atagctggtagattatggggagtgaaaaaaagtttgttggtgactatttacaataaaaatttatgcagcatttctaaaaaggatgtaaaaattatttcttgcgtaatattttttacattatgttgttgaagaatttgagtctgcttctgatgcaattggaaaatttttcagcttttctcgaaaagttttttcccagaaaacggatgggtcaaataaaaaactaaacatctcacatgaccaatttaaattcccttacattttgggtttactttattatgctggcccataaaaaaatggagtttttccggtgccaaatttttgtgaattttctttcggcccgtcataagcggattgtttgggggcaaatgaaaacaaattttgtgttattcgaatgcgctagccgagctctacattttcaaatgtatcaacaaagggtctatctccactctctggcgagttatgtccagccaaagcagagtgggccataaacacgaattttttaatctttggtatttcctctattttgagcctgctctacatttatgtattgtgccaatatgcctattgcaactgaaatttattcaactttcccgacaaattgttgagataattattctagacgatttttttatatctcaaagcttaactattgcctttttgtatgataactggtagatattgggagtaaaaaaaagtttttttgtgactatttacaataaaaatttatgcagcatttctaaaaaggatctaaaaataatttcttgcgtaatattttttacattatgttgttgaagaatttgaggctgcttctgatgcgattgaaaatttttcagcttttcttgaaaagttttttcccagaatttatacagctttcccgacaaattgtttagataattattctagacgatttttttatatctca

SEQ ID NO: 39332 - DNA, 1048 bp, Heterodera glycines
  unsure (1)..(1048): unsure at all n locations
tagagcaaaaaggcaaatgcttacttgatcctgattntcagtacgaatacggaccgcgaaagcgtggcttatcgatccttttgaatgtgtaaagtttccagcaagaggtgtcagaaaagttaccacagggataactggcttgtggcggccaagcgtccatagcgacgtcgctttttgatccttcgatgtcggctcttcctatcattgcgaagcagaattcgccaagcgttggattgttcacccaccaatagggaacgtgagctgggtttagaccgtcgtgagacaggttagttttaccctactaaagacctgttgctatgatagtaatcctgcttagtacgagaggaaccgcaggttcagacatttggttcatgtgcttggtcgatagaccaatggtgcgaagctaccatctgagggattatgactgaacgcctctaagtcagaatcccgcctaggcaagatagcaatattcttgctccccggtgtcgggaggcactacttatgcgccgcttgcggtgcagcacaaatgccccagcatctggcccgatgtgcgtgcttaattgctcgcacattgccaaagccgtagcactcgtgtgccatggtggaacgtcggggcgcaaaatcacttgtatacgacttgactactggtcagggggttgttagcagtagagcagcttttacactgcgatctgttgagacttagcccttgatcggatgatttgtcttatttttccccctttactttttgtgccaacaacattttaggtacaagtacatgagaaaggaaggctctcttaagggagtcaagtgcctcgtcagtcaccatgaaattaggtacgataagttcttgactttgcttttttttccatttattccaatcgactattgctttaaggttttgtctttgactttgctttttttccatttattccaatcgactattgctttaaagttttgtctttgaatttgctttttttccatttattccagtcgactattgctttaaggttttgtctttgactttgcttttccatttattccaatcgac

SEQ ID NO: 39333 - DNA, 752 bp, Heterodera glycines
aaaatatatttaatctttaattatttaaataataaaattaaactttttttataatttaagggcccacctctgaccaatataaaacgggcacataaaggccgattttccgagtcaagccaaattgaagaaaatgatgaacaaattggacgttccaccaaacaattaaatatgactaatgaggacggagaacggcagccaattaggcgcagcaaattggctggcattggcattcttcacacggcacgcgcaaatcgattggaatgttgggcatcgatcaatcaatttaattaaataaaatattagattaatagaatgattcattaatatattttaaataaaaaatatataatatgaatataattaaactttgttatttattagattttcaaatgaaaatgaattcaatatttatttattttttaaatttttctataaaatatttttcgttttaataagatatttgtgttttttttttcatttatcatttttcaaaatatcttatacattttttcaacaaatttaaaatttaattattttatttattaactaagcaaattataatttttataatgttaattaaggcgattatatgaacccaaactgttgcaagattgtcagaacaacatgtccacataatgaaaagccaaccaagctctgagattcgctggtacagaaaggtacaacaaaaaacatattgacaaatttacatttgaaaattaaaattcttaaattgctttcataaattttatttt

SEQ ID NO: 39334 - DNA, 1042 bp, Heterodera glycines
tgtacaatttttaccaacaaaaaaaaaaaaaatcattttagctgaacgatgacattgcgcagctgttcccgaacacttttttggtcaacgaaagcgacaaacaacagacagtgatcgcggaggaacggttgaacagcttgaaggagtggttgagcaacgactgtcgcgtctccaggcaacaggtagggcgggtgcataacatcgcgtttttttcaaaaaaaaaagattgggtaacaggacgggacccgtattgtcatttgtccggaaaattttaattttagggccaggctccaattgacgaaacaaatttttaaatttgttaacaataaattaaaaaaaaatttttttttctgaattgtggttggggaccctgtgaaaatttttggtttttgctaataaattttcaaaaaaaaaaaaaattttatttcattttgttgtatttttttaacagttggccattgccatcggtgcgacggttgttgaacggattcgcaaacgcgtcaaggaggtcacccaattccgatgttcggccggcatttcacacaacaaagtgccaaatttttctaattttttcataattttttttttgtattaattttttttagattcttgccaagcttgtttgtgcaaggtttgttgtgtggtttctggtttcagtcataatataacataattaccaaattttccacctttttgtgtgaattttaacggaaaattaaggagtttttacatttattgtgacttttttcattttacccccccccccccccccatagcacgaaattaaacagttatggggcgtaaaaaatagaaactttccttcttttttttgacaaaaattgctgaattttttttaattttcttaaaattatttggttataaaattttttctttctttcaaggcataaaccgaactgtcagagtgtgattgtgccaaaacacattgccaaactgtacggacagacgccaatcaattcggtgtggaatttgggcggaaaatttggcaagcgactgaagcgccaattcaatgcggaggtgacgg

SEQ ID NO: 39335 - DNA, 877 bp, Heterodera glycines
  unsure (1)..(877): unsure at all n locations
tagggttgagcggtaccggtaccggtactggccggtaattaccggtttttttggtaccggtaccggtaccggtaccggttttttcaaaaatgaaattaccgttaccggtttgtctagtaccggtaccgccggtaaaaatttgcactggtaagaatgggggtctggtcgagaaaagagtaggaaattggtgaagaaggagaaatttttgagaaaaaattaaattttatttcatttagtcatgggattacacacatgcacatgtggtgtttcataatttttcgcctgggttcaattccccacttggatagaatattcctcacattttctttaccattattttaattaaaattttaattttaaaaaatattccaactttgttctttcatgttaagcatcctaaaaacccaaaacttaatcaattggtcattttttttacaaattctgttaacaaatcgcattaaaaattacaaaatttttcccggcggcgcctatcggcaccgccggccctccttgtcccccaaaagtcttggaaaaaacgtgccgcgtaaaaagcggtgttgaaagcaaaaaaggccattgatttacattaatttacatggccggagacccttcgcaaaattggaaaattggccgctgatcccttgttttgcaataatctgaattttgaggtctacatctgaattttagtgttctatgtcctgaatttgaaaaaaacttggtcaacctgaatatacatatacttctgaacaattctaatgctaaaaaacaggcactcgcgcgaaaactgaataaaaattttgtatttggaaaattttgtccanaaaatttttatgttctaaaattaccggtttttaccggtaccggtaccggtaccggg

SEQ ID NO: 39336 - DNA, 878 bp, Heterodera glycines
cccactcccttctcccaggggtattattttgtaaagtctttttttcaaaataaacttttcaaaccccatttttcgcaccgtgatgttatttttattgaattctgaaccggtttgagtagattagactagaaaaaattgaaaattttgaaatcatgtttcccactcccttctcccaggggtattattttgtaaagtctttttttccccaataaacttgtcaaaccccatttttcgcaccgtgaatgttatttttattgaattctgaaccgttttgagtagattagactagaaaaaattgaaaattttgaaatcatgtttcccactcccttctcccaggggtattattttgtaaagtctttttttcaaaataaacttttcaaaccccatttttcgcaccgtgaatgttatttttattgaattctgaaccggtttgagtagattagactagaaaaaattgaaaatttttaaatcatgtttcccactcccttctcccaggggtattattttgtaaagtctttttttccccaataaacttgtcaaaccccatttttcgcaccgtgaatgttatttttattgaattctgaaccgttttgagtagattagactataaaaaattgaaaattttgaaatcatgtttcccactcccttctcccaggggtattattttgtagtctttttttccccaataaacttttcaaaccccatttttcgcaccgcgaatgttatttttttttgaattctggaccggtttgaggagattaaactaaaaaaaattgaaaaattttgaaatcatgttttccccctccctttctcccacggggatttattttgtaaaaggcttttttttccccacaaaaaatttttacaaccaccttttt

SEQ ID NO: 39337 - DNA, 1160 bp, Heterodera glycines
gaaaggggggggggaacggtcgaatgacgagtcgaaaagtgccaaaagttaacgaagataagtcgaaaaggtgccaaagacatcgaaaaaataccaaaaatctatccgtgccgttcagacagccctcactacgatttcggcactttgccaagcgatgatcgatttgggtgtcgtggcactttgccgttacgccttcaacatgtaaatgcgaagttgtgccaatggacattagttttcttcatctcagaaattcaaacccgaaaatggcctgtctcatccccaaaataagcaaagaggccaattatccggtacgtctcccatttttgcattcattttccatttttcaatcagagtttatccccatttcgaggttctcatccattatctgatgccttttcgcgacgactttcgctatttcgattttccgcccatcaaaacgccgttgtcaagtccaaaaaatgtacacaaatgtctaaaaatagtgaccacactttcagaatatcagctggatctgatggacagttacatcgacgccctaatgctttacgacgagggcaggtaaaatggggacaaaggacaaccaaaaaagaaacgaaaattatttcgaaatttacttggaaaaggataaacgggcggactgcgaggtgtcttttgcttttgcatttcagccaagtggagcagctgaagaagcgccaagtgcacgacccgcggcttcagtacgaatgccaactgttgcggaaccgcgccatgcacccggacaaaaaagggatggaactgagtgcggaagaccgtcagagactgctcgaaaccctttcggcaccaaagcaacggatggacgaagcgcagtgagtgaccgaatggaaattgggcggagaagggcaccattcgacccgaccaaaataaattgatgaattaagggtcgtactggacgaaatccgtgaggagtttccgcgggagctgaacgaaaacacacggatggccgcatttcgtacaaccaaagctaagacggacacgctcggccaagtcgatgaccgtctccagcccattgtgccgggtgcgcccgttaaggacgaacagagaacggcaaagaaagaagacgcggactgaccggcgaaatttattcattttacactccatccatccattatttgtttgatccc

SEQ ID NO: 39338 - DNA, 544 bp, Heterodera glycines
  unsure (1)..(544): unsure at all n locations
aaaaatcactatctctttttttggaatattttacgtgtcaaagggtgtgcatttaagcgactcgctgtgcttgcccactgcatttcaaatagctggtaatttttatttctccggcataatccagaaaaaatcactatctctttttttggaatattttacgtgtcaaagggtgtgcatttaagcgactcgctgtgcttgcccactgcatttcaaatagctggtaatttttatttgtccggcctaatccagaaaaaatcactatctctttttttggaatattttacgtgtcaaagggtgtgcatttaagcgactcgctgtgcttgcccactgcatttcaaatagctggtaatttttatttgtccggcctaatccagaaaaaatcactatctctttttttggaatattttacgtgtcaaagggtgtgcatttaagcgactcgctgtgcttgcccactgcatttcaaatagctggtaatttttatttgtccggcctaatccagaanaaatcactatctctttttttggaatattttacgtgtcaaagg

SEQ ID NO: 39339 - DNA, 1528 bp, Heterodera glycines
cgcattcacttaaatttgacatccttcatatgaaaataataatatgatcaaattcttttacaccactcaaattctcgccatagcgacaagatttataaatgaataaatttaaatgtgataaacagatacatattatgaaatcaaaacttaattgaaatgatcgttttgcctaatagtcaaattttctaattggaaaccaagagcatgaaaagttaaacctttatctaatacctttacccaccaaagaatttaaaaacaaattaagtgatctcaaatatacagaagaaaatactcattaagagaaatattctttttaacacagtataattttttcttaaaataatggcaataaattgaaaataaaatttgacgcttttggtcttctttattaactgtcggagaaaatataaaaataattttgtcgtttaatatatttttatactattatcaactaaaataaaacatagaatataaggcgacaaaattccataagtaaataatttataaattgctataaaattatttataactagaaaattaacaaataaaatgaaaaaaacagaaataaaaatactataaaattatcaaccaaaatattattgtatccataagaattttattaaatgttcatccagaatttaaaatgcacaatttaaaaggtttacaaactaaacaaaactaattgggaatattcgttaaaacaaaatacataaaaaattcataaattaaaaattaatgaaaatgaaagtaaagctgaaaaataatcatgtagtcttaactaaaataaataaaagaatcaatgaaaaacaaaatttttaatataatttaaacagtgccctacgggcactgaaagtgacgattttaattatttaaaaaaaaattgaaatagcttcgctattaaacactgtctctagagggtgctacgtgccaaaaaacttttataagatggcaattggattttttaatggccgtgaattcagttgagttttcttaaaactcaaacttttaatatccacttaaaatctctcactcttcctcttccacttactctttcttttatctttctcttcctcttctctttaagacatgcaaaaagcattcaaaaatgagacatccaaaaaagtccgtttttgggccagttttttgaatgtagttcgtgacttcgcattatttttcccttatagcccttaaaattctgcgccgattgacccaactctcgccccgtaattcgcgctaaaaagtcttaaattagctcagaagcttggatcatgggtataaacttcttataaggggaatcttttctaaattgcctctggccatttatattaaaagcagaggaacttgaaaaaaatacaattttatcaaaaggaatcactaagaaaaagaagatttgaagatgtttctaattttgtgagagaaattaaaatgctaaattaatctcaaaatgtgctttattaattttaaaataaattttacaataaattagtattgatttaaaaaatttaaataaatttaatcaaattaccag

SEQ ID NO: 39340 - DNA, 1043 bp, Heterodera glycines
ttttatcatttttaaagaaaatccatacaattgagcatagtaatcccaaaaatcagtcatttttgttgaaaatctgttaacaaatcacactcaaattttcaaaattttccccggcggcgcctctcggcaccgccggacccccttcttccccaaaagttttttggaataaacgcgccgcaaaaaattgatgtgaaaagtaaatctgaattcaaataatattcgatcatagtccaaaatgattaattctttgaaataagtgaagaaaatttgtttgaaaattttcattaatttaatttagctttaacttttggatttattaaataaaaaacaaaataaaatttaattttgtgccattttctcttgaaataaattaaaatttgaattttttaaaatttttttgaatttttaaaatttcctggttggtcccggttcccggtcccgaacaaaaatcgaggtcccggtcccggcttctctcaggtcccggcaagtcccggtcccggttgtttcagccgagtttttgatacaaaaaaatggggggggggcggatggaagccgtaaatccgtaaatggaaagccgggagttatggggaagcgcaaatccgaaggctcattaaaaaagggacaaaaagtactagaataaaggggacgacagaatgttaattttaaaattttcatttttttaaaaaaaagcaaaaaaaaaaaaattttttttattgattttcttactgtagcagggagttgacctgtgttcgatttgaatttgtggatgaaatggtagaaggacagaatggcatcacgattgaacagacttttattggtagtttatattcaaatatttctcattgagaattacattcataaatgcagaatttatttgtctattaattttactcagtttgtagcctgtggccagtccaaattgggtcgtgccggaggatggcaattccttcagctggcaatgaatgacgaccaacggtgcacgaatgtaattttggcagcatttaaaatatttgcactaattttttcctctgttcccccatttt

SEQ ID NO: 39341 - DNA, 271 bp, Heterodera glycines
cccgacctggatttcaacgctacttctgctgcgagctgacatgaacgtcgtacgcactctccccctgatcgtcctggccaccgccctgaccgcctgcgccggcaagcccgcacgcagcgatgcaccggcggccagcaccgtggttccggccaatgccgctgccgaagcccccgctgcagttgccgatggcggaacgatcgaccctgccgtggccgttccggcggcgcaggcgccggttgccgcgcccccatcgccggccacgccggcagcg

SEQ ID NO: 39342 - DNA, 826 bp, Heterodera glycines
aatggtaaaagatttctttttaattgttttgctccttataataaatggcttcttaatgcactttaaccgtccccatcaggttgattttttcttttttttggcccatatcttttaaaaaaatgaacacaaaagtcaattggggagcctaaaatgcaagaccccaacagtttcatgttaattggaacatttggaaatcctgtctaatttaagagtgtgttttgcgcatggcaagtgataattaattaattacataattaattgcctgtttttccatatatttttttttgtctttccgttggccaacagcaggtgaaacacccgtcgcattcttctaatttccgttgtcccccggggcgttctcccccccccccctcccccatttgacagctgtcccccccccccttttcccgccctttcagacgattttcccatggccaaaagattcgttcgtcagtgttaattaattttccattaattacgccattatccttttttttctccggcaaaatgttcagtaacattttgcagcgcaaaaacttcaggtgaaaagactgaaattggtcggatttgtgcaaaacatccatgtttcgaatcccgaacccgaattcggacaaatttcttgactttttaatttttttatttcttgcggctagtatcttctacaataatttgtcagtttggtcggatgtgcatcaaacggaaaaaataattaaaattttttgggggaggttgtctgacgggccatgaaactcacatcgccaaaatttcttaagtccatctgcgctcaattggtcgaaaacatagagtgcgccgtcatgttctaact

SEQ ID NO: 39343 - DNA, 1205 bp, Heterodera glycines
aaataaaggtcccgagtatggaagtatagctcagttcatgcggtaaactcaggtttcagacgaaggatttttataataacagttttttaattcatattttcatgaaaatgaatttgcttttgttttatattaccatcaaaattagtgttatgcatatttgtagctgcattataattcttttaaaattttctaaattttatttttatttttattcttcaacgtaccacggtaatcggtgcctcgtttgccacgcggttccacgaaatgattcccctcccatttttttaaaatatccatgatgaatttgtttttaaccacacgtgccttcatgtctttataataatcataaaaatcaatcatgggcgtctgtttggctgctcttgttcctttggaattgcacatacggtcataactttctcgaagcatcctgaaaaattatgtgttataaaatcttgatttaaatttgaagctacggattccaagtagctcgagaaatgccgaataattaattaatcgttatttctactaagccaagaaagcggctgggaatcgaacccacgacaacagcaatccgtgctatgctgcattgcattttaggcttttgagtgtattttaaatattccgttttccagttattactgggctctagtataaactctagatccttacatttaccctaaatttatcgttttttatatcaatttattgatattaaatctttactctaatgatcctttgtgagcctcgttttgcattttctgattatttttcacgacagttaattcctgttttatgcttcggttcctgtccaagtgattatgcacttcctcatccgaccctccgcctctgctgctgaaagtgctccttgatgacctattacggctcatgcggggtggcttcaaccggctgccgcccaatgattgggaccgttgtaaatacacattttgttcgggttgttgacgctgatgcccacttggctgtacatcgagccctcttagctggtcctcgtatccgttgttgttgctaccagttaagaggtcgagcggaatcccgtcccggaatctttgtacaccattttgaaccggtggatgacttgatgcagatgaatgcgatctcgttgttgatcgttgcaatgattgacgacttggtgccactgatcctgcatctgagcgtaccgctgactgccttagtcctattttccttga

SEQ ID NO: 39344 - DNA, 1190 bp, Heterodera glycines
tttcagggttaaacttcatttcatattggtcaattgggtgtttttactatattttaatagcattacagtatgatctctgttagtttggaaaatttcataaatttattaggtttttaaaaaaggccgagacccgatttttttaacggtgtgcacagcggaaaagagcaaacaaaaaaaataataaattcaaaatactcgtaaaaaaataatttttttttttttactattttagaaaaaagccgaaaagtttggtcacctttagagaaaaaccgtaaattttctgcatcatttatttggaattcaaaaaaaaaaattttttttttcaataaaaaaaaatttttcaaggggtgtctaaagaataggcaggcgacactaaacaattttttgtgttggaattttttttaagttataaatttgaaatttaccttcaacacggggtcgatatttccaaatatgagcagggcatgctttctttggctgaccactgcttcaactcggattgtgattattttcccttgaatggaaaaagcgaaatgaaaaaccctatttttccgtcgtcactgtaaatttttgtccggaacgtaacgcgtacaaaaaattttttgttccgtgactgatcgttagggacgtgaattttgagaatataagcaagcaccaacagattgccttattacgccttcaaataaatttggtgctccgagcactatatatcaggggtgtgacttgtctcagaaaagacgagagcgagagtttggcgagaggcgagagttttttaatttttttctgtagccttattttttaatttaaaaaacttcaaaatcgtatattaaattaggggtacgggcctgggtatttgggcaaataccgggtcagggtattgccgggtacagaaagccgggtcagagtcctagtttttaaaccgagttcaagtcatgaaaaatccaaacaaaaatctttaaaaaattttcatgaaaattaaaaaatattttcatgaaatatatttattttagaaacaaactttattatttgtccatttttcccacctttttttgcggtgcgttttttaaaacttcggggcaggggcggtcgggcggtgccggtaggcgccgccgagaaaattttgaaaattgtcttcggatttgttaacagattttattcaaaaaatgaccaaaacttgttttttaattttt

SEQ ID NO: 39345 - DNA, 1075 bp, Heterodera glycines
gattggaagtggccaaattggccctttcgaaattgcactctttttgggcatcgaaccacggcaaaatgtgcggaagaacgaactgcttgtagctgaacggaaacccaaattttgagaagacaaatcggcggacaaaaggagggaaaataaatgatcaaaaaaagaggaaaataattaatcagagcgataagaaaaggcaaaaacgaactgattaaaaaggtaatttattgtgattgaaagaaggaagtagtaaaaaatgataaatggtctgtgatttgtgagaatggagagcaacaaaagctgaaactgaccaaaaaggggaggaaagggactcggagtgccattcggggggacagccgggcaattctgaaaagggcatttgaaaagagaaagcaagcaacaagtaacagctaatgaattaccaaattcaatcactgaaatgtttaaagccgcgcttttgaatgaccgaatcggagtgaaaatggacgagaagagagtcagcggaactggtgatggcggcgggaaaatctgaacgcaaaggcaattaaacacaatgattgattgtgccttttcaaattcaactcttttcattaattttaattaaaaatcaaaattcggattctttcgactgtttcccccaatcccttagaattgttgttttttctctcttcccaccttggccgcaccaccgggccacttccttcgaatttgtctcgttccctaaagggcaaagtgtcagatgctgcagctcgctaatcactccctcccccaccctccctttctctgatcactttttccactcgctttccctgatcactcgtctcttccctcactctctgatcactttccttcccctatttcccctctgctcacttctgatcacttccactgaccttctctgtcccggatgctcacataatcgtcgcattcggtaaaaagcgcctcctccaactcgctctccaccacagtgaggtgaattctgtgcaatttactggtcgcctgttccaagaatgttcattttattgccttattccaccgccccctcaatttcaatgccattttttaaatttatatc

SEQ ID NO: 39346 - DNA, 1398 bp, Heterodera glycines
  unsure (1)..(1398): unsure at all n locations
ggaggcttcaaaaggaaattgaataaaacaaaataaatttttattttccatgttaattactaattttttttcgctgtataaccgcattgaagtagttatgttgatgcccaaagtgccaagctcggacagctcatctaaagtctcttttttgtcacctgaatgcgaaacattggcacataacgtgccaatggaaacctgtttgttgggtgttcagttagtagtatataatggaaaaactttcagaccaattttaaggcatctaattcgatcatcaagatcatctcgaaaagtgcttcgcgaacatcctcgttcgctgtggtaatttcgttcaaaatgcacctaaaatttttgaaaacggaaatgtgtttgcttcgccagatactatctttaaaaaatgtaaaactatacatgatcattcattctacttttgcttaatgaatgcaaaaatatatttaaatatttgattgattttgcagttcatttaaatattttacttttagcacctgcgtggattgttagtccgttcgtaatctggcatgatgccaccgacgttcaattgtatgacggagtgtcgcagttcaattattgcgttttcaagcgcattgatgctttttccatgaattttttctaaaaaattaatcgattttcatttatatgtaaattatttttaatacgatttattgagtctagcagggcgatgttttttgccattgacacagcactaataattcctaaaataggtttttttaaggaagtgaattaggtatcaatttactcaagcgaaaatcagaatattgttccggggatagaagctcgaattttgatgcgtttttgtcgataaagtcaaaaacttgttgggcttgtacataaacggtggcttcttcttggcttggcaacacgcagccaagatttaccctctcattaagccactgaattcgaataacaattataaaattaattaatgaccagggctttcaaaaacatgcacaaaaagtggccaaaatatgcgcataaatatgcacggcagtgaagctcactgttgactcactcgcgcatccattaagatttggatttaatttttggcatgatcaaattttttctaagggatttcaaatcggaagtatttgacgaaaaatgaatatacaaattatggaaataaaagtcccgacttcatacgcaaatactaaaaacaaagtgtttttcctactaatcagactacgtgaatccaggaaaaaatatacatttgcatattctgacagccctgttaaagacaattccctatattatttanagaatttttcattaattttcagaatattttttanataaaaaattaatttttataaacaaacaattaatgaattgtgtggtgataagttgtacgtgcaaaaattgatg

SEQ ID NO: 39347 - DNA, 808 bp, Heterodera glycines
  unsure (1)..(808): unsure at all n locations
ataatctccggcaacttaatttgcatcattcatttgcttctctttcattgcatcatttataggtttggctcggtcgttcaatctgatcaattggacattgtgtggaatgatgaaatggtgcgttggaatggcccaattcccggcaaaggcaccccccccccccacaggacgacttttcctcgcccggaatgcccaatggcttcggttttgccccgtcaccggcaaatttcattgagccgggcaaaaggccaatgagctcaatgagtccgatggtcatattcgaccaggaaaatggaaaggtaaaagcaaaaacaagcaactgctaaatggattaattaattaagtaattaattaatttgtcagttaaaatttgttatcggcgcttcgggcggctcaaaaatcatttcggccatggcgaagcccgtgatccgcgtgctgtgcttcaacgagacaataaaagaagcgatcgacgcgccgacgcttcacaaccaattcacaccagacataacgcaatttgaggagacagtgccaaaggcagagaaaaaggggaaacgaaaaaattaaaaacaaaaaataaaatagggaattatttaaatataaaaatatttttaaataattaaaaaaggattaaaataatataaaaagaatagaaatattttatctggataagcaaaatatacaaaaaaaattttgattgaattttcctttttttgaatttaattgtaaaaataatcggaaaacaaaacaaataaatggataaagtatagtatgtaaattattgcttttcagccgnttgctcaanagactt

SEQ ID NO: 39348 - DNA, 536 bp, Heterodera glycines
tacagtcaggtgcaaaagtattgcctcaaattttttttttttaaaactggttttcccaaaaatgaatggtgaaaaaaagtcttatttacgcaaaaagaaacactaattacagcgctaataaatagccaaaaactgccccgataactctctttgtcgacgagaaaattggtcatgatccaattgacccccccccccccttctgatggtgcaaaagtaatgcctcaaaatgtttaatcgaccaaaattcaattttatgttgagataaaattctgaaaaaattcttgctaagcttacttttgatactgatcaaaaagtcttttggaccaacttgatcagatcactccttcatggtgatctgaaaagtcaaaaatggcttgaaattgggaaaattttcgaaaaaattcctagggggttgggaaattttttttgaaaattttgagtaggcctatcagaaagtggacaaaattctctaccgaattgcctttcgcatgactggtctacgacctatactcgcagggcaccatagagtgtcaaaa

SEQ ID NO: 39349 - DNA, 899 bp, Heterodera glycines
  unsure (1)..(899): unsure at all n locations
ataaaatntcgagattatatgaaaaatatttttttttacttatattttccaatatatataggttttcccgggtctaactacattttttgttgaaaaagttattaacaattgagctcaaagaaataaataaatgatgtcgtcctgaacttttaaaaaaatacaaagcattctttttaggaagacttaatcagtgaaaaatttttttataaaatatttattctcccaagtctaaaaatttcctgtttcatgggtcaattctcgctctcggactctaagtttactatttttgttcatcttgaatgtcggctattatatgtattaaagcacacgaaattgaaaaagctgattttcctattcatttggtaagttcgaaaaaatgttacgttagattttaaagttataaaaacttcttaaaaaatgtacaatgtgtgaaattttttaaattttcgacaaatttctattaaggtatttttatgtcattctgtcaactacggaatgaacaggaaaaacggctttttaatttggttaattttaatttcattggcattttctgcgccagttttgacaaataaaaaaataagtgccgacgtactcgcattacccaaacattcgagatcggtcgagattctattgattttcaaaaatatccgctttttttatcgggtttttgtttttttctagactatattttaagacaataaatttaaaagaaataattttaataaggaaaaaatttcttaaattgtaaaaaaaaatatttgtaatttgcagataaggtttggcttccaaaatcagaatctttattagatttttttttattgaagcattgatgatttttagttggttttccttgttcttaagacggctttgaatcaaaaatgcacacactcgacaatttg

SEQ ID NO: 39350 - DNA, 1009 bp, Heterodera glycines
caatgacattttcggtttcttaagccataacttttttcttacttggtcaatccatacatccttggtatagtgaaggtgctgatgtccagcccagaatatgaggaagggacgagggaaattggggattggatttgggggaaaaaaggaataagccaaaatccgggccctggataaatgacctccccaaatttgtaatcccatgggcgcctattagatctaatacgcgtgcggggatgggcgagaaggagtaaaataataatataaatattggccaattacattaataataattccgccgcgttctgctctcggctctcgctcgccgattaactgcccgctcaactaactgactccttatcgagagaatgctcccgattaaatagttggacttatggaacggaataaagatggggaaaagcggggataaatggtgtgagaaagagattgaacggatgtgataaattgcgccttacaattattttcggtgacattatatcccgacgaattttcggcggtgacattttgtgtgcactgattttctacataaaattgatgaaattttgggggtttttcctaaataaacatgtggaaatttataatttcgaccttaagtgtcaatttttaacgaaaaattagaagttttatgggctcatagtgtgtcgatagacgcttctgggtgaaaaattggaatttttgtaatttttaacattgtttcaccgaaaattgaccattttaggtcaacttttgaaaattttaccctagaacatctaaaaataagtcgaacagagattttttgatttagaatttccctttaccaatagcatcttttattaattttttcataggatgtcgataggcgctgctgggtgctcaaaaaactaaaaattttttaattttcttggaatttgaaatttttttattattttaagggacattatatcccgacgaattttcggcggtgacccagggaggcactgattttctacataaaattgatgaaattttgggg

SEQ ID NO: 39351 - DNA, 1117 bp, Heterodera glycines
gggggggggggggggctgtgttttaggaatacggtatctggtgagatcagcaattgatcagttttaacgattaaaagggccacagttttttgagcattcattctttgatcacttttacgttattgtggtgccactgactttttcgatcagataaatgcgtcgacgactgatcagtatagctattttatttaatccaacaatttaatggccgccgctcctttctgatcagcctttgatcacttttaggctatttaatcgttgttttttactgatcagcagccccctatcctgctgctcattttcccgttcactttatgtaattttactgcttttcttttttggagccaaagcctttttccgatcattttattcctttctcccctccgtccgattgggcaagaaaaatttgctcgaggcaagcttttcctcattttattcaccaaatgtttgtgccattttaaatgtttttcggggccaaaacggccggtacacaaacggcgggacccaaatgatggtccaaaatatttctgagccttggcacaagccctagacccggattcagaaggcacaagaagggcttttctctcccggccttaaatttttttgtccaatgtaatttttaaagaatttcaccggcgagggaaaaaaattcgccgaaatttggcatttttgggatataatttatgaaaaaatacgcaaaaatttgggcccggcgataccgatttcccccctccccttactccatgggctgatattcctttttttataaattctcgagaccgatcccgaaccataaaactcgaaaatcaagccgtctcggttttagcgaaaaccaaagttgatttcttcagttaatcctggttttatccggcattattgtcccccatgtaagataatgcaaagcattgcctgcggcaaaacttaaaaagtggccatttttccttagatatgcttttcatcggtgccgccctccgtacgggcggcacaacacaacttgcagtccaaaagcgtaccccatctatgtccatgatgcttcaagttatgtttgccaattgtggacccagtcctcagcttcttcctcgatcagagtccccagaagcatgcccgaggcaaacat

SEQ ID NO: 39352 - DNA, 1281 bp, Heterodera glycines
  unsure (1)..(1281): unsure at all n locations
attatttttgcttcataatacaaaattttattaacaaattaaagaaaaatacatcaaacgatataaaatttgtttatttttatttttttaataaaggttaagttttaaaattttgtttcttaaaaatctgttgctttttaatttaatcattataaatttattatatttaatataattttttaaaattattaatactactttggtttaaaatgtttgttttatttctgtatttaataaaagacaaattttttaatgttttttattactgttaacagctaaaatttaatataattgattttgttttttaatgtatttcttttagttttgattattttgatgcataatttatccgctgcagcttatataatttcaataatttttaaaaatatttctttcaatatataatgcctaggttttatcaataaataatatcgaataaaattttaacaaataaacttccattattctgttcaagaatgtctttatttactcaaaagttcataaaataaaaagaaaattcaaaaataaacaaacaggaaaataaatatcataatcaggcaattggtaatatcgtaattatctaacaattattgttttcggtatttttaacaagaaaaagaatgattttaatatacaaatagtataacatctcatgaaataaaaaatatataactttaagagaacatattcatacttttgtatattaaattatcaagcaaaacgaatttaattaaaaaaaaagaaaacataaaaatagtaaaataaaagtttatattcttttttatatatttaacacaattatcaatttcacaattgaattataaattttacaaaacaaaaaatttttttataatataaataaaaacaatttaaaaatgattgcggtaactcttttacatcttaaagcgaatattcgaactctgcatgaatattttttatgagaagaaggaaaaataataaatatgacaattgtccaagtattatcaagcgaaatatgatattatgtaaatgaaaattaagtttaaaagatcaaaaaacaattttatgttgcttgcaataatcaattattaaagaaaatcttataatattatcaataaaattgaatgattaataaaacaattgctttaaaaaatgaaattaatgaattatttaaatagataaaaataatattaatatttatcataatttccataaaagtaatttagattaacaagaaaagtgagggcatagataaacagagaaaaactcgaatgttttatcataataaatctgangtaaaaa

SEQ ID NO: 39353 - DNA, 1044 bp, Heterodera glycines
ttttattttttgcaataattttggcttttttctgccatttcgattttaattgcattttgttgttcacatttttcattcttttccatataattttcatagaatttttgccttttgaagttttttggggacggtggctttagggttttccacaaatgtttaaataagtcttcatctattgcatcaattagtacaattataaataagaagaaaataattatcaaattattttgcagcattattttatttaaaatatctcgaaaagaaattatcttacttttcagctgataatattatatatattattatggaatctatgaaaaatattttttcatgacttagaaatgatttaattaattgcaatttgtcgtgttttaattgtgaaataattgattagaaaataatttcatttatatgtttgtaacgtctattatatctttttaaattttaattgcttttttgttgttgcacattcgtttgagtaaaattattgaaaattgctaaaagtattttaaaatattttttgactaagcggcgcaagtgtccatctaaaatcatgctcgactaaatccatattttttccgggactatcgtagacctgaaacatgcaaaaaataagatttttagtttgatttgattttaataggtttttgcaatttttagagaatttttttaataagatttacgaatttttgggccctgcgatgctgataggcagcgccaggcgaattttaaaattaaaaaaaataaattaaaaaagaaaccgtcaacctgaatcgaactcacgacagaaagtaatgtcaaggttgattcactaaccactacaccacactacacatcaatgagaaataataaaattaactttaattcataaaaaatttgtcaaaatggttaaaaaaatcaaaattgtataaattttttgccttttatccatgaatatgtcattcttaggggtgtattttcacccccgcgcccccgcgggggtgaaggtcgcgggggcgggggatggcgggggtcagagtcgcggggacggggggaggccaaaaa

SEQ ID NO: 39354 - DNA, 986 bp, Heterodera glycines
aaaaaaagagatagtgattttttctggattaggccggagaaataaaaattaccagctatttgaaatgcagtgggcaagcacagcgagtcgcttaaatgcacaccctttgacacgtaaaatattccaaaaaaaagagatagtgattttttctggattaggccggagaaataaaaattaccagctatttgaaatgcagtgggcaagcacagcgagtcgcttaaatgcacaccctttgacacgtaaaatattccaaaaaaagagatagtgattttttctggattagccggagaaataaaaattaccagctatttgaaatgcagtgggcaagcacagcgagtcgcttaaatgcacaccctttgacacgtaaaatattccaaaaaaagagatagtgattttttctggattaggccggagaaataaaaattaccagctatttgaaatgcagtgggcaagcacagcgagtcgcttaaatgcacaccctttgacacgtaaaatattccaaaaaaagagatagtgattttttctggattaggccggagaaataaaaattaccagctatttgaaatgcagtgggcaagcacagcgagtcgcttaaatgcacaccctttgacacgtaaaatattccaaaaaaagagatagtgattttttctggattaggccggacaaataaaaattaccagctatttgaaatgcagtgggcaagcacagcgagtcgcttaaatgcacaccctttgacacgtaaaatattccaaaaaagagatagtgattttttctggattaggccggagaaataaatattaccagctatttgaaatgcagtgggcaagcacagcgagtcgcttaaatgcacaccctttgacacgtaaaatattccaaaaaaagagatagtgattttttctggattaggccggagaaataaaaataccagctatttgaaatgggcgccggacttttcgacagcggacctttcgacagaaggacttttc

SEQ ID NO: 39355 - DNA, 1316 bp, Heterodera glycines
  unsure (1)..(1316): unsure at all n locations
aacgaaagtttaaaatttgtgacaatttnttgatccacataagatggccacccgcatttgcagaattgacaattacatttgccattttaataaaatgtgcattttcagggcacacgtgtggctttggacatgaccacgctgaccataatgcgccaacttccgcgcgaggtggacccgttggtgtacaaaatgagccacgaagaccctggcaatgtgagctatgccgaaattggaggtctctccgagcaaatcagagaactgagagaggtaagacaatttgagagcgaaaatcgaattgaaatttgtgggaggaatctgttggaccacaccttaaggttgttgaactgccgctgatcaatccggagttgttcaaacgcgtcggcataacaccgcccaagggctgtcttttgtacggaccgccgggcaccggaaaaacacttttggccaggcacagcgaatttaattagcgaattggcaaaatccgtttcctcagggcggtcgcttcgcagctcaactgtaactttctcaaggtcgtctcgtcggcgattgtggacaaatacattggagagtcggcacgaatgatccgcgaaatgttcaattacgcccgtgacaaccagccgtgcatcgtttttatggacgaaattgacgccatcggttaaatttgttatatattaaatttttttgatttgtcttattaaaaggcggacgtcgtttttcggaggggacttcggccgaccgcgaaatccaacgcactttgatggagttgctgaatcagatggacgggttcgactcgcttggcaaagtcaaaatcatcatggccaccaatcgacccgacacggtcccacgattttcttttccatgaaacttgcaactcttcacataatatgttcagcttgacccggcactgctccgtccgggccgattagacagaaaaatcgaaattggactgcccaatggacagagtcgtcttgaggttttttctgtgtcctaacggtactgagcttttcccttacccaggtgctgaagatccatgccaccaaagtgctgaaaaaagaagaaatcgattacgaagcggtggtcaaattgtccgagggattctcaggggcagacctgcgcaatgtgtgcacggaagctggactgaatgcgatccgaaaggagagggacggcgtggtacaggaggacttcatgaaggcagtccgtaaagttgcggacgccaaaaagttggagaccaggcatgcattcttaccgtttttgttcgggttatgagaattttgttttagtcttgactacaaacccgtgtgaaagggctgtaagca

SEQ ID NO: 39356 - DNA, 813 bp, Heterodera glycines
ttagggctatcgtatgataccaagattgtacaattttgttgagtctgagaaaagttatgagtgaatttactcaaaaaattagcaaatccaaaaaccataaataagaaataatttaaatagaaaaatataattgtaacatttaaacgatttaaaaaatgtaatcaagcgcagataatacagtttattttaataataattttaatgtaaaataagaataataattaattaaatgagcattaaaataaatgataaaaataagcaaatgatggggtgagtcattatgtaaaagcataaaatgaaaatgttcaacaaaagtctacccataacatttgtcaatgtcaaccaaattaaacattggaatcattcgatagccctaaaaaatttttataagcatgacaaattttctaaaattttgatattttcaaaaaaattatggccaaaaatctctgaaaacctggtttcttgagtatttttggccataactttgttcaaaattgaccaaatttttgtaactttgctattgtaaatacaaggttagtctgttccctaacacttaaatgtgattttttgatgaaattaaatttatacaattaattgtataagattatataaaaataaatgtagaaaattttagagtatttaaaagttattaaattcctttaaaaaggaacaccttaagaaatgctcaaattatagaagatgaatttaaacattcaacacgcaaaatcggtaaaataaaaaataattctaatataaaaaacaaattataatcatgaaaatcgattattttaataaaaataaattaattagtca

SEQ ID NO: 39357 - DNA, 1494 bp, Heterodera glycines
gtttttgccaaacattttcatttggaattatattctgagcaaatttttggggttcccgactttttcaaattagcatttatatattaatttgtttcaattcgcagaaaaaatggcgggggggcggggataattatcattaaaatttcaatttttcttctattgggacccaaaactacatggtattttttaaaacaattcaacaggaaattaaacaaattgactgtttttgggtgtaaaaacttctgctaaatcgacaatgcttttttattattgaaaatgccttaacgcagttatacctttaaaatttggtgcggttaatttatttatttttccaaaaattcgttggtcattttttagagtctttataaccatcctgtggagtcgaattgttaattaattgataatattagtgaattaatttaataggtgtttatgatttttctattaagacccatagaattggaattttagggaaaattttattaatcattttttaccaatggacaatttaaattgtgattttattttttaaaaaaattaaaaaatcattttgagacgtaaaaattgaaattattaccgctattatttttaatatatttttaattgccaaaattgaattagctaatgaaaattgctgcaaaagtcatttggcgaaatatttggaaaaaaatgggaagaaaaaaaggagaaataattgaaaaattttataaaataaaagagaaaattaagcaaaaagggagaaaatattcaataaaagaatggaataaaattaattcgaaaatagcgaaaaaattggggacaaataaaacatatttcaaaaagggatcaaagaattaggacttaatcaaaagcaaaataattgctacaaatcaaaatatgatgaagaaaaaattaaattgtgcaaaaattcatagaaatgaaaaatgaacataaacaaaaaaagaaaatattcaagaaaagaatgaaaccaaaattatgccaaaatttgtaagaaaattggagttggcaatgacacaattaggagatggaaaaaacaattggagatgaataaaatcattcagcttttagaagtgcatgaaaacttttttattgataaatctagacaaaatttgttcataaattttatttaaattatataaatcatttacgcttgttgtaataaaatgccataatcatgcgaattattaaatactcaaattctaatcatctattttccgagagatttctaagagaggtttttgggaaaataactccatgtgtgacataaaatatggacacaatgatatggacaaatatggaaacatagacataagtagcggagtggcacgaaaaatggaaaataggctctaaaaagtcaaaaaaataaggatgtaaaataagaaaattctattaaaaaagcaacaaaagtaagccaatctatgttaatatacataatttttaatattaaaaattattgtcaagaaaataaataaataaattttggagattttttag

SEQ ID NO: 39358 - DNA, 746 bp, Heterodera glycines
attaaaaataattttttttggggtggagccccggattctccagtattaccgtatattgataatatccattttccttttatgacgatttttgaaattaaaaatggttttatgacataaaaaatgcaagaagtattaaaatgtgtttacgatcggcgggtacggagcatttactcaatgaatggacagaaaagaaaaataattaagaaaaagtaaaggaatccaacaaaaaattatggcagaaaaaccttaaaattttttgaaaaatcgttggcacttaaattcggtcattccctaattgtctcccctcccccccccctgagggcaaaagcagtgctgcttcctttttatcaattatcatttgtgccttcatcaattcattaattaattactctgttcaattgaggattgattgattatcttcgacaataatttttgttgagttactgaccaaaattgccccattctctcctcaccaattcattgattgaatgcctttcattcattaattaatgtaatacattttttttattattttataattgttgatacaaattccgaattattaaaaactttttaacatggctcttcaagacgcttatgccaatgcaatggatgctttttgtggcaccacggggccattttgggtgagaaagggattttattttttaaatttatttgaaaaaggcaatgcctgttcgaactggccggtttagacacccttttgcccaagtgcgtagccggggggg

SEQ ID NO: 39359 - DNA, 827 bp, Heterodera glycines
ttactctcaatcaggggtcagaaatgggtttatttttttcctagatatttctctaaaaatagaatgggaaataattttgactaccgaatagcaaaaattttaagtctcgagttttggagctcgggctgtggttcgaattcgattaaaattaacataaagttcgtgatcagcaaacccccacatttaacgactcaaaataagtgacctttttcaatttgttcgctctgcctttgtcgtgtctttgccctttcccttccgttgccctttctgctgccactccaccgcacttcgtcccttccgctttcccttcgtatgatggcgatggtctgacttcgtcgtgctgtcggcggtcatcgtatcggcggccttcaccatttgcagtgacaaccaaagattgcatcgtcaactccaaattctgcatgtgttccaatcgccggttgccttcaatggaagttgggggccgaagaagcgattggaaatggagagaaggttcactgtgacgcatttggcaagcaattgttgagtcgaagaattataaggaagttttcaatttgtaaagtcgtttttgcttaaaatatgatttgaataaaaatctgctaagattgcactcaaactttaaaaatttctggcgatgcctttcggcgtcgccagaccccctcctgttcggacaggacaactgggcgacgccaactgcgatagtcaactggaaattatttctaaggtaatctaaggcgctgattgtgagcgggaatctgacattactcagtttcgaaccccgaacccggattagagatttttagaaatcctagtttcatttttttttttac

SEQ ID NO: 39360 - DNA, 1131 bp, Heterodera glycines
cgttaattattaaaattccaattcagaccctttctgaccaacagaatcatcccgccttagtcaataatatggcacagtccaatgatcatattatcgacgtccaaatccgttccatcagcggtcgctttaaaacctttcagattcggtattttgtttttcatttttctgttttttaagctattggtggtttagggttcgaagtcagcaggaattggacaatcttcgcgatcagttgggtcgtccgatcggtgttttggactctctcgtcttaccacaggtaaatcagaaataacaaataaacgaaggggaaatgaacacaatctgacatatttggtctgctagagcaatacccgggtgcttggggaaggtttccccagccaaaaaacattttgaattaaaaacgatttcaaattttattgaaattgtaatataaaaaagtttttttttcgtttgagatatgggtaaatgtgttgctttcccgggagagcaatactgggtttaaaaattgtttatttcagccaatgcatgaactttttgtggacgcatttttgactgaaatacgcaaaaacccgagagttacggacgtcgatttggatgaattggaaccgtgcttcagctgttcacaaacaattgcgcaagtaaaattggtgaaacggtgcgtcgattcggttgggcaaagtgaggaaaactgccgaagttgcgcctgcaaaccgaactggcaagtgaaaatatggagagaaatttaaaagattgtcgacatttaatttaaaatcctttaaggtgcgcgcgatgtatgggacgtatttttgcctccaaacaaaatcagcaaatgccggaaatttggatggctgggagagcgtaaggagaaaaagaatgcatatttgttaaattatgtgaacattaactactttaattactcacaaagtttaaaaaaatgccaaattagggaaggtcaaatgttcaaagtttgaaaaaacttttctttttaataatttggctttcgtttgacattccccaagggctctcttttcttaggccagtgccacgactttgtcgtcgcccactgttcgtgtgttttggatgtgtgccaaaaggaacagaaaaacaaaggcgacgaatgactgcgattat

SEQ ID NO: 39361 - DNA, 906 bp, Heterodera glycines
aacattttttaaaaagattttaaaaattaattttctccctttttcaacctgcaaaatgttgggctcatttgcaaaaatgctgttcaacagattgtaaatgtcgggcagaatgtccaggatgaacggcggcgagttcttcaagttcagccggggctgctggcacagcctaatcaccgtctccatggcacgatagcatttgtccacggtgcgtcggtccttcaacagcagcggggccataattattattttttgaattattttggcaaggaattttgaatttgccaattgccactaaaccaatcgagactctcgagaaacggacgaaaagtgtgccaaaagaaaaacaatttgataagcaaaaatcaaagaaagcactgagatggtaaagccgtcacaagaaaaacaaattcgataaaaacaatttaaaaaagtaaattaataatataatccatttacaaaattcaatggcccctccctttttgcctgatttgtcaactccgtccctttttcgcaaagtttggctttttcccataattactgattgctttgtagcatttaatttaatacagatcaatcaatcaatccatcactaattgttgtctctcgtcagtttccaactcattgttaattgccctgtgaataacctgcgcattcagctgacagttcggcccgctcattagcggcggtgcgttggcactgcccgcggcgccaccgccggcggcgccgttttggccaagtgaagcgagcagtgtttgggtggacgaattgacaaaggaagtggcggagccgaccatccgattgagcagcgaattcatcggaggaaatgcgaattttgtggacagagagagatcggcagcagaaggaaaagaaggcgcaacaattggaggcaatgaaagaaaaattaag

SEQ ID NO: 39362 - DNA, 1144 bp, Heterodera glycines
atgaacagaatggcaaagtcggtgatggccaagttgaatttgaacatggcgaacgggttcatgtgcaggggtcggaccaggcaatggtgcttggcctgggacgagggacttctgtcggtaaaaaatgttttttttaaacagatttagccattttaaatttgggtgtaatttgtcgttaatgagccgtgtcactgactttgagtaacggacgaggcgaacgacggccaccgaattgagcaaagtgccaatgcaaacgctcaacgaaaggtacacaatctccacaaagtcgaccaactcgcgctcactttccacgtcctccttttcaatttggtgccgaataattgtgccgttcatttttttatttgaatttaaaaactcgctctaaatggtgggaaaatatttattataaaaattttaataaatctaattagcagagagatagaggaaaatggcaatttgacaaggatcaatcatttccataaatgtttttaactatttttatacatttttaatattttttaaagaaaattttaaaccttcaaattgtttgacttattttttcgctttggattttcggagcatttaacgcaaatgaatttgctgatatggagaggcccttgcgcaaataatgtctaatggatttggtaaacattggcacggctttggaagggatgagcactaacggaagaagacgcccccggggggacggataatggcggatgatgaaaacggaagggagggggaaaggaaggggggagaggaaggggggaagagatgcattgggacgacggataaggagatgatgcacttgttcagactgattattcataccattaacagggaacgattaaaatgatttggtgttatcaccaattaagactcaaataaaaaaacaaaaagtgaaaagtgagagagagaatttgaaaaaaacaattgttttaattgaaagtcgaaaagcataagaatttcttttcaaatctaaaacgtaaaagaaaaataaataaataataatttatatttgttattaattagcgagttttcttcccgccatgcctaaattagctcctaaatgagcgctaagtgcctgataatccgcttgaatcataagcaattggaaatagtactgaaaaattaaatgtcgtca

SEQ ID NO: 39363 - DNA, 850 bp, Heterodera glycines
taccaacagttgccttctcttgtctggccctatcacctcccttacgatatttgaaacgcaaacaaaaaaaattcttgactaaaaaatggctatctcttttttctcattttttaaacgcaaaattggtaccaacagttgccttctcttgtctggccctatcaaacaatcttacgatatttgaaacgcaaacaaaaaaaattcttgaccaaaaaatggctatctcttttttcgcatttttttaccgcaaacttggtaccaacagttgccttctcttgtctggccctatcaaacaatcttacgatatttgaaacgcaaacaaaaaaaattcttgaccaaaaaatggctatctcttttttctcatttttttaccgcaaacttggtaccaacagttgccttctcttgtctggccctatcaaacaatatatctgaaacgcaaacaaaaaaaattcttgaccaaaaaatggctatctcttttttctcatttttttaacgcaaaattggtaccaacagttgccttctcttgtctggccctatcaaacaatcttacgatatttgaaacgcaaacaaaaaaaattcttgaccaaaaaatggctatctcttttttctcatttttttaccgcaaacttggtaccaacagttgccttctcttgtctggccctatcaaacaatcttacgatatttgaaacgcaaacaaaaaaaattcttgaccaaaaaatggctatctcttttttctcatttttttaccgcaaacttggtaccaacagttgccttctcttgtctggccctatcaaacaatatatctgaaacgcaaacaaaaaaaattcttgaccaagaatggctatctcttttt

SEQ ID NO: 39364 - DNA, 971 bp, Heterodera glycines
attaaaaatgatttaattcataaaaaaaataatttttttatttaaattttaatgaatatggagaagcattgccaaaatgcgatcaataaatgcaattgatcttcattagatctttttaaaaataataataatattagtcaataagattattaaagccatgaatttcatcataatttcatatggcattttttaattacggcccattgaatatttttcgacaaatccttcatttctgactgtaacttttttttgttactaaccaaatccaacaatcttggtatcattcgaaagcttaacatgtttggtagctgattctaagctattgcttcgtgattagacaattaccaaaaaagttaacatgaacatttaaaaaactagaaaattttgaagtttttttttaatattttttttttcaggcttgaaatcttttctttttttataatacgagtagagcgtttgaagtgctttcgaatgataccaagattgttagatttcgcttacaaagaaaaaaaaaattatgatccatatacttggtctggcgccgaaacggcggcgccgaaacgaccatctctcactagccatgattttccattttttaaactaattattatggattctttttttatgcacaaaatcgcgaaacaggcatctaaaaaggcagaaaaaaaatcgcaaatatgcatcaaataagtacaaaaatccttaaataggcacaaaaataggcaaaaaaaatttttatataacacttttaggtagcaaaatatgtaaaaatttaataaaaacacttaattttggttatatttccattgtaaatgaaaatattaaatattttaaaaatttttgagtaaggacaaattctaaagcaaaaatttttttatcaaaaaaaaaaaaaaaaaaaattaaatttttggccaccaatttttgaaaaattttttcttctcttaaagggatttttcaaaaatccggaaaaa

SEQ ID NO: 39365 - DNA, 1247 bp, Heterodera glycines
ttttgagcgtattacgatttacttacaccatttttttctaggcttagatcacatgcgatttcggcactctgataatttagcgttcataatgggatgtataaaggcgatgtagaaaggaatggaagcgctaaaattgttgaaaaagctttttgagcgtaattacgattttacttacaccatttttttctaggcttagatcacatgcgattttcggcactctgataattttagcgttcataatgggatgtataaaggcgattgtagaaggaattggaagcgctaaaattgtttgaggagctttttgagcgtaattacgattttacttacaccattttttctaggcttagatcacatgcgattttcggcactctgataattttagcgctcataatgggatgtataaaggcgattgtagaaggaattggaagcgctaaaattgtttgaaaagctttttgagcgtaattacgattttacttacaccatttttttctaggcttagatcacatgcgattttcggcactctgataattttagcgttcataatgggatgtataaaggcgattgtagaaggaattggaagcgctaaaattgtttgagaagctttttgagcgtaattacgatttttacttacaccattttttgctaggcttagatcacatgcgattttcggcactctgataattttagcgctcataatgggatgtataaaggcgattgtagaaggaattggaagcgctaaaattgtttgaaaagctttttgagcgtaattacgattttacttacaccatttttttctaggcttagatcacatgcgattttcggcactctgataattttagcgttcataatgggatgtataaaggcgattgtagaaggaattggaagcgctaaaattgtttgaaaagctttttgagcgtaattacgattttacttacaccatttttttctaggcttagatcacatgcgattttcggcactctgataattttagcgctcataatgggatgtataaaggcgattgtagaaggaattggaagcgctaaaattgtttgaaaagctttttgagcgtaattacgattttacttacaccatttttttctaggcttagatcacatgcgattttcggcactctgataattttagcgctcataatgggatgtataaaggcgattgtagaaagattgggaagcgctaaaatggttgaaaagctttttgagcgtaattacgattttacttacaccattttt

SEQ ID NO: 39366 - DNA, 713 bp, Heterodera glycines
atagacaaaagaaaatgacgaaatagtacaaaaaatgggagagaacggcagacggacagggagttgaaggatgggaaatcaatcagtggataatccgtcagtaatggacggacaatcaccagcaaaatttattttacgactctttttatcatatgattttgtttcatagactttgtctatgactgtatcatatgattttgtctatcatttcgcagaaatgccttaaaaagcaaaaaaaaattttgaaaattcttaaaaactcgacttcgagtgtccggcaaaggatctcgccgcttttgaaatgggttggaaagatagaattaggggcgcgcttgcccttttccataatgtgaagagatcaaagtgcttcgaccaggtcttttgctagtatggtgatggatgtattaatagaacaggatttaggttcgattttattggtctatgctgaccgagataatggataacagagacgaacggggccattcgtattgctacgtgagaggtgaaattcttggaccgtatcaagacggactactgcgaaagcatttggcaagaatgtcttcattaatcaagaacgaaagtcagaggttcgaaggcgatcagataccgccctaattctgaccgtaaacgatgccaactagcgatcccgcggcggatttattcgcccctggtggggagcttcccggaaaacgaaagtcttccggttccggggg

SEQ ID NO: 39367 - DNA, 1250 bp, Heterodera glycines
  unsure (1)..(1250): unsure at all n locations
taaaatntctgtcccatatattactaacattatgttcggttcggcttgtgttctaccactgatccctgacatcaacttttcacccaaacaattcctgacccgctgtagcagtcatataaagcctctgcccactctcgatcacacagttaatggatgggtgttgtttacttatcccctcccaaaatccattttccaatcaccaccaccgccagcgcccattcattgcccttttatcccgcgccgtcagcgggaaatcccttcccgatcacaaggtcatgtcatgttcgtgtcctgtcgtgtctcgtgctggcggtgaaggttgtgggactgctgttggtgctcccatttgaccacccacacccgttaggcgataatggaaaccgtattttaagggggtgggtatgggatcagggatatgtcggcatgccgattttatcgcgtcgcaaaacacccctggtacgaactgtgtgccttccgccacccaacccccgcggtgaccattcgtataaatgatcaattgcccggaacgcgtaggccgagcaaccgcgccgtgcaaacagcagggctgctcgagagcgaaagactttcctatcacgtgaaccgaccccaaaagaaactcgaggctttaggccctaaaaagttcgagaatttttcaagattcaacaaaagtcgcaaatttttacaaatgtagtatttttcgtttaataatattcattatttattttgtgacttttaatggttattttttatttgatttttaaaattttttatctcctttttaaataaaattgtttttttttcaaattatatgttttttgtagtttgttttatatgcatacaaaaaatctttttttaaccgaattccccccaaaattccttttttttccctctttcccgtccctttctgccaaatggctcgcacatcagtccatttcagtcccgtcgattcatcacattttggcaaaagtgatttgggccaatttctccgcttttcccattggccaaccatctggccgataaattcactccatctctctgcttgctgtccatcttcacaccaaaacaattatttattatgtgtcggtgctgtggtgctgtgctcctcatttccatcgcccaacctcaaatttgacccattcgccgcactcgcggggccttggaaatcctcgggattctcgacacaagatcccctcactactctcgagataagatagttgaattttggtggggacaagccaccagtctctccc

SEQ ID NO: 39368 - DNA, 854 bp, Heterodera glycines
aacaccctattagtgctttgctgtgccgagaaccgtccccacagaggatggctttcaatctgcaagaaattagattggccttatgtggttgtaaaaaacttttgggtatggaattattttttgaagtgagtcaaacaccctattagtgttttgctgtgccgagaaccggcaggcaatggatggctttcaatctgcaagaaattagattagcaatatgtggttgtaaaaaacttttgggtatggaattattttttgaagtgagtcaaacaccctattagtgctttgctgtgccgagaaccggcaggcaatggatagctttaaatctgcaagaaattagattggcaataagtggttgtaaaaaacttttgggtaatgaattattttttgaagtgagtcaaacaccctattagtgctttgctgtgccgagaaccggcaggcaatggatggctttcaatctgcaagaaattagattggcaatatgtggttgtaaaaacttttgggtaatgaattattttttgaagtgagtcaaacaccgtattagtgctttgctgtgccgagaaccggcaggcaatggatagctttaaatgtgcaagaaattagattggcaataagtggttgtaaaaaacttttgggtaatgaattattttttgaagtgagtcaaacaccctattagtgctttgctgtgccgagaaccggcaggaaatggatggctttcaatctgcaagaaattagattggtaatatgtggttgtaaaaaacttttgggtatggaattattttttgaagtgagtcaaacaccgtattagtgctttgctgtgccgagaaccggcaggcaatggatagctttaaatctgc

SEQ ID NO: 39369 - DNA, 698 bp, Heterodera glycines
ctgttgcagtgttttctgttctttttggatgccatccgacgcattctcaaaaaagaaaataaatatttatttatttttattattttgcattttgtatttttattttttccatttgcctccaattccttttccaattcggcaatttttcgtgtcgcttctgccaatgcgtcggtcgtttctctttgctgcctaattataatatttaattgttttatcattttaaatcaaattttaactttttacgaaaataaaactttcaaaaattttaattttaaattttgtgcctttggaattgataaaaacacgtgaatatccggtgtgcggacgtttcgcctactggacacctcgcctactgacacttcgcctactgacatttcgcctactaagccaaaatcggacgtttcgcctactaagctaaattcggacgttttgtctactaagccaaatacggacgtttcgcctactcacctaaaatctgacattttgcctactggacatttcgcctattgaatatctcgcctactaacctaaaatacctagctctttcgacagcaaatttcaccaaatatatattctaatttgacatatatttcgctatatttataatgctaatgaaatttagcaaaaaaaaagcaaataaatttttcaaagaacacagaaagtgtgcatctctatcattagcttcttcatcactcttt

SEQ ID NO: 39370 - DNA, 887 bp, Heterodera glycines
  unsure (1)..(887): unsure at all n locations
tttctattttntggacttatntggtcgaaaccncgggctctaaaaaagttgaaatgataaaattaacacatagcaccaaaaattaattttaaaaaattggttttcactcactgtatttttaacaaccgaaaaccctttaaacagtttatttttaaaacccttaaaaaaagtatttctgtgcattttccatttcagttttttccattggtttagtcgatttgatttttcaatagaattttttgttactatcattttgtaaattagtcgcttttgaaataagttatggccctcaaaagttggctcaaatggaattggtcaaacgacaggacttctccgcaatgggcgggaaacttgattttttgcataattgacttatttaaaaaacttacagttgaacgttcgcttcgcgcgctggacgaacgcattgacagaagtaaacaaatttgatttgattgaatagcaacaaaaacgttaatggtcaaaagattattagcatttattcataattccattttgatttttccaattccctaatttaccgtcttaaatttgttgagaaccggaaatagttctaatgcgttttactggcctgcaccagggacggtcccaggattttggtttggggggtccctcccccggaagacgacctttttgcttttcacatctctttttgcctcggtttttccaaaaaaaacttgtggaacagggggtccggtggtaccaataggcaccgccgggaaaatttttgcattttttaatgtgctttgttaccaaatttaccaaattttgtcaaaaaaagtgacaaattttgcgtttttgagccatttttagcagggttttctcaaaaaattgtacattttttttgaaatttagcgaaatttttggaa

SEQ ID NO: 39371 - DNA, 437 bp, Heterodera glycines
tttcttgagacagatcgctttgcatcagcttaccttcaggcctaaactgtacaagaaccaagtcccccgaaaatcaacagaaacattttttcttgacctaagaacacatttttttccaacaaaggcgaacaacctacaatataaccaaatgttgtttttctcaataaaaatgcatctgaacggggctgtcaacagctttatttaagagttttacatccattgaagcaataagtcaaagcgcttcaatacataatgacacgaaaaataaaatagaaggaagaagctaaatagcaagaaatatgttatctggtgtatttaagagtattatatatttataaggtcttccaatgtttgcaaggttcgtttccatcggaattcaagcagtgaagcgatgcgacaatttgaacgtcccgtcgccccagtaagagagctgaaaa

SEQ ID NO: 39372 - DNA, 1030 bp, Heterodera glycines
ttaaaatcatttataataaatgtttaaatcatataaaattaaacatcatcagtctgatgattctttgtgcgctgactgccattttgtacgttttggcctcttttgcgtccaatgttaatttggcggcgaattgagcagaaacaaagaacgccgatggataattaattatgaatgaagagacaacaaaggaacagaattttccaattcgatttgatctgctgaccgatgacttattcaatgcattgtaaaatagaaaaataattattgaaaaattataaattcattgcagttttacattttttggatttgaaaaatcggcagagaattattaatcgcttatgtggattctccttcaccctttaccctcccattcattgcttcttcttagcttttccttttcttcaatcattctgactgtcagtgctttgaagtgacaattgtttgcttggctttttctcttcattgtctttgcctgggtttcccttgaaaatgaaaaataaaaaatatttaaaatttattttttttaagttaaaaccaatttgtgctactcctttgtaaatattatattatttagtgataatgcagcagcattggcaccgaccatttttgcgcgttttgttttgccttttgtgccattttttgatagttgcccacggaatgcaaatttatgtgaaaacattggccgacagaataattcccctgaaagtgcacagttcagagacggttttaagtgtgaagcgaatgattgaggcggaggagagcattccgacggatcagcaacgtttgttcatagagctggaggaccaccgacggttggcggattacgaaattcggagtggctttacgcttggcgtggtggtgggaaggacggaaatggcggcggaaagcgatcggatcagagtcaacgtgaaaacgaaggacaacaaactgatcacttacgaaatgcacagatcggacaccgttaaaaacattatggagaaagtccacgagcagcagggtattccgatcgcagaacaacggttgtcttccg

SEQ ID NO: 39373 - DNA, 397 bp, Heterodera glycines
cccgtgtcgctgttcttcagcgaaagtccgataagacactagtaggaatacgccggcttcacaaatccgttgcgtgcgatgggtggcactccgcgctctgctgacaaatgagggagaatttatgaaaaccgcaaaagcgaaaagcctcccctttcttcgagggggggggggggggggaagtgcaccccaaaatgcccaccgttttccgtccgctcgtcgtcttcgtcatttgaccgatatgaatcatcgttcctcacaacgaccacctaagggggaagggagggctattgggacagccaatgacaaaacaaagaattggttgaccaatgaccaaacatgggtaatgaatgccaaaaagggtcaatggtcgtcattcctttggtgccattgcctgtct

SEQ ID NO: 39374 - DNA, 910 bp, Heterodera glycines
acaaaaacgcaaacagttcgagtcttattgttaattaaacagttttataaacctttacaattgtaaaaaacaaaatattttcggacagaaaaacagacggaggcgggtgaattgaattatttgcaagtctttcaaggacgatgactttcgcttccattcggcgcccgaaaaccggtttttaggccccatttttgttcgagaaaatatcggccgaacatcgacacatttgtccgatgtcatagcgctatgttttcatactcatttatacagtttaatacttttttattcgtaataaaatatatgttcccacttcaacaattcgtctccgaattgggccgtgatccgtgggagatgttgcagttgtttttgccgcggtttgctctgctcattgtccgccgcaacaccaccagtgtgctcattccgttgttgttgctgttgtactccttcgccctctccgacactttgttgccactttttccgtgccgccgcccattccgtgccgatgccctcccgctcgatgaccacaacgtccatgcgttgcacaatttcggcacggatggcctccgcaaggttggcggcggatgcagtggcgtcactggtggtgccaagcaggtcgtacacgacgccatcggcggtgccggtgggatccatgggcctattaaaaaattcggaaggccttttgacaaattttaacagtagaaatcaaaaaaaaatcttttgaaaaactaaaaatgtttaaaattactaaaatgcattacaaatttctgtaaaacctttaaaaaattaggggaaaaatggcaaaaaaaagcgttttttgataaaatgtaattcaaattttatttttttattagaaatcggggatcggacgggtcgaaaaatctgtctaatcaaaaaccggaccatttctgat

SEQ ID NO: 39375 - DNA, 796 bp, Heterodera glycines
  unsure (1)..(796): unsure at all n locations
atttccattcccagacaaccgtccgttgcccagcaaaatccgttttaaatgccttcagattgagtaattaaaaaccagagagctatgacaataaaagcatttatttcattttcagttacatcgatcactccgtcatcgcttttcttcgttcaaatcaccaaattttcgacaaaagaggcaccaatttacatttgtggcttccttattcaaacaccacgaatggccaaccaatttgggatgtttttgcccgtgaaatttggccaattttttcggcaaacattcaccacttacgctttccccatggtgatcatttggaccatttgcttcgtcgcacttcgccgacaattctcaccgatctcgaccaattgaattcaatctattccggtgctttgttgcccgctgcgtttggtgatggttttgatgggccaatttcaacaatttctgctggccaagcattgtccaaatggttgcactctccgagaaaagatggccaacccaagcgattgcgttgcgataattacaacgcacaatggaacactgattggatcaacaatttcaaggaggtgtggccataattcgacaaatgattgatttttgttttcaaattgtttagcattttctccgtgccaatgccatttcttcggtcagttaccaaattcatttttctgttcatgtgccatcaatggaaatggtgccatttgaattggtgaacgaatgcacaaaggaaaagctgacattggccaaagcaaatgaaaatgaattggacaaanagtggataatgaaacgctgcaaaatt

SEQ ID NO: 39376 - DNA, 1195 bp, Heterodera glycines
aaaaagagaaattgcgcaagagactaaggccggaaattaacggaaaaaaccgaaaatggcattggcatttgtactaattgtaagtgagcagcaacagaagaagaaaaggttgttttgccaaaaacaattcacacaaatgaatgaatgttttgaggatgaatttgtgctggaaaacaatttttgtattttttttaaaagcgatttttgggaataaacaaaaagaatttgctaattatgtcaattctttaagaatggtgttcaatgaatacattcgccgattgtcctttaaatttcgattaacattatttaactaattaattatttgacaaagtgatgaatcattggcaaaaggttcaaaagcataattaataaacattatgtacaagccagagtggccaagtttttttttcttcaaaaaaaggacaaattctttgtgcctttgtccaaattaagttttttaaaatcaatggaagcctaaacagctttaaataagcgattgaaagtgattgtatccgatcatttgatcgtcaatgaatttttgaaaaaatcattaaatttttaaacaacataattaatgttcctaataatcaaaagacagtagtgatcttttcataattttaatgctgtttaggctatcagtgctttaaataaaatcaactttgactccgattttggacagaggcgcaaaagtcggggctccggtcgtcacccccgccccctatttaaggtatggtaaatccattaattgcttacttttttaagttgtgcaataaacgcaagagcaactttcttcgtgcataaaaacttaagttttttcaatggcaacagatcgctgttgtacggaagtggcgatgatggacataaccaattggcaaaagctttcagcgcagcgaaagttgctgtttcggtggccatatttttgtgtaagtaaacgacacaacgaagtggtggacaatcggtgagaatggacgggatgacacgaatgacgcagtggaaaatgccaagccattggtagtgcgcgagaatagtggcaaaatattgagcgaaacaaattccaacatgcgatcacttccctttgggatgctcacataaagtggacataattgaaaactgtggtcctccatttgttcaaaaattccataacttgttggctgacgtatctgaaaaaattcaaggaaaattaccgtaactctta

SEQ ID NO: 39377 - DNA, 1224 bp, Heterodera glycines
  unsure (1)..(1224): unsure at all n locations
ccttttcatgactataaaatcttttgtttccgctttgactctcattaaaaaaataagctttccacgaanttattattctgttcttttgtttgacatcattcggaactcgtccaaaattgtgctaatgncaaaaaaatgaaccgacggtaataaattngaaaagtcacacaaattcatcattatttagctaacaataaactgttttccataatttcagttggatttgcaacgacgtttggatggacattttcccctgttttgaccatgcccaacttggcctcaaattggcacttctttcgtcacgtttcaatgcgttggtggacaaacatttcgatggcaaaagcgaattgacaatttggagaccaatcgcaattcgtcgcaaggacaaaggacctgaaccgaaactgtctgtacaaatggatagaaaatttgacaaatttgtggaatttccattgcccgaccgtccgttgcccagcaaaatccgttttaaatggcttcggattgagtaattcggaatcagagatttatggcaataaaagctttccttccatttttaggtacatcgatcactccgtcatcgcttttcttcgcttaaatcaccaaattttcgacaaaagaggcaccaatttacatttgtggattcaattatcatacaccatggatgtttttgttcgtgaaatttggccaattttttcggcaaacattcgccacttgggcgtttgcaatggcaggccaaatgttgtcaaaatggttgcacagtccgagaaaagatggcatgccgaagcaattgcatttctttttgaaggagccaccaaatatggaatgggccaacactctcaaaaaggtgtggccatattttcgttagccaactgattttgattgcatttaattaatgtccgtccgttttcccattgtttagcattttctccgtgccaatgccatttcttcggtcagctaccaaattcaatttactgttcagcaaccgtcaacgcaaattgtgccatttgaattagcgaacgaacagaccaaggaaaagctgacactgatncaagcaagcgcaaatgtttgngaggatcgctgngtaatgaaacggtgccaatattgngagacggcggcggntcatgggcagcccaaatttggacggattagcactgtcgagtttcattattacgtcgaagctggcattgggtgagncacaaaaaagcatttgattttgtttaaaaa

SEQ ID NO: 39378 - DNA, 1171 bp, Heterodera glycines
aaaaatggctatctctgaaagtcactattaaatccttccggggaattggccacaacttttgtcttctgttgtagcgctgaataaaacactaatagtgtgtttgaaaacgcacgaaaaatagttcttgacaaaaaatggctatctctgaaagtcactattaaatccctaccgggaattggacaccaacttttgtcttctattgtagcggtgaataaagcactaatagtgtgtttgaaaacgcacgaaaaatagttcttgacaaaaaatggctatctctgaaagtcactattaaatcactaccgggaattggacaccaacttttgtcttctgttgtagcgctgaataaagcactaatagtgtgtttgaaaacgcacgaaaaatagttattgacaaaaaatggctatctctgaaagtcactattaaatccctaccgggaattggacaccaacttttgtcttctattgtagcggtgaataaagcactaatagtgtgtttgaaaacgcacgaaaaatagttattgacaaaaaatggctatctctgaaagtcactattaaatccctaccgggaattggacaccaacttttgtcttctattgtagcggtgaataaagcactaatagtgtgtttgaaaacgcacgaaaaatagttcttgtcaaaaaggatgtatctctcaaagtcgagatgggagggcggacgggaatatcgcaaggagagcttttttctattgtaactgtgaattaagcgaaatatatagttatgtattggctcgagaaacagttcgacacttaaactgtcgatttgttaaagtcactattagatacataccgagatctcgactccgactttagttttgtgttgtagcgcagactcaagcttcaatagagtatgtgtatacgctcgattagatagttcaagagattttaataggcaatctgcgcaagacttatatcaaatccggatcgggagatggctcatccatcatccgtaatttcaaggagcggtgaataaagcattgttagtgcgccggatattccacggaaaataggtagccacaaaaaagagagatctcagagagacttgtattacatccctgccgggagggggacaacgagtgaagtaataaggagtaaaagtgaatgaagcaatgatagtgtgatggaccacgcacgaaa

SEQ ID NO: 39379 - DNA, 610 bp, Heterodera glycines
  unsure (1)..(610): unsure at all n locations
tgatgatgatgatgatgatgatgatgatgatgatgatgatgatgatgatgatgatgatgatgatgatgatgatgatgatgatgatgatgttgatactgaaataaaaagacgagaggagaaattttaactgagatgtattaaaaaataagcttgaagagattgggtataatgatgatgatgatgatgataataataaaaagacgagaggagaaattttagctgataaaatacgaaaccatagtgaaaacgaagaaaaaattgaaggaaagacgcatggagaaattctaaaagaaaagctttatgcggataatgatgatgatgtacaattagttgcgacaaagggtgaaatatttaaagaaagaattgaaagtatcaaaacaaccgataaaactgaaaataaaacccatggcgatttattacaaaatataattgcatcaaggcacgttgagcgaataagatttaaatatataaaagaacgacgaaaattttctgtgtattttaacgaacaaattattgcttatatcgaactgtcagcccagcttgngtatatactaggattcgatgatcccatcaaaatacatagcggggacatggcaaaatattactgtga

SEQ ID NO: 39380 - DNA, 780 bp, Heterodera glycines
aaaatgccaaataatccgagtaaaattgccaatggcagccaaatagtcaatgaaaatgccaaataatccgagtaaaattgccaatggtaaatagtcgatgaaaatgccaaataatccgagtaaaattgccaatggtcaaatagtcaatgaaaatgccaaataatccgagtaaaattgccaatggcagccaaatagtcagaaaatgccaaataatccgagtaaaattgccaatggtaaatagttgatgaaaatgccaaataatccgagtaaaattgccaatggcagccaaatagtcaatgaaaatgccaaataatccgagtaaaattgccaatggccaaatagtcaatgataatgccaaataatgcgagtaaaattgccaatggtcaaatagtcaatgaaaatgccaaataatccgagtaaaattgccaatggcagccaaatagtcagaaaatgccaaataatccgagtaaaattgccaatggccaaatagtcaatgaaaatgccaaataatccgagtaaaattgccaatggcagccaaatagtcaatgaaaatgccaaataatccgagtaaaattgccaatggtaaatagtcgatgaaaatgccaaataatccgagtaaaattgccaatggtcaaatagtcaatgaaaatgccaaataatccgagtaaaattgccaatggcagccaaatagtcagaaaatgccaaataatccgagtaaaattgcccatggcagccaaatagtcagaaaatgccaaataatccgagtaaaattgccaatgg

SEQ ID NO: 39381 - DNA, 1400 bp, Heterodera glycines
  unsure (1)..(1400): unsure at all n locations
tttaattaattacatttatttgtttattacgcttttccggtcatgtgaaaataaaatgaaggaaaaataaataacggaagtaaaaaatcaatttttgtaattagtgtttaatgcgtcttaatctttgtgtgctgctgacgtttcgctcgtcagatgtgcaaaaagtccaattctgttaagcaaaatgaaatgatttgaattcatattttcattttaattatataattttattttattatttaattcttcattgctctccccgaaagaatttggcccaattttgaacattattcgtattttcgccatttttctttaccattttgtgccatccgattgtcgttgaagcgttcaatccctctgcgtatgtttatgtcgccgttatgattgtgctgtacacgaccaatttgatcaacgcctaattatgattttttaatcggaaatgggcgccttttattgactattttttggcattttctttggccaaaaatatgccaatttgtcttgtgacccattccaacaaacggatttaaattgaaatttcgattaaatcactttaaaaagagagcaactcacttgagtcaactaaatgagcaccatttgcaacagcagcagaaaagaggaaaaaaacaactccaataagaaaaatgcaaagaaaaagcagctgattcccaaatattcgttgttgagtcgtcatttatttttgttttttaatttcacaatttgtcggacgggaaaagggataatttaattgctttcgtaagtaatcaacaactaattatgatggtcgatcggtcggtgggaggtgagaatgggtgcgcgaaagatgtgatttattaggctgactaatgagtgaacaaagtaattagatgagagatttcaaaaaaaatatgctgtcctaaataaaataatacgtcaacggataaagtgattggtattttaaatattcttaggtttaatcaattcgaaaacagacatcaaatatgtaataaaattacaatattaaggtctgtcaagggaatttttcttaaaatgacagtagtaaatttaaaaaattaaaataaattctaaattaatgcttatatatcggtagctgattcagtttttccaaaaaatttataaaatcgaaatccaacatagtaaattgcttacactttatcagtcaatctttctgaaacaacaaatccaccatcaattcttgtacaataaatttagcattttatggaagtctgaagcgcgagagattgtgaagttgcatcggtgggagcgatcaaaattttttgattagtaatgcaaaagattcagaaaatttttcaatgctgtgtttcnaattttgaaaaatgaagagtccgacaatgcctaggcgccgcccggaataattttttggaattttcaaacattta

SEQ ID NO: 39382 - DNA, 1324 bp, Heterodera glycines
  unsure (1)..(1324): unsure at all n locations
attaactattcaacctaaaaaaatttaaaaaaattaacccaaaaataaatcgaaattttcaatcaaatttcagaaaattcgaaaaattttccttcctcaataataattttattttattttttttaaattttcccccaaaaattatcaattttaaattccaaatttaaatgttaaaatgacttaaaaaggcaattttttcaaagctaattgggcgttgcaaatgcgctcggattatcatccattattattttattcattccgtcttttccccaacttttttttgtcaaaaatgtctttttttgtccattttatggccaaatgcctccgctgtcaaaaattgggcaaaaattattttttgttcattttcttcttcgcttaattagttttgttcattacttttgggtattaaaacaaatgaaatttctcatttttctccttttttggaaacaaaatttttttccgactcaatgcatttttttggccaaattctctcgggaatttttggacaaagaatttcattttttaaataattttaatttattttaggaattaaaaggggaatttattatatttttatataaatattcattaaaaataaaaaatgtcctcaattttaataaaataattcatttggctttgtttaaatgacaaatttctttaatcatttttatttaattttttggaaattctttttaattttcaatgaaatattttcaatcttttttcaatataatttttaatttaatttagcgttttcaattagctttaattttcgaaatatttttctttttatattattattagggctaggatttttatgtgctaaaaatcctgaaatatgtaataaaatatgtgctaaaaaatgctgaaatatgtgctaaaaacccccaaaaatgccaaaatatgtgctaaaatatgtgttaaaaattgaaaaaataagtgtgtttttgcataaaaattcccaaaaatctcattctttatcatttttagcccatacaacgcaaatcaaatacatttcgaagtgtttggggtaaaattgtctttttttgataaatcatttctataaattgaaagttccagcagagaacttcgaaatccaatgacgaattaatgaattcgagatttcattagtttctacaatcgaagaaaaaattttttaatttgaaaattatgttaataattaggaaaaaagtcgatttttaggngtgtatttttcaattttcttgtatttttattgcaatttttctcaaaaatgccaaaatatgtgcaaaatatgtgcccaacccccaaatatgtgctaacatattttatgtgccaaacgcca

SEQ ID NO: 39383 - DNA, 1210 bp, Heterodera glycines
cacggtcccccgaaggaatggatttaattaaattctctccttcggggatttttttccattaggtcgtccgttagcgttcgattgctctagtcaatttttcaaaatttttgttgaaatatttgtcgtgctctgaagggcgtgggaggggggggggcggttttgctccgggagtccctctgtccagcggttgtgaggatgaggcctaactgctctaccactctgctccattccccaccgcgcagaaatctatcatacaagaaaactgaatgctatacatctgatgaccgaatgacgtatcgtttgctaggtgagttgttactgacgcatagcaaaacctgcacaaagagcggatttgcaagaggaatttgcgcagttattaatggccaaccaccataaaagcaggcgaacccgggcgacccgggggcgaaagtgaagtccgaattcactgtggtagtggagggagtgaagaaaaagcggagacggcgcggggcggcaatttgttgcagtttttgctgctgtccggcgaattgaatgttctgctgctgctgctgctgttgttgttgctggttgggataaacgaagttgttggcctcaacggacggagatttgccattaaaattgacaattctctcggcggggggcggaaagggcccccgtggggagcgaaagggcacggacattggcacgggcacttgttggggcggggcaaagactggcggaaacggttggagttggggctgactgttctgctcactgttcagggactgctgctgataagcaaacggctgctgttccctactaagctcttcaccattttctttgttttattttaatttcccaatttagccatttaaaattgaaaaaacgaaatcatgtcaaaataattatttattacttgtcgtacggcacaaccacctgtgccggtttcctcatcgtcagttgcttcggttgttgttgttggctgttgctgggccaattagctattagaatgatgttttgttttgtcagttttgggaattattattgggacaaattgacttttaagttaagtgtccgatatgatcagccaattgacccaatcggtcattaattcattaattacctatgcgagaatcgctttcttctgtcgatgagtgttcgatctgttgcttcagtcttcgagttgagcttttcgagtcagcgtttgttgatgtcttctgctgacaaagga

SEQ ID NO: 39384 - DNA, 859 bp, Heterodera glycines
gtcgattggaataaatggaaaaaaagcaaagtcaaagacaaaaccttaaagcactagccgattgaaataaatggaaaaaaaagcaaattcaaagacaaaaccttaaagcactagccgattgaaataaatggacaaaaaagcaaagacaaaactttaaagcaatagtcgattggaataaatggaaaagcaaagtcaaagacaaaaccttaaagcactagccgattgaaataaatggacaaaaaagtaaattcaaagacaaaactttaaagcactagccgattgaaataaatggaaaaaaaaagcaaattcaaagacaaaaccttaaagcactagccgattgaaataaatggacaaaaaagcaaagtcaaagacaaaaccttaaagcactagccgattgaaataaatggacaaaaaagcaaagacaaaactttaaagcaatagtcgattggaataaatggaaaaaagcaaagtcaaagacaaaaccttaaagcactagtcgattggaataaatggaaaaaaagcaaattcaaagacaaaaccttaaagcaatagccgattgaaataaatggacaaaaaagcaaagacaaaactttaaagcactagccgattgaaataaatggaaaaaaaaagcaaattcaaagacaaaaccttaaagcactagccgattgaaataaatggacaaaaaagcaaattcaaagacaaaaccttaaagcaatagtcgattggaataaatggaaaagcaaagtcaaagacaaaaccttaaagcaatagtcgactggaataaatggaaaaaaagcaaattcaaagacaaaactttaaagcaatagtcgattggaataaatggaaaaaaagcaaagtc

SEQ ID NO: 39385 - DNA, 1115 bp, Heterodera glycines
aggaacaatttctattactagatcaaaccgaaagagtccccttttaggttttcaataaaattcaaaagcggcctatttttaaaaagcgccaaattcttttcataagaacatccagtacaaatgcacctcgttcccgttgtaaacttttgataaatactgaatttctttaaatcggtgacgcaaaatgttggacgtgccaattatgtcttcattttggattccaattgcattaatattattggcatctttcgcctccaattcctgcctatacaggatcactttcaccttcaattcctgcctataaattgccactttcgcaaacaaaatcattttaatgacaatttgctttatctcgccaaccgcttcggatgtaatcggatggccatagctatctgctaatgggtctggttatttgaggttatgcgaaataaatgtcccttagcttcaagtacgtccttggattgtagtaacagtacttatttcgaacatacatattcttttttaaatcaaaaatctccattaggttattcaagaccgaaattttccgagaccaagcgaaaaccggagatacaacgatattagtctgtaaaattccttaaggtacaaaaaagttatggctagaagaattcataaactggttgcccgaacattttctgccataacttttttgaaccataacaaaatttttcaagatatagaaaattgttaggactatcgaatgatttcaagaattaaattttgcttgcttttgagcaaatttatgggtaattttttgttgaaacttttcattttggtggtttttttttataacgacttagcaccagttgattacctaccgtatcttggacaccacaactggtgacaaatcatagttgactccctaccgtatcttggacaccacaaccaacgacaaagcatcagttgactccctaccgtatcttgggcaccacaagaaccaaggacaaatttgcgcctgactcaatttgacccaccgcttttttctttgaagtcctccaatttatcttttgcctcactgatgatctgattaaccaaattactgccactataaaatacatcggtttgaattgtagcaattttttgatataattgctcca

SEQ ID NO: 39386 - DNA, 845 bp, Heterodera glycines
ttttttttgtttggggggcattccccccgaaccgatgcccccagttttagggggagaccgaatctttcgggaatagtttccctataccctgtcttttaattctgcgttggatttttgctccccataattgtttgagttccccaaacggacactggaaaaaatcgatttttttgttttcggggcagtccccccgaaccgatgcgcccagatttatggggagaccgaatccttcgggaatagcttccctatagcctgtactttaattctgcgttggatttttgctccccataattgtttgagtaccccaaacggacacttgaaaaaatcgatttttttgtttcataaatatttttttcagaaagtgctctaaagcgcaccaaattttatttacaacttaattttagcactctgatgctttagtatcaaaaaggaagatggagaaaaaattttttaaaaaatttttccttatattttggttatatcgttttgcttttggtggggtgcttggaacagtggaatcatgcgcacccgtccgatctggcaagttaagcaacgattgctgactagccaaaaggttcggtgccgtgatgaaacgaaccagcactgcttaccccgcggcacccggcacggtcccccgaaggaatggatttaattaaattctctccttcggggatttttttccattaggtcgtccgttagcgttcgattgctctagtcaatttttcaaaatttttgttgaaatatttgtcgtgctctgaagggcgtgggaggggggggggggcgaaggcccaccacgaggccgcgaagaggccgagtgagtaccttcggtgcaggaaaattattaa

SEQ ID NO: 39387 - DNA, 664 bp, Heterodera glycines
attcatgtgagtttgagcagaaaaaggagatagacttttttttcaaaattttcagagccaaactcgcccagaaagaaatcccagaaaaattagggtcgtcgcttcttatcccgaaaatgtggttggaattcatgtgagtgttgagcagaaaaagagatagacgttttttcaaaattttcagagccaaactcgcccagaaagaaaatccagaaaaattagggtcgtcgctactattccgaaaatgtggttggagttcatgtgagtgttgagcagaaaaagagatagacgttttttcaaaattttcagagccaaactcgcccagaaagaaaatccagaaaaattagggtcgtcgctactattccgaaaatgtggttggaattcatgtgagtgttgagcagaaaaagagatagacgttttttcaaaattttcagagccaaactcgccaagaaagaaaatccagaaaaattagggtcgtcgctactattccgaaaatgtggttggaattcatttgagtgttgagcagaaaaagagatagacgttttttcaaaattttcagagccaaactcgcccagaaagaaaatccagaaaaattagggtcgtcgctactattccgaaaatgtggttggaattcatgtgagtattgagcagaaaaagagatagacgt

SEQ ID NO: 39388 - DNA, 1103 bp, Heterodera glycines
ttttttggcagaaaactttttgtttttaagaaagatcagcgatcgcaaaaacctttacaacggaatccgctatttgcggcccgacttttgcggccccagcatttgtgcttatgtccaaaaatctgattcaaactaaaatttttaagccgccctgctcttcatgggcttcttaaacaaaaattctgtgccaaaaaagggggggtgccatcagcaatattaccgcgccctttcctcattttcctccatttctgtcgttcatcaaatccattcatttatagccattgcgcaactcaccagtaatgagcagcagccatcgcgagaccggcagaagtccaagaagtgtgctgatgcgccagtacgaaatgctgctgcaaaactcgaacgacaacagcggattccgtgcctggttcgacaacaacggcgctagtttaaaagagtacaattttgaaaattttttcaacttttttttggtcaaaatttttttttgtttaaaaagtcctgaaaccaaatacccgggggttttaaaggtcgctgattacaaatatgacaattatttgggcctattaagcaaatttggcgctagttataaagtgatagattttgtattttatcaaaaaccataggggggagacttttgttttgttaatttttttttggataaaaatcgtgaatatacattttattccccatatttgtgatgttttgacttattattcatcaatatgtgtgaatgatttaataataatttgttgcatctaagtagaatggaaagcgtttgattctaacatgcattctccagcgcctcacaatccctattcgcatacagatactgtgggcttaacgatgacaaaagtaaaatctgatcacgtattccggatcagcgtcacaaagatacccttagagacattttttcgagtgattctgtggtaaaaaattttttcaaatcaataatcctgtgctcccccttaagtcccaaatccaaaaattacttttatttttataacttttttcaaaaaagcaataaatgataaaataatattcttactatagagaaaaaaattgtggcatttatgaatatttttatatttttaagcgcctttttg

SEQ ID NO: 39389 - DNA, 894 bp, Heterodera glycines
gcctttatagggaagtggccataaaatcagttcgtttaaagagcgaactgcactttattttcatattagccgtcaggccccgacttagcttcaaaactggtaaagccacacattctctatcattatgaattttgatcgcctcacttcccggcaattcatggccgtaaaatgcgttgaatttcacaacttttgccatcacatgcaacttgtgtttttattttcaacgccgtgttggcgttgtgaaataaatcagatactgtatccatttgcaatttggacaacccttttctatacaaaaaactgggtttacggtcatacagcgaccgccatcgcctttatagaaagtggccataaaatcagttcgtttaaagagagaactgcactttattctcatattagccgtcagaccccgacttagcttcaaaacagttaaagccacacattctctatcattatgaattttgatcgcctcacttcccggcaattcatggccgtaaaatgcgtttgaatttcacaacttttgccatcgcatgcaacttgtgtttttattttcaacggcgtgttggcgttgtgaaataaatcagatactgtatccatttgcaattaggacaacccttttctatacaaaaaactgggtttacggtcatacagcgaccgccatcgcctttatagaaagtggccataaaatcaggttcgtttaaagagagaactgcactttattctcatattaaccgtcagaatgcccgacttaagcttcaaaacagggaaaagccacacattccctatcattatgaattttgaacgcctcccctttcccggcaaattcatgggccgaaaaatgggtttgaatttcacaactttttgccaatccctgcaaacttgtgtttttatttt

SEQ ID NO: 39390 - DNA, 1684 bp, Heterodera glycines
aaaaaaaaatttttttggtctaaattttttcaatttttttttggtttaagaagacatgaaacaaagtacaccgggtttttcaaagtcgctgatcacgaatatgacaattatttgggcctatgtttgggcctgagttgtttatatgctcattttaattctaccaaattttcttaataaatttaataattttgaaagtccaattctgggtttatgtttatgtataaaaatccatccctaataattattaacttttaattttcaatttaggtgcttgcttcggagcgtctacgagaagtactcgtcgatgaggcatccaatcaatcggcttgccgaaattatttccattgacaccatgaaaatcgtaaagatttttttacattatcaattgaaaaatgctactttgaattatccacatgggttcagggggcttcggtatgaaatttatgagtggttggatatccaacaagggaacatttcgaactgtaaccacccagatcacttagaaaaatcgataaaaataacaaatttttaaaaattcataaaaacttctaaaataatgatagagcaattaaattaatttaaaatgataagcaaacaattctctatgaaatagcatcataaaataaatttttttaatcggtaaaaaaaaaagaaaaacaaattgacttgggttacttttttctgctcggttcgagttcgtttttatgtaattttattttctatttaaaattgtgtcttttattatcttcccattaaaatctttgacattttttatctcggtacacatgcttatttggcaaatattttaagtccttttcttaagaatccttggtgctctacccacccataaaatttcatacagtaaagccgtgatgtcccactacccagtgcttatgagggaaattagtccagggggccctcttacgcgtccgtaattaggcccctcagggcttggaagggaagggatgttgatggatgcctgggggatcctcccaggcggggatcgattggccgttccactgaaatggctcccgactgatccgactgcccctttgactggctctccattgccttttaagcgcccctcgggatgggaggagtttatcggagtaataaatgtgcgtgggaaaataaaatgccatttccggtccaggccttacaataccgaaacccaacgggcacctgaggatcctcctttataagctattccttacttttgcatgcttcttaaggctatgattggaggaatgtgcgcaaacttcacattttcgggcgatgaacacttgattaagagggaaattgaaaaaatttctgaatttgtgaaagatatcacgggcaatgcaactcaatggataagagcggaactcgtaagtagcaattaaaattattatgcaattatagctgggattaaaaatgacaaaatagcttaattttttttacgatttcatatattgaattgatgcgtcaattacaggaaaactcctggccactggaaataattcggcatgtcaagatcgggataaagaatccagtcatcgacccatattcgtacaattataccgcaaatctgatcgatgacattgttttcgcacgtgggcctttcgggtaagtgaaacaatgacaaataatcattgatttctatgaataatcgctctgaacacttttatataaacttgatcaaacc

SEQ ID NO: 39391 - DNA, 1317 bp, Heterodera glycines
agggggggaaaaactcacgatgatccgggaaatgcattaactcggagtgtgtgatgtgaatgggcatcactttgtgcattaccatgccaaagtcgctgcctcgcgcgactctggccaagccagcctcgagcttctcaagacgaaccgtcaggtgcagcttcagcttgtcattggtttctgtaatttgtgagagtcacattggacacgaggaataatccagaaaaaaataatatgaattctaatttattgggggcattcattcactcacaattcatgcttttttgtttactacccccccccccccgccggtcattagcagtgaccgccattcatcccccttcatcagtcagcctcattgttcttccaccgactccccccccccccccagtaaataagagaaaagagagctaattcttgagcatattgggccgctatctcgtcccaaaaaataactgttttttcctaaaattaatttaatatttatcactcattcattttccacaactcaactcactcaccaccaccatttcacttttatgctgctgttcactccaaaattcattcattcactcacccattttcaccaatcgataagacaattgttttatttacacaatcactgcgcagaaaaaatccaacgaaacaaaataaatttaatctgtcacaacaaatgttttttcgtctgttaaataaaagtgtccgttttctgttgttcgtgacaatcttctgttttgtcgtcattattttcgtactttacacattcaacagtttgtcatgcgaaagtgtggcacaaattgaattggttttaaatgaacggttgcacagtgttaaacacggaaggagaacagcgggtaaaatgaagagaaaaacatattttagaccgaaattctctaattttaatggcactaaagaagcattgtcaattatcacgaaagcaaaataatcagcctttgaaaaactgatcgcttaaaaatcggattttatattttaaaacaaaaacttttaaccaagtgaataattttgtgttaatttttactcaaaaattcttggctttttttccataggtccgagcaaaaacattacgctgtttttggctattaaaaaggaggaagatttgctctccgaataccgattagcgcacagaacactccgatgttattgcgcaatgaaaaactattcgctaattgatggtggatttttccacaattgggacaatgggaaaactctgtccacaaaaagatgtgtggaatattttttggcacatggtaatggataattttgttcgatagtttatgttccgacggcactgcgtcctgt

SEQ ID NO: 39392 - DNA, 904 bp, Heterodera glycines
ttcaaaattttttccattccctaagagctgcggaaatgggaattaaatctccgaaaaaaggcttctctttttaggacaattttctatctcgtaaccccgatgctaatccgttccggagagcctcttcaaaattttttccattaccgtaagagctgcggaaattgtgaattaattctcagaaaaatggctatctctttttaggacaattttctatctcgtaaccccgatgctaatccgttccggagagcctcttcaaaattttttccattaccctaagagctgcggaaattgtgaattaattctcagaaaaatggctatctctttttaggacaattttctatctcgtaaccccgatgctaatccgttccggagagcctcttcaaaattttttccattaccctaagagctgcggaaattgtgaattaattctcagaaaaatggctatctctttttaggacaattttctatctcgtaaccccgatgctaatccgttccggagagcctcttcaaaattttttccattaccctaagagctgcggaaattgtgaattaattctcagaaaaatggctctctttttaggacaattttctatctcgtaaccccgatgctaatccgttccggagagcctcttcaaaattttttccattaccctaagagctgcggaaattgtgaattaattctcagaaaaatggctatctctttttaggacaattttctatctcgtaaccccgatgctaatccgttccggagagcctcttcaaaattttttccttaccctaagagctgcggaaattgtgaattaattctcagaaaaatggctatctctttttaggacaattttctatctcgtaaccccgatgctaatccgttccggagagcctcttcaaaattttttccattacc

SEQ ID NO: 39393 - DNA, 912 bp, Heterodera glycines
tttagtgcaattttaaaaaattcataactcgtgattgggagggtggattttcacgtgtcaaatatttaaaaataatttgaatatttcttttaaattatttaaatttattttttttaaattaaagaatttcattatttttttttgaatttgtaaaaaaattaatttaatttcaaattaaataaatattcaattaataatttccaacgttgtttttaattaataaaagagtattttattataaaaaatttttaaattaaaatgcattcgatttttataaaaacttttcattatttatttaattttaaaacatgttgtacctcttctgatcactgttgtacctcttctaatcattgttgtaccttttttaatcactgttgtacctcttctatttactgttgtacctcttttaatcactcttctaatcgctgttgtacctcttctatttactgttgtacctcttttaatcactcttctaatcgctgttgtacctcttttaatcactcttctaatcgctgttgtacctcttttaatcactcttctaatcgctgttgtacctcttttaatcactcttctaatcgctgttgtacctcttctaatcactgttgaacctcttctaatcactgttgtacctcttccacacatcttccaacaattttgtacctcgtctgagctcaacaacatttaaatacgggcgcgaagcgcccgtttggcctcaacaaaatttaacaacgggcgcgaagcgcccgtccaagctcaacaaattttagaaacgggcgcgaagcgcccgttcgaggccgcgaaacggcctaagaatcaccaaatttaaaaaacgggcgcgaagcgcccgttagaggccgcgaagcggcttaaagccccagataatttgttaaaaattccattctccacaaagcg

SEQ ID NO: 39394 - DNA, 1335 bp, Heterodera glycines
  unsure (1)..(1335): unsure at all n locations
ttgggacatatttttcgttttttattgcattttttttaaaaattattaaaataaaaatcctaaatacatgtaaaaatagataaaattgacaaaaagtggcgtaattgttttgtgatgaatgtgctaaataatgattcctagtgacgaaaagtggcattaaaatggatttccgggataaattctgtttttcatgcatttctcagtgaaacaatgccacagaaaaatagttaaaaaactaaaatccccgctacattaattagttaaattatttttcagatttgtttaaatttaattggttcatacacatgcacctgcaatgaaaactttcatggagatggatttaattgttcgagtaaaaatttatataataatttcattcttatttcattttataaaaataaatttgataatttttttcataaaaatattttttggtaattttttcattattctataaaaaagattctgttttagttgccgacatttgtttagcccgtattaaactcaaatgtgccgcaaatgctcactgtgattcaacaaatgaagaagtaatttaaattaaaattttttttaattacttaataaataaatatccattgaattcattcattagctgccagaatgcgtttgcaatgatggattttacggagatggaaggcgaaagtgtgagcaaaacggtacttataaaaattcaaaattttaataattattataaaaaaatctgaatgcattaaacatattttttttaatcgattgctattaattttattgaaaagatattggtaaaatttcgaaaatttttaacaattttttgtataaatttaatggagatagcaaaattctaactataaattccatatgtaacaaaaccctcatacctattgttttttggggcataaattagttaaacattgaactccaaatctaaatcaaaatttttgtttggattaggcgttcggaattaaaaaaaaaaattatataaatataattttcgtgaacagtgggattttcaaaatactaattctaaataaaaataaatatatatagtagtaaattgcgtttttaaagcatagttagttataaatgcaaattttattaacttttcggaaaaaatgaaaaaaatgtacccaatttttacattcaaaaaataataaacataaaatatttagtaaaatttagacaattttaaaggaatttccaccganattacaatgaaaacaatacgaatatcaacaactacaacaacatcaacagatgcaccacctccccaaacaacacatacagtaacagcttctacagttnggtcctcactacagtatccttgaccgtattcac

SEQ ID NO: 39395 - DNA, 1026 bp, Heterodera glycines
agtttgatgttattcgaatgagctagacgcgctctacattttcaaatgtatcaacaaagggtctaccgccactccctggcgagatatggcctgtcaaagcagaacggggccaataaatttgaatttttgttaatcttcggcagttgcctttatttcgagcctactctacttgtgcatcttttcccaatatggcactgcttccgaattattgaactgtttcacgactgattgttgagataatttttttttccgattcctttatctccaagcatgagccttataagtgattgttcatatccttctcttgaaaaaaattgtcactaaaaaaaacacgttttctgaatattaacaacaaaaatttttagacactttctaaagaagaaagaaaaaaatttttcatttgcctaatatttatttatactgttgaactgttggaaatgcagctgatgccgtcggaaaagctccgattttttggggaagtttttttctttcagtttcaccactgatggttgaggcaatttttttcgccaatttcttttgtctacaaacattatttattgcgtttcatcctgtagtgtgtaaaaaattttcagtaaaaaaaacttgttatctgaatatttacaagcaaaatttaagaccatttccaaagaggaaggaacaaaaatttttgcctaaattttatattatattgttgaattgtttgaaatgcatctgttgtctgccgttttgaaatttttcaacttttcgcgaaaagatttcccagaaaatgcatgggacaaataaaaattaaacttctattatgatcaatttaaatttcctatcagtttcgggtttgctttaaacacgctggcctatgaaaaaatggagttttatggatgtcaaattttgggacttttcttcgacgtggtcatcagcgggttgtttcgtgacaaaaacaaaccagtttgatgttattcgaatgagctagacgcgctctacattttcaaatgtatcaacaaagggttctaccgccactccctggcgaga

SEQ ID NO: 39396 - DNA, 1756 bp, Heterodera glycines
  unsure (1)..(1756): unsure at all n locations
aaaattttaaattttatatccaattttcaaaagtaacctgaatttgccgctcgatttccttcctgtttttttgggtcctctgctgtttggttgcttgtgagtgttttgtcctcctcgtttgcttccagctccagtcgttcgtgccggtctcggcctaaacggtttgcgaggtacggtcgtcggcagagcagcaacctccgcaacaaccttaatgataagtaattgctgaaagcactggttaattgactcacttccgcaacggttgattctcgcgtgagttgagacgaagaaatgccgttggaagatgaggacggagttggaacagtggtggaagtgactccggaagaggacgggcaggcgaagttctgactgacttgccgcagggaaagcgaagcaggctgaccaaccgggcgacgatgaccactgctggtggggctggttgtcgtgttattcttaacggactaagcagtttaaaaccaaataagagccaaaagaccccgagattgctcgtcgtatggccaacttccaccgcaacagcggacaaattggcactaatggtggttggcgtactaatcctagtggtagcagaacaagcgcttgggccattgttaaacgactccaaattgttgagaaaattctgcacaccaatgggaccgctgcaattgctgacagtcgtcgacatttggtgttgtacgggggaagggcctggcgggggattttgaacaccagcggaggacagcggactgtgaagtgcagcggcagccgcagtcaccggactcatctggcggactatttcgcttaatgcggacccggacgcaatgttttgcagcgtggagatgtcctgtggaggaatgccgagaaagttcattcgagacagttgagcgagaagttgttgggcactgagttgtcgggaatactgcgtttgtatctcattgatcatcagatcaagctgattgttggcaagcgcagcaaccaacgcctaaagcgttaaattgaactaaaaacaaacaacgcaaacgtgttttatctacttggtgttgttgttggaatggctgcgactgttgcgcggcaacattttggtgcgttgtggcaagttgtgcctaaaacaaacagtgaaaataaactgagacggctaaaaaaggaaaacggctaaataattgaaaatttgaaaggggaacgacgagagaatgaaatgtacattcatttgttcgtggttactaacctgtacagcagctattagttgctgctgctgttgttggacgatcatttgttgctgctgctgctcaatttgctgagtttggctgtccttctgttgttgctccattcggtgctgcagtctcaactcgttcaaaagcgtgtccatttctttgtttagctgacaatgagtgtgtacagatttgacatttgtaattagacaactccgcgcacctgttgaacttgtgcttggtattcttggaatttgtctgccacacttttccgacattcttcaactcgttttgcacaatttaccaatttgttcatccccgtcctttctctcgcatcaacaactgctgaatgacagctgccaattgattcgtcttccgccaaattacatttgacaggcgtttgatcgagaatagagcgaaactgtacattattcggggggacgacattcgtcgaattggcatttcggagaagtgtcttttgaattgttagcacgaagaggcgactanaagattatttcattaataaagtggaaataaaatttaacaaaatg

SEQ ID NO: 39397 - DNA, 760 bp, Heterodera glycines
  unsure (1)..(760): unsure at all n locations
gaagaggcgagagtcccccctccggggagccctggcctaaaaagaaaattaattagcaaatttaagcgccgaaaagcagtctattaatgggaatcaattcgaatacaccagcagaagaggggttttttatagccattttaaatggaattgggccaaaattaggcagacgaaacgaaactcccccccccccccccgttctctttcaccttttacctgctgaatttaacaaaggcatctgtgtgcaagaaagaagcggaatgtgagataaagtgggataacggacttggtagaacccctaaaggatttgaaagggccgtgggttcgagtcccactggcggcgggcgagttaccctttatgttctacaaaccagcaaaaggttgtctgtcgcatttatggtgccggccaaattgagcccggttactatagacccccccccncctttcaggtgattgtgttcatcattcctctgatttccttgtccgcctcctatttgctgatcgttgtccgcgtccttcgctattcgcttcgtcctccgcccaactccaacctttgctccttcaacggcttaaaatgcgcggcccaatgggcggccgacgatggccaacagacggactgcgaagggacgggcgaaggcggcggacgatggcacagggccagcaaccggcggggccgaagaagtgccaaaacgaggcaagaaagagtcaaatggcaatgatgcccgagggggaggggagggaaactatgccaatcacactgatt

SEQ ID NO: 39398 - DNA, 1269 bp, Heterodera glycines
gacccgagttcagaaaaattttgaagcctcagatttatttcccctggtatcaaaaggaggctggaaagcaaatgagatcaatttcgactcagttttcctcaccatgcttctccaacacttcggcaatgcccgtgtcgcctgctccggccggcaaattgtcgtcgggcacagaaagcccggcttttttcacggtatgacgatggatttggtagagacggctggacaccgaagtgccgccaatttgacccgcgttaaactcaatctgatttttttatttaaaataattaaaatattatatttaaaaaaatgtcttaaaagtccaaggaattggggtttttaccgtctctcgtagttttggatgactaatcattagttattaaaggctataaaaacacttatgattattagtagaatatggactcttgcactaaaaaagccatattgggtaggctttagatcttaaaagtcgctgaaatgggcccaaattaaaagaaaggcttagaaaagtccgtccattaaattattttttctttttataaaaacttttcagttcttttctttctttcattattcttagtttacctgtttaagttcatattgcggctcctcctttgatgtttcgacattattttttgcctcatggcacatataatccttaaattaattaatttttaatttttttcacatttttatgccataccgaacgtgccaacataatggattttgtttgtttgatgccttcttcgtgcgttttcttcaaaatttgcaaatgcattcggatttgttcgttcgtttttgccagttctacataggtttctaccaaaaattcgtagtcatttgatatgcgaaaatataacaaattaaaatccttaacaaaaaattttttgttaaattcattattaaaaaatattttttaataaattattgtttaatatcacatattttttaaaatttaacttttcttttaaattatttcaaaaatatttatttataaattgttgtctaaacaaaattcaaaatcaaataccatctgcacatttttcgcttgttcaaaaagttggcgcgggaaaggcgacgggaaaagagaaaatgcgacaatttcagccgtgtcacctctgaaaatttaattaatgagaataaaaaaaatatttaatttgtttcttaaattgttatctattttaattaatttttgaaatgagtttcaatttggaacacttaaagcacttcgaaagccttctctcaatgctctcaatttttcaatttcattaa

SEQ ID NO: 39399 - DNA, 1696 bp, Heterodera glycines
cctagtggctagtctccttgactttcccttcttctttcttctgtttcaatccctctacacaaattaaattattttgaatttttttttgtatactcgtgggtttcctattaagaaaatatgattcctcatagtttttttttaaattgatacatattttattattttttaaatgaaaatcctaccaattgagcttaataatcgcaaaaaccaacctttttttgttgaaaatctgttaacaaattgcacccaaatttcaaaatttcccccagcggcgcctatcggctccgacggaccgctttcttccccaaaagttttttggaaaaaacgccacgaaaaaatttatgtgaaacgtaaatctgaatttctataatattcgatcatttagtccaaaaatgattaattgtttgaaatgactgaagacaatttgatttgaaaattttcattaatttaatttagctttaacttttggattttattaaataaaaaaataaaatttaatttttgtactattttcagttgaaataaattaaaatttgaacttttttgaattttttatttttttttgaatttttaaaatttcccggttggtcccggttcccggtcccgaagaaaaatcgaggtcctggtcccggcatgttccggtcccggttttcccaaaattcccggtccaggcgcactctaattttttgagtttctcgctcgtttggaaatttaatttaattatatttgttattctttagatttttaataagttttaaataattaatgcagtattttaatttattatatttttttaataactttaaaattttttttttctaatttatttttttcactgcttcaatttttagctttttagattgtagcacattttcaatattttattgcttataactaataaaattttgttttgtctgtaaaattataaaatatttaattcatttttttgtcggcatggtcaagtagtcattttgatttttatcttttattgaaaaaacaaagcactagttgagtgtaaaacataatttaataagtgattaattagccactcaaatttatgctatcgtgacagtcacaggagggagctggcactctttaaaagattaaaattttttttttgcttttttcttattatttaattttgccttgtcaaattatttttttcgaattattatttttatttcccgtatatattttttctatttaattttaaaggcttatatttatttgttttaaattatttaaaaaattatatattttttcttaatgacaaacccaaatacactatttaacattaatgatgaactcatattaattttttattgtaatcattagcatttatacatgtaattaataatattttataattttttatattcacgagtttgaggaaatttaatttctattatatcatttttatatttttccactcgatttaaatataatattaaaattagattattctcttattttcaatcgaaaattagatcgagcgaagatagtattgaggctattataattaatttaacgatattatctgcaaaacaataatcatttttgttattttttttatttttcatatttttgattattaagtattatcaaaaattttcaaacttagcccaaaaatttttgtttttgtaatgtgtttataagggttttatattttcgtatttgttaaatttagagaaggcca

SEQ ID NO: 39400 - DNA, 853 bp, Heterodera glycines
atcatttcgctggtcttttgaaaactgaaaaagtcacttacgaattaaattggccatttgcaaatcaaattaggtaacattttcatcaaaaaatcgattaaacaacgaaaacatacgccggagtttccttgacagttttcagtccttgtgccatttcgctggtaatttcgtttaacggcgaaattccaagctttcgtttcagttgtgccacgtgtttctgacgcgcggttaacagctgacgaagtgtggcgatttcattctccgtctgaagataaatctttagaattcaaagggatttgctaaattttgtcaaacctttttcagttcctcgatcacgagttctctttccgcatcggacagttcggcggagttcgaatttgaagtcggatcttcagatgctaaatttgctatatgaactaatgcttaagtgtataaaaacaattctttaattgaattccaccttcaattcctggagttgccattgtttaatgttcggttggatttgatgaaatagcgaaatcaaaaatatcaacacaaggcaaaattggaaagggctttacagtttgcttgacagaaaaataataaaaaaaggcctggattagctttttaactatttttgaacaaaaaatgctaataaaccttcgataaaactttaaaagcttaatttggcgtttcgtagtatatgaacttttttctcggacatgattatttttagtgcggcacactgacaattttttgttttcttaagtcattggaaatgtgttttcgagtgttttcgtggtcactgatcatgaatccgacatacatttcgaccaattccgaatcccagatccgaattcgattttgggatact

SEQ ID NO: 39401 - DNA, 1549 bp, Heterodera glycines
  unsure (1)..(1549): unsure at all n locations
taattatataagtaataatattaataatttcactttttccgctttgaggaggaagagcaattttcgaatttgaccagtcgactcccgtctcaccaagaaagcattcacatgaaacattggcagacccaacgtccgtttgcattacgtttgcccttaggctacattcatcgctccaaaccgattgagcacagccccaataaaggaacacatttcccggctgatcccctgtaaaatggaaaaaatttccaaaataaaaactgtattttaaatgtatctacaacgaaatgttgaaaaaagattattcgggctcggtattttgggtctcgggttttcagtctctgtctcgagtctcgggaaatttttggtctcgaacagttgggtacctcagaaaagtgcttatgatcccgagagcgagataaaaatgaaaaaaataataaaaataattaattaaccaattattgccaaaagtgattgatttatggaatatcacagcaaaggaaaaatgcaataaatttaattttaataataattaaattttgtcattgtacatgctgagcaggtggccgcaaaacacagctccttatcaggtaagcattctccatttttcacaatagtgtattcctggtttggcaaactttctgcttttccttgtttgcagaacaatcctttttttgaaaacacatcaaaatttaattaattatagcaattaaaaattaccgaaacaaaactgcaaaagcccgaataaaaagaagaaaaaaacgaacactgtatttgctttcatttggttttcaatttcaattgaatgccaagattggcagtctaaaaaggttttgtaaagcaaccagaaaattgaaaagtttttttcattaaaagggatttaacggacgattcatttttaaattctcattaatcaccctttactaaaatttggattggtgtggtgtgattagaaccaaaaatttgataaaaattattatttttctttgttattttagttctaattcataaaagcgaccaaatgagattaactaatgaatgctagtcaacatcagtgaaatatttttctggacataaaatgatcaatggtgactgtttgttcactttgtgtgttcattaacataaattcatctgatttttccaatgggtgaaataaaaaggcaaaaaaatatatatattatatatatttatttttaatacaagtataattgaattgaattgaatgaataaatgaatgaataagtggcaaacaaaaattttcgagtcttgaattccggagaacaaaaacactgaaattggattttattttatttaaaagtaaaaatctctctttactcattaaactctttttttactcattgctagggttggttttttgcgcatatgctacttagactaaaaaaaaaaatttggtttggttaagatttttggtccatatattgaaaaaaatgaaaaaaaaagaagcgaaaaaagacccctaaggatcggtctggaaatttttaaaaaattataaggccanaaaaaacacaaaaatttgcgtgttttcgttatt

SEQ ID NO: 39402 - DNA, 957 bp, Heterodera glycines
tgccaacgaatcgctcgtcggactgtcggcgaggcaaaggtccaaaacattgttgacacgaacctttgtcctaaaaaactaactaaagatttccatttaaacaccaagagtaattaatgtatggaaaacctatttttccgtaaaagtcactcaaaatttttaacaaaaattactctgattggaattagattttaacaaaaaccgtctatggtttaagcatatttcgacgttttaatttaatttgaccattttgagtgtcaaaacatttctatctgttaacgcaaaagtcgacaaatttgttcgcgttcgggtgatcattcctttatggtgaccgggacaccccaaaaacagaaaagcggcaaaatttctgcggaaaatattttttttgtttttgatcatttccatctgaagagaaaatgaagctgaaataataaaaaggagagagaccaaatcgaaggaaaaagaattgaaaggcgtaagaaaaaggaaaacaaaagaggggaccaaaagcgttgtcttttttaggcctaaccaacaaaacgcgttacctttttggtctgtcgcctttttacctttctgagtcggagaacacaaattttcggagtcgaaaatcgcgaaaaaacagtccaatgcgatggcaaaattcgaccagtgtggccatttgcttcagaattggcttcatccgcccttccgtccagcgaattgtctcgcaatttcttcggtcgggcccaacattttccccctcctccaccaattggtgtaaatttccatgatggtccggtaaaaggacgtagaagaagcccgacctggccgaactcgtggccagatgaagctgagagagcggaagcagcgaatcccttaaaaaggggggggggggggaattggaggggacaaaggcggggacagacggacctccgctgttcgaattcgtcgtcattgtaatgggccgatgccatc

SEQ ID NO: 39403 - DNA, 822 bp, Heterodera glycines
  unsure (1)..(822): unsure at all n locations
gggagagagannnngggggagagggagagtgagtgagtgagagagagagagagagagacaaaaatgatgaaattgggcagttattttttaagaaaacggacaggagaccggaacgccaagaattgaattttcaaaaaatagggcccgttggcgtgtgatggatgcgatggcttttcatcagaggtcctccccaaaaatcccccggggcattctttttggcccaaaaaattgcttttccttttgaacaaaacaaacaatacaaaaatatctgcccgatttaaaaagtcttttaagaataatgtcaacagttattttttctagcattttggtggaaatagtgtgcaaaatgaggagtgtgtgtgtgtgtgcaagggaagtcagagagacaaaaaagcggcaaaaaaacaaaggaacaaacaaacaaaatgccgcaaggcctaattaggtaatttgttttcagaagagtgcccagcagctgcattctccttctttagagagatttgtttaccatcgcatttttaatttgctgaaattgccccaaggcaacaaattgttgtttgaattatttggcctcaaaacactgaaaatgaaaaaaaaaacaaaataattttgaaaaataatttatttatacggcagtattcttcacctttacctaatattatcgtacacgcaaatacaacgcatacaaataacacagatacatacagatcacacaaatgacgagcgtgtctgtttcggattctccaaaaaattttttttttaatttcataaaaattttggcctctgtgaggggttgaggggcggaccggctcagttctaaga

SEQ ID NO: 39404 - DNA, 716 bp, Heterodera glycines
ccaactcgccgcggccatctcgccgcgagcaactcgccacggggccaactcgccgcggccatctcgccgcgagcaactcgccacggggccaactcgccgcggccattcgccgcgagcaactcgtcacggggccaactcgccgcggccatctcgccgcgagcaactcgccacggggccaactcgccgcgccatgttttttggcaatctcgccgccagaattttttcgtttaataatacattaaaaacaaactttatttattatgtattcaataagttatatttcatcaaagtttctctccaatttaatatgcttcaaattgaaagtcaacaaaggaagcaaaaattgccgaacgaatgattcctctatattttcgcaatttaatgtggatatcaatatgaaattatagtgatgctaacgaagagacgaatgtcgatgacgaataatacacacgtatttgaacaacaattttgtcaaaatggtcaaagaagaagcgaagaacagtgccaatgtgaaagtaaaaaaaaatcgtaacgggataaaaaaaaggcgtgcatgggactgtcttcccagctccgtgtcaatccattggtcaactttttaacaccggtgctggggatcaattgcaccggctaattggtaaaaggacgattcgtttttggccaattcgtttttattacgccgcattcttttttggggtaaaaattcgaaaatcgat

SEQ ID NO: 39405 - DNA, 607 bp, Heterodera glycines
  unsure (1)..(607): unsure at all n locations
tttcttaagatcccatgggtgctctatccgcgctctctaatagtattcggaaatcttcacggacacctggggtccttcctttgttagcgaaaaatgttgatttgcctttctctagtcataccggtatgtttataactttagagattacagaaaataattcatactaaggtacttatgcagtttagggccacataaaaaaattttggttttaatgataaaacgtgccagggggtatccgcggccacttatcacgaatatgacatccatttcgaccattttgaacccttaatccggactcgaataaagtcgaaaaacaacattttttttcaaatttagcatttgtttgggttgaattttaagttattttatgttagatgtgaactttatagaatatggtctgttgcattttattatagatttaactcaatttttggcaataaatgcgaattttgaaaatttttgttttagactttttgttcgagtgccggggttcagaaacagggttgttcccgggttaccctgaaacctcggcctttttctcgacaacgaaaccctgacccgantgattttgggtcgggtttcgggtcgaaataagcactggtaagaa

SEQ ID NO: 39406 - DNA, 1531 bp, Heterodera glycines
catcccacgaagcttcattgaatagatttttagaccgctggtgcacaaacgttttggtgggtaactccgacgatgtagtgcttcgagtaccagatgaaagtcgtattttcctcgtttatgagcgatacaaatggtgtgtgcttttcttgatccatgatggataagaaagtcgagaaattggtctacggggtcagaagcttcgttatcaaaagaatgaaaaaataaacgacggttgttgaatacaggagctccttccggctgaggagtattatccccaggagcatttacaaaaggtggtgacatccattgacgcatctgttgacctctcactcttccacataggcaaacgcaaccgggtgcgcgctgaccttgcccatcgttgatgttgattccagctcgaatgcaaggttcacaaatgaattcagcaactattagcaaaggtacatgtttatgggcgacttggttgttgagctgtagtgggcgctcctgggatgtttcggcatcgaagaagcaaagacgaagtggtagcagttcatctcgctcatcatcatcatcatcattaatatcatccccgttttcaacatcatcttcatcttcatcaccttctcctcccagattgttgattatgaaatcaatatcattttcatcctcattgttgttgttgttgttgttgttgttgttgttgttgttgttgttgttgttgttgttgttgttgttgttgttgttgttgttgttgttgttgttgttgttgttgttgttgttgttgttgttgttgttgttgttgttgttgttgttgttgttgttgttgttgttgttgttgttgttgttgttgttgttgttgttgttgttgttgttgttgttgttgttgttgttgtctgctgacgcgttttgttgattattaaaagtattcatttttattttgcaaaaaaaaaaaatttttgtgattaaaatgaagttttgcgtcatatttgcgtgcttttatatagcgaaaaggtacagtgctgcgcgctacgtgaaagacaaagttacggtgctcctacgcacatataaaagcgcttgaatgtgcacaagatctcacttgcgtgcaatgcatttgcttatcgcattctcgcgcattttggactgttcccctgacgaagtgggcgcgcgaatttgctgtagtgttgcggatcgagaaaaattgttgaaggaatttgcacatcgtaagctcatcactacatactccgaccgtaatggcttcacccacacactcttctttgctgggctcactgaagagggcgccaactcagtgcttgcttatggtaacctgatgcaccctacaatgtttgcgttgccgcccattattactcacgacatcgtattatgctaaagtacccgaaattcccatgtgtaattgagaagtgttttggtcaaagggatgatggacccttgcacaaatattacccgcttgaactggtaaaagtcgtcgatgactgttttccgcctgtgtacgcgagtttactgtctcaaaagcgtgacggctcaacgtcat

SEQ ID NO: 39407 - DNA, 1156 bp, Heterodera glycines
tagtcaaaaaaaagggaacagcaacaactcgccggatggttgactcgccgataaataacagggctcgagtcgaaaagttttcaaaatcagaacaacgggcccaaaaaatcggactttgtggtcgagaaacagaatattctccaaaaattgcttgtctaataatttaatcaaaaaataattttttaaataaaataaaattagaaaaaaattttgagttggaaaaaataggaaagaaacaaatcaatgaatgacaactcgtctggtatatcctcgtattcccttattagggttctttctcttttctctctctctgctcgatttattcctcacgtatttccttgttaggggtttcctcacatttcctttctttctctttccctctctctgcatatttctttcgctctctctgttcgattcatttttattttccccacttcctttctctcactttatctctctcttattctttcactatcttcccattcctctctctctcctctatctctctcctctatctgtctgtctctctttctcttattattatcccctttcactcgctttctctaaaattatttctctcgctcattctttctgtgtgtttcttttccatgctctacctttttctctcaatagctctcgttctgctctcgctcttttcgcttcctctttgctctttcttttttttcttttctctgttcctcacacatcacttttccattttctctctctctctctggtttcgtaataatttaacaaacacgttgtgtgtgtgtgtgtgtggaagactgtgactttgattgtttttgcctattttccctgttgttggcttcaataagacgactgactatccacatatacctaacttacaaaattggaatttatacggtttatttagggtatatttctgtttcatcatcgcaatctaaaaattcaaaaaacaaaaaaaatcgacaaaattataaaacaacaaaaagttgacaaaacaacaaaacctacctaaaaatacgtcctactttgtttcttcacgtttctgtctgataaaagggtttggttttatttttgttttaataaaataatgcaaatgatacatttgtttcttcctggttttcgttttacgaaaacttgataataaacttactaccaaacaatccacatt

SEQ ID NO: 39408 - DNA, 854 bp, Heterodera glycines
  unsure (1)..(854): unsure at all n locations
tttcttgtgattcacctataatcttcagtaataagttctcagtnttattctttaattctataggtaaatcccgaaaacattgcaccaattgacttttctccggattttaagcccgaatgttgaattttcttgtgattcatctataattttcagttaataagttctcagttttattctttaattctataggtaaatcccgaaaacattgcaccaattgacttttctccggattttaagcccgaatgttgaattttcttgtgattcacctataattttcagttaataagttctcagttttattctttaattctataggtaaatcccgaaaacattgcaccaattgacttttctccggattttaagcccgaatgttgaattttcttgtgattcacctataattttcagttaataagttctcagttttattctttaattctataggtaaatcccgaaaacattgcaccaattgacttttctccggattttaagcccgaatgttgaattttcttgtgattcacctataattttcagttaataagttctcagttttattctttaattctataggtaaatcccgaaaacattgcaccaattgacttttctccggattttaagcccgaatgttgaattttcttgtgatacacctataattttcagttaataagttctcagttttattctttaattctataggtaaatcccgaaaacattgcaccaattgacttttctctggattttaagcccgaatgttgaattttcttgtgatacacctataattttcagttaataagttctcagttttattctttaattctataggtaaatcccgaaaacctattgcaccctaattgact

SEQ ID NO: 39409 - DNA, 1136 bp, Heterodera glycines
cgtgcagccccggacatctaagggcatcacagacctgttattgctcaatttcgtgcggctgaacaccgaaaatccctctatgaagttgtgcccacagaagcaatgagccaactatttagtaggctagagtctcgctcgttatcggaataaaccagacaaatcgctccacgaactaagaacggccatgcaccaccatccaccgaatcatgaaaaagctatcaatctgtcaatccttacggtgtccgggccgggtgagtttccccgtgttgagtcaaattaagccgcaggctccactcctggtggtgcccttccgtcaattcctttaagtttcagctttgcaaccatacttccccccggaaccggaagacggtcgtttccgggaagctccccaccagggcgaataaatccgccggcggatcgctagttggcatcgtttacggtcagaactagggcggtatctgatcgccttcgaacctctgactttcgttcttgattaatgaagacattcttgccaaatgctttcgctgtagtccgtcttgctacggtccaagaatttcacctctcacgtagcaatacgaatggccccgtttgtctctgttaaccattatctcggtcagcaaaaccaataaaatcggaccgaaatcctcttctattattccatgcacgaacattcaagcgaaacgcctgtttgaagcactctgatttgttcaaagtaaactcgccagcccaccgacgccgaccggtaaaggccaacgccggggaaagaccggcagaaaagccaaccaaaccagtaacacacaaagtgtgcaccggacggctagcacagatccaactacgagctttttaaccgcagcaataattctatgcattttgagagctggaattaccgcggctgctggcaccagacttgccctctcatagatactcgttaaagggtttaaattgtacccattccgatgaccggcctcataagagatcggtctcgttatttctcgtcactacctcctcgcgttgagagtgggtaatttgcgcgcctgctgccatccttagacgtagtggccatttctcaagccccttctccggagtcgaactcttatcctcggtacccgtcatcaccatggtagtcagatacacta

SEQ ID NO: 39410 - DNA, 976 bp, Heterodera glycines
gggtattattttgtaaaaagtcttttttttcccaataaacttttcataccccattttcgcaccgtgaatgttatttttattgaattctgaaccgttttgagtagattagagtacaaataattgaaattttgaaatcatgtttcccactcccttctcccaggggtattattttgaaaaagtcttttttcccccaataaacttttcataccccatttttcgcaccgtgaatgttatttttattgaattctgaaccgttttgagtagattagagtacaaataattgaaaatttcgaaatcatgtttcccactcccttctcccaggggtattattttgtaaaaagtcttttttcccaataaacttttcataccccatttttcgcaccgttcgtgttatttttattgaattatgaaccgttttgagtagattagagtacaaataattgaaaattttgaaatcatgcttcccactcccttctcccaggggtattattttgaaaaagtatttttttccccaataaacttttcataccccatttttcgcaccgtgaatgttatttttattgaattctgaaccgttttgagtagattagacaacaaaaaattgaaaattttgaaatcatgtttcccactcccttctcccaggggtattattttgtaaagtctttttttccccaataaacttttcataccccattttcgcaccgtgcgtgttatttttattgaattctgaaccggtttgagtagattagactacaaaaaattgaaattttgaaatcatgtttcccactcccttctcccaggggtattattttgaaaaagtcttttttcccccaataaacttttcataccccatttttcgcaccgtgaatgttatttttattgaattctgaaccgttttgagtagattagagtacaaataattgaaaatttcgaaatcatgttcccactcccttctccaggggtattattttgaaaa

SEQ ID NO: 39411 - DNA, 1079 bp, Heterodera glycines
ataaaaataccgggataaagcacattagatagagcttaaaattctctacaaaaatgctctaagacaatttttcgctaaaatcaacccctgacgagttataggcccgggactgaaatgtcccgctcaagccaaaaaaaatttctatttccggaaaattttgaaattttttcaaaaatgccaccaatcgatagagctcaaaaaacggttgcttgaaagtggtctccgttttcctgggaaaaatcggcaaaaaataataaaattcaaaaacgaaaaattttcgagggggcctagctcgaaaaattttgaaaattttcaaaatctgaaaacgccatcggatgcagctttaaaaactgcacaaatgctcaagcggcgccaacccgctccgcttaacccccagcgagttattcccgaaaaacggaaaatgccgaaattgggtgccaaattttgccattttctgcagcattggcatttacagatagccccgccaaataagcgccaagttttcccaaacattccaacttaaaatcctacctccaagcattttccgctcccgcttcttcccgcaaagttacaggccaccaaagacggacaaaaaaaatttcacgccgtttcagcgccgctggcgctcaactggccaccggagcggaaaacctatagttttcctgaatgcgcctcaaaaagttgtaagacccttccaccactttcagacccctcccgacagccgttcgactcaaattagtttttaagacgaaacccgacttttctctatatatgtataaactagcgtgtgggaattgacgggggcggcgtaggccgttgggttttggatgaagagaaaatggacatgctcatttgttattttaaacagacaaacattaattgcattagtgtgaagttttaaagcgctatcgcgctatgggacgcggcttcgccgcgtcgctagaaagtgatgtaatttagcaattcatcgcagcctcaggacgggcgctcgcgcccgtgtttttaattttttgaggggaattcggccgcttcgcggcctcgggacgggagcttcgcgcccgttttttaattttgtgggg

SEQ ID NO: 39412 - DNA, 931 bp, Heterodera glycines
agagcaatccaagccagtttgccatgccaactgttttcacattaacatattgagtgcaagggggtgatagcctggagcatagtattgaaactggtcggcccttatggggcctccaggttattcgccacttagcgattatcatgattatgtacaaagccttggatctctaattgcataaatcaaacgagctatagtccatgtgggcggtactgaaatatggctattaagtgctgccacctggactaaagggagggaggagggatgatgtgcgacttagggcacttccggtttcattgcattgaaaagtgcaatgtgtcagcttattaagcgagcgaaaccaagtgcatgtcggatgacgcaaagaccctaacaaaaatttttagtttgctattctgaaatgctgtttcgcggtaaagggtgtgggtcgtcaatagaaggaactttctccatagtcaaaaccaattgtcgtgtcgattgcctcggggagaagaccgcattcaaattagaaggaactttaattttgggcttggcccaatttccctcccttttttcccagtaatcccccaggaaatttgccatctcaatgctatcacagcaatctcggacggatttgttgatgttctccattcgttccccatcacctcgacgccaattccatcatcacaatgccgttggccatcactgactccccacttcgctactagccgtcacacctgacccaattcgttgctcgaccattggcccttgctctaatcccgcccattctgcccacccgacgcgcacataaaaagaaattaagccccgccacattatcgctttcttccggccattcgcagccaaattttcgacaaattccgatgaaatctcaccattttcttgttcactaatttcgttttggcaaattttcacaaaatttgcttgtttttaaacg

SEQ ID NO: 39413 - DNA, 814 bp, Heterodera glycines
  unsure (1)..(814): unsure at all n locations
aatgaattntggcccaaaaattgggcccaaatcaatggcatgccaaatttagtcaaatatttttgccaatttttgggctatggtttaatgaaagatgcagacccaagcgaaaatgatatcaaaattgagctgccagcagaatggaaaatattctgcaaaaaatacatggaaaagattagcaggaaaatcagtggttattccgaacaactcaaatccaattgtaactgatcagtgatcactagtgatgcaaattatatggaaattattccatttttcctggactgatggaaggcatgaaacgaacgaaaaacattttttaagcttggtttgaagcttctagcatgggtttctgtaaacatatttttccatatttcgcgatttatttcctaaaatttggtaaatttagaaaaagttgtatgaaataagtactatttctgccatagcttatgttaaatttgatagttttattttaaatttgattgttttattaagttttctaggctaatagagaaaaagcttgcttattgaatggtaccaagaatgtaaaatttaattgcctttaagcaaagttatataccatgttttgtcgaaaaattcgctaaaatggcggatttcacgaacgacccagcacggttataaactcttttgtggtttgtctatactattatgggttctatcctccattgtccatgttttttcgcttttctaaaatttattttttatctaccattaatttattttaatttcaaaaatatataaattaaaaaaaaataaaacagcgcatatccgggacactccaaaaaatgtcttcctg

SEQ ID NO: 39414 - DNA, 1287 bp, Heterodera glycines
gcagtagtacctatgaatttaaattttctatgaatttttaaagttttttgaaatttttttaagtgcaaaagtggtggtgtctgcaaaaatttttcaccgggtttaaaaaatctaggaaaattagtaagcatttgtagtgttccgatacgtattcctgcataatttggtgagcccctgatcaattacaaattatttatggacgatcaaatttttagaaatttttatttatttttgcataattaattcataaatatttttttcagaaaatgctctgaaacgcaccaaattttatttacatgctagtttaggcactctgatgttttttctatcaaaaagggagatgaataaatttttaaaaatttttaattcctttttaaacaggccaaaaagtttaggcttatcttttttttcagaaacttatcagaagcgccccaaactttgcagggatactgaaaggaaaagaattaacctgttttatcacattagcttgtcatcagtttttataaaaaattttcaaaattctgagtctcctattattttatttttttttcaaaattttgaagggcggaggggggggcgaaggcccaccacgaggccgcgaagcggccgagtgagtacctcggtgcatgaaaattattaaggaagagagttcattatttgtttattttttgcataattaattcataaatattttttccagaaaatgctctgaaacgcaccaaattttatttacatgttagtttaggcactctgatgctttttctatcaaaaagggagatgaataaaatttttaaaaatttttaattcctttttaaacaggccaaaaagtttaggcttaacttttttttcagaaactgatcagaagcgcaccaaactttgcagggatactgaaaggaagagaaataacctattttaaatattatctagtcagttcatttaaataatttttatccaaaaaattttttttggggttttcggggcagtccccctgaaccgatgcgcccagatttatggggagaccgaatccttcgggaatagcttcccgatagtctgtactttaattctgcgttggatttttgctccccataattgtttgagtaccccaaacggacacttgaaaaaatcgatttttttgttttcggggcagtccccccgaaccgatgcgcccagatttatggggagaccgaatccttcgggaatagctaccctatagcctgtactttaattctgcgttggattttcgcaaaagcataattgtttgagtacccccaaacggacactgaaaaa

SEQ ID NO: 39415 - DNA, 971 bp, Heterodera glycines
gatgacggaccagggcaaagagttcaccgccgccccagtgcaacgctttttagccgaccaagaggtgcaacaccattgcatgcacacctcaccccagtggcatgccggaattgcggagcgtgccatcagaagcatcaaggtttaaccgaaacggcaatttttttctttttcgttgtccatcatgtgcaacaaacatttaaggaaaggctgtaccgctactttacccatcgcggcgcaaagtgttggacaggcgtcatacagcagattgtgaccgcactgaacgggtcaccgaaccgtgcgctgttcggcctcaggcccaacgacattaattttggcaacgcggagcgcgtacgacgcaaccagctggagcgattagatgccggccaacagcagcgacaaagcccacgcgcccgactccctttccgtgtgggggaccgtgtgcgtattgaaaaacacaagcacgtgttcaaaaagggatacctgcctcgcttcactgacgaattgttcacggtggcagaggtacgcacatcacgactgtcgatcacctacaagctacgggatgacgacggtgaactgctcaccggctggttctatgcgcaggatttgtgccttgtgctcaagcctccacatccgctacggtcaaaaaaggatgaaccccattgctgacaaagcgggagctgctgattctgctaccgtagggcctgtgtacgacattgaacgtgtgctgagaaggcggacggggcgccgacggcgcggagcactgcttcgtcaaatggaagggctattcagcatgcgcataacagctggattccggtcacatcaaatcattataaataaagcggatcagaaccacgtcaaatggtaccggatttaccaaatacaaatgaccacctccttccctcctcctccttctaacattgtgttaccttccaacacgcaggtgggaggggcaaccgaacaaactccctttc

SEQ ID NO: 39416 - DNA, 732 bp, Heterodera glycines
aaatttgaagaatttgttaacagattttgtccaaaattgatcaatttttaacgccttttgggtgtgtttttgaacaatattttaaaaaatagaaagagaggttccggcggtactgataggttggagtttttgtgcaatttatttacagattttgcaccaataatgccataagtcagggctcccatcgtccatgctccgtttccaaggacgggtatgccgatttgcaaggacataatgaaaaaaattcatgaaacccaaggacatttaaaatttttggctctactgcagtttacgcgtccaatcgacttttacgcgtccaatcgacttttacgcgtccaatcacagtttgcgcgtccaatcaaaagtttacgcgtccaatcaaaaatttatgtgtccaatcaattattagaaattatttaattatttaaaatattggcattaaatgcttaaatgtcaaaatgaagactttttgattaatacaacgaaaagatgattagacagggtattgaatacgtatttcttcgagaatttgctgaaaaattttttcgttattgttagatctccgaaacatatactgatacaaataagattgtaaaagctcggggttagtgccgtggagatgacgaagaccatttttcactgcacgccaagttgcctcaatgccctgtgtgtgaaacaaattagtctctctattattaaattttataacaattgattgaatgcgtatatacc

SEQ ID NO: 39417 - DNA, 814 bp, Heterodera glycines
ggtgttcagctgcaattttctttttcctcttcttcagttgctgcccctttttctcctccattttactctctttctcttccgtctctcctccttccaatgttcttgcttctgctgatgttgttgtttctgatggtgttcagctgcaattttctttttcctcttcttcagtttctgctcctttttctcctccattttcctctctttctcttccgtctctcctccttccaatgttcttgcttctgctgatgttgttgtttctgatggtgttcagctgcaattttctttttcctcttcttcagtggctgctcctttttctcctccattttactctctttctcttccgtctctcctccttccaatgttcttgcttctgctgatgttgttgtttctgatggtgttcagctgcaattttctttttcctcttcttcagttgctgttcctttttctcctccattttactctctttctcttccgtctctcctccttccaatgttcttgcttctgttgatgttgttgtttctgatggtgttcagctgcaattttctttttcctcttcttcagttgctgctcctttttctcctccattttactctctttctcttccgtctctcctccttccaatgttcttgcttctgctgatgttgttgtttctgatggtgttcagctgcaattttctttttcctcttcttcagttgctgctcctttttctcctccatttactctctttctcttccgtctctcctccttccaatgttcttgcttctgttgatgttgttgtttgatggggttcacctgtaatattctttttcctctt

SEQ ID NO: 39418 - DNA, 1529 bp, Heterodera glycines
tccagcaagaggtgtcagaaaagttaccacagggataactggcttgtggcggccaagcgtccatagcgacgtcgctttttgatccttcgatgtcggctcttcctatcattgcgaagcagaattcgccaagcgttggattgttcacccaccaatagggaacgtgagctgggtttagaccgtcgtgagacaggttagttttaccctactaaagacctgttgctatgatagtaatcctgcttagtacgagaggaaccgcaggttcagacatttggttcatgtgcttggtcgatagaccaatggtgcgaagctaccatctgagggattatgactgaacgcctctaagtcagaatcccgcctaggcaagatagcaatattcttgctccccggtgtcgggaggcactacttatgcgccgcttgcggtgcagcacaaatgccccagcatctggcccgatgtgcgtgcttaattgctcgcacattgccaaagccgtagcactcgtgtgccatggtggaacgtcggggcgcaaaatcacttgtatacgacttgactactggtcagggggttgttagcagtagagcagcttttacactgcgatctgttgagacttagcccttgatcggatgatttgtcttctttttccccctttactttttgtgccaacaacattttaggtacaagtacatgagaagggaaggctctcttaagggagtcaaatgcctcgtcagtcaccatgaaattaggtagaataagtttttgactttgcttttttttccatttatttcatcggctagtgctttaaggttttgtctttgactttgcttttttttccatttatttcaatcggctagtgctttaaggttttgtctttgactttgcttttttgtccatttatttcaatcggctagtgctttaaggttttgtgttttgactttgcttttttttccatttatttcaatcggctagtgctttaaggttttgtctttgactttgcttcggctagtgctttaaggttttgtctttgactttgcttttttttccatttatttcaatcggctagtgctttaaggttttgtctttgactttgcttcggctagtgctttaaggttttgtctttgactttgctttttttccatttatttcaatcggctagtgctttaaggttttgtctttgactttgcttttttgtccatttatttcaatcggctagtgctttaaggttttgtctttgactttgcttttttttccatttatttcaatcggctagtgctttaaggttttgtgttttgactttgcttttttttccatttattccaatcgaccacgttaattcattctctatacatttagtgtcttatttcatgaaattatattaatttaattttaaataaagaggcaaatttttacagaaaataaatagacgctgactaattagctaacatttataaagaaagtagaaatttgattaaatgcatatacaaaatattacttttttaaatttgtataaagttcctagtcgtatgtgctttgcgtt

SEQ ID NO: 39419 - DNA, 1085 bp, Heterodera glycines
aagagagttagccttttttgtgagattatctatttgtagtaatggagccatctttcagccgaccatttgtagagctcatccgcatatagtgaggcggtttacggggaaaaccctctctcttggaggtctgagaaaaaagagttagccatgtttttgagactatctattgttagtaatggagccattttccaaccgaccatttgtagggctcaaccgcatatagtaatgcgttttcggggaaaaccctctcgttggaggctgtagaaaaaagagttagccatttttctgagactatctattcttagtaatggagccattttccaaccgaccatttgtagggctcaaagccattttccaaccgaccatttgtagggctcaaagccattttccaaccgaccatttgtagggctcaaccgcatatagtaatgagttttcggggaaaacccttcgttggaggctgtagaaaaaagagttagccatttttctgagactatctattcttagtaatggagccattttccaaccgaccatttgtagggctcaaagccattttccaaccgaccatttgtagggttcaaccgcatatagtaatgcgttttcggggaaaacccttcgttggaggctgtagaaaaaagagttagccatttttctgagactatctattcttagtaatggagccattttccaaccgaccatttgtagggctcaaagccattttccaaccgaccatttgtagggttcaaccgcatatagtaatgcgttttcggggaaaagcttctcgttggagactgtagaaaaaatagttagccatttttctgagaatatctattcttagtaatggagccattttccaaccgaccatttgtagggctcaaccgcatatagtaatgcgttttcggggaaaaccctctcgttggaggctgtagaaaaaagagttagccatttttctgagaatatctattcttagtaatggagccattttccaaccgaccatttgtagggctcaaagtcattttccaatcgaccatttgtagggatcaaccgcatataggaatgcgttttcagagaaaagcttctcgttggag

SEQ ID NO: 39420 - DNA, 1214 bp, Heterodera glycines
ttttttgggagatgggttttttaaggaaatcggcttttggggagacttttaactatactttgcgtcatttatttacggttatggatttcggattggtttccacgaagtgggcgcgggaaacgaaagaagccaaaatccaagaacaaagaaagaaaggccagaaaacaaattaaagaaattttgacggattcatagggggaaaaaaaagctccaagccggaggggaaaacgcactgaaaaagcggaacttaatgaagcgccagtgagtggaagtcaaaaaactttcacttgcaccaaaaggcaaaaagaaaaaggaaaagcggatgaaattggtggggggagggggaggagagaagcaaatagagggaattcaataaagggaagaggaggtcaaatgaaagtggaaaattgggggaggggagtgaaacgaatgggcggggcggggaacggaaagaaattcaatttaatggggggaagtctcgagccaaaagacgagagcattgaacccgttgatcaaacacaatgaatgctttttgtttattagcgatattggcttggattagggcgaggatgaaaaagggtgtttaaatggtgaggggggggggggtaattaaatgaaatgaaatgacaccgcgccgccgtcggcggaggggcgagggacagcaaaggcagacagacactctctgacgacgccgttcccctaacgcccctctcgccctccttcccccctctctctttcccttttccctcccctcgtgcctccactattttcctcttcgcatctcccccaattccatcccattcttgcgctttttattttgacgtcgtgacagatggaaaacaaaattcaaaaagacttcgcagtcagtgctaaaagatggaatttgatttacacgaagggacagcgaatggtcggccgatggtcagcagcagcaacagtcacttcatcatcactcttcacaatgcttatgcattgattggaaattagggtaacgatcattagcagcagcagaagaagaagcagaagaagctgaggacattttaagggaatgacgagccaagagaaacaaaaacaattaattaaattttgatgtatttatgaaattgcagagcttgatgaacgacttggttatgatggagtcattatgggcaaacggagagaaaaatggaacagagggagaaagggaggagagagaggggaaagtggaaacgagt

SEQ ID NO: 39421 - DNA, 1281 bp, Heterodera glycines
tcaacacaacgcttcctccttgcaactgggtgtcaaccaacagcaccacggattcctccttgcaactggtgtcaaccaacagcaccacggacaacactaatggtgatgaaacggaggaccaaatcgatgagactgaggaggcgacggagcaaagctccacgacatctctggaacatcatgtaaaacttggtttaagcactttgtagttgagaaatagactagtgtaagcattgggtttttatgggaaaatatacaaaagtccataataagccaatgcttacactagtctatttctcagctactgtaagcaatcctaacagtgataaatatagcccggctaaaatgtattttatcacacacctagctgtcttctgcgtcagctactcagccgaaaactgagtcccagtgaaaatggacatttcagtaccagagtaaaaaaatttagttttacttctaaacacctataaaagtgtttttgtgcgattttgagtcgataccatattcggcaattttaccaattatttagacccatacactcaacaaaggcactgaaattaattgcggctccaatgcttcatcatttgttatccgaattctcaaaaagcggagcctattcccggcgccttccaacagctcaactgatcacgaccaattgacagtgaaaattggagacaaacaggtgaaacagcagaaagagagcacagggcattcatccactaagatttgatcaggtcacccataacattggtctgatcactagtaaatcccggtcagatgactgacaaatgattttgatcagatcactggttcttgtactgaaaattttgtcagattagtgatatttcttgctcaggtcactactgataattgtaatttgttcgtttgtccatatttaaattagagccaattaaatttgaaaaataggcttttgggaggagaatattcagatctaacttaaatttttgcactaattctaatcctaaatccaaaatcggatagacttggattcgtggtcagcgaactcatctgtccatgtcacatcataaaataaatttttgtcatttttacttttaattgtgattggtttggtttggtcccgttcggagttaagaaagaaagagagcacgtggcgttcctcacggcccaaatttatttaaattctgataaacttggcggatagatcgttgataaaataccgtatttgctctttttatatacccatggtatattatttttcaccttctcagaagggggtatataattggagactggcagactaat

SEQ ID NO: 39422 - DNA, 987 bp, Heterodera glycines
tggtatcttacgatagcccttaaattgagttatcagcttgccaaatttctaaaaattttataaattttttcaaaagttatgacaatttttccagttttttggctagaacttttgaaaaacttaataaaattttttgaaattagcaatctaataaagcaattaaagagctatcgtatgataccaagatttgtgcaattttgttgtgtcttagaaaagttatgagttgatttagccaaaaatttagcaaatttgcactttttgtgaagtgacctagcaccgatgctggcagtaattctgaagtttaagttttttatgaatttttacttatgcctattattttaggggggtccggcggcgccacctgaaaaaatttgtaatttttaatgcgaaacaaattcatattttttttctttttggcgtaccttaaaaaagtactatactaaaaaattccggtaatggagaaaaagctggagtggaacgggattcccgccttttccccgttaaaatcccgtcaaatttccctgttgccagaccggtgtaattactttttatgtgttttatacattttttcacaagcaattcaaaaaacaaattttcaaaagtttatttatttttttctaaggcattcttgcatttgctttaaaaataagctttctcatcatgagttttttttatgctattaaattttcagttatctttatttgaatctttttttgtttaccaattcaaaaatgtcgcacaatccgaaagaagcaaataaagaaatggaaaaagcgatgtaattttctaaaattgaatgtacatggctaatcattttattgtttcagcttcatttcagccgactgttggcttgaggtgttcgatttgcttccgccttctcagcttggactgggaattgctttgattagtcgccgttttgactatttcgtcgacgaacacttcaaaacgcgcaaatggaaattgggcgaaatgaaaattcgacgcaaa

SEQ ID NO: 39423 - DNA, 1428 bp, Heterodera glycines
  unsure (1)..(1428): unsure at all n locations
aacagtgattagaagagatacaacagtgattagaagtagtacaacagtgattagaagaggttcaacagtgattagaagtagtacaacagtgattagaagaggtacaacagtgattagaagagatacaacaatgattagaagaggtacagcagtgattagaagaggttcaacagtgattagaagtagtacaacagtgattagaagaggttcaacagtgattagaagtagtacaacagtgattagaagaggtacaacagtgattagaagagatacaacagtgattagaagtagtacaaatttgattagaaggggtacaacagtgatgagaagaggtacaacagtgattagaagaggtacagcagttattagagaggcacaacagtaaatagaagaggtacaacagtaattagaagaggtacaacagtgattagaagtagtacaaatttgattagaaggggtacaacagtgattaattagtaaattcattaaattaaaatgaaaatattttttaacaaatttaattaaaaaaaatacatgaaattctatcaattaaaaaaataattaatttaaacttataaaatgtattcatcaaaaaaaaaattaatttaaatataattttttatttattaactcaacaaaatattttaaattaattaaaatcattgaaaataacgtaaaaatgcacagaaaaattatgttacaccgtccggactcgaactttgccccccccccaaaaatgatgcctcagaatccccaatcacacagggattctgaggtcttaacgatgtcaaaagtaaaatctgatcacatattcatgatcagcgtcataaaatagccctaataacatgtttctggaagatttttggtgaaaaaatttttccactcaaaaatcctggtcacccccctttggtcccgaaccccaaaatcacttttattttggtatcattttttaaaaatgtgataaaaatatgaaataaaatttatttggtagagcaaaaaattgcggattttttcagtatttaaaatttcaaaagcacctttacggaaccgagttctgaatttttttctgaaaattcggatttttccagaaattcttgaataactttttttcatttgaagatataaatttcatttaaatcccataaaattctcctgatttttctctatttttaaggctttattcctgtaaaattgatcaacccttcgatttgttatgaattttcaaatattaggccaaaatcccgagggccaaaaaattgccaaaaaataaagaatttttaaaaaattccaaaaattttgaaacganaaataaacatcatattcgtgctcagcacatcaaaataccccagaaaaatatttttgacccccattttcacccaaaaaaaattttcgaaatttctagggggcctagctcgaaaatttttgaaa

SEQ ID NO: 39424 - DNA, 953 bp, Heterodera glycines
agggtttgaggtgttttgagtcagaagtttcgctttcaaacagctcgttgggatcgtccgttttcggcaaaagagtgcaccatagcaaaaatggcgtagtttgaacgacacttctctagggtttgaggtgttttgagtcagaagtttcgcttttcaaaaagctcgttaggatcgtacgttttcggcaaaagagcgcaccatagcaaaaatggcgtagtttgaacgacacttctctagggtttgaggtgttttgagtcagaagtttcgcttttcaaaaagctcgttaggatcgtacgttttcggcaaaagagcgcaccatagcaaaaatggcgtagtttgaacgacacttctctagggtttgaggtgttttgagtcagaagtttcgcttttcaaaaagctcgttaggatcgtacgttttcggcaaaagagcgcaccatagcaaaaatggcgtagtttgaacgacacttctctagggtttgaggtgttttgagtcagaagtttcgcttttcaaaaagctcgttgggatcgtcctttttcggcaaaatagcgcaccatagcaaaaagggcggagtttgaacgacacttctctagggtttgaggtgttttgagtcagaagtttcgcttttcaaaaagctcgttgggatcgtcctttttcggcaaaatagtgcaccacagcaaaaagggcggaggttgaacgacacttctctagggtttgaggtgttttgagtcaaaagtttcgcttttcaaaaagctcgttgggatcgtcctttttcggcaaaagagcgcaccatagcaaaaatggcgtagtttgaacgacacttctctagggtttgaggtgttttgagtcagaagtttcgcttttcaaaaagctcgttgggatcgtacgttttcggcaaaagagcgcaccatagcaaaaatgggcggaggttgaacgacacttctctagggtttga

SEQ ID NO: 39425 - DNA, 1056 bp, Heterodera glycines
cggccgaattaaaccttaaatataaaaagggtgcggagcgccctttgaggccgcgaagcggccgaattaaaccttagaatacaaaagggcgcggagcaccctttgaggccgcgaagcggccgaatcctccaccaaattatgaaagcgtcctcgcgatgcctgtagaccaaatagaagcgcaaagcacccgtctgaggccgcgaagcggccaaatgagtccacaatatttagaagcgcaaagcgcccgtctgaggccgcgaagcggccgaatgagtccacaatatttagaagcgcaaatcgcccgtctgaggccgcgaagcggccgaatgcacttgctcatcacttaacaaacgcgcatgcactagcaacgaagtcctttgcgcgaagcgctcatgtaatgcatattcttttcatctctcacaagtatactgtttacaccgagcaactactgcgccacacgctagtttatattaccatagagaaaagttggctttcgtcttaaaaactaatttgagtcgaacggctgtcgggaggggtctgaaagtggtggaagggtcttacaactttttgaggcgcattcaggaaaactataggttttccgctccggtggccagttgagcgccagcggcgctgaaacggcccgaaaatttttttgtccgtctttggtggcctgtaactttgcgggaagaagcgggagcggaaaatgcttgctggtaggattttaagttggaatggttgggaaaacttggcgcttatttggcggggctatctgtaaatgccaatgctgcagaaatggcaaaatttggcacccaatttcggcattttccgtttttcgggaaatactcgctgggggttaagcggagcgggttggcgccgcttaagcatttgtgtagtttttaagctgcatccgatggcgttttcagattttgaaaattttcaaaatttttccagctaggccccctccaaaaatttttcgttttttgatttttttatttttttgccaatttttccccaggaaaacgggaaacccctttcaaggaacccgttttttgagct

SEQ ID NO: 39426 - DNA, 878 bp, Heterodera glycines
tgtcggcaaccatttttgtcagaaaacaagcacttcctgaacaagtaaattgatgtagaacatgatatcattggtaaaattttacagggtattcgggaattaaggcagtttttttcgtaatttattacattaaaccgatgcaatttgactctaaaaagagggtgccaaaacgatgtgctggcaaaatatacctggttggccagtccatgcaatggaccagcaaggccggccatcgaagcggcaaatgacaggtacgggtcggacagcgcggagccgaccaaatggcacgtgtgcgcggacacattgccaccctcgtggtccgaatggatgaccaaatagagacgcatcagttccacgaattcgcgttcggtgtagccaagcatatggcaaaagttagcggaccaatcctttaaagggtggcatcaaatttaaccatggaaccaaaaattaaacaaaaaaaaaccttgttcgggtcgagcacacccacggaagaaccatcacggtagagatttctaaaaaaaaatatgagataatttagcaaagactttcatgctgtccaaaaatccgtaatttttggaccaaacaattttttcatttttaggaactgactaaaagcattataaaccaagaaaaactcaatgccagtactgatagttattcaataatacggattcctgagttccaagcgcggtataaaatgtccaaaatgaagagattttgtctttcaataaatatgggggactcctccgttcaaggaccatccaggatggatcccatccatttacctgtaaatcattgccgcaatggtgggtagtttagcgagcaggttcatcgagtcttcgtacgcatactcccagtaggtgctcttcggcacacct

SEQ ID NO: 39427 - DNA, 886 bp, Heterodera glycines
cagaaaatggaacggataaaatgggcaacaatcataagttgaataaatgtcagtatttaaatttggagaaataaacgccaattaggcgaatccgatgtaattggcttggttcggctgtttttttagtctattgttgtggcctttggagtgcgctctccccgtttattagctctgccgcaaaatgagccgcaattgtttgattggttggttaattgattgtgaatgggcgggggggggtcaaaatggtgtggcgcccgacgccgcatcattaccctcccccacagccttccattgcattccaaccagccaaagacgacggctgtgttgcagcgcctgccctgggcagggaggggaggagaggacccctccaactccaatctctcaatggcgccaatattttgtcggtcggcgggggggggggagaatgacggggaagggacggagggacacaaagtgttaggaaaaccaccaaaaatggcgagaagggaatggtggcggggagaaggaatataattgtcgaagtgcgagcgatggatgggccgggacaaacgcagcagccaaactccaattccaacctcagccgccgccgcattccgagcgagcggaggaggcacaacaaagggcgcccgccgcggccccacccccccgctatgacgtagtaacccagcgctaatctagggaagctatagccatacatttttatggcatttttgcgtgggcaagacggattttatatatgaaaattatgaatttttccacatttgatttgggcacatgggttaaacgggaaatgaagaaaaataaattagtgaattttttctataaaacaaatttttttgggggcattttgaccataattaaaatgaaaaattattgcttcacccat

SEQ ID NO: 39428 - DNA, 1405 bp, Heterodera glycines
  unsure (1)..(1405): unsure at all n locations
caaataaaaaacgggggaaaggggggccgcagattttaattattcaaattttgttgtacataattttagaaaaataaaaataacccattccattttcagtttttccagatagggatgttactatattaggtcccaaaattagtcatgaacgaaatttaattcgtgtgcttagccaattgggaaggaaaataacatttcggcggcgcaacgcacaatttttctcccattaacaaaaccggcacatgtcgaatgcttttcaatttctgcacccgaaaagaacaatgttggaacactcaaaaaactggggaggccaaggaaagtgacttccgattcgattcagagcaataagcgtttaaaaaagactgattgacgacttacgaatctttctgatttttgccaagattttgtctaattttgatttattcttttgcttctttcgaaaacctcacctcatttgaaaacgcctcatttttctccatgtttaaaattgttttattgtatcatatttatttctgcttttatttattgtaaaccattgaagaataattgtgacggaatacatcattacaattttttgttgttgttgtttgctgtattaggatatattccttacaattcgttaattaatgcattttttaaattttgcgttttaatttgtcaaatattcgattatttgttgtgcattttattcctgtgggctgaaatgaggcgagtgtttctaaattttgtccgtttttcaattgttttgctttaagttggctgcccaatgagaatcttatggatgtgttcgcttttttgtccgatgttcgcctcctccgttcggtttccttcgtttgccaccgcttttggcgtttgtctgagttggcacttttcaaatttcacccaatggtggccaaaagtgttcgcatcggttgggacccaaaggttttttggaaattaaattgaaaaagacaattgtttatccttttttgtggaaacgactaacaaaatgggttcctatttttcagaatgcttcgcactatttctttgttcaaagtgtaaaatgtgccgtggctctttcgaatttggcactttccgttggcccatcggacaattcgtcgtccaattggcccccctctctgccgcccccaaatattgtcggaatccgacgcattcgaatggaaggtcatcagtttaattccgttggattatttaaaatttgtaaacattttttggtggcattttttgttaaggaaaattgactcgcgaagtgctcgaatttttgtctcggtgcgcagccaaaatttccgaaagtgaattggattntgagaatttggaaagctttttggcgngattaagccgacagaaaattcatttggacgaatttttgcagtttttggaaggtgaaaatttgttggcaatttga

SEQ ID NO: 39429 - DNA, 896 bp, Heterodera glycines
tttttcctccccataattgttggagtcccccaacccgggacaacttgaaaaaatcgatttttttttttgcggggcagtccccccccggaaccgatgcgcccagatttatggggagaccgaatccttcgggaatagcttccctatagcctgtactttaattctgcgttggatttttgctccccataattgtttgagtaccccaagcggacactagaaaaaatcgatttttttgttttcggggtagtccccccgaaccgatgcgcccagatttatggggagaccaaatccttcgggaatagcttccctatagcctgtactttaattctgcgttggatttttgctccccataattgtttgagtaccccaaacggacacttgaaaaaatcgatttttttgttttcggggcagtccccccgaaccgatgcgcccagatttatggggagaccgaatccttcgggaatagcttccctatagcctgtactttaattctgcgttggatttttgctccccataattgtttgagtaccccaaacggacacttgaaaaaatcgatttttttgttttcggggcagtccccccgaaccgatgcgcccagatttatggggagaccaaatccttcgggaatagcttccctatagcctgtactttaattctgcgttggatttttgctccccataattgtttgagtaccccaaacggacacttgaaaaaatcgatttttttgttttcggggcagtccccccgaaccgatgcgcccagatttatggggagaccgaatccttcgggaatagcttccctatagcctgtactttaattgtgcgttggatttttgctccccataattgtttgagtaccccaacggacacttgaaaaaatcgatttttttgttttcgggg

SEQ ID NO: 39430 - DNA, 1168 bp, Heterodera glycines
  unsure (1)..(1168): unsure at all n locations
aaaatcgattttttgtttcggggcagtcccccccgancngatgcgcncagatttatggggagaccgaatctttcgggaatagcttccctatagcctgtactttaattctgcgttggatttttgctccccataattgtttgagtaccncaaacggacacttgaaaaaatcgatttttttgttttcggggcagtccccccgaaccgatgcgcccagatttatggggagaccgaatccttccggaatagcttccctatagcctgtactttaattctgcgttggatttttgctccccataattgtttgagtaccccaaacggacacttgaaaaaatcgatttttttgttttcggggcagtccccccgaaccgatgcgcccagatttatggggagaccgaatccttccggaatagcttccctatagcctgtactttaattctgcgttggatttttgctccccataattgtttgagtaccccaaacggacacttgaaaaaatcgatttttttgttttcggggcagtccccccgaaccgatgcgcccagatttatggggagaccgaatccttccggaatagcttccctatagcctgtactttaattctgcgttggatttttgctccccataattgtttgagtaccccaaacggacacttgaaaaaatcgatttattttgttttcggggcagtccccccgaaccgatgcgcccagatttatggggagaccgaatccttcgggaatagcttccctatagcctgtactttaattctgcgttggatttttgctccccataaatgtttgagtaccccaaacggacacttgaaaaaatcgatttttttgttttcggggcagtccccccgaaccgatgcgcccagatttatggggagaccgaatccttcgggaatagcttccctatagcctgtactttaattctgcgttggatttttgctccccataattgtttgagtaccccaaacggacacttgaaaaaatcgatttttttgttttcggggcagtcccccccgaaccgatgcgccgagatttatggggagaccgaatccttcgggagtagcttccctatagcctgtactttaattctgcggtggatttttgctccccataaatgtttgagtaccccaaacggacacttgaaaaaatcgatttttttgttt

SEQ ID NO: 39431 - DNA, 995 bp, Heterodera glycines
  unsure (1)..(995): unsure at all n locations
ttaattcacaatttctgcagctcttacggtaatggaaaatattttgaagaggctctcaggaacggattagcatcggggttacgagatagaaaattgtcctaaaaagagataaccatttagcatcggggttacgagatagaaaattgtcctaaaaagagatagccatttttctgagaattaattcacaatttccgcagctcttacggtaatggaaaaaattttgaagaggctctcaggaacggattagcatcggggttacgagatagaaaattgtcctaaaaagagataaccatttttctgagaattaattcacaatttctgcagctcttagggtaatggaaaaaattttgaagaggctctccggaacggattagcatcggggttacgagatagaaaattgtcctaaaaagagataaccatttttctgagaattaattcacaatttccgcagctcttagggtaatggaaaaaattttgaagaggctctccggaacggattagcatcggggttacgagatagaaaattgtcttaaaaagagataaccatttttctgagaattaattcacaatttccgcagctcttacggtaatggaaaaaattttgaagaggctctcaggaacggattagcatcggggttacgagatagaaaattgtcctaaaaagagatagccatttttctgagaattaattcacaatttcgcagctcttagggtaatggaaaaaattttgaagaggctctccggaacagattagcatcggggttacgagatagaaaattgtcttaaaaagagataaccatttttctgagaattaattcacaatttccgcagctcttagggtaatggaaaaaattttgaagaggctctccggaacggattagcatcggggttacgagatagaaaattgtcttanaaagagatagccatttttctgagaattaattcacaatttccgcagctcttacggtaatggaaaaaattttgaagaggctctc

SEQ ID NO: 39432 - DNA, 906 bp, Heterodera glycines
ttgctatggctccgcatcacccgcttcaaccgggtgctcagtgtaaatatcgactggtcattcaaattctgcctttccagccttatggaaagatattatggaacttttggttccatctcagttgtcaacgccgcgactgcatcgttattatatcagtcgatagaattttcgaatcgcttttaaatcgtctcttttgcgtcccttaatcttcactctgagcgagttactgcggtctaaacacgtttttggtagagttgcggccagaataaaaatacagtttgctatggcttcgcaacacccgcttcaacgggtgctcagtgtaaatatcgactggccattcaaattctgcctttccagccttatggaaagatattatggaacttttggttccatctcagttgtcaacgccgcgactgcatcgttattatatcaatcgatagaattttcgaatcgcttttaaatcgtctcttttgcgtcccttaatcttcactctgagcgagttactgcggtctaaacacgttttttggtagaattgcggccagaattaaaaatacagtttgctatggcttcgcaacacccgcttcaacgggtgctcagtgtaaatatcgactggccattcaaattctgcctttccagccttatggaaagatattatggaacttttggttccatctcagttgtcaacgccgcgactgcatcgttattatatcagtcgatagaattttcgaatcgcttttaaatcgtctcttttgcgtcccttaatcttcactctgagccgagttactgcggtctaaacacgttttttggtagaattgcggccagaatttaaaaatacagtttgctatggcttcgcatcacccgcttcaacgggtgctcagtgtaaatatcgactggccattcaattct

SEQ ID NO: 39433 - DNA, 943 bp, Heterodera glycines
agaaaaaattgaaaattttgaaatcatgtttcccactcccttctcccaggggtattattttgtaaagtctttttttccccaataaacttgtcaaaccccatttttcgcaccgtgaatgttatttttattgaattctgagccgttttgagtagattagactagaaaaaattgaaaattttgaaatcatgtttcccactcccttctcccaggggtattatattgtaaagtctttttttccccaataaacttttcataccccatttttcgcaccgtgaatgttatttttattgaattctgaaccgttttgagtagattagactagaaaaaattgaaaattttgaaatcatgtttcccactcccttctcccaggggtattattttgtaaagtctttttttccccaataaacttttcaaaccccatttttcgcaccgtgaatgttatttttattgaattctgaaccgttttgagtagattagactagaaaaaattgaaaattttgaaatcatgtttcccactcccttctcccaggggtattattttgtaaagtctttttttcaaaataaacttttcaaaccccatttttcgcaccgtgaatgttatttttattgaattctgaaccggtttgagtagattagactagaaaaaattgaaaattttgaaatcatgtttcccactcccttctcccaggggtattattttgtaaagtctttttttccccaataaacttgtcaaaccccatttttcgcaccgtgaatgttatttttattgaattctgaaccgttttgagtagattagactaaaaaaatatgagtgatcaaactttcactaaaaagttaagcctaaactttttcccaaagttaaaaagcaattaaaattttattcaccctccattattgatagaaaaaagcatcagaagtgccctaaactaacatgtaaataaaa

SEQ ID NO: 39434 - DNA, 970 bp, Heterodera glycines
tgatgggaaaatttttttgaaaatttacgaaagagagacttttcctctctatcaattttttggagagcaaaaagcaatttggcagctgaattttgctgccggtgtttcaaaattaccatcaataaacacacacataaatatgtatttaggtgacagctaacagaagaaaagaagcggaggaggaactaaaaaaaggggaaaatgatgcaattgcaaatggccaaccgaccgacggaagagagacccaaccaacacccactgaatgaatgaatcccccgcgggtgttccgctgattgtttacgtattttgaaattgaaaaatgagggaaggaaacatggccatggtaaataaataaaggggaggaaaatgccagaaagagagagagagagagagagaaaagagagaaagagagggagagaaatagaaggaacgaagaagccgggaaaaagaggagatagagaaggagtgaaacaagtagagaaagtgaaaggaaaacaatgagagaaaaggagagaaagggggagagagagagtgagaaaagggagaggaggggagagatgggtaaagagaagagagttgaaaacacggagactgagaggagaaggaaagagaacagctggcagcaaaagggaacggttggaaaatgattttggtttcaatttttttttctccgtattcccacacaatgtacacttttaattagtctctttctctttctggtcagacagtgagagtttggaaattgatctgatcggtgatcaaactcaacactagattaagggataagctttttaaaattgataaaaaattattactttttaaaaaattgataattattccatttattaattattatattttaattttattaataatctgacaaaacattctcggccaaaagtttacgtgggaaaatgagcgaatgagaaaagttaaaattattacagcaaataatatttttatataatca

SEQ ID NO: 39435 - DNA, 1432 bp, Heterodera glycines
atttaaaaatacagtttgctatggcttcgcatcacccgcttcaacgggtgctcagtgtaaatatcgactggccattcaaattctgcctttccagccttatggaaagatattatggaacttttggttccatctcagttgtcaacgccgcgactgcatcgttattatatcagtcgatagaattttcgaatcgcttttaaatcgtctcttttgcgtcccttaatcttcactctgagccgagttactgcggtctaaacacgtttttggtagaattgcggccagaatttaaaaatacagtttgctatggcttcgcatcacccgcttcaacgggtgctcagtgtaaatatcgactggccattcaaattctgcctttccagccttatggaaagatattatggaacttttggttccatctcagttgtcaacgccgcgactgcatcgttattatatcagtcgatagaattttcgaatcgcttttaaatcgtctcttttgcgtcccttaatcttcactctgagccgagttactgcggtctaaacacgtttttggtagagttgcggccagaatttaaaaatacagtttgctatggcttcgcatcacccgcttcaacgggtgctcagtgtaaatatcgactggccattcaaattctgcctttccagccttatggaaagatattatggaacttttggttccatctcagttgtcaacgccgcgactgcatcgttattatatcagtcgatagaattttcgaatcgcttttaaatcgtctcttttgcgtcccttaatcttcaccaacgccgcgactgcatcgttattatatcagtcgatagaattttcgaatcgcttttcaatcgtctcttttgcgtcccttaatcttcaccaccgtcgcaactgcatcgttattatatcagtcgatagaattttcgaatcgctcattgattcgtctctcttgcgtcccttaatcttcactctgagccgagttactccggtctaaccacgtttttggtagaattctgaccagaatttaaaaatacactttcttatgccttcgcatctcccgcttcaacgggtgctcactgtaactatctactggccattcaaattctgcctttccatccttatggaaagatattatggtacttttggttcaatttcatttctcaactccgagactgcatcgttattatatcagtctatagacttttcgaatcgcttttaaatcctctctttcgcatcccttcatcttctctacgattccgcgtttctgcggtgaagaaagaggggggggggaggaggggaaagggcgaaaaggaggtggaggggaggtgcttcgttaagcattggcactcgccgtactcaattatttcaactatttgcagcattaattttcttttgggatggcggaaaagctttggaatccgtcgcctttgcgctgtt

SEQ ID NO: 39436 - DNA, 1071 bp, Heterodera glycines
  unsure (1)..(1071): unsure at all n locations
ggacaaaaaaaaatcaaacaaattatgcgattataaaagtcaattttgtatgcctgttaccgcgggataaaaccgatttcgcaattctagacaacaatatatacttgattcgatcagacctttgcatttataaatatagaattgttgaccgtcaagttgaactaaagtttgtggtcaatagtagtagcgcgaaattcaactttttattatttaaagaataccgcgacgacgccaataataataatatacttcaagcaggctctcaaacgcctcagttaaaattattgttaggggttgcttatacatttgacgtactactgatcataatttgtgcatttgccgtaaaacagatccgccgagcgagcagcagaagtaacacatcttccgaaaatcttggcatgttcgacctagtggaattggcagcgcttacaaataattccaaagaactggtgtacacgcccacaacagtagtcaaagagaggagtatttaaggcaactattctggccatcagcgctcatttcgtacactaaaccactatatgcaacgagcaatcaaatattttattgactattacgccataaacgacattactcaactgtatgctctgttaaaatcggaaatcgactcacacccgtccaattatttcccaaatcctctgctatcagtctcctgtgtccatattgtgaacaccgagttcgaaaaccaaccggtgatagtggaaggaacgcttgatttgatagacgagctgctcttttcgacatgctaccccaagacgaggcagggagtcggctggtaagtgagggattaatgtcaattatttaatattttttgttcaggagcgaacctctgtatgtggaactgacagatctaatggtttgtccgggcgatttgccaatatgtctgtcacacttcggacaacggaaggaacgacgacccagcttgatggtcgacgaactggattggcacgacagcgacgacgacgccgcagacgaagcctggtgaaagtgttatgtgaattcaataaatgtagaccgngaatatctcgctgtgacgatcagaagaaggaagaa

SEQ ID NO: 39437 - DNA, 869 bp, Heterodera glycines
gtccttttaaaaaaaaatggtgtgccaaaaaatgttgtgttcagttggcggtcgacaacggtgctcgcattcgggacgaacgcgtcaaattgcgcattgctcaaatgatgtttacggtgagtagaaaattcagaatacgaaaatccaagattctccagggccttggtacattatacccctggggagttttgggataccatgagaaactcttgaccacaaaatttagatcagattattagccgagttccgtcttgggcccccgcactttctctttttgaactttatgaacttggcgattggtccttaaacggagagagagagagaaaagtgacggagaaaaaagggcaatttgttttggcgcaaaattggcattttgaaaattcaaattaaataattgcttctgatgctcaggtgattgtcgtgttcgtactctgctggacgcctctgtacgcgttgtactgctactttttcatggcggaggaccgtgactcgatgttcttccaatttgcctcgtccgttctgcgcccaatttttcaggtcctccccaattaaaacctctcacttccgtttgttttcactcaaaaggctattttaattggtctaaatgatctaatgagccatttaatccctcagcagcactcaaatcaattagaattctccgagaaactttcaagatgctctcaaatctgattagattaagtatttgtgtacacgatcagtcgatcggttcattgccttgttgtgatcactaaagatccatcttcatcatgtttattttattgttagtcacgatgctctaactgtctgcattaaaaaactctaatcactctttttcaagaatttaaaaatttcgccggattttcaatttt

SEQ ID NO: 39438 - DNA, 1142 bp, Heterodera glycines
  unsure (1)..(1142): unsure at all n locations
ttttgggcctgtttaaaaaaggaaatttaaaaatttttaaaaattttattcatctcccctttttggatagaaaaagcatcagagtgcttaaactaacatgtaaataaaatttggtgcgtttcagagcattttctgaaaaaatatttatgaaataaaaaaatcgatttttttcaagtgtccgtttgggggtactcaaacaattatggggagcaaaaaatccaacgcagaattaaagtacagactatagggaagctattcccgaaggattcggtctccccataaatctgggcgcatcggttcggggggactgccccgaaaacaaaaaaatcgattttttcaagtgtccgtttggggtactcaaacaattatggggagcaaaaatccaacgcagaattaaagtacaggctatagggaagctattccggaaggattcggtctccccataaatctgggcgcatcggttcggggggactgccccgaaaacaaaaaaatcgattttttcaagtgtccgtttggggtactcaaacaattatggggagcaaaactccaacgcagaattaaagtacagactatagggaagctattcccgaaggattcggtctccccataaatctgggcgcatcggttcagggggactgccccgaaaacccaaaaaaaaattttttggataaaaattatttaaatgaactgactagataatatttaaaataggttatttctcttcctttcagtatccctgcaaagtttggtgcgcttctgatcagtttctgaaaaaaaagttaagcctaaactttttggcctgtttaaaaaggaattaaaaatttttaaaaatttattcatctccctttttgatagaaaaagcatcagagtgcctaaactagcatgtaaataaaatttggtgcgtttcagagcatttctgaaaaaaatatttatgaattaattatgcaaaaataaataaaaatttctaaaaatttgatcgtccataaataatttgtaattgatcaggggctcaccaaattttgcagggatacgtatcggaacactacaaatgcttactaattttcctagattttttaaacccnggtgaaaattttttgcagacaccaccacttttgcacttaaaaaaatttcaaaaaacttta

SEQ ID NO: 39439 - DNA, 815 bp, Heterodera glycines
aaacatactgtatcactgacgctttttattttaggtatccaagacgggtggaataccgtatttgttttttttaaacatactgtatcactgacgctttttattttaggtaaaccagacggttggaataccgtatttggtttttttaaacatactgtatcactgacgctttttattttaggtataccagacggttggaataccgtatttggttttttttaaacatactgtatcactgacgctttttattttaggtataccagacggttggaataccgtatttggtttttttaaacatactgtatcactgacgctttttattttaggtataccagacggttggaataccgtatttgttttttttaaacatactgtatcactgacgctttttattttaggtataccagacggttggaataccgtatttggtttttttaaacatactgtatcactgacgctttttattttaggtataccagacggttggaataccgtatttggttttttttaaacatactgtatcactgacgctttttattttaggtataccagacggttggaataccgtatttggtttttttaaacatactgcatcactgacgctttttattttaggtataccagacggttggaataccgtatttggtttttttaaacatactgtatcactgacgctttttattttaggtataccagacggttggaataccgtatttggtttttttaaacatactgtatcactgacgctttttattttaggtataccagacggttggaataccgtatttggttttttttaaacatactgtatcactgac

SEQ ID NO: 39440 - DNA, 1070 bp, Heterodera glycines
  unsure (1)..(1070): unsure at all n locations
tacgacgtggaaagaaagcgccgaattcgtaaaattgggaaacaaatccctaaaagaaaaacgagaaatttgtgatcaccgaattttgaaaagagggaaacaaatccctttcttcatctcgccgaattcgctggatttgttgaaattgtaaaacgtggaaaacgaatcttgaaagcggaggaaaagctgacaactaagtcaaaagctttgaattgaaaacgggaaaacaaattctcatttgctaatggtgccggttatgcgaagtccgccattaacgcgacaaagagcgttaaacctcggcatacaattgcgaaacgagggcataggagttgcgcaagaacagcagcgagttcagcaacagcactccgacgtcggaaatgctcctttgcgcgaaaacgaaaatcgccaaagccacgtttcatcggtttcatctgttttaggaccagacacaatccaccggcgacttttgcaaatcccaaatccacggaacgatatggacgcgcaacaaaatcgaaacaatttggacgaagatgctcttttggatgaccatggtgactcaatttttggtaacggaaatccccatgaacaaaatttgggtggagaaaatgttcgaaatgcagttagtgttatgagaagcattgaccaggggagagtgcgcgttgatattgtggatgattttgggtttcacccggacatgacttcgaccccaaacgtggtcgcaaattatcagcgtggtgaaccgagttttatgctcaatcaaccaccggcagtccaccaacgcaatttgatgctggaggaacagcattttcgttttgtcgcacagcctaacgccggggaacgcgctgaaccaagagaccaactttattttcgacaagcgcaacaaccaacgaatgtcgggccgcaacaaaatgccgaatatcatcaccagtacattcatcagcgaaattttccgcagtttgaaacgcgtgaaccccatcaacaaaaccaacgcaattttgttgaaaataacccaacaatgcgtttttacggaaatgctgcntccaaattntgtcacgaccncataaatgttc

SEQ ID NO: 39441 - DNA, 899 bp, Heterodera glycines
ggtaaggaaaaaatttggaagaggctctccggaacggattagcatcggggttacgagatagaaaattgtcctaaaaagagatagccatttttctgagaattaattcacaatttccgcaactcttgcggtaatggaaaaaattttgaagaggctctgcggaacggattagcatcggggttacgagatagaaaattgtcctaaaaagagatagccatttttctgagaattaattcacaatttccgcagctcttgcggtaatggaaaaattttgaagagtctctgtggaacggattagcatcggggttacgagatagaaaattgtcctaaaaagagatagccatttttctgagaattaattcacaatttccgcaactcttgcggtaatggaaaaaattttgaagaggctctgcggaacggattagcatcggggttacgagatagaaaattgtcctaaaaagagatagccatttttctgagaattaattcacaatttccgcagctcttagggtaatggaaaaaattttgaagaggctctgcggaacggattagcatcggggttacgagatagaaaattgtcctaaaaagagatagccatttttctgagaattaattcacaatttccgcaactcttgcggtaatggaaaaaattttgaagaggctctgcggaacggattagcatcggggttacgagatagaaaattgtcctaaaaagagatagccatttttctgagaattaattcacaatttccgcaactcttgcggtaatggaaaaaattttgaagaggctctgcggaacggattagcatcggggttacgggatagaaaattgtcctaaaaagagatagccatttttctgagaattattcacaatttccgcagctcttgcggtaatggaaaaa

SEQ ID NO: 39442 - DNA, 1237 bp, Heterodera glycines
ccatggatggcacctttatctaagcctcgctcggcatgggtcgtcccaccaactccagcttattttgatgtgctcgacttttccaaatatatcaccaagacacggttggccaccgatgaggaagccgaatgggaatttgacgcatattacaaaggcataaatttgccaacagccaaatttgaggtgttcaagagagtgtcagagtttatatacttaaaatggttctcttttaaataaaggaacgtgttgccgaaagtctggcacttcatttggaaagagaagaaatgtctaaaagagagaatcaccccgaaaaggaaagggaagaaaaccgcgccaaatttctccgctcgctcatcgatgatgcccatttaattttggcacatggaaacccaaaaatcatcgaccatcgcgtgagtaacagcagcatgcctttttatcagttcttaatttttatagatttcacattctgaccgttgcgagtccttttggataagggccggttttctccctctgtacgagagtttgcccgtttgggaaatggaaaaagtgccgtccattcgaaaagtgaagttcaccggcgatgacaggtccaaataattaactttatttccatcaaatattattttttaataatgtccaacaaaacagacgccgtcttggcgaactttcctttacaatgcgcgacaaacatggcgatgcaagtgcggacgaaaagcccaatgaaaagggtaactttatccgaattgcggggcgtatttctcccttaccattttttcagctattcgattgggatgacccgggcagactcgaggcaccagcgtttcccccgttttttgacgttgcggatgcattgataatgtcgcccatggtttataatattctcacctactcagagccattgtgacaatgctcagccttcgaataagggtcgggtaagtccaattcattcgcactattcatttttgtgtaataaagcccccatttccaccaataagccctggcttgtaaactttatgtgtatttattttcactccgttagtatttttaggtgaaacgcataagtgcggtcggttggctatcaagggcattactgacgcggatctttcgctctggccactcattggcgttgcgacacggaacatgagcgaaaggaagtgatcagagaaagtttgaccgcaacggcggtcgtatctctctaaagagtgctcgcatgcacaagcgccattgtcttggttag

SEQ ID NO: 39443 - DNA, 1547 bp, Heterodera glycines
  unsure (1)..(1547): unsure at all n locations
gatattttcgagatttggactcccatctaagtgaggcctatgtataaaattcaaaatcgaatggcacggagaggagagaaaaaattttcaaaagaaccaaacctttggttcttgatcaacagagcgaagtcaggtgccgatcggttcacgccaaatctttttccaaaactcggaggtactttgattataagagtaataacgccattagcatttatcgacccctcgccacccattaaatttgacaaaagtaggcattttgtcacacttcaaagtcaatccccgtgcaggtggcgctgtgttttatgctgagttttgttggttgagcagagggcagctgctgtccttttgctgctgacgatttcacccccccccccccgtcaccccaaaaaattccaattttatcgctacgggttaaagacaaagagaagaagaagattgctgaaaaataaaggacaacccgccgccggcggtgacgaaaattttaattgcgcggccaataaaataaaattcaaaaggaaaagtgaaagagagagagaaaagaaaattaagacatggaagagaagagatggtaaaaagagcaaaagacggaaaaaataatgaaggagagagagcgcgagagaaaaaaaaggaaaatagcgagaaaaagtggaggaggaaaaggaaataaaaaagtgaaaaaaagaagagagagagagaggagagagagagggaggaataatatgagagagaggaaaagagttgaagtgaaattggcggggatagaaaagacaaaacagaatagaataaagagcaaaaagaaagaaaaaaagtgtagaaatggacgcggaacagcaaaaaatagcatagcgaggaacaaaaggaggagagcaaaaagagagaaaagaggcaaagaagagcaaaattggaaaaagagagcgaatgaatgcgcatgacaaatgacgcacaatcgtagcaaaaatgcattaattaggaaaggaagaaagtgttgtgcaaaatgacacaaatttcgaggagcaaagccaaggccatccgccgccgacgccgtggggcgacgccgacggcgacggacgcaacggcgcgtgccgatcattcggactgatcgatcagtgcccctccccccatttgtctctgtccttgtccccaatgtgcgcggctgttttgcttctttgcccaatttgttgttggatgctgcgccggtgcagcactttttttaagttccaccccatcaacaaatggaaatgcttttaattaatgacttacatggaggaacaatgaaatgaaaaagtggtggtggggatattagagacaaaatgaaaaagttagaggtgatccgatcggccaaaaaggtgcttgtttaaaaagtcaagcaaaattaatctgataatgcataatttgatcagatttttcatttgcgagtatttttcacatctttaatctggtccaatccttggctgtgattagacttcattcataacattttttaatgtcgttcaaacaaatctcactcgctgcattnagcagtctgaagtgatcagacagacaatgat

SEQ ID NO: 39444 - DNA, 1514 bp, Heterodera glycines
  unsure (1)..(1514): unsure at all n locations
agcagcacgggattattgcgtttcagcttcatgtccttgcgatgggcaatgaacattcgcacctgagcggaattgttggagccatcaaaatgttggtttgatattcgtccaattaaatgcacaattaaatattaattaattgatcatttaccggtgtcccatctttgctggtataggaaacctgaaatttgaaattattgcaaggaacggacgacaattaaaaataattttgtacaaattaaagccttaattgggattttttataagtagtctcaattagagcttgcttccgacctgttccaccgtgaattccttgctgtccatcatctcgggcactttgccctggcgaaacacttccaactgaacgtgttcgcccttttcatatttggcaaagtccgcgtagaaaatggtgaacggagacacaaacgactcaattttgaagaaaaatttggagaaccgtttgtacgcaaaaacgtcgtcatttctgctgattgatgagtccataattactgaggcaaatggcaactcaatttgataaagcattttgccactgttcaggtcgtgcacatagagagcgtcctgttggatatttttaagaaattaataagacccatgaaagcgttgattggctatttaatcaatcaatccggctttagatcagaaaaatcggatcgggagatcacttgaacaatggacactcatttcaattaattaactaattaattaatgatggttcactggtaattagcaccttcacatccttcatgtagcagaccaacagcttgtctccggccacggggtagacaaatcgcaacaattgctttgggtcctcggggatgaccacctgcggcgtctgtttcgtgccgcccttgagactgactctgatcaatttgtactgcggcgcgtctatgtttgtgtagaccaacaccgatttgttgtcagagtcaatcatctgtccatttacaagtttatgtattatttattacactcgtaaaaaagttttgccctttttaatggcgggggaatttctctgcttacgcatttttattctttgtacttaatcagatggccgggaatcccggaaacagaaagtcccaggaaaagagattttagtccctaaaggcctttttgtctgtccattatcaaatcgttgtccattcttctgttcacgctttttcaaaatgacgagccttaatatttgtgcaatattattatggatgtacaaaataatttgccaatttttgctgcttgaacaaaatttgtctttcactttacaaattgtaccgtatgcctttattacttgtgatgtacacatgtactactgtatgctacagatttctcctcacttgataatccgcgtcagcttggtaaacaatggcgttagtttcagtgggccggtgaagttgtaatttgttcactcagatcggtgtaagcaattttgggtgttcttatcgtcgngcactttaatcacaaacaaaaagcgaccatcctctgacacttgggcatagctaaag

SEQ ID NO: 39445 - DNA, 1195 bp, Heterodera glycines
ggattcatattttaattaccaaatattctaataattcacctactctcttttgcaaattcgattaattgctgttcgacaaccttccaattttgccgagaaaacagttctgtgtaagaaaatcgaggatcaagtagcattgcgactcgcaactttttatttcttatagtttagtttattcaaataatgaatttttattttttaataaattaaataaaataaaaaattagtgaatataattttattattttaattaactcgacgagaacatgacattttcttaaaaatttcaaattactttttgattgataaatttcaaaattatattaattttttaatgtttatttatatatcttttaattgtaattaaatccaatttttatatttatttttatttgcaaataataaatttatcactagatcatttgaatttgcattattgatatgtttttctgcaaatttcattattttcttattatcaaaattatttattaagttgtttttgaatatttaaaaaaaatttaaatacgaatttgattattaatttcattaaaattaaaatagaatagtgccattaaaggaaattaaaaaatttttaattctttaattatttaaaatgttatatattttttattttgtatttataaatatttaaaattgctgcacaaattgacggttattgtccttcgatcgaactggagttttcctttatttgttttatagaatatacttatttattaaactattatattctcgtctaccagttaattaatttattattttttaaatatataaattccagaaaataaaaaatttacttttcttgaatttttatttaatcattttttaattagtatatttatttttaagccattaaaccgcaaaacatggaaaaaaagaatctagcgaacttttatatgatgatttgataagattgaattatggtttcaatttttgagttttgcgtaatgtataattaattttttctttcatcattatattcttttgaccatttattaatggatttttcaaattatcacaaacaaattaaaattatttttaattcaaataaatttttgttttctttacacttttttcttctatgttgctttaataattattcctctgtttcagatcatattttaatgctttttaatatattcgatttaattttgctttactaattaaaaaaaattaa

SEQ ID NO: 39446 - DNA, 1651 bp, Heterodera glycines
tttttgctccccataattgtttgagtaccccaaacggatacttgaaaaaatcgatttttttgttttcggggcagtccccccgaaccgatgcgcccagatttatggggagaccgaatccttccggaatagcttccctatagcctgtactttaattctgcgttggatttttgctccccataattgtttgagtaccccaaacggacacttgaaaaaatcgatttttttgttttcggggcagtccccccgaaccgatgcgcccagatttatggggagaccgaatccttccggaatagcttccctatagcctgtactttaattctgcgttggatttttgctccccataattgtttgagtaccccaaacggacacttgaaaaaatcgatttatttttgttttcggggcagtccccccgaaccgatgcgcccagatttatggggagaccgaatccttcgggaatagcttccctatagcctgtactttaattctgcgttggatttttgctccccataattgtttgagtaccccaaacggacacttgaaaaaatcgatttttttgtttcataaatatttttttcagaaagtgctctaaagcgcaccaaattttatttacaacttaattttagcactctgatgctttagtatcaaaaaggaagcagagaaaaaatttttttaaaaatttttccttatattttggttatatcgttttgcttttggtggggtgcttggaacagtggaatcatgcgcacccgtccgatctggcaagttaagcaacgattgctgactagccaaaaggttcggtgccgtgatgaaacgaaccagcactgcttaccccgcggcacccggcacggtcccccgaggaatggatttaattaattctctccttcggggatttttttccattaagtcgtccgttagcgttcgattgctctagtcaatttttcaaaaattttttgttgaaatatttgtcgtgctctgaagggcgtgggggggggggggggggcgaaggccccaccacgaggccgcgaagaggccgagtgagtaccttcggtgcaggaaaattattaaattttaaaaattttttaattgctttttaaatatgccaaaaaatgtaggcttaacttttttagtgaaaattcgatcactcatattttttgctaattgagcagaagcgtaccaaactttgcagggatactccccggtaaaggactaacttacactgaaatgagcgccgagctagctggctcaaaaaaattttcgaaaatctgagtctttcgtttttatttattttttgcaaaattaattcttaaatattttttcagaaagggttctgaaacgcaccaaattttatttacatgttagtttaggcactctgatgctttttctatcaaaaagggagatgaataaaatttttaaaaatttttaattcctttttaaacaggccaaaaagtttaggcttaacttttttttcagaaactgatcagaagcgcaccaaactttgcagggatactgaaaggaagagaaataacctattttaaatattatctagtcagttcatttaaataatttttaaagaaaaaatttttttttgggttttcggggcagtccccctagaaagatgcgccctagatttatggggagaccagaatccttc

SEQ ID NO: 39447 - DNA, 1005 bp, Heterodera glycines
  unsure (1)..(1005): unsure at all n locations
gaaaaataaaggttgcatccaaatgtaattttttttttacattgaagcatttggatggcttgctgtttacagttggcttagtcttctttgcaagaagcagcacaacttttgtttgggccaacgaccccaaaccattcgaatagcaatcgattgggctgactagactccatatttgcaggaatagcaatggcaggtctatcttaaaggcctgacgagttatgtttcgacaaacatcctgtacaccataaatcgatttgcaaatttagtcgaactatataaatttttcaaaaaatgattcatcttttttatggttagcgcatatgtctctagctttatagaaacggtccccgaatctgcgaggaactacttttttgagaatttctatagattattattctgcatgaatccttcgcttaaattcccatttatctcataaagtcagattaaattaattactccgatttgttttagaattggtccaaacacgcttgctaatagcttttcttttcgaaaagagaggcgaggaaaaataaaggttgcatccaaatgtaatttttttttacattgaagcatttggatggcttgctgtttacagttggctaagtcttctttgcaagaagcagcacaacttttgtttgggccaacgaccccaaaccattcgaatagcaatcgattgggctgactagactcaatatttgcaggaatagcaatggcaggtctatcttaaaggcctgacgagttatgtttcgacaaacatcctgtacaccataaatcgattttcaaatttagtcgaactatataaatttttcaaaaaatgattcatcttttttatggttagcgcatatgtctctagctttatagaaacggtccccgaatctgcgaggaactacttttttgagaatttctatagattattattctgcatgaatccttcgcttaaattcccatttatctcataaagtcagattaaattaattactccgatttgnttttagaattggtcca

SEQ ID NO: 39448 - DNA, 1066 bp, Heterodera glycines
gaggatttttattattaggaggtttttccagaaaaaaggctttttctttttttgataaattttatacccatacaaatgttcttgagcagaataggaggggcggtgcgcaattgaccttttttttttgaggggatttttaaatttatactctatcccagaaaaatgtctatctctttttttgagaaattttatacacatacaaatgctctcgagcatgatagggagggctgtgcgcaatagaccttttacttttgagggaatttttatatttatactctatcccagaaaaatggctatctctttttttgagaaattttatacctcacaaaagcgcttgcgtatgatagggagggctgtgcacaatcgccattttatttcacaggggatttttatatttagaggttatcccagaaaaatggctatctctttttttgataaattttatacacatacaaatgctctcgagcatgatagggagggcggtgcgcaatagaccttttatttttgagggaatttttaaatttatactctatcccagaaaaatgtctatctctttttttgagaaattttatacctcacaaaagcgcttgcgtatgagacggagggctgtgcacaatcgccattttatttcacagaggatttttatatttagaggttatcccagaaaaatggctatctctttttttgataaattttatacacatacaaatgctctcgagcatgatagggagggcggtgcgcaatagaccttttatttttgagggaatttttaaatttatactctatcccagaaaaatggctatctctttttttgataaattttatacacatacaaatgctctcgagcatgatagggagggcggtgcgcaatagaccttttatttttgagggaatttttaaatttatactctatcccagaaaaatgtctatctctttttttgagaaattttatacctcacaaaagcgcttgcgtatgagacggagggctgtgcacaatcgccattttatttcacagaggatttttatatttatactctatcccagaaaatggctatctctttttttg

SEQ ID NO: 39449 - DNA, 905 bp, Heterodera glycines
atcagagctcagattcgtgatcagccaattttttttaccctaaattcattggaaagaaaatttttaagaaaattaaaaacattaaaaaatcaagtgcttgatgaaaagtcatagataaaatcaatgatttttcaaaatctgagttcagattcgtggtcagcgtattcttttagcaatgaaaaaatgctttttgaaattttcctatttttttccatcgggaccgcaattctacacctttgccaaaagatgactttatgcagattcaaacaaatttcaatagtgaaaaatttgatttttgacttttgttcgtatttgagattcgaaatttatcaaactaatgtcagatacgtgatcactgatctgcaactcagaaaaccctttacaatagtcttttttctccgcgtttatatgaaaaaaactttggcgcctaaataaaagcattggggaacgcaaacaagaaaagtgccgccagtcttaatttcacatatatcatcattttgaataaaaatgcctatcattataaaaaaaataaagtttcgaagcgaaagttaaaaaacaataagtgtgaagtatgagttagacactattaaaagttaatagtgaacaatacgccaatgaaaaaacagacagctgagttagacactatatgttttatcattgtttttaaaaataatttggtatgctgaaaaattttaacctatgcacagattttcttcaaattttgcataggcccatattttaacccaacctataggatgatgctttattttttgtcaaaatgctttttaactcgagatcggctcttcagtttttacaagggaaaatctcggcaaaatttttaaattagtggggttttttggcgttttgtccttaggcaatttttgtcaaaatgatgatatatgatt

SEQ ID NO: 39450 - DNA, 1228 bp, Heterodera glycines
  unsure (1)..(1228): unsure at all n locations
cttaaatctcgcaaaagtgataaaaatcntgacccaattttcatgaggggcagannnaaaaaaaganaannngcacaaaggaacctaaaaagggncgnnaacnncannaanangannaaaaaggnnagnncggngngannaannangnnacnngcngttttaganggggaannaaggaaaaaggngcggagaaaacgnggccgggcanaaccccagcaagaaaagaaaanggcacagngcacaaggcgagcgcaaccaaaaanagccnaaccccggagaaaacgaaaccacaaccggcaacggngcccaccgccgcaacccgccagacaaaagaagcgagccacgcaaggcggaacacaagccaaaaccaagcccccgcaacacaggcgacccaaccagccaaacaancacgganaaaccangcgagaacggcccaaaaaatcatcaaataaagcattgcaatttgaaaaggttacctcaaacggagaagaagcattggcgttggtgccgagcgaaaaggaggaagcggaagaaccacgagctgaacatcacatcattgggaaaagccgagaagcggcagttgaaacaagaaaagaatacactgtcagcaatgagccatgcgggaccaagcttcatccattatcccgtgtaaacaacaggaaatttaaaggactaaaccgagaggccaatggatgatgggctttgaaaaatttatgctaaattttttccctaaattttagcggatttttccaataaattctgccgtttgagatcctgagtctcggaactcaactcgataaggaaccgagttttgggattagactcagtctcatgaaattttttagccttgaaaagagcaaaactaaaattttcggcgctattatggaaaaaaatacatgttttaaatttttagatttataggttttcaaaaattttaaaatgtacacctaaaatctttttttttaaactcagattgaattcggcacggaggtcggcggagaacatgaatggccatttatggcacatgtttctgtaacatgtcacgtcaaaggcaaaatccggcaaatacaaacatgtggtggcacaattatccaaaagagatggattctcactgccgggcactgtacccatgcaaatatgacttttttcgaaaccaatgactgtgacgaatggaagcagccattttttgaaaaatcaaagatcagattcacggcaaatcaacggttgg

SEQ ID NO: 39451 - DNA, 920 bp, Heterodera glycines
acaatgtacaattgcaagtgaaatggggagattgaataagaaaaagtatattattttttttaaaattgttgaaaatttctttcgcgaaaatcattttgtacagaacccgggactgaactggacaaatgcctatgggactgaatcgtccaacgccttaaaaccgtaagaattttattgcgctaagattattggtgttatccgggcgcaagagcacggagcgagcggcgccccaactattggccgtcgtagtcgattgtgcggtgttttggccaaacttcactcccaatgcacctttaatttataacttcatgcccttgcctgttcaggatccgtaaccggtgtaaaatgcctttcgcaaaaaaatattttcgagtatatcatttggtacttttccgttttagttgccaaattccattttgtttaaaaagagtaacaagcctttcaatatgcaaatatacacaccgtttcaattatggcctctcatttgtcagttcaaaaaatatttgtatgtgtggcgaagtggtttttttagacagtaaagggaaaaggaagagaaaaggatggaggttcgagtccgttgtgctgcatgattagttttatttactttgtccaaaaaatttaaaaatatgactttaggaaattatttgtgcattttttgccgatcaaactggacaatcttggtatccttcgaaggctcattgttaggagaaactttttctttgcaaaagttaagcaatttgaataaagaaaagtacgccaaaatgagatgtatatatttttctatttccgccagatttcctaaatcctgcggattttcatccattaatccgttttttagatcatttttactcattttggtgatggtttcaacaaaagttcgggagtgttcctcgttgctcatgcgatttccgactaaaaat

SEQ ID NO: 39452 - DNA, 1585 bp, Heterodera glycines
atttgaaaattaaaatgcccttttgggtatggtatttagtggaccatcccagtaggggtaaaaacaacatttttactaaaatttttgagagaaagagatgggttaattagcccacaaccaaaatcagtgctttattgttatggtcaatttaatgatagtattcctgtactacaaaaaataggagtgcatgtgcacaaaggacctcctagggacgaattgctgacctctctaaagaaccctctcttattaattctagatgaccttttaacaataattgatgagaaaagcctatctgaattattcattaaaaaagctcatcatcttaatatgggtgtgattttcataacccaaaatttatttgaaaaaaagatgaaggtagcccgaattaattcacaatatattgttttaatgtctgctccgaatgctgcacttcaaatacgtaatttgggcgttcaactgtttcctaaaaatcttacatttttcctaagtgcctataaagatgcaaccgcatcaccgtatggatatttattcttggatttacacccagcttcgagccctttgctgagaatacggacaaaaatatttaaagaagatgaagaaaaagcattgtatattcaaaatgattagtttacctaaaaatgttattcaaaacttggattttttaaagaaattgacaaaaacaaaatcttttaaaaagagacaacaaatatttaaagaggctactagtgagcaaattggattattaattgaaattagttataatatattaaaggggtacttcccgctcacgaagagacaaaaatatagacttttaccatacgcaaattttgtaagaaaattagcaagagttagaactgagatgggtgcaaagaaagtttttcaacaaaacggtggtggttttttcgttaatttgactcctttattattaccagtacttattgccgcgctaaaatatggagaataaatttattctcgttccctcagacttgtacaaaaatttactaaagccagacgccggggaaattaatgttgataatgctaaaaataaattgtcatcacttttgaagcagcgaaaattggacgctacttcaaaaaatttactttacaaccaggaattgaggcgtttcttgaaactaaggaaggaagttgaagataaaccggtaaaggttgagctttcagatggctcattaatggtgtttaaaccaaaacagcgtgaaagagatagcaaaattcctactcaaattgttaatgacgaaggattggatgaaacaggctctattccaacacttgaagacccttacactactgctgaagagagtgatgctgagtcaacaacatcaacaccaaagacgagaccactgataagaccaatgcgtgtaggaacaactaaatttcgtcaaaagcaaaagtcttttgtagtcaagaaaaaaggaaaaattatgtcaattataaataatgatcctgagaaaattggggttggctctagaggacatatactgagagctgatggacggcatatttaaaagtaatgtaatcaagcatagagcgatattgagacggcacccgagatgctcatcacccatag

SEQ ID NO: 39453 - DNA, 790 bp, Heterodera glycines
gatcgatccgccccgtgcctccgtcccttcggcagttgctatagctcgttctgcagggattaacgttgtgatggtcacgggtgagctgccaatttagccaattgatcaaagcattttcaatgcttttaaggcgatcatccgatcactgcgcaagcgatcgcccgggcagttggcattttgacggacgaaacggaaaccgtggaggacattgccatccggaaacaatgcgacatttcgcaggtcgacccaaagtacgccgtccgaattcgcttttccaaatgccgcgcctccattcacagagaagcgagtgccatcgttgtgcacggcagcgaactgcgcgagatgagcgagcagcagctgatcgacgtgatcagaaatcaccgcgaaattgtattcgccagaacatcgccccagcagaagttggccattgtccaagcatttcaacagttgggacacattgtggcggtgagcaaatggccaaaagggcgactaaagaaagacaaatggaaagtaattgtgaaggtcacgggggacggagtgaatgactcaccggcactgaaaaaggcggacattggcatagcaatgggtgagcgaaggggggggggggcaaaagcggacaaagggacgcgacgggaaaaaatgaagcaattcagggataagcgggtcggacgtgagcaaacaggtgccactttgatgcattaattgcctaatgatttgctcttttttggtgactgacatggtgctgctggatgacaatttcgcgtaattcccctcaaaactttttctcgcg

SEQ ID NO: 39454 - DNA, 883 bp, Heterodera glycines
  unsure (1)..(883): unsure at all n locations
accaaaagcncggagacagcagacctacctcactcggctgttctgcttgtcggacgcgatggcagcagccaccttctcaaacgcctccttggccgacttgacgctgccctggcgaaacgtcgcttggaccggctcaatgacgacggcaccaccggccggtgagtgatcctgcactgcttgagcatgttgttgcagttgctgttggtgtttctgttgtgccgatgtcgtcgtcgtcgccgccgctgctgctttttcctttttgccgccaccgccgtttgttgtcggccgtgccgccgagtcggccgcttcacgctggaagtcctcaaagatgtggtccaagtagtcgatggcctccttgaacttgttccggtgctgactgtgccggtaccgggcctggtcaatcatctggtccagccgacgggtggccgagtccaactgagtgccgctgaaaaaaaacaattttttgaaaaatatgttgtgccattttccaccactcatttgataagagaggcacaaaaatgtttcaaaaaaaattattagaaaaggaaatttctctaagaaaatttcaagaaaaacttagtaattaattcttcatataattcctaaaaatgatttcgggtgggggaatgtaatgtacaaagaaatggacggtgctaaattcctctgatcaatgactgatcaaaattgtaaaaaaaagaaccaatttctatttgcaaataaattagaggagaaaaatatggcaaactttgnggcggacaaactgacccaaaaacagtaggagtttggcactttgtgtgcccatcaacggcagacattttgtgtgaacaaaaatttgtgcaattagcaaagagcaaaatcgggaaccacttactgatcggtttta

SEQ ID NO: 39455 - DNA, 711 bp, Heterodera glycines
  unsure (1)..(711): unsure at all n locations
aacaaaaagcgattaaaattatatcttcagtcatttgattcgtttgggattttggggctcagtcaaagggcccatggatttaaagtagggttcgagccccgtggggcgggggtggcttttcacgggggcgggggatgcgggggtcagagtcacgggggcgggggcgggggcacgataattccgctcccgtggggacgggggcgggggtttgctttgaattaggtccaaaaatctcacaaaaaaatattttctaagaatgatttctttggctccacattcctttatttgttgatcgcctcgatactatttcttttgacataaattgcacagattccgactaaaaagtaaccaaaatttagggatttttgggtaattttttttaagaaaaaaaaaatttttttttttggggggggggcgtgccgataggggcgaattttaaatttatttctaacagatattcaccaaaaaaattaagactttttcgataaattttcgttttttaactatattaaattatcgtgatttactcaaaattggaactcagattttttaaatttttttttcttgcggcacatttaaagtgcgaggnggagagttcccggcggtgccgataggcgccgccgggaaaattttttgaaaatttgaatgcaatttgttaacaaattttgtacaaaaaatgagcaaaaatcgcgagcttgggataatttttaa

SEQ ID NO: 39456 - DNA, 947 bp, Heterodera glycines
aaacttttcaagcccaatcccaaaaatttaaattttttttttttttttcacattttaaattttttggcttaaaattgccaaaaaaaaaccaaaaggcaaggaaaatttttgaaaaaaattatgtatttgaaaaaccttattattttatttgcaaaaaaatcgtatttttttaacccaaaacttttcatcattttgattgtcttgcgggttcgattccttaagagttcggtcataattttgcaacaattttttttgggtgttgggtccacttctatgtaattttcttaattaattcatttttcaaaactttttgtcgacgatccttttttttaacagaccgccaaaattttaggggtttaaataaattattttaaaaaaaagttttactggaaaaattattatattttttatgatttttaccgccagcgactgaccactttttgcataaattttgaaatttgagttgtttgtttaaatgtatgtcgttcgattagcacatttgagaaaattagctttttatcacacagccgaagaaaatttttgaatttttaatgaaatttgtagaaattttttagaattttcttaaatcttatttgataaaagaatcggttaagattctctgttgtagaagcttttgatcatactctcccccctccctcttaatcacctcgtcatcttccacattccgagagcattctcgccgaccctctggccagcttctctgatcatcttatcccctccaacctcggcatctcttatcattctcgtcaccggcatttgatcaatcaatcccccctccggcttctctgatcatcttaacccctcctccctcggcatctcttatcattctcatcccctcctcccccggcctttcatcaatcaatcccccctcaagcttctctgatcatcttaacccctcctccctcggcatctcttatcattctcgt

SEQ ID NO: 39457 - DNA, 658 bp, Heterodera glycines
ttgttttttttttgtttgaaaaaattgtgtgtccacccattttgaccctttgtggatgggggcgtgcggtctaacccaccccccccccctatcaaagaaatttttttaacgaagcggggggtggggggggactgggtataaaaatgcatcagccattattgatttattttttttagaaaaatttctaaattttttgcctttcccaacagcaggtggttcggctggtgcatggagtcagcaaatcatgtccacagcaccgaacgacagcatagaggaggaagaggaggacggctcggacagtgccgccgccaccaccgcaacaccggcgagtgttggctcgtcatcgttgtcgtcgccgacagccggcggcgccgccgccggtgtctcctccaatttgttcgccagcagcagcataaccacggcggcagcggcggtggccaacagtgagagcaatgacggtggtggtgttgcatcatcggaggagcataacaataacaacaacggtaggtggaagtgggtcaggcaaagtaggggaagcacgtcaccccccccccccccctccttcccctggaaattttttaacaaaaaaaacaaatatttaagaatactaaacattttgtttgtttgttttttttaattttcccgggggagggtattt

SEQ ID NO: 39458 - DNA, 1297 bp, Heterodera glycines
  unsure (1)..(1297): unsure at all n locations
ttttgtttaagacaaccccgtttataagatttggacttctaagataaattttttctatgtaaagatggagcgcattttttttgggaaaactcatttggaattttttctttaaattttcggggggggggggacgcagtgggaaatgaaatgaatcaaaaaacaagcgaagatatttttaatcgcttttggcaaattcagagggacagaagggcccggcggatgccaacaggcgccgccggcgactaaaaaatcgttatgaaaaaccgggggaaatcttcaaaaaaaacttagattttttgaaaatatgaacaaatcttgtttttgttgttagaaatcacataattggcagacatgttaaattatgaattgtttgatattttatgtttttttaatgatatgtatttctttcattgtctattggataaaatttaaatgtgtaaaaagaaagggaaaagtaaagttaaataatgaaatcgcataaaatcgaaaaatgccaatttttcatacatacttttctgcaaaattgaatgtgcatattttggatcttccaaaactcacggcttctatttgctctcacctattttttaagttaaaagcaattgttacgccgcaaaactacaaaaattttccgaagtttcgcttctcgaagacactaagattttgacaaaaaaaaaaaataatcagcgaccccgaaaaccctcgggaaacatgttttcatgacttttgaaaacaaaacaaaatttttgaaaaatgggggggggcagccctactatgacccccacccacccctttcatgtatgaacatactattggcgtctatatctcaactgcacctaacaaaaataaacaaaaaaggaaaattcgaacgaacaatggcaaaaaaaaaaacaatgagataaataaaatatgtgtatgcatcattatcatattttgtccatcaatcagccgaactctgatcagcaatattgtgtgtgaggttgatcgatcagaaactccgctccaccatggttttgcacaaccgttccaactggtcacacacctggttcatcgcctgggcacgctgcgcattcagcagctcaccgccgcccgcctcggcaccaacctgggcacaaaaaggcactcaattccttttggagaatttttttcaataaaattcgtttttttttaatttttgattccgtcgtttcctgtgcataaaatgcttttctgacaaatttttttttgctttttccccccaatttttcgggggcaaaaaggtgtgcaaaaccttttaattttttccaaatnttttcggggg

SEQ ID NO: 39459 - DNA, 1028 bp, Heterodera glycines
  unsure (1)..(1028): unsure at all n locations
ataacgttacaaagtctaatttagatgagtgtttttatcatttttaaaaccctgttcttggtcgctttcatggcacttttcttcaccggataccctgctgatgttgctggtgctgttagttcatcaggcaacagacgaaatgttaaatacattgattatgggccgcttattcgacaatcccggaaaaaccaaaaccgtgtaaatttttattacataccaaacatagtaagagatcagtaaaaaaaagcttgtcaagctctattagcagcaaaatttcaatttcgaatttcaatgggacaaaaaatttatggaccaaaactgaaaaagataaatttagctttagctgcagcatatcagaatttgattttgctttaattacctgacttttttagaataaaaactcgagaccgataaagacacggccgtcgccgagacgaggcgattgatgaccagcacagaagaaagaataatcgagagaaagctgatgaaaaattgagaaactaaggatgattaaaactgagtcgaaagtatggaaaatggatgaatgcattgtttttttgggaataaatcatattaaagtgttcccattcgtccttgggtgccaaggacgtccttggatttggcttagtgtcttggaaaatgaagaagaccttttttccaagaatgcccttggaaatcggcattagaaaaaaatattcaaaattttccaaaaattcataaatccgaaaaaaaattccctcggcgtcattctctttttcttanaaaaaattggcccaaaatggcaaaatttggtgaatctgttaacaaatctcattataaatcccaaaaaattttccggcggcgcttatcggtgccgccggacccctttggtccccaaagttaaaaacaacgccgccgaaaaagtggttgaaaaatgtaagaaaaaatgggaattgacagcggaacaaaaaaataatgatgacaaaatcacacaaaagattaatttatatttgacggaagagggcatttaaaaaaactgggtcccaaaa

SEQ ID NO: 39460 - DNA, 593 bp, Heterodera glycines
ttttaaaccttcttgtacctcttctaatcacttttgtacctcttctaatcacttttgtatcttttatcacttttgtacctcttctaatcactcttctaatcgctgttgtacctcaaaatttaaaaaacgggcgcgaagcgcccgtatgagttcaacgaatttaaaaaacgggcgcgaagcgcccgtccaaggccaacaaaaattgaaaaaccgggcgaagcgctcgactgaggccgtgaagcggcctaacaagctaaaaaacaggcgcgaagcgcccgtatgagttcaacggatttaaaaaacgggcgcgaagcgcccgttcaaggccaacaaaaattgaaaaaccggcgcgaagcgcccgactgaggccgcgaagcggcctaacaagctaaaaaacgggcgcgaagctcccgtctgaggccgcgaagcggccttaatagcccaacaaatttataaacgggcgcgaagcgcccgtctgaggtctcgaagctgcgttaatagcccaacaaatttagaaacgggcgcgaagcgcccgtataagcccaacaaaattaaaaaaacgggcgcgaagcgcccgttcgaggccgcgaagc

SEQ ID NO: 39461 - DNA, 852 bp, Heterodera glycines
  unsure (1)..(852): unsure at all n locations
tttgtttttttcttgtatttataaatttccctaaactttaagctttcgaatgataccaagaatgtctggattaaccaagtaaaaaaaaagttatgatctaaaaaagtgagggtggtcactcattggacgcgtaaacattgattggacgcgtaaactggaatagagccgtgattttaaccattatgttggttttttaaatatcgcctataatgattgtagtttaatcggcatacccgtcctggaagccgaccttggacgatacgagccctgaacaaaactattaccgaaaaaagttatggacaaagaaacggatgattggacgtctaaagtgcactaaaccctatttcggtttatttaaaaattttgggcaaaacgccaaatatgataaaattagtttttttttcaaaattttttttgattttaggttctaaaaataaaaacttagaaagtaggtgctaataactagggctgccaaaaatatgcacgaaaagtggccaaaatatgcacaaaaatcgcaaaatatgcaccaaatatgcacaaaaaaacttgaaaattaggggtgcaaatttaataaaaagaaattttttttcactagtgcatttgccaatgagctacatttcatttataaaattctctttagcaaatatttgacattttttaaatcaaaaattttgtaatgaaaaaaaaatttggggaaacaattttcgaaaaattttccaattcttagtggtgtatttttnaaaacatttttggtcgattcttaggggtgtattttttctgtatttttaggactatttttanggggtgtatttttccgttatatttgcatttttgttaacaattttccaaaaa

SEQ ID NO: 39462 - DNA, 1026 bp, Heterodera glycines
  unsure (1)..(1026): unsure at all n locations
tgcatcggtgatcacggcaaggcttaaattagaaaaaaagtgtggattaaagagcaattaggactccaataaatctccaaattgggttaatacattttgtccaaaagtggccaattnacggaatggggacaagaaaatttctctcctccattacgttaacagaaaggtaattaaggcatggccgaatgagtcaccaaaaggggtttgtaaatttacagtttcataaaaaaaattatgcgacgaatttgaataaaaaattattccattgagcagaataatgaatttgatgaaatttgctacgctgcgataaactaattgatatgctgattaatgaattactttaattggttgtccctttttggcacttttttacctgtgcgccaaatatccgccgaccaattcagtaagcacaaaaagaagggtcaacacggaaacaatatagagcacacgttcggcacgactaaaaaaaaagtaaaacggcattattgggaattttttgaatgcaattcttacagaatttacttttaatttaaaattaaatatttttttctcacaaaaaaatcaaaatgaattttttgctaaaaaatctcaaaagaatgtttaaaaatttgattgtaaaataatcaaaccaaccgcgagttgtggtcatcgatgccaatggacagggccgaacttttctcgagattgcactgctgatcccacaccttttcaggcttttccgtcttttttgttagcaacatttttatgcaataaataatttaaggaataaaaacgaaaataattgctatagcaaaaacaaatcagagaaaatatcaatcagtttaataaaattaaaataaaataagaaggataaattaaaattaaaaaagaaacatttgaattcaaaaggtttaccaaagtttgacattttatctgtgttttttacataatgccagtaaatttatcattttttgtgttgtgccatcacttttgcatttttcacgtaaagggtaaatttttatctcactgaaggagaagtaatgaata

SEQ ID NO: 39463 - DNA, 138 bp, Heterodera glycines
aatcaacgaatttattattttacaaaattttaatattttgttttctttgtttagacacttttattttgcttctgtgctattccgatcattgttggagaaatgtgcacacaaagaacgcatcacatgtatttgccatat

SEQ ID NO: 39464 - DNA, 967 bp, Heterodera glycines
gatatttgaaatgctaacgaaaaaaattcttgccgaaaaaatggctatctcttttttctcttggggatttgaccgcaaacttggtaccaacatttgccttctctagtctggctctaccaaacactcacacgatatttgaaatgctaacgaaaaaaattcttgccgaaaaaatggctatctcttttttctcttggggatttgaccgcaaacttggtaccaacattttccttctctagtctggctctaccaaacactcacacgatatttgaaatgctaacgaaaaaaattcttgcccaaaaaatggctatctcttttttctcctggggatttgaccgcaaacttggtaccaacatttgccttctctagtctggctctaccaaacactcacacgatatttgaaatgctaacgaaaaaaattcttgccgaaaaaatggctatctcttttttctcctggggatttgaccgcaaacttggtaccaacatttgccttctctagtctggctctaccaaacactcacacgatatttgaaatgctaacgaaaaaaattcttgcccaaaaaatggctatctcttttttctcttggggatttgaccgcaaacttggtaccaacatttgccttctctagtctggctctaccaaacactcacacgatatttgaaatgctaacgaaaaaaattcttgccgaaaaaatggctatctcttttttctcttggggatttgaccgcaaacttggtaccaacattctccttctctagtctggctctaccaaacactcacacgatatttgaaatgctaacgaaaaaaattcttgccgaaaaaatggctatctcttttttctcttggggatttgaccgcaaacttggtaccaacattttccttctctagtctggctctaccaaacactcacacgatatttgaaatgctaacgaaaaaaaatcttgcccaaaaaatggctatctctttttt

SEQ ID NO: 39465 - DNA, 747 bp, Heterodera glycines
  unsure (1)..(747): unsure at all n locations
cataatgtactgtttgcatatggtaacaaagcaaatattaaatacgcactcaagtacccttntaaagggccaggacattgttatgtcgagtgcaaacaagagtccggcaataaaatcggaattgatgagccggctcaatatgccaagatgaacttccgtggtgcaacggaagcatatgccattgttcattcactgccatttgccaaactttcacatcaggttgtcaaacttaacatccatatgcctaatcaacaaccgattgtgtacagggcttttcagctggtgagcaaagctcaacaaatccagcaaggcgaactgccagagacgcaatgttctgcctattggaaacaatggcaaaatgaatggaagcatgatccgaagctcaaggacatgctttttgaaaaagtccctgagcattttatatgggcaaaggacaaatggaacaaaaggaaatataacctaacaaagagaccaccaatcggtcgaattgttcctgtacccccatcggacccggaaaggttcgcgctctattcacttatgcgtcactttcctggagacccagaccatcttaagatggttaatgggttgctttgtacctcattcactgaggctgcaataatgcatggtcttcttgaagacgacaaaatttgggacaaaactctggcggaggcagctctgtcgcgctggccagatcagatgagatggctctttgtgagcatcctggtctatggccagccgagtaatgcc

SEQ ID NO: 39466 - DNA, 1136 bp, Heterodera glycines
agttgtaaaaatggaggttttttgactcaaaatgagctttttgaaacttttaatctgggagccctgttttttgcatttttaatttgattcataatttttcagttgaataaatgcaattatttcaaacgtaatagtaatttttcataatttttaagaaataagaaaatataaaaaaaaaagtaattcccctccaagtagttgtttttcttctaatttttcaaaattattcatttttcggtgggaattcaatcaaaattttaacatttaaaatcataaaatattgtcatttttggactaaatcagttaacaaattgcacttaaattttaatgaatttttgttttgtgcgtttttgaaatgataaatattgtaccaaattgaatcaaaatttaaaaaaaaaccaaaaattagttaagaatagagtcaaaaaatgtttttaacgatttttaagcgaataggaaaattttttgaaaaaagtctcgagtctcgggttttttgggtctcggtctcggggttttcggtctcggggtcgagtctcggtctcgagtctcggggtcgaatctcggtctcgagtctcgggaaatttttggtctcgaacagcactagtagccagacccttggcacttacttagaatccatgtgcagaaaaatgcaattgatgggatggaggaatggggggattcggggatggcaccactcggggaaggggaacttatccccgaaaaatgccaagcaataataaacacctcacaaatcgttacagtaccttgtcccactgactgcagttgtggctcaacaactagagtatttagcccgggaacaaacagtagcggagcagagagcagcccaagcgtaacacggccggcatttgccaaccttttggtagtgcggttcatcatgtcacactcaatctttaacaaaattaaaatctcaacttttcggttgttaaatttgtttttttaaatttaaattacacggtagaattttttggcacgcagatacgaacaatggcacacacttggcttcccctcatattgccaatttccgtagatgtccgggtcatgaccacctttcttgtcctttcccattgcaaaaaattaccaaaaaatcaaaaaaaaaaaatctaaaaataggtaaa

SEQ ID NO: 39467 - DNA, 631 bp, Heterodera glycines
aaaatctcaaaatatggaaataaatggcaaaaatgtcaaaatatggacataaatttttcaaaattgagtgcaaaatttcttcaaatttattggttgaaattgcatatgagatacatttccaaattttttgactcggtaaggcgctttgacaaagacggctttcgtcttgcaattagtcggtcaacattcggaaattggtctcgaattttttcggcaattacgtgcaatcattttaaaagaaaaaaaacataaaagccaaaatttattaatttttaagaaaatttaaatttattcaatattctcgagaaattttggcgaaaaaatgattttttgaaaaatttttcgggttttgggctcaaaagggctaatttagctgctgggggccgttctaatagaggtttttttgaaaaatgccaaaatatggacataaaatatggaccaaaatgccaaaatatggaaaaatatggaaatatggacataaatcgcgaaatatggaaaaatatggaaaatatggatatagaaatccttcctagaagcttcaaaccaagctaaaaacatgtttttcgtgcgtttcaggcctcccacagtccaggaaaaaaatatggatttccatataattacacgccctact

SEQ ID NO: 39468 - DNA, 1064 bp, Heterodera glycines
  unsure (1)..(1064): unsure at all n locations
catttacgtgtagcaaatgtgcgggagtaacaaaaaattgcgaagtatgtaaaacaatgaaagaaatgctancatggtcagtagctgatggtataaacccgctggagaaatttattgattggatattagaatttaaattttctaatactgttgcttttggtcattacgcaggttttgatagtaacatggattttcttaattaagattatttaggaagatatgattcacatttcgtgcttaacgaattaacaagaagagggtataagccgaaaattatgataactgacttaaaaatttatcaaataaaattaaataaactcgtttttcgtgatttctggctacttagccaaaacagactaagtgttttaccaaaaacattaggacttaatacgcctgcaaaactttttttcccacataaatacaataagccagaaaatttcggtaaggaagaggattaatattgaatgcaaaaatttttagggtgcaaattaaaccacttgccatgtattgacgactatggtcctaacaatatgaaagaggatgagtatgaccatttcatgaaatggtatgaacataatagagatactaaatttgagctcggtaaaagaaactaaaaagtattgaataaaacactttttaaggtgagcaattaaaaaaatattgtgaaaatgatgtacagatattgcttgaagctatattgaaatttcgagaattgtttttaaatataacacacgatgttcgtacgccttatggatatgatgtcattaaagatggcatcacgattgccggaattgttatgaaaatatttagaggaaaatttttattggaaaaacatatcccaatattgccggaaaaagggtaaaaattatatattaaattaggtttacatgactatttagttttgaaacagctgataatcagagtgtaattgccataaaatatttcaattggatttcattccgcgataatgttaaagtacgtcatgcatgtaacggaggagaggtgtcgtttggaggtttgaaggttgactgtatcataggtgcgcaaaaaaaaattattgaatt

SEQ ID NO: 39469 - DNA, 1016 bp, Heterodera glycines
aaattaaaaatccaagaaaaaataacattttatgtttcaattacggcctcatttcataatttcgagaaattccgatcaaaaatgcaatgatgaattgatggttaaaacgctgatgaaatgtaaatttttaaataaattaaataataaatttaattaaagttaactcatttttcatcgcaaatttcattcaaaatttctgaaattttcccggcggcgcctatcggcaccgccggataggctttacttaataatcctgtagaaattgagtcaaaaactgcgtcatttggtcaattttagacaaaatctgttaacaaatagcattaaatttcataaaatttttatgcatccaatcaaagttttatgcgtccaatcattttttatgcatccaataacatttaccatgtgaaaattattatcccttgccagtttttgtaaaaaaaatctcttttacactacacgggataattgcgtctcttttcttccaaaatatgctgatatattttggaatttccgtgaaatcgtctgaacatatactgatacaaatatgtcggcaacatatcctcatttgagccacgcaaatggcgaagagatgtcttcagagacccccacgtagcctcaatgccttgggtatgcacttacttgtctgtcatgagtagggtcgcaacttttagtgaaaaaacttttttttgctcaattgttttgaagaaaggagctcaaaaaacgcatttctgcgttaaaattttttcatttggacgtcacttttcgtcactagaaatcactattttggcgttttgtcactattttttcactatttcgacatttttttgaaaattctttaacaaaaatgcaataaaacgaaaaaatacacccctaagaaacgacctaaaaattttttcaaaaatacacccctacgaatcaacaaaaaaaatttcaaaaagcactcctaagaaatgaaaaaaattttcctcaaaaagggattttcctggggaaaattttaaatttaaaaaatatttttt

SEQ ID NO: 39470 - DNA, 1152 bp, Heterodera glycines
tttttttggaaaaagcacgccgcaaaaaaaacatttttattgattttttaaatttgaatatatttcttcaaaatgctgatttttgaccccaaatgaagattttttgtcggccaaatgcagattttgaaagttttccgttgaaggccttgtttttacgctaataaaatattgttttaagtcgatttttcatgtttttattacgtttcattcgcgctactatcagttttagaaaaaatcttatttttggggtccgagtcttagttttagcctcatctgtccttattttgaaaaaaaaaacttgcgaaccctgcttgtattttattttccttttcgcaacgtccctgcttcctctcccacttctcccatctcccctcattctttctttttgtctctccttattttattccgtcttaatctcttccttcacctctcctcccttctctcctctcttcctctctctcatttcctattttttttctctctctctctctcttgctttctttttccagtctgggcctattcagtttggcgcactttgacgctttataacttctcttgcaaacaaataaatttttaatttatatataattcgatagcctaagtgacctctattaccctgtaaataatataggaaacttagggctatgaatgattttaagaattaaaaatttagacgcttcaaagagaagttataaagcgtcaaaatgcggtcctattgaaacggcccatattgaaatgacccgcaccccaaattctgtcctttaagttccatgcccccaattaaaaaatatatagataagatgaaagtacttgcttatatgatttttgcattgaattttgcaattagtttgcaaatgattccttcaacgcgtcgttcaaagccgggctctttattacatagcgaacaatctgcttttgtgaaatacaaacaaagttctattaataaaggtaaaaaaggcttttttcatgaattatattaatttttagtttcttgttaagcagctaatgtgtttaatccaaatttagtaaaatttatcaatttttgtaccttttgacatgttttggcattttgtccatcataattaaaccatttaatctaaattgattcaatatataaatactctctaatcttcctttgaaataaatatcaaa

SEQ ID NO: 39471 - DNA, 768 bp, Heterodera glycines
  unsure (1)..(768): unsure at all n locations
ccgccgctgctgttgctgatggaaacccgccaaaaacaatttatgtaaaaattatattaaaaaaattagaggccggtaaattctattttttattcggttttttgttgttttttccatttggctttaacccaaaaaaataggattaaaatattttcaattttttcggctcatttaccgactcaattgaccaaatctcccttattcagtctctaataaaaaatttgcaaattttttaaaattttattttgccaaattgcagagacttgatgatccaacgtactcatttcataaatatattgaaataaaaaagaaaaaaattgtcgagaacatcaaacagaagaaagaggtcggtcataaaaatttggaaataaattataaaaaaattaatttttaaatttagacatttgcattgcacaaacgccgcccaataccgttagaaggacgtatcgtaatcgtagtggatgacggtatagcgaccgggctctcggcggaagcggcacttgtacaactgcgagacaaaaaagctgctgttgtgatgttggcatcaccggtctgcccactgagtactgtcggtaagaatcttgtgacaattttgcgctacagtaaattcaaataccgtatttccttanatcgagcccatacgtatctagaanagtctcaagaaaaagagtanatttcttttttanaaggctggcgggatacaaaaaaggtgagcatctataagtcattttggatgtccattttccatacccattnttgaagcatcat

SEQ ID NO: 39472 - DNA, 899 bp, Heterodera glycines
aaaaatttttgtatcattgtacacagatgaaaatgttcaacatgtggcagaccaaaaagatcaccatttcgacgtacttttttcaaaaaacttttggggaacaggagaggggcccgtagtaaaataatacggtttactcgtagtaaaagagcagcaaccccgaattgggggtaaccttccccggataacctaactttttacaatcagcagataacggataaggttctgctgctgtcaaatttttttgacaaatcctttgactttctttcattctttcatttcaccaaaatagggccaaatttcgtccaccattaatttttatccaaattttcttcgtcgaaccaaattgattttccttggattgctatgtcgatattcaacaggcaacaaggcgcataaattgctatagttgttgaggaacattttgacgagttctccccagacaacaaaaatgttgatgccattctgtgaccgtgcgcatttaggaatatttgaaaatgttcaaaattctcgccattggggtgccaaattttttctttgattcattcgctacgaatttacaccgcaactcatggtaacgctaccagggtaaggcgatctagggaaccttaccagagtagccttacctcgttctttacaggcacaggggttccaataggcgctgagagcaaaattgacgtgatttttaatagatttccttaaaaattgtcattattggatcttgaagatatgaaatttaggtttcttcatttgcacccaaaaattttacatctacaaaccctttatttcctcccattttatatatatcttttttatttcgtaaaaaaatttttacgttaattcataagaagaggattattatctttttattgaatattctccaatcaatttggactcta

SEQ ID NO: 39473 - DNA, 986 bp, Heterodera glycines
atacagtttgctatggcttcgcatcacccgcttcaacgggtgctcagtgtaaatatcgactggccattcaaattctgcctttccagccttatggaaagatattatggaacttttggttccatctcagttgtcaacgccgcgactgcatcgttattatatcagtcgatagaattttcgaatcgcttttaaatcgtctcttttgcgtcccttaatcttcactctgagccgagttactgcggtctaaacacgtttttggtagaattgcggccagaatttaaaaatacagtttgctatggcttcgcatcacccgcttcaacgggtgctcagtgtaaatatcgactggccattcaaattctgcctttccagccttatggaaagatattatggaacttttggttccatctcagttgtaaacgccgcgactgcatcgttattatatcagtcgatagaattttcgaatcgcttttaaatcgtctcttttgcgtcccttaatcttcactctgagccgagttactgcggtctaaacacgtttttggtagaattgcggccagaatttaaaaatacagtttgctatggcttcgcatcacccgcttcaacgggtgctcagtgtaaatatcgactggccattcaaattctgcctttccagccttatggaaagatattatggaacttttggttccatctcagttgtcaacgccgcgactgcatcgttattatatcagtcgatagaattttcgaatcgcttttaaatcgtctcttttgcgtcccttaatcttcactctgagccgagttactgcggtctaaacacgtttttggtagaattgcggccagaatttaaaaatacagtttgctatggcttcgcatcacccgcttcaacgggtgctcagtgtaaatatcgactgggcattcaaattctgcctttcagccttatggaaagatattatggaacttttggttccatctcagttgtcaacgcgcgactgcat

SEQ ID NO: 39474 - DNA, 374 bp, Heterodera glycines
aactgatgacaagctaatgtgataaaacaggttaattcttttcctttcagtatccctgcaaagtttggggcgcttctgataagtttctgaaaaaaaagttaagcctaaactttttggcctgtttaaaaaggaattaaaaatttttaaaatatttattcatctccttttttgataatataagagtcagagtgccttattcaacttgtaaataaattttggatcgcgtttcagagcagtttctgaaaaaaaatttatgaattaattttgcaaaaataaataaataatgaaccctcctccttaataattttcctgcgcccatggtactcactcggccgcttcgaggcctcgaggggggccttcggccaccccccccc

SEQ ID NO: 39475 - DNA, 968 bp, Heterodera glycines
attttggctaacgagaatttggcggcggactttaactacgccgaagttgttgaagcgacgcaaaagatgagcagttctgagctgaaggaggtcatccgtttcgcgttccttctgcgctaccagcaagtcgtccaaactcagatcagtgttcttcagcagtgagtccatggcagaacaaaacatttgcaattccaatgttttcattgccttaaggtcgtcttcggtggccaacgagggaagcgaaaatgaagcggagaaaatccaaatcaaattgtcgcacaacgacatcatccgagcgttccacgacttgaagaatgtatcgatggcgccattttccgagtcagtggtgacggaagaagtcgtcgatgtggattgatgcgttgacaatgagttctgctgataatgtgatcatatgcgttacaatataatcgcctcctcccaattcgtttaatgtatgtataaagtatgatatgatatgtagtacacaacccattgttcttttgtgttttgaataaagaaattgtcgagtcggaatttttggtttttgactaatacatatttccgggtcgttttttatgcaatgataatatccaatttattaggccataactagggcagggatttttaggtgctaaaaatcccaaaataggtgctaaaaacccccaaaaaggccaaaataggtgttaaaaattgaaaaatccagtgtctttatgtacaaaaattccaaaagcgactaattttttatcaatttcggccacacaattgcaattggtcaagaaaataaataataaatattgtggacgaatttttgggaaaattttttgtttcttaggggaatattttctgaaattttggtcaatctttagtgggtatatttaaaaacaatttttttggacaggttcttagggggtgtgtttttcaattttattgcatttttgctatgaaatttttggaaaaaggccaaaata

SEQ ID NO: 39476 - DNA, 1519 bp, Heterodera glycines
atagaaaatttaaattcataggtactactgctaaatcaacgcagagacgcctttccttgacctttttaggcccctgcaaaatctggtgcgcttctgatcactactcgaaaaatgagtgattgaattttcactaaaaagttaagcctaaactttttggcctgtttaaaaaggaattaaaaatttttaaaaattttattcatctccctttttgatagaaaaagcatcagagtgcctaaactaacatgtaaataaaatttggtgcgtttcagaaccctttctgaaaaaaatatttatgaattaattatgcaaaaaacaaataaataatgaactctcttccttaataattttcctgcaccgaaggtactcactcggccgcttcgcggcctcgtggtgggccttcccccccgcccttcagagcacgacaaatatttcaacaaaaattttgaaaaattgactagagcaatcgaacgctaacggacgacctaatggaaaaaaatccccgaaggagagaatttaattaaatccattccttcgggggaccgtgccgggtgccgcggggtaagcagtgctggttcgtttcatcacggcaccgaaccttttggctagtcagcaatcgttgcttaacttgccagatcggacgggtgcgcatgattccactgttccaagcaccccaccaaaagcaaaacgatataaccaaaatataaggaaaaatttttaaaaaaatttttctccatctccctttttgatagaaaaagcatcagagtgcctaaactaacatgtaaataaaatttggtgcgctttagagcactttctgaaaaatatttatgaaacaaaaaaatcgattttttcaagtgtccgtttggggtactcaaacatttatggggagcaaaaatccaacgcagaattaaagtacaggctatagggaagctactcccgaaggattcggtctccccataaatctgggcgcatcggttcggggggactgccccgaaaacaaaaaaatcgattttttcaagtgtccgtttggggtactcaaacaattatggggagcaaaaatccaacgcagaattaaagtacaggctatagggaagctattcccgaaggattcggtctccccataaatctgggcgcatcggttcggggggactgccccgaaaacaaaaaaatcgattttttcaagtgtccgtttggggtactcaaacaattatggggagcaaaaatccaacgcagaattaaagtacaggctatagggaagctattcccgaaggattcggtctccccataaatctgggcgcatcggttcggggggactgccccgaaaacaaaaataaatcgattttttcaagtgtccgtgtggggcactcacacaattatggggagcaaaaatccaacgcagaaatagagtacaggctatagggaagatattccggaaagattcggtctccccataaatctgggcgcatcggttcgggggggactgccccaaaaaaaaaaaaaaatcgatttttttcaagtgtcc

SEQ ID NO: 39477 - DNA, 1460 bp, Heterodera glycines
ggattacatatgtatttccttgttaaaaagagggaaactttgatactttagtggaatatatttaaagattcaattttaaaaatgcaatgcaaaaaagccaattttagtaaaatatttcctcatcaattaattattaatttagtctgcttaaaatgataaagttaatatgaatttttttattttggttccaaatattaaaaaaatgacgattttaataatattcaagaatcatttttgaaatgttttaccaacaaaattgaacaaacttggtatcattcgaaagctcttaatgaggagatgaggagaagctttttttaagcaaatgttaatcaatttgatgaattcgagaaaagatatggttttctagatttttttttgaataaatttcctatttaatccattttaatatagacctgacatgttttttctttacactctctctttattggttcatctctcgtttttttgaaacgttgtagtaagttagcatttagatgtagattaaaaaatgcaatggtttttgatcatagatcttaagggcatttgtttttatagttaagcgtatacagtaacccaccccaccgcatcaatcattcattcccctcctccacagtcgcattgtgttgtggcattgtcgcacactttgtggccaaataacacagacccattattaacaccgtcgctgctcaatgcagtggcctcattaatgaagaattgatgcggtggggtgggttactgtatacgcttaactataaaaacaaatgcccaaaagatctatgctcaaaaaccattgtattttttaatctacatctaaatgttaactaaacaagtttatataactgataaataaagattttattagcatgtttatctctctctgactcgaaatttttcgtctctctctctctctcttttctctctcaagttaattccaaactgtaatttaaattatcgcaaaatagcgcacacgttgcgagcggcgcggccgcgtcacgcctaccagatagtctatgcgggccgactggcagcccaggcatttggggcgcacatcgtgcccctcgatctgaaaatatgaaccaaattaaatttaattaaaaaaaaagttgtgcacccaaagcctttgactgtcctcatccccccgcacgagtcctgtccacgggtcgatgctgtcttcgacctgccgcgcggcctgatcgcgcgccgcatccgcatatctcgcccaccagccgttgtcgcagcatgtgtcacagattgtgacacagccgcagttgttgccgcggactgtcactgcacagtccactccatgctcgccatgccagaaggaagcactgatcggagaaatttaattctccgatcagtgcccccggcgcatcacccgaagggcttggcgtccgttgcggcactggccgctcaaagtgcgtgcgggggggttcccatccctgcattggttgatgttgttg

SEQ ID NO: 39478 - DNA, 1043 bp, Heterodera glycines
  unsure (1)..(1043): unsure at all n locations
aaatttcaaaacggcagacaccagatgcatttcaacaattcaacaatataatataaatttagcaaaaatttttgttcnttcctctttgaaatgttctaaattttgcttgtaaatattcagataacaagttttttttactgaaaattttttacacactacaggatgaaacgcaataaataatgtttgtagacaaaagaaattggcgaaaaaaattgcctcaacaatcagtggtgaaactgaaagaaaaaaacttccccaaaaaatcggagcttttccgacggcatcagctgcatttccaacagttcaacagtataaataaatattaggcaaatgaaaaatttttttccttcctctttagaaagtgtctaaaaatttttgttgttaatattcagaaaacgtgttttttttactgacaatttttttcaagagaaggatatgaacaatcacttataaggctcatgcttggagataaaggaatcggaaaaaaaaattatctcaacaatcagtcgtgaaacagttcaataattcggaagcagtgccatattgggaaaagatgcacaagtagagtaggctcgaaataaaggcaactgccgaagattaacaaaaattcaaatttattggccccgttctgctttgacaggccatatctcgccagggagtggcggtagaccctttgttgatacatttgaaaatgtagagcgcgtctagctcattcgaataacatcaaactggtttgtttttgtcacgaaacaacccgctgatggccacgtcgaagaaaagtcccaaaatttgacatccataaaactccattttttcataggccagcgtgtttaaagcaaacccgaaactgataggaaatttaaattgatcataatagaagtttaatttttatttgtcccatgcattttctgggaaatcttttcgcgaaaagttgaaaaatttcaaaacggcagacaacagatgcatttcaaacaattcaacaatataatataaaatttaggcaaaaatttttgttccttcctctttggaaatggtcttaaatt

SEQ ID NO: 39479 - DNA, 1680 bp, Heterodera glycines
  unsure (1)..(1680): unsure at all n locations
tttgacctttttgaaatatttttgatgagtcacncgttcggatcaaagcatatacaaaagcagcaattacnatcattaaaatgcatttcatgaacagtccaagccatttgctgcttttgctttggaaaattattcggtgttcgaatcggtcgtcgtttaattgcgccatcggagtgtattcagtgtttgaattggtcatttggagacagttggttggatttaaacgaactaaattttaattatcctttagtattaaaatgattttggtggattttctattttaaaatattatttccaaaattttttcagaattttgctaattttaagtatttaattaaataaaatgagcaattaatttaaaacacattatgtcttatattacactccatttttttgtttggaaaattatccaaatttaaatcttgcggagattaaaattgtgattacctttatgttctttcttcaaacaacgcaaaactatgtagtacatccgggttatccaccctccgaaaattttttaaattttttacaaggagaattttttagtgatgcgacatttgaagattggcactcgagcataatagggagtcgaaaatcgagaataaagaaatcttaatgaaattaattgaaatgtatttttttaaatcaaaaacatacatgaaaaaagggatgggggtcaaccgaaatttttggaggccggtggtgccgattaacgccgccggtaaaccgggaaaattctttgtggttttaaataaaattttaaaataagatcacttacaaataaaattaaataattaatttataaataataactccattaaaaacaattattctttgatgaaaaaagagaaattgttgaaaaatatataaatataaacattcacgaaaggaatggaatgaatttagagcaaaaattaaacaaataattgatatggattctgtgacgattgaaaaatgggcaaagaaaattggcagcaaagaaaatacttcaaaaagtaaacttttaaagactttggttttattatttaatttaaatatttttagggcggaatcattatacaattgctgaaaaaatggaaacattgaaaaaaataatttaaaaaaaaaatcccaccctcactgactgtgaaatgtcaaaaatattggatattccacgaagttctttacaccatatcaaaaataaatattattaacattgtcaaaatattatttaaaattagaaaatatttttaataccgtagatgaaccaaaaagggtactttacggttatctgtgtccagattttccaaaaaaattttttttgaaataaacttgttttagggttttcagggtcggggaaaccgattctggcatctgttttgacccaattcgaaccccgaacccggattcgaacaaaaaagtcaaaatccatttttcaaaaaaattcacattttttatacacaaaattgagtcgtggcctttttttggttatacgagtcgtcgtcgtggcattttttggtcatacgagtcatcgtcgtggcctttttttggttatacgagtcatcgtcgtggcattttttggtcatacgagtcatcgtcgtggcattttttggtcatacgagtcgtcgtcgtggcattttttagtcatacgagtcgtcgtcgtggcattttttggtcatacgagtcgtcgtcgtggcattt

SEQ ID NO: 39480 - DNA, 890 bp, Heterodera glycines
cactggaaaaaaatcgatttttttgttttcgggggcaggtcccccccgaaccgatgcgcccagatttatggggagaccgaatccttccggaatagcttccctatagcctgtactttaattctgcgttggatttttgctccccataattgtttgagtaccccaaacggacacttgaaaaaatcgatttttttgttttcggggcagtccccccgaaccgatgcgcccagatttatggggagaccgaatccttcgggaatagcttccctatagtctgtactttaattctgcgttggatttttgctccccataaatgtttgagtaccccaaacggacacttgaaaaaatcgatttttttgttttcggggcagtccccccgaaccgatgcgcccagatttatggggagaccgaatccttcgggaatagcttccctatagcctgtactttaattctgcgttggatttttgctccccataaatgtttgagtaccccaaacggacacttgaaaaaatcgatttttttgttttcggggcagtccccccgaaccgatgcgcccagatttatggggagaccgaatccttccggaatagcttccctatagcctgtactttaattctgcgttggatttttgctccccataattgtttgagtaccccaaacggacacttgaaaaaatcgatttttttgttttcggggcagtccccccgaaccgatgcgcccagatttatggggagaccgaatccttccggaatagcttccctatagcctgtactttaattctgcgttggatttttgctccccataattgtttgagtaccccaaacggacacttgaaaaaatcgatttttttgttttcggggcagtccccccgaaccgatgcgcccagatttatg

SEQ ID NO: 39481 - DNA, 1658 bp, Heterodera glycines
cagaattagagtacaggctatagggaagctactcccgatggattcggtctccccataaatctgggcgcatcggttcggggggactgccccgaaaacaaaaaaaatcgattttttcaagtgtccgtttggggtactcaaacaattatggggagcaaaaatccaacgcagaattaaagtacaggctatagggaagctactcccgaaggattcggtctccccataaatctgggcgcatcggttcggggggactgccccgaaaacaaaaaaatcgattttttcaagtgtccgtttggggtactcaaacaattatggggagcaaaaatccaacgcagaaaaaaaagttaagcctaaactttttggcctgtttaaaaaggaattaaaaatttttaaaaattgactagagcaatcgaacgctaacggacgacctaatggaaaaaaatccccgaaggagagaatttaattaaatccattccttcgggggaccgtgccgggtgccgcggggtaagcagtgctggttcgtttcatcacggcaccgaaccttttggctagtcagcaatcgttgcttaacttgccagatcggacgggtgtgcatgattccactgttccaagcaccccaccaaaagcaaaacgatataaccaaaatataaggaaaaatttttaaaaaattttttctccatcttcctttttgatactaaagcatcagagtgctaaaattaacttgtaaataaaatttggtgcgctttagagcactttctgaaaaaatatttatgaaataaaaaaatcgatttattcaagtgtccgtttggggtactcaaacaattatggggagggagcaaaaatccaacgcagaattaaagtacaggctatagggaagctattccggaaggattcggtctccccataaatctgggcgcatcggttcggggggactgccccgaaaacaaaaaaatcgattttttcaagtgtccgtttggggtactcaaacaattatggggagcaaaaatccaacgcagaattaaagtacaagctatagggaagctattcccgaaggattcggtctccccataaatctgggcgcatcggttcggggggactgccccgaaaacaaaaaaatcgattttttcaagtgtccgtttggggtactcaaacaattatggggagcaaaaatccaacgcagaattaaagtacaggctatagggaagctattccggaaggattcggtctccccataaatctgggcgcatcggttcagggggactgccccgaaaacccaaaaaaaaattttttggataaaaattatttaaatgaactgactagataatatttaaaataggttatttctcttcctttcagtatccctgcaaagtttggtgcgcttctgatcagtttctgaaaaaaaagttaagcctaaactttttggcctgtttaaaaaggaattaaaaatttttaaaaattttattcatctccctttttgatagaaaaagcatcagagtgcctaaactaacatgtaaataaaatttggtgcgtttcagaaccctttctgaaaaaatatttaagaattaattatgcaaaaaataaagaaataatgaactctcttccttaataattttcatgctctagaggtactcactcggccgcttcgcggcctcgtggtgggc

SEQ ID NO: 39482 - DNA, 1527 bp, Heterodera glycines
  unsure (1)..(1527): unsure at all n locations
aagaggtacaacagtgatcagaacattaacagggannaggagaggnacaacagngannaaaagaggnacaaaagnaaanagaagaggnacaacagngattttaagaggtacaacagtgattaggagaggtacaacagtgattaaaagaggtaaacagtgattagaagaggtacaacagtgattagaagagatacaactgtgattagaagtggtacaaaagtgatttgaagaggtacatcagtgattagtaaattcattaaattaaaatgaaaatattttttaacaaatttaattaatttattaactcaaaaaatattttaaatgaataaaaattgaaaaacattagaagaggtacaacagtgattaaaagaggtacagcattattagaaggggtacaaatctgattagaagaggtgcaacagtgattaaaagacgtacaaaagtcattaaaagagatacaactgtgatcagaagaggtacaacagtgattagaagaggtacaacaatgattaaaagaggtacaaaagtgatcagaagaggtacaacagtgataagtaaattcattaaattaaaatgaaaatattttttaacaaatttaattaaaaaaatacatgaaattctatcaattaaaaaaataattaattaaacttataaaatttatttataaaaaaaaattaaattaaatataattttttatttattaactcaacaaaatattttaaattaattaaaatcattgaaaataacgtaaaaatgcacaaaaaaataatgttacaccgtccggattcgaacctgcccccccctcaaaatgatgcctcagaatccccaatcacacagggattctgaggtcttgacgatgtcaaaagtaaaatctgatcacgtattcgtgatcagcggcccaaataacccctaaagacatatttttggaagatttttgtgagaaaaatttttccactcaaaaaccatgtgctcccccctttggtcccgaaccccaaaatcacttttatttttgtatctttttttaaaaatgtgataaaaatgtaaaataaaatttatattatagagaaaaaaattgtggatttttgtagtattttacttttctcaaatttcttttcagaaggcagttacgaatttttttctgaaaaatctaaaatttccagaatttctggaataacatttttcatattgatgttagaaaacctaaataaatcccataaaattctcctgatttttctctatttttaaagctttgttgtatgaaaattgacttaccctgaggttagttatgaattttcaaatattaggccaaaatcccgagggccaaaaaattgccaaaaaataaagaatttttaaaaaattcccaaaattctgaaacttaaaatagacatcatattcgtactcagcaccttattttaccccagaaaaatatttttgaccccaattttcaacccaaaaaaaattttcgaaaatttctagggggcctagctcgaaaatttttgaaaatttccgaaacatgtgcacatcatc

SEQ ID NO: 39483 - DNA, 970 bp, Heterodera glycines
  unsure (1)..(970): unsure at all n locations
gtcaattttgtaccgatcaaagggaaaatggcttaactctggccccaatgtgcgcctgaatcgctaattagcttggcactttcgaatattacatataaattagccctctcaaattttccttcgggcctcagaaaatggctatctctttttcggccaattttgtaccgatcaaagggaaaatggcttaattcaggccccaatgtgcgcctgaatcgctaattagcttggcactttcgaatattacatataaattagccctctcaaattttccttcgggcctcagaaaatggctatctctttttcggccaattttgtaccgatcaaagggaaaatggcttaattcaggccccaatgtgcgcctgaatcgctaattagcttggcactttcgaatattacatataaattagccctctcaaattttccttcgggcctcagaaaatggctatctctttttcggccaattttgtaccgatcaaagggaaaatggcttaattcaggccccaatgtgcgcctgaatcgctaattagcttggcactttcgaatattacatataaattagccctctcaaattttccttcgggcctcagaaaatggctatctctttttcggtcaattttgtaccgatcaaagggaaaatggcttaattcaggccccaatgtgcgcctgaatcgctaattagcttggcactttcgaatattacatataaattagccctctcaaattttccttcgggcctcagaaaatggctatctctttttcggccaattttgtaccgatcaaagggaaaatggcttaattcaggccccaatgtgcgcctgaatcgctaattagcttggcactttcgaatattacatataaattagccctctcaaattttccttcgggcctcagaaaatggctatctctttttcggtcaattntgtaccgatcaaaagggaaaatgggcttaattcaggccccaatgtgcgcc

SEQ ID NO: 39484 - DNA, 1098 bp, Heterodera glycines
atattcctaaattttataataatatatgcaaattatcctctttaattaatatgcaaaacatttgtaaaatcaatgagtttccttccgctgtttataaatgaacagacaaaatataatataatatataaatataatcaatcatatttgctatagaaataaaaatttatgcagcaaatcatataaccaaacaaaataatcatacttaattaaataataataatataatataataatgaattattaattattcttttagaaaataatgagaacactaatggacaattactatcttttattaatattattatttttattaattatttttaatgatgggcaaccatcaaaaaaacgtccaccaaagggtaaaagcataataactgataaccaaaaattggaggccgaaaatataaagagtattttttttatttcatttttcaattttttaaaaattaattgctcagatgacgctcatagatggtcaaatcggagtgaaaacacgaaaataatccgtgccatgtttccaaatgtgccaaatgaagcaaaaaagttggatatggaaggcgactttattcgaattgacggcaaagtttatcccgctaaaggtattttattaatttgtcgagataatgccaatgaatgattgacagacatgaggaggtcgaaaaatgccgaaaattaagaaacttaaaacattttttagaaaatttggtcatggaaagtttgtatcacgattttaaggaaattttcactgaaaacttgagtcatttgaaaatttataacaaaaatattttgaaatttaatagaatttttttttattaatgctttgttattgacttaaaaataatttttgaaattgttttttttaatttagtcatcaatttattttcacattgaatttttgagttttataaaataattaactttataatctggcatattaattaataatccaaattttaattaaaaaatatattatatgtatataaaatgttttagattttttggaatcatttaatgagaatggcaaagacagaactgaaataaaatgggacgaatcaggagacttttcttcagaaaatttggacattattgactcat

SEQ ID NO: 39485 - DNA, 941 bp, Heterodera glycines
tagttcttccgaaatgaataatttctccacggagtgctctttagcggtatttaacgaattaaacctaacaatttttttattattagagcgcaagaaatagtcaaatggatgagttgaacttccattatgctgattctgactgctacaggtccgaactggcggagctgtacacttattcggaaatggacgaattttcactgaattacgagtgttttatacgatatatgcgcgagaaaaaggttatatattctttaatttaaatattattattaatttaacgacagaaagaacccatttggcatgacttgccgaccaaggaaaagagcgaaactctgcagaaccttgtcgaatctttcgaaaattctgattctgaacaaagactggaagctgctcggatagttctttatattttacaggcaattatttatttacatgcacaattttaattatcatttccaactagaaaatttgttgttttcgctttttagggtgcatatggcgatttcgctgacgttgaagttaaagattttgaccgctggtctaccgaaggtataaagttactaaagaaccccatatggaagcgaaataaaataacggaaccttcctgttctccttttgcaaagctcacttccattttcagaattcaccactgaaacttacagtgttttcatttgatttgcaatgaaaacaaccctaaatttcaagtttcagcgaccacagaggaggaaaatggtggaaaaggtctcgacgcagcgtccaaatggtttggtgatcacgggacgggcggattcgagcaggactgtttggtccgtggtgcactgaatgcttaccacgtgtacgagcacgggctgttccaagtgagtgatttttgaatttgccttgtcattctgcttatgtctactagtctttatgttcgcttcttcggctcgaggacgctgtgc

SEQ ID NO: 39486 - DNA, 264 bp, Heterodera glycines
caaataaattatgccaacattttaagtgcgtgccacgtttttttctgcttctctgtttatatacaaaaaaaaaaaatttttaatgtttgcacactatgaaaatatgtttctccttataaaaagttctatcccgttcccttcagacgcccaaaagtgccggcgcccaactgagcgagtccgggacacggatctggttttcgaaaattttttgagcctcgaatgccatccctgccatggacacaaaatgtcatgggacgcgtaaaa

SEQ ID NO: 39487 - DNA, 1505 bp, Heterodera glycines
atgtacagtgcgccaagagaaacaaaaacagacagtttcatttagactctatgtttagggctaatattttatgttttaacttttgccaaaatagttaggttttaggttctaaaaaacgcccaaaagaggtgctaaaatggaaaatatgtgccaaaatgtttaatatttagtggtgtaaaatgacaaaatttatttaaaattaagctaaatcagtatgagatacctatcttttaaaatttatacttcttgttaagaaaataaataaataagttttggaaatgaattttgaggaaatttttcatttcgtaagggtatatttttgaaaatttttcctcaattcttaggggtgtatttttcggaaattttgaggtcgattcttaaggtgtttttcgtttttattgcattttttaaataaattggcaaaacgccaaaataggttattgtctgtgcccacttttggtccaattgattatacataaatgagcatttgtcctacaatttcccgtggcaaatcgtccaattatgctcgtgcttcggcttcttcccaattgccagttttggttgaccagggcttttgttattttgattaattctaaattaatagtgattaatcattcattagacaaatgccgaccagtgggatattcaggacaatctttggaaattttaataattaagcgaacttttctaggctttcacgcatatttttaaaaaccgttaatttgtctataaaatattatttcattcatttttccttttctttaaattcaattttacctttttcgtcgtcatacaacccagcagagttttttgcttttgaattgtttcctttttcgaactttgcagccgattcattgacggaattggtgaatttcatgagttctctaaatgacttttccaaatgtttgagacctgaaaatttttattaattaatttaccacagaaacacaaacaaaggaggaaaaattaataaattaacaggtttttctcttaaaatgcttaaattgcgattaagaaaaattttaggaccagctgaaaaatgagattcaattaaaattatacagtgtgacacaaaatgatacattcacctccgaatttgtgtttttagactgttctaattagggctaatggtttttgcctatttttcctaagcttccagtgatctgaaacgctcgaaaaacatttttttcggttgtttttaagctacttctaataaacgacccaaaatttgtgattttaaaattatttagctcaataatgatttggcctaatttttttattttttgaataaattttgtcattttacatacctaaaattgactttttgagaagcttcaaaaattaagctatgaattatttcaagtttttagggcgacattttccgatattatgaatttttgaaagtgaaagtatcgttttgtgtcacctattttataaaaaattggtggatattgaagaccaaaaaaagaaaaatttcttttatcaattaaatcaattcttattat

SEQ ID NO: 39488 - DNA, 828 bp, Heterodera glycines
ctctagagtctaattaggctatggagaatccatgaaaaaatatgtatttacataaaattagcatccctagaaatgaatattaaatgaaaaaaatcaaaattaaaaagaaaatttcattttaaattgaaaagtatatgattttatttatttatccacttttagcatttgagaaaatgcggaataaaaaagacgtgaaccgattaattgagccaatccgttcgataaaattcagtgaaaaggtattattaattacaaataattattttgccaaattatacacgtattgtgtaaaataattgtttaagtatgaaaatttcattgtgatcatttgcaccggcacacaattcaatgccgaaacattttgccaatttgtcgggacgcgacttcgctacgaactgctcgaatttgtggagaatccgttgtcaaattgggtggacttttgccatgtgtatccaaaattgatcacttccgcgcaatgtttggccgaaacggggccaaaaaagtgggcagataaaggaattaaaattaattaacttaatgaggcgttttaatggcggtttccaccgttcttttcggtagggatcggttcgtctgagccaagtttaaagcgccgtaacttttttttaattgataaaatttatattgacattattcgaaagctccatatgtctagaagttcttgctaagcttttactaagcgattagaaatttataaaaagttgcaacatgaaaaccgcaaaagtcagaaattttgcatatttttatttattaaccttttttttatatgtcggcatatctttgtgttttttggaaagccaatagaacttg

SEQ ID NO: 39489 - DNA, 600 bp, Heterodera glycines
tgccatcgacacgaattcttcagtgaccgttgcaacaactgcaatgccaacaacgaggccactgaacggcacagtggcaacaaattcaagcagtacaaccaacatttcgtctgccatcgacacgaattcttcagtgaccgttgcaacaactgcaatgccaacaacgaggccactgaacggcacagtggcatcaaattcaagcagtacaaccaacatttcgtctgccatcgacacgaattcttcagtgaccgttgcaacaactgcaatgccaacaacgaggccactgaacggcacagtggcaacaaattcaagcagtacaaccaacattttgtctgccatcgacacgaattcttcagtgaccgttgcaacaactgcaatgcccacaacgaggccactgaacggcacagtggcaacaaattcaagcagtacaaccaacatttcgtctgccatcggcacgaattcttcagtttcaagcagtacgaccaacacatcgtccgccattggcacgaattcttcagtgaccgctgcaacaactgcaatgccaacaacgaggccactgaacagcacagtggcatcaaattcaagcagtacaaccaacat

SEQ ID NO: 39490 - DNA, 1217 bp, Heterodera glycines
  unsure (1)..(1217): unsure at all n locations
atcacaacacagcactcagtctctacggcataacggtgagtgatcaaatttggttaaaattgtcactaatcacactaactatgtttcaccattccnccttcaggatcacagcggtcggctgaacagtggccattacacatcgtccgtgatcaatttgatcagcactgatcgggagtggctgagtttcgacgacgaagcatgcattccgtgcggcaccgctccttcgcccgttgtgagaatttcgttcccgaccattcaaatgaaaaaaataataatttgttttcccctttttagagcaagcacgcattccttctgtactacaagcggatgaactcgaaagccgagcgcgacaacaatgccaatgcgaatccttcggtgctgagcgacgaagagaataacggatgatattattgtgtgtctacaagcggatgaactcgaaatccaattgatattattgtgtgtgtgtatgctctgtataatatgtattgtatttgtattgcattgtatgttcatattagtcgtcttgtaaataaatggcaataatcccataattcatgtttgtttgttttgatttgcctcttcaatttctccccgggaaaagcaatttcaaggttgtaaaacccgaatccaaagcaatattggagaattaggggtccatcaatgaatttcctgtgaaacaaagctttttcctccaagagaaaccacattttaaggcttttcagggtcgaaaaatccgtgacaatattggagaatcggggaggggtccacccaccgaaaaagcatttttttatttgtctgaaaatttctaaaatgatacatttgaaatggtgccaatgccttcaatgttcatatttccaaatttcatttccacgatcatatttgctcgacttcgaacaaaaagtcgaaaatccaaattttcaaaaattcgctttttggcgctctaatttggaaccgactgcataaaagaacagttttctcactgaatttctcattcgcctcgcaccaattttttcaccaaactgaaacagcgtcagtgcaaactctgcgaatgtgaatttcatttcttttttcgtgatccgtgaacacagctttttcgaaagtgcgtcccccacccttgacaatgaaaaatgctttttttttaatcgcagttaaattaggttgtaaatatgcagatattctgatgtaacttttatgatttctagctaaattctaaactg

SEQ ID NO: 39491 - DNA, 673 bp, Heterodera glycines
acccccgcccccgcgactctgacccccgcaatccccgccccgcgatcttcgcccccgcggggacacgtgggtgaaaatagaatggtatattcgtgggataaaaggcaataaatttatacaaatttgaatttttaaccatctttgacaaatttttatgaaataaagtaaattttgaaataatttccaatattttgtggtttagtggttagtgcttcaacactaacagtatttcttgttaggagttcgacaccggttgacgttttcattttaatttatttttatctgattaattcagggtttctttatgttcttatttctaagaaatgttctgattttagggcgtattttcatccaaaagaatgaaatttctgaaaaatttggctaatttctaacaaaattcataaaaaaaatttctcccggctgcgcctatcggcaccacaagccccaaaaaaacctattttttcttaaaaaattagcataaatcaataaagttggtcattctttagacaaaatctgtgtaacttatttaaaaaagaattgaatcgaggcgatacatcgactaaaggaatgtggagccaacacatcattcataaaaattaatttttttgtgagattttttggagctaattcaaatcaaacccccgcccccgtcaccgcgggggcggaattatcg

SEQ ID NO: 39492 - DNA, 370 bp, Heterodera glycines
ttttttttttttttttattatataaaaaaaaaaaaaaaaaaaaaaaaaaaaaaaaaaaagctttcttttttttttttttttctttctttatttgttggtggcacgccaaccacaaaaaaaaaaaaaaataatctttttttcctccccccccccccccccctccccccccccccttttttgagagaagaaaagaaagaagagaaaaaagaaagaaaaaaacaaaccacccccccccgcgggggggggggggggggtgtgtgttttttttttttttttttttttttttttttccccccccctcccccccccccccgcccccccccaaaaaaaaaaaaaaaaaaaatattattttttttttttttttttgttt

SEQ ID NO: 39493 - DNA, 959 bp, Heterodera glycines
ttgaaataaagttttactacaaaagttagtgtatattcaaatcatcaataaaaaataataataaatgattaaaatcaataaaaatctttttactaatattaatcaatttaatataataataaataattaaaacaacaaaatatttaattaaaaaaagcttctttgacaatttattaaaacatttaataagaattttagaattgtctaattcttaaaaaataaattaatataaaaataataaacatttaactaatcataagttattaaaaataataataatttgcaaattaagcaaaacgtaaacctatcaaaggaaaaggaaacacacacagaaaatattaattcttaagtcgaaaagtaaaaaatataaaaatgtagagtgagaaattagcaccattttccaactaaaactgaccaataattaatgcatttaatgaaatgtaaattattattttttatttcgttaaacaaaatgaacgaaataaatcataatcatctctagttttaaaacatatatattttaaattagtattttggttttgaaaattattaaacaatttgtaggaaaaaaaacaacttttctagtaagagaaatgtactttgaaaaaggcgattttacaaaatgtagcgccagaacctgcttttttcaaattgagcacttaaataaacaaaaactaatattaaataggaaaataaaaaaaaaaataaagaaaaaaataatctctttaaaataacactttaaactaaatatgttaaataaaaaaaaattaaaaaaacctactttatttaaattagaatagcagatgaataaaaaatgaaaaaaatgcagcacatatcatataagaaatgtcattaaaaaaagattgattgttaaataaaaccttaatattaatcttttaaatcttatgtgaaaagaaatttgattgaattaatttgatgatttgaaaaatatcataatg

SEQ ID NO: 39494 - DNA, 722 bp, Heterodera glycines
  unsure (1)..(722): unsure at all n locations
agaagaagcacttgaagccgtagcagcaccatcgtgtcgatgaacaactcaaacaaaataaatttctaaattaaaataaacttatttaaatttttggtatgttgaatgcgtgtgaaaagtggggccaaggtgtgccggccacattctcaaagattctaggcacaatgcacaaatggagaaagccggtgggaggggcaatgggccgctaatgatgtgcaattcctttcttttagcctgggacaatcggaaaacgcattaaaatttaatgcaaaaatttggcatcggcggaaatgcgcacacattggcaattacggatttgtccaatgcattgcagcaaaatgctgaaaatttctaaaattggggtgcccaacaaaaagtgcctgtcaatcatttcacccacccttccgcctgggggagaaaaatgccacaattggacatttccatttgcggcacacaaacaaataggaaattataggtgacagaaaatgcatgggggtgagtaaagaataaacaaaatcgcaccaaattctggatttggccaatgaatctcaatttgggatctgatcagtgaaggatagttaatattcattattaagcttccgctanaggattgataagatacgggaatttgtgaaactgttcagagagccatttgaaggttaattanattgaaatgagtgatggaaatttggtgctgattaagagaataataagcgttgatc

SEQ ID NO: 39495 - DNA, 367 bp, Heterodera glycines
ccttttttggagggaccagatcttacaaattaaaaacgtccctctttgtaagatttgtccttattttggcacgacctccttgttttgtgcttattcttagctttgaaaataaaaatactaaaatgaataactgttttgaattacatatcatttttaattgaagcgaatatttaattaattttaatttgaaaaaaattacattttaattcatttttgtgagtgtaaaatgcccaataatttcagtgaaaatctgttaaaaatggtcaaaatttctattttcctccggcggcgcctatcggtaccgtcgggtccccaaaacttattttttaataaaaaattggctcaaaaactcaaaaattttccaggt

SEQ ID NO: 39496 - DNA, 1168 bp, Heterodera glycines
gcacggttgtaggacatttgcggccacagccactaacgacattttcggctcaactttttcgactccaacaaaataaaaacctcagaaaattattttccatccaatttaaccgaatttaatgctctgctctttctaataagccgaatcaagttttttagaaaaaaaatttcctagcccacacccaactggaagcaatgaagaggaggaaaacaatatcagagaaacaagtcccaaaatgatggagaaagaagtatgaacattattaggaaatatcagatctctacagtagttggcagactgactagcaactttcgagctctaatggggttttgacaagcccaatttttgaaaaagaattactacattgaataaagtttggcgaaaatttaagaagaaaaaggatttaagataaatgagccctattctggtcttggtgtcgaaaaagtcgagccgcaaatgtctttttggaattaaaaagtgataatttggcgttccgttggccgcaaatgtccgattttcagcaggccgaaaatgtcggaccgcaaatgtccgaaaatggcccttaagaaatgggacgcaaatgtccgaggcgcaaatgtccgaccgcatttgtcgggccgcaaatgtccgattttcagcaggccgcacaaaaattttccgaatggcccttaagaaatgggacgcaaatgtccgaggcgcaaatgtccggaccgccatttgtcgggccgcaaatgtccggaccgcgaatgtcttaacacgcttttaagaatcctctcaaaaattctgttttaaattttggaagaaccgtcatatgaattttgtacgaaccccgatgaaactgcttcttaccacaatttggtcccgagctggcgtcgatcctcactctgttcaatttgcacgtcgtgtctgcccgatttcgtcttttccacgcttccccctgatcacttgctccgtcgagttcctcgtttctccacctgactgagtgccgcttgaaagtcgttcttccacccctcgttttgttccgtcttttcgatttccgaacgcctcgatcgctttaaagccgtcgcgtcggattcaccgaaaagccgaatgggctgccctcgggccctcgatcgacgcacaacggagggacgcggcatcgaatccgagcccggtcaatgaaaacttt

SEQ ID NO: 39497 - DNA, 1015 bp, Heterodera glycines
aggtcccggttcccggccttttgaaaagctcaggtcccggtcccggtagggcaaccggaaaaaacaagcactggtaagaatgagggtctgagtgaaaaattagtgatgaaaattggagtcaaaggaaaaaatttaaaaaaataattaatatattctttaaaagtaacactgcccaagtgtgcaaatggcctagtggctagtctccttgactttcctttcttctttcccctggttcaatccctctacagaaattagattattttcaatttttttttgtatactcgtgggtttcctataaagaaaatatgattcctcatagttttttttttaaattgatacatattttatcatttttaaatgaaaatcctaccaattgagcttaataatcccaaaaaccaacctttttttgttgaaaatctgttaacaaattacacccaaatttttaaaatttcccccggcggcgcctatcggcaccgccggaccccttctttcccaaaagttttttgaaaaagcgttccgaaaaaaagtgatgtgaaaatcaaatctgaatttctattaatattcgatgatttagtccaaaaatgattaattgtttgaaataattgaagaaaatttgtttgaaaattttcattaatttaaagtcccggtcccggttttggcaaaaattcccggtcccgtggcactctaatttaatgtgagtaccagatttcttttaatagagctctgagcagggctggacgtaactgattttcaattacggaaatccgtaaatacggcgattttttcagttacggccatccgtaatccgtaattcggaggtcaaattttttaatgcaaagtttaaattttaaactttaaaatttaccaaaaaaccgtcccccgaattatggctattgtatgaattgtatctcaaaatttattttatagtctagtttgcaaatttcatttgtaacttaaaatcccctctattaaatatacacagttatcacatacagtatatttattatgcatatat

SEQ ID NO: 39498 - DNA, 1316 bp, Heterodera glycines
ccgttatgtccttgtaaatcagtatattctgtccttgtgatagagagagtttaaacgatacgagcactgaataatataatattaatttgctttaagcaccgaattggagtcgcaaatgttaggcaacttttcgaattgtttcgggtgcacctagggaatggttcgaacgccgcattgttatcaatgaaacacctattcacggatttgattatttcgttacattttcgtatttggtaagaaaatattttctttttgggaatacaataaaatatttaatttggacatatatttttatgtgcttgttaagctatttttttattattagtgcatattttctagattttattgttagaaccaaaaagctaccaatttatcaaaatgcattttaaaaaaatattttttaaattttcgtgacaagaattttgattttatatgtatttcaatactgatttggttaattttgttgctttttggataaacagacgggaataaaagtacactggtaagaatgggggtctgagtgaaaaaatttgaaggaaattggtgggaaagggagattttttgtgaaaaaataaatataaattcattttaattcattagcgtacatatttatgtagcctagttgttaatacttctgttctttcattatttgtctcctgagttcaattccccattaggataggtgatttttcatattatctttaaattattttatttgaaatttaattaataagaaactttgtctaactttaaaaattatttttttttaatttttaaatagccataagcccacaaattaaccaattatagttcattttttggacaaaatttgttaacaaatttcactaaaatttcaaaattttccccggcggcgcctatcggcaccgcctgacccactccttgtaccacaaaggattttgtaaaaggcgctcacaaaaaaaagagattttaaccaaaaaaagattttgtaaataagttgaaaacatagaaaaattctctaagaatattttggaattttaaaaataatagacaattttaatgaaaaattattgaacatattttaaaaaattttcctaggattttagaaaagaaaaattaccctttttttgccggtacccctcaaaaatattattaccggattaatttcaaaaactcaagttttaaattttttccccattaataaagaaatgtttaaacctttacattaccaagaaattttttttaattggtttaaaatataaaatttttccttaaaaaaaaaataaattaaaaattatttaaaaaaaaaatccaaattttttttcaaaaaaaaattt

SEQ ID NO: 39499 - DNA, 1077 bp, Heterodera glycines
agcagtgctggttcgtttcatcacggcaccgaaccttttggctagtcagcaatcgttgcttaacttgccagatcggacgggtgcgcatgattccactgttccaagcaccccaccaaaagcaaaacgatataaccaaaatataaggaaaaattttttaaaaaattttttctccatcttcctttttgatactaaagcatcagagtgctaaaattaagttgtaaataaaatttggtgcgctttagagcactttctgaaaaaaatatttatgaaacaaaaaaatcgattttttcaagtgtccgtttggggtactcaaacatttatggggagcaaaaatccaacgcagaattaaagtacaggctatacggaagctattcccgaaggattcggtctccccataaatctgggcgcatcggttcggggggactgccccgaaaacaaaaaaatcgattttttcaagtgtccgtttggggtactcaaacaattatggggagcaaaaatccaacgcagaattaaagtacaggctatagggaagctattccggaaggattcggtctccccataaatctgggcgcatcggttcggggggactgccccgaaaacaaaaaaatcgattttttcaagtgtccgtttggggtactcaaacaattatggggagcaaaaatccaacgcagaattaaagtacaggctatagggaagctattccggaaggattcggtctccccataaatctgggcgcatcggttcggggggactgccccgaaaacaaaaaaatcgattttttcaagtgtccgtttggggtactcaaccaattatggggagcaaaaatccaacgcagaattaaagtacagcctatagggaagctattcccgaaggattcggtctccccataaatctgggcgcatcggttcggggggactgccccgaaaacaaaaataaatcgattttttcaagtgtccgtttggggtactcaaacaattatggggagcaaaaatccaacgcagaattaaagtacaggctatagtgaagctattccggaaggattcggtctcccccataaatctgggcgcatcggttcag

SEQ ID NO: 39500 - DNA, 608 bp, Heterodera glycines
ttttggtgcctggaatttagacttcccggaatattcatcaaaatttcattgttttcgtaagacttttttgaatgtcctaaagtgagcaaaaatcttaaaaaacggtttttacccctgagcacattaaaaataagagataaattttatcttatccgtcgattttaatgtgtccttgaaattcttatttttttaattatttaaaatatttaaataattttaaaaagattcctcgtaatcaaggctcccaggctgagtatttatcctcattttgtggtttatgataggtaaatgaagatttttttgaaatgaggatttgtagctttttgaaaaattttatggatttatgagacttttgaggaagatcatccgaatctgttaaatttatgataatttcaataaattgacataatgcttgacaatcatttaataatttgggttttaattaaagttgagcgtgaccaggacgggaattcctggggttttcaggtcccggtcccggcgggactaaataagcactcggtaataatggtggtctatcgtgagaaaagaggagaaatttttgagaaatacatttaaagtattttttcatatccatatatcaagggcgt

SEQ ID NO: 39501 - DNA, 1187 bp, Heterodera glycines
atttttgcaatttctttatcaaacatttttggtttttctttttttatttgccaataaatttttgttttttccattttttctttcttcgttatgcgtttcttgctaattccaaatattctcttccatctttcaattgttgaacagttaactccaattttgttgcaaatttcgacataattttgttgccattcttcgcttgaatatttttttatttgcttgtattcatttttcataaatttttgcacaatttcaattttttcttcataagtttttgaatttgttcccaattttttcgctatttttaattaaatttattccattcttttgctgagtatttttttcctttttgctttattttctctttaattttataatatttttgaattatttctcttttttcttctaaattttcttcttctttcccatttttctccaaatatttcgcaaaatgacttttgctgcaattttttcttttctgatttaatttgacagttaaaaacataattaaaaagaatatcgaaaataatttcattttgtcgtctcaaaatgggttttggaatttaaaaaaaaataaaaccgtaatatattgtttgcgacatataaatgaataaaaatgaattttttctgattaaaaaactgacaggaaatcatgactctactggtttaacgacgtgctgggtcgtttcttaaaactgccaccatgggcgtttcttaaaactgccagggcgtttcttaaaaactgccactatgggcgtttcttaaaaactgccaagtgggcgtttcttaaaaactgccaagtaggcgtttcttaaaaactgccaagtgggcgtttcttaaaaactgccaagtaggcgtttcttaaaaactgccaagtaggcgtttcttaaaaactgccaagtgggcgtttcttaaaaactgccaagtaggcgtttcttaaaaactgccaccttgggcgagaattaaactacaaattaaaacaactatatagaaatattttatctaaattttattgatataaagtttgtaaattaatatatatattccagaatttcttttttaaattttcttattctttaaaatgttcaccaaaaacatgaactgacaagcataacaaattctaaaaaataaactatttaaaatactaataaatacagacttttgttaatgaacattcatgcactttcata

SEQ ID NO: 39502 - DNA, 172 bp, Heterodera glycines
ctataattattctttccactttaataataattgcaaaattcagtcggtttgtcccgctttctcctctttcaattggttatcatgctgatgtttcgagtttggttcgcattagagacggatcgtttgtcgcaattagaacagaaaaaattaggcgccgatggcacttcgacgg

SEQ ID NO: 39503 - DNA, 1472 bp, Heterodera glycines
  unsure (1)..(1472): unsure at all n locations
aacgagcaccngaaaancggaaccanncaanncgcaannaaannaannannccaannnccaccncnnngcacgncnccccgncggaancgnncacaacgaanncgncgcccaagnccacaaaggcanaagagaacagnccgcgcgcgncggccgagangaacannnngcganggnngcgcanccaaccgnncacnnccancngagnggaaaaggacgcgncggngagaacgaccaacngaaagaacgacggaannaggcgagaagggaaaaggaaggaagcgnnngcngacgncgaanngnnngacgaaanccnccgacagaannnccacagacaaggcacagnncacagggncgnngagcnccgccaannngncgaagcaaacnnnggcacggnncgnncccacgncgcnnnccngggcgnagaaaggcgccgacaaancncngaacgccaacgcnnnngngncgtgaagagtcaccgagcgaacaccgcctgaaaagcggcgattgtttagtcatgcaaagtaaaatcaaagaatggcggcaccaaggatcagattcttcgccacctccacgcccacggagccgaggccactgacgagaaccgacgccttgcgcaagtgttccatggcggaatgtccaagcgcataactaaacaggaaaaaccacaataagcaattatatcaaaggcatttgttgctgcttacatctgccgagagtacaaattggtgtcgatggccgccatttgttctccgttactctttggtgcctaaacggaaaagagtcagcaagaaaatgagcaaccaatagaacaaaaagtgacgttttctgatgcctcggagttcggcagttcacagatgatttttgcctttttcgttgctggttcctcaataataaggtcagatgactgcataaaccactggaaatggaaaaaacgaatctaattttcagtggccaattgcatccgagcaattattgggtcaaaaatcatcaaaataactccgaatgttattcaatcaaacggctaatattcggctctaattgtaaggcaattgaccactgccaataaatgagaataaaaattcaacggggcaaactaaaagaaagaattggaatgtgagcaaaaaccacttgattgttttctttttattacaaaatcagtcaacgaaaaattttggctaggtaatttcattcacattctcagaaaaaaccaatcataacgccaaagaatctatatttaaaacttgtatcccaaatatgtaagcaatccgtatttaactcgaacagtaaaaggctgcaaaacagtagcttttcaaattaattgttnaacgctttatgcaatataaaatggtaaggaaaacgaaaagtcgcatcattcctccgaactctcttccgactcattctcttctatcgtttcgcccgcttcttcagccattggcaatgtttttgcctccacttcttcagcaccttcgtc

SEQ ID NO: 39504 - DNA, 1505 bp, Heterodera glycines
tttttggaattttttaaaaatttttttatttttggcaaatttttgggccctcgggattttggcctaatatttgaaaaattcataacaaattgaaggggttgatcaattttacagaaataaagccttaaaaatagataaaaatcaggagaattttatggactttatttggaatttctatcttaaaaaggaaaaaagctattccagaatttctggaaattttcgatttttcagaaaaaaattcataactcggttctgaaaggtcatactgtaaaagtaaaatactacaaaaatccgcaattttttcctctataatataaattttattttacatttttatcacatttttaaaaaaagatataaaaataaaagtgattttgggattcgggaccaaaggggggggaccaggatttttgagtggaaaaatttttctcacaaaaatcttccaaaaatatgtctttaggggttatttgggccgctgatcacgaatatgtgatcagattttacttttgacatcgtcaagacctcagaatccccgtgtgattggggattctgagtcatcatttttgggggggggggtgcaaagttagaatccggacggtgtaacattatttttctgtgcatttttgggttattttgactgtttttaattaatttgaagatttcttttaaattatttaaatttattttttttaacttaaagaatttcattatttttttttgaatttctaaaaaaaataatttaatttcaaattaaataaatattcaattaataatttccaacgttgtttttaattaataactaccatttttttcgtgttttcattgttttattcatttaaaatattttttattttattaataataaattacatttttttatttgaattaaatttttataaaattcgagaaattagttccttttaatttcaataaatattctatattataaatttctaactttatttttaataagtaaaaggatttttttaatttgataagtttataatacatccaataatacaattttcttatttatttcattttaatccatgattgtacctcttctaatcacttttgttcaaattttaatcactgttgtacctcttctaatcactgttgtacctcttctaatcacttgtacctcttctaatcactggtgtacctcttctaatcactgttgtacctcttctaatcatttttgtacctcttttatcacttttgcacctcttctatcactgttgtacctcttctaatgactgttgtacctcttctaatcactgttgtacctcttctaatcgcttttgtacctcttttatcacttttgcacctcttctatcactgttgtacctcttctaatgactgttgtacctcttctaatcactgttgtacctcttctaatcactgttgtacctcttctaatgactgttgtacctcttctaatcactgttgtacctcttctaatcacttttgcacctcaattaatcacttttgtacctcttctaatc

SEQ ID NO: 39505 - DNA, 675 bp, Heterodera glycines
acaattgaatcgacatggcagaagttcaagcaggaacacaaagcgagatttggtagtcacagatcacttttttccacatacatttctgattttttgtggcgtaagcaatttggaggaccggacattttttataatttgtggacccaaatcgcggaattgtacccaataagcacataaatctcctttatttggtattcaaagcaattgcgacaataaaaaagaaaaaaaaaattttgaaaaaatttgacccaaaaggcggacccaaactccattagtaccgaaaagccttagaagcatgttttcactacttttaaaaacaaaaattaattttttcgaaaaatgggggggggggggaccagctccactattaccaaagttagtacctattaccaaaagggcattataatagccatccttgaagccccatacaagcttaaacatttttagaacttaatgtattaagtgcgataacttttgaggaaaaggattgaagtcaccatcatataggtatcagtatttcaggtatattcgggttcgggattagaaatcggtcgaaatggatgccatattcgtgatcagcgacctagaaaaccccaggagccttgttttcaggactttttaaaccaaaaaaaatttttgaaaaattccgacccaaaaggggggacccaaactgaa

SEQ ID NO: 39506 - DNA, 1268 bp, Heterodera glycines
  unsure (1)..(1268): unsure at all n locations
cgaaggaagaaataaaaaagggagaaaaagtgactttggaaagtaaaaaggttaacgttaacagcaaaaataaaaagcaaaaaatggcggatgttgatgatttggaagtgaaatttgaggccttaaaattaaaagtgaatgaattggaagataaattggcaaataaacccgcaacaatttgccagcgggcataaaaacaccgaaatatgatgctacaggcgactttttcaaattcttaagagaatttaatttaatggcaactgtcagcaattggcatgccacggactgcgtccgaatgtttccattatttctcgagggagaagccaaagagcttttcttaatattccgcctgataaaaagaaaacatggcgagatttaacagatgccatggcggaccagacaaaaaaaattgacggtccaatgtgggcaaaaaaattgttggccagagcaaaaatgggccacgatagcataacagaatatgccaataaaatacgtgagttggtgcaacaagcctccccgacccaaattacacgagcgaggcccgagaatgcgagagtatccattatttttttaatggactcccgactttcctaaaaaggaaattattttttatgaaaaaaccaagaacgcttgttgaggcaatttccatggcaaaagaagttaaccaagcaagggaagaacttgcaaatgatgaaaagggagatgaaattaaacagcaaataaatgagataaggagcaaattaatgttatttcgagtcaaaataatggaaaaaacgaaaatcaaacagaatttgttaacaattcgtggcgtaacaattttggaaacggaatttcttggaatcgtgggagagaaaataattacagaggagggcagagagcacggaattttaataaattttatacaagaaacacaaatattacgagagggagaggaaatgacaggcaaaagtacagtatcaatatggagggaaatgaagaataaaccccttcaacatcgttcagacgttcacccaccccggtattaagctgtttaacaatcgcaatgattttttgtgcattatttggtaattctgtggcacaatatcaattgtgttcggaccgagtaccacaaactccgatttctttaccgaatatttctgaatgtactgtcccgaaaaacgaaaaagcagcggaaagtacagtaacgctttttcttcctattcgggaccaaanaaattctcangtttataatgttaccaaaactgacaaaatttgcactggcaccctct

SEQ ID NO: 39507 - DNA, 934 bp, Heterodera glycines
  unsure (1)..(934): unsure at all n locations
tttatttatgcaaaataaattgttttattaatctctataaagttgcnatcaaaaaanannnaccaannagcaancccttttaaataaaagattcctttttttatttaaagttgattaattattttttgctgatatttaattgtttaaaaaaattttataccacacttaaattgttgaattcaattagagtagatttatttatattaaagaaaaaacatttccttagatttctatattttaagtaaattttgctaaataatttataattaaatgtgaagtaacaaatgttaccgagcaagtccacataaaacttacgatgaagctgtccttatgaaaattgctcgcttttatagcttcttgttataataattttttttcgacttttattttgattattattttttatcatgatccttttcaacagttatttgtattttcaagtcttttttttctctataaatttcaaatattaagaataatgttaattttttaaaggttctattaatttattttatattctaaatttttgatccaatttttaaaaaaagttagtataacaatattaaagagaatattaaataatcgacactttataattttaattttcaatttaattgttgttctgtaatcacttttcttaattttttttttaaatttatatatctctcttaaaataagtttaaaaatattactttttatgaaccttattgcagaatgcagaataacactaaaaacaccagccatcttctaagacaaagataaataaatataataaaaagtaaatttaaaaaatataaatgattaaaaatatgaatacttttctattttcattgcccacccctccatcgagagcgaagcttaagattagttgtacaattgtataatcttgttttaatttaaatgattttaaaaaataaataaattttttgaatta

SEQ ID NO: 39508 - DNA, 1085 bp, Heterodera glycines
  unsure (1)..(1085): unsure at all n locations
cgtggtttgtcactcagatgagaagtgatggtcgtatctttatttcattcnggtctaacaataatagagatcggaccgggccgggcccggtttttaccgggcccggaaaccggaatcagtgatttttcgaaaagtacagtttcatagcggattttgcgagaccgggccccaaaactggtcgtttttgaaaatgccaaccgagctcggaaccggcattttttgaccggtctttgatccagtcaaaaatttttcatttttattcattttccttgaccggtttttgagaggccgggccaggaaaccagttgcttctgaaaatttcagcccggcccggcagattcggaaaatccgatctctaaacaataagcaaaaccggagatccaagcttttgtctcacacttcagacttcagcctcaaaaaatttgtcttgttcaatttcgttcgaatttcgagattttttctgaattgaaaagttcttaaatactgcgatttcttcatggttgctttatgtttcaattgctcagattagcaattgatggatgaattagattttacttaaaattgtgtaaaaatattaaaattttatttttaatagttagctatttaaatttttgaatttaccctgccaggagaggaggggggggggggggcgtcccgcaaacaagcttgatgggcttctttatatccatgattttcctatttttccatatttcatgatttatgtgcacatttacatatttatatatatttttgaattatgtacattttttgtctaaatttttacatcagttatttatattgatttttttttgcaattttatgtcaatgtttgggtttaaaatctttgaaaattttaacgaaataagtgcagaaactggaacagttcgaacattggcacagaacgccaaaaatgcaaggtacagggaggcgaatggaaaaacagagcagcggattttttgatattttaccgcaatggcattttggccatttgccaatgccaacaatttttgtctttttttcgttcctcttttacactttctataaaagtctgttttcattcatttcattttgtacaatttctcata

SEQ ID NO: 39509 - DNA, 1241 bp, Heterodera glycines
tttcaaaaatttttcgagctaggcccccttagaaattttcgaaaattttttttggggtgaaaattggggtccaaaatatttttctgggggtattttgatgtgctgagcacgaatatgaagttcatttttcgtttcagaatttttggaattttttaaaaattctttattttttggcaattttttggccctcgggatttgggcctaatatttgaaaattcataactaacctcagggtaagtcaattttcatacaacaaagctttaaaaatagcaaaaaatcaggagaattttatggcttttatttagattctctatcatgaatataaaaaaagttattccagaagttctggaaaaattcgaattttcagaaaaaaattctgaacacggttctgaaaagttattttggaaaagtaaaataatacaaaaatccgcaattttttgctctattttataaattttattttagctttttatcacttttttgaaaaaagttatagaaataaaagtgattttgggaatcgggaccaaaggggtgagtataggatttttgagttgaaaaattttttcaccaaaaatcttcaaaaaacatgtcattagggctattttatgacgctgatcacgaatacgtgatcagattttacttttgacatcgttaagacctcagaatccctgtgtgattggggattctgaggcatcattttgaagggggagggggcaggttcgaagccgggcggtgtacattatttttctaccatttttttcgtgtttttcaatttttattcatttaaaatatttttgagttaataaataaaaaattatattttatttaatttttttttgataaataaattttataagtttaaattaattatttttttaattgatagaatttcatgtatctgttgtacctttttaatcacttttgtacctcttttatcaaatttgtacctcttctaatcactgttgtgcctcttctaatcattgttgtacctcttctaatcattgttgcacctcttctaatcactgttgtacctcttctaatcactgttgtacctcttcatatcactgttgtacctcttctaatcactgttgtacctcttctaatcactgttctatttcttctaatcattgttgtacctcttctaatcactgttgtacctcttctaatcattgttgtacctcttctaatcacttttgtacctcttctaatcactgttgtacctcttctaatctctgttgtac

SEQ ID NO: 39510 - DNA, 963 bp, Heterodera glycines
aagcgattgatttcgatttgcgctgcttccacgacttttcattcaaagttagtttcggtctcatttttcaatttcgttttactttttcctaaatgcctttaccattttttcttttccctcttcggcacttattgggcccgccgttgtcgccgatcgccgtcgtgtgccgaacagcgaccgattgtgccgcttccgtcccgcgtcgtccgtgccaattcgatcgccgctcgccctttgcagaaacctcccgaaaatgctgctgcgcttccgttcgcctttacaaatttttttaaaatattttgtttttaatctctcccactatttgtcggcggcgtttggcgttccgccgtccttccaaaacacttggattgttctcagcagccaatttggcagatccgaccagttgatgttgggactcattctgagccgaaatgccatttccattgagttggcaaagtgccaatgactgacccccgctaactctgtgtacgctgacggcacttcgccctccttgccgaatttgtccggcttttgggtgggcagttggccatagaattcgtccaccattgtcatcccaacggccaaatttcggtcgattatataaccgcctgaaaaagcgtcgaattgtttttcgtcgctgttcagcgtacgtattgcgaaacgaactctcaaagtcctcgtcgtcctcccccaaagggttgagcaaagattcggccattttcagccagcccatgtaacacatcagttgcagaaaagtcatcagcggaaagtaatattcgaagtatgccatggaatccctttgctcccaaatgcgaaattggcgcccaaacaaacacaaaaggaagtaaacgcgagtgggcaagaaaacgacctgaaaataagctgaagggggaggggaggtcacggcatctggccaaaggcaaagggaagggaaaggaatgaacttgcccacagggacgggca

SEQ ID NO: 39511 - DNA, 943 bp, Heterodera glycines
cttcttaggcaaatgcctaaaagttttgcgtgcatgccttagggatggcacggaattccgatttccgacatttttggggtcggaattccgatttacattatttttgataataagtcggaaatttttttttctttaaaaattggccttattcaaaaaaaatttgaattatttaaattaatttaatttagaatgaaagatataaacaaaattatgttttatgatgaagcttatatgtgtttttgatacctaaaagtgttaatttaaaaaaaaaatttatttgcctatttttgtgcttaaaaatatttattatttacaagcagtaaagagtaaatattcagtagaacgaaataccataaacaaaatattattttgttatttttgaattacattttcatttttattgtaaataatggcattttcattgtccattgttttcgctgacattttgcattgaatggaaattatgggcattttcagtgtccaaagtttcgatgacatttggtattgaatggacattaatggcattttcaatgtccgaagtttcggtgacatttgacattgaatggtcattaatggcattttccgtgtccggtgttgtttcgacaatatttggcactgtttcttcaatggtctgactgccttgcacatagtttggtacaacttaaaaataaatttattaaaaaaacaaaaataggttttcgttaattttgaaaaaagcctttgaataaatttgacctcgcccttcaaccaaaatgaattgaatggcactacaaattgggcaagttacatgagctttaaacctaaatctaatttattttaaaaaataaataatttttgaacgattcattcaccaatttttgatgcaaggaatgtgaaatttgtgctgtaaagtatgtaaatataaaacatatttcaaatattaatttcatattttagaaattaa

SEQ ID NO: 39512 - DNA, 1304 bp, Heterodera glycines
aaaataataacaacatcagttccatattagttacgcttataaacatcatatggcagactgagataaagatcttttaggcccaaacaaaatctttgtttagtaatttacaatgtatattttcatttttatttacaacagtgtccaattcttctggtgttcattttttcattggcgtccaattttctagtgtccaattttcggtgtccaattttctggtgtccaatttaccgggagccgcccaaatagttacaaaatactaaaaattgcccaaattgtattttataaacaatagtaaaacttgcccaaaaaagtttgtttattttcatgctcaaattgttacaaaaatactaaaaattgcccaaattgtattttataaaacaatagtaaaacttgcccaaattgtattttacaaacaatagtaaaacttgcccaaaaaagtttgtattttacaaacttatactaaacatgctcaactagttacaaaaatactaaaacttgcccaaattgtattttacaaacaatagtaaaacttgcccaaaaaagtttgtattttacaaacttatactaaacatgcccaaatagttacaaaatactaaaacttgcccaaattgtattttacaaacaataagtttgtttattttacaaacaacattaaaacatgctcaaatagttacaaaaatactaaaacttgcccaaattgtattttacaaacaacattaaaacatgctcaatagttacaaaaatactaaaacttgcccaaattgtattttacataacaatactaaaacatgctcaaatagttacaaacactaacttttgattctgatcaaaggcttttacagcaacttgatcagatcactccttcatagtgaccgagacctcctaaaatacactgaaaatcggagttttcgaaaaaaatccctagagggttgggaaatttttctgtaaaccattttattgttgttttaaatgattttagtcgtaaaatttatggggcatgaaaatacaaatttagcaccaaacgaagagatccaaacttcaacaaaatcctaaaaataaaaaaataaaaacaaaaaagcatgctgtcaaaatcttcatcgtaatctctttccgatcatgtcatgaagcagtagcaacagtttgtttccgtctcactgttctgtcctccaacagtctcttttcctcctcctcaacaatttggagtcgttttatgtacggcacaatgtgcgttcgtagtccccaaacaagtcgaaccgtgccctggccgtcgtcaaccgatgaatgcattcgccaagtctgatgct

SEQ ID NO: 39513 - DNA, 913 bp, Heterodera glycines
tagcaaactgtatttttaaattctggccgcatttctataataacgtgtttagaccgcagtaactcggctcagagtgaagattaagggacgcaaaagagacgatttaaaagcgattcgaaaattctatcgactgatataataacgatgcagtcgcggcgttgacaactgagatggaaccaaaagttccataatatctttccataaggctggaaaggcagaatttgaatggccagtctatatttacactgagcacccgttgaagcgggtgatgcgaatccatagcaaactgtatttttaaattctggccgcaattctaccaaaaacgtgtttagaccgcagtaactcggctcagagtgaagattaagggacgcaaaagagacgatttaaaagcgattcgaaaattctatcgactgatataataacgatgcagtcgcggcgttgacaactgagatggaaccaaaagttccataatatctttccataaggctggaaaggcagaatttgaatgaccagtcgatatttacactgagcacccgttgaagcgggtgatgcgaagccatagcaaactgtatttttaaattctggccgcaattctaccaaaaacgtgtttagaccgcagtaactcggctcagagtgaagattaagggacgcaaaagagacgatttaaaagcgattcgaaaattctatcgactgatataataacgatgcagtcgcggcgttgacaactgagatggaaccaaaagttccataatatctttccataaggctggaaaggcagaatttgaatggccagtcgatatttacactgagcacccgttgaagcgggtgatgcgaagccatagcaaactgtatttttaaattctggccgcaattctaccaaaaacgtgttagaccgcagtaactcggctcagag

SEQ ID NO: 39514 - DNA, 886 bp, Heterodera glycines
gttttctgttggtccgtcgttaatcgcgcgagatgaaagcaaatggacaaaatgggaaaaggaagcgattaattggcaactttatgatcaatggaacaaaattgacattgaaattgatgaggacggaatcggggacgggtcagtgaattattcaaaagtttcaaatttattgcatttttgttttaggcttcttgacgaaattcccggcccaagtgatcagcagaaatgaatgattgaatttgctgagaaataatcgatcaataattatggaattttcactttttgctcttgcattcatttttctggcacaaaaattattggaaaatgggcccgacgacgtagtgattttgtccaaaaaagccaatttttcaacggggaagaggtgaggaaggtgtccgccgagaaaacaaaattttagtttttcaccctgcctccccccgccgccctctacgcaccccttggacctgtgtgatttttaaaattttacgaaaaacaacactttttaatgattattgtttattgccaaacatttccgcgtccaattttggcacatacaacattgaaatgtgctatgaaaaggtgttgttccattcaaagaaaggcgtgccaaaagtgagcattttgcttcttccttcgcccttcgtcttccatgcttcttctcggccccattcgtccgggtggtccgcacttttgccaacgattggacaccgttcaatcaaaaattgatcatcctccccaattattcggcctgtcaaccgttcacgagtgcacgaattcaccagctcaaattggtccccattggaatcagcatcatgttcaaaggaatgcaaccaaatgataaagctgacggcaatggtggcactcagaaacagctcaaagaaaggcg

SEQ ID NO: 39515 - DNA, 1399 bp, Heterodera glycines
aaaaggaatacttttttatgattttccagctacattcttgataaaattgatggtaaaggtaaaaattgactttgggttcttaattgtttgtgcccttttttggcattttttgtgtgctttccaaccgtaaaaaatattctttaatggacaagtccaaacatttatttatttattttatgtaataaatcattaaacattcaaatcattaaattttagaatatttgaaatttttatcaaaggacaattcaaatttattgccataaaaaagctttaattccgttaattattgtattttctcgaatgggccttttcagtgtgtttttttatagagtcgacattgttacgcaaaattatttaccctttattttcttaaaataaaattttattattcaaatagaaaactattcttaaaaattagtcacaaattgtttgaagtagctttatcatttaaatttaaagcacaatgcatttcgttaaagtttgctcatcctttctcaatcagagaagtcaggtcatttcttctcactctcctcccatctctcttcttctctcacttcctcactctcctctctttctctcatcttctctcactctcctctccccttctctcatctctcttcttatcctctcctccacccatttttctcattctttcacttcctcactctcctctctttctcttatcttctctcactctcctcttccttttcttctcgttcctcctcctttttgtcccatcactctttcttcgctcctctcctctccctctccttcctattacttcctcttcctcttcacttcttccgctgctattgacctcctccgcctccgcccattgctcctcctatttcgtccctcacttttttgggcagtgactgcacttttctgttgatcatttccgccttatcatttgccgacaaattggggttgttcgcgatttcggtcagttcccttaagcattcgtgttttgcttttccgtcgttcttttttctcattttctcacttgtccgcctttttcgccgcttcgctgaactttctcaccgcttcttcgtgcgccgcttcgccctcggccttcgcccgttccctttcctgctcaaactcgacgtatttcttctgcaaatttattttgttgcttattttggcttttttgtcctttaaattgcctgaatttcctccgattgtttgtccacccattccttcactttttccgctatttccgtttcttttaaatgccccaggctcgtgacgtattggtagaattcgttgattttctcttggctggcctctgttaagaatggcgggggctgcgcatcgccttgggcagctgattcattttgggctcggcacaatgccaaaattaacaaagaataagacgcaaaggaaaggaaaatggacgaag

SEQ ID NO: 39516 - DNA, 976 bp, Heterodera glycines
aaaaaatgcacgaaaaatttcgcagtgttttcacaaggtgggcgataaattttttattgaattcttctatattgcaggtgattgttgtctgataagtgatgacatttctttcccaatttcatttttcagttgcgctgcaaaccgtgccgaggcaccaaagggcgccacgcgtgtcaatgatggaaatgagaatgtgtgatgacaaaaactaattgatgaagaacataacgaaaccgatgatgaagaatgagaatggttagacatggccaactttagcataaaacttgtgaattatttatggaattaattacaaaatttaatgtcttatcatgcgtacgagatgtatatatgtgtacatatagaattattatgagtccaaatacccacgactagagaagcgagaaccgaaccaatcccgaaactcgatacccagaccctgacttaagtccgaaagacaacctggagattgcaaataaaaactcaagaatttctcggttcaagtcaagaatcaagactctcgaataatgaggactttggaatacttttgtcaccaaagactgatagaataggaaaaataatagtcaattgaacatgcacatgacatggacatgagggggggggggggggaatttagttacaatcaagattgacaataaacaattgcagaattttgcatttattttcgtaacgaaataactagaatctagattaaaatggaaaaaatactacacataaatcagcggagaggaacggccaataaggcaattgagagggggaagatgtatcaaaattttaccaaataaaatatagatgaatgtcttatttcatgtaaagtgagatataaaatacaagaatgttctatgaagtatgtctaataataaagtcatcttacacaaatattaaaagtgatggaatgttgtagtctcctaaaatatcacagcaaattttatattgttctgtaaacaaaatcaactta

SEQ ID NO: 39517 - DNA, 946 bp, Heterodera glycines
  unsure (1)..(946): unsure at all n locations
attcgagagcacctgagtggataaagattaaattttatttagtgtgtaagaaatggagatagaccttttgtcaatctttattaatgtataacaaatgtcatttatgcgttctttttatgtttgaaaaccaaatgctaatagattattttaatctttattttaaccgtgcaaaattctaatatcggcaaaataattggagctgaataactgtaagcctttattcaaagagccttttgaaaggccaacctttttcaaataaacacatgttattataagtacacggttcattatttcgtaattgagcagtaaatttggggagttgaaagctatattctggctacattttgaagcatttttttatcccttgacagcttataatattccttatttttatgcattcgagagcacctgggtggataaagattaaattttatttagtgtgtaagaaatggagatagaccttttgtcaatctttattaatgtataacaaatgtcatttatgcgttctttttatgtttgaaaaccaaatgctaatagattattttaatctttattttaaccgtgcaaaattctaatatcggcaaaataattggagctgaataactgtaagcctttattcaaagagccttttgaaaggccaacctttttcaaataaacacatcttattataagtacacggttcattatttcgtaattgagcagtaaatttggggagttgaaagctatattctggctacattttgaagcatttttttatcccttgacagcttataatattccttatttttatgcattcgagagcacctgagtggataaagattagattttatttagtgtgtaagaaatggagatagaccttttgtcaatcttcattaatgtataacaaatgtcacttatgcngtctttatatgtttgaaaacaaatgctaatagattatttttatctt

SEQ ID NO: 39518 - DNA, 1189 bp, Heterodera glycines
cgctactggcttaataaaacaagactcagcgctactgaattgcagtctaaatgattctgacccaattttcatgtattttaataacaatgtaaaatttaagcatcttcaaatataaaagttaaataaaaattcatatgaattaattcatgatatccacttctccatcctctgaattaacatcaggcgagttttcatcttgcacttcattcaaacccatttcttcaaagtattgatcaacatgcagcccattttcatccaaactttgttcaagcaaaagccttgcatcttcttcaattatcatttcttcagcttcattacggtttgacggcggattgaagccaaccaaatgtccaattcttccataataattagacatggcttcaacaaattcatcattgcagtaatccgtgttcaaaaaagccaaaatatccgccttcgctgaggcaattcctctgtccaattcaagagttaattcaagcgggcgagctggcaattgtcttccttcatcaacggccactgcggtttcttcttcagcatgacttagttcctatcatttacgatacaaaagttagagacaaacaagtacctgaaaactcgctatccatcggccgagcaagaaaccaggctggtaaaagcgttgctgtcgtccgtggtaagactcagcatggttgatggttcgatgccgaacaacgtcaaaaagtgcaaaaaagtgcagccctattctgttgttgatccatgtgttgttctgtatatttggtgttgtctaagtagttttacatttatttacgcagtaatcgagaagttcactcaatgcgccctgttgtaaagtttccaatggagagtgtgtgatgagatggcgcatgagttgaagcgaacgggctaaatagttgggaggacagaattgtagagccccaattttgcgaacaaggcgctgaaactcaagtccatttggttcttttgagctgtacaattgcataaatcccattgattgaattcggcgatttatcgcttgcttcacatgaaacgcgcacatttttggtctgacagttggaaaaacatcgcaaaatgcattcactgacgcagattcgtagtcaaaattcgcttgggaaatctgagcaaatcaagcagtttataaaacgtgaattaccattaaaatgccgggaattttgtccaattcttgccgcaatct

SEQ ID NO: 39519 - DNA, 1533 bp, Heterodera glycines
tttctctaaaatattcgattggatttagtcgaactaatccgcatccattttgagcgatacaaaagtaatggagtaaaatatttctacttaagaaagaccaaattttaattgaaaattaaattcacaagaaataggaatgaataaaaatgtaaggacttttggattaagttgcatcacaaatattagatcgataataacggagaggcaagcgtaaaaataggaaaggtgaggggaaaggcagaatatttgatatttaaaggacacattttgcaaaattttttatttaaaatgtcgaattaaattttgtaaaaatgcatttttcacaatatttcttttgaataaaaaattcttgttataaaaaacaataattatattgaaattttacattctataaacaaaatagtttttgatatttttctataaaaatttgtaaaattaataatcaaacctaagaaatatgtataaaaataaacattaaaatactattacattttttagccatttcacagttttgtttgtgaatgctttttttgtatgaaaattgttgccttttaaatggaaattgattagcatttggtgggcacacaaaaggcaaatgctttgtgttgaagcaaaatgttaagagctgttcccacaatttaattatagcaaagtcacgcattggagaggagcggaacggaaaattggggaggggcgaggcggcattgagaaatgaatttgaaaagcatcactgtgcattaagcttgtttaataataaaaattaattaattaaatttaaaaaaaacggaaattaatgttttgattgaggactgattttaggtgctgatttagcaatttttttcggaatttttacagcaaaaaatgtaatacactaaattttcaacttttcgatttttttttcaaacaatatcttttcaattttctccagtcactagtacaagctcagcattgattcttgtaaaaatttatttttttaataaaaaatgaattttaaataccttaaataaataataaataaacatcataaaatgggaaccgtgtaaatgtctgtctacacattatgtacaaagcaaattgattattattggtatttgtgtttgtgagaataaatgaagtgaaatggggggggggaaagaatgggtggcggcgcggcgaaaagaattgacggcggacggacgacggacaccgaccgacccaaaagaaaagacacggacaaacgaaccgagacaaagtgtaaacgcaaatatttgtgacaattaaataatgggtgagtcgagtgagtgaatgagggtaattagtgtggccagcaaacagtgcgtattctttaattcattgcctatgggatgggacacggattgaaaaaataatggggacgcaattcacgcaaaaaagcggaaatgcacgggtcgtgagaaactaaaatttcccgagactggagaccgagaattgaccacgagaagagaccataaaaagccgaaacttttccagggtgaaattaaagataacaaaaatgcgtctcgaaaaagtgggaaa

SEQ ID NO: 39520 - DNA, 836 bp, Heterodera glycines
gcagtttcgctggtgaaatttaagcccgttttagcccggtcaaattgaccgggaccgggccgcccggtaaaagcccgccgggcccgtccgggctctactaagaacataggaattgaccaagtaaaaaaaagttatggtctatgaaactgcgggtgttcctcaaaagaaaggtcagtattgcgatgctcggattcgcctcattcaccgccaccggttaacgacatcttaacaatcgtcccccaaatgcctaatttgtaagatcaagttcaccagtcgttgctgctgaatttagtgaaaagtgaatttccgcttttttattcgaattggggtccgtggtcccaaattattcgaaatggattccggatttgtgatcaaaatgaccctaaaaaccagcacgcattagttcccatagaaaaaataggggcattttttcaacttatcctcacctcatgttaagaaaacacagtcttctggtttattagtagattaatttaattttaaaaaatgttttaaaattaaaaaaaaaataaaaattatcgaaattttaaaaatagcgttgttattaacgttgatggcataatgtatgttgatactaaataaataccgtatattctttaattaaggccccgggggggattatttttcaacctcttcagaaaaagggacataattggagacagggcctttaatggagacagggggattatttttcaacagatttttaatgactagggccgcgacttttagtgatgaaaaatctcgaaatagttaataaaataatgacataaccccaaattttttaattatttttggtgagaagcgtcaaagtctgattt

SEQ ID NO: 39521 - DNA, 950 bp, Heterodera glycines
cttttcaaaagatcgttaggatcgtacgttttcggcccgtacgcaccatagcaaaaatggcgtagtttgaacgacacttctttagggtttgaggtgttttgagtcagaagtttcgcttttcaaaaaaatctttgggatcgtcctttttcggcaaaatagtgcaccatagcaaaaatggcggagtttgaacgacacttctctagggtttgaggtgttttgagtcagaagtttcgcttttcaaaaagatcgttgggatcgtcctttttcggcaaaatagtgcaccacagcaaaaagggcggaggttgaacgacacttctctagggtttgaggtgttttgagtcaaaagtttcgcttttcaaaaagctcgttgggatcgtcctttttcggcaaaatagtgcaccacagcaaaaagggcggaggttgaacgacacttctctagggtttgaggtgttttgagtcagaagtttcgcttttcaaaaagatcgttgggatcgtcctttttcggcaaaatagtgcaccacagcaaaaagggtggaggttgaacgacacttctctagggtttgaggtgttttgagtcaaaagtttcgcttttcaaaaagctcgttgggatcgtcctttttcggcaaaatagtgcaccacagcaaaaaggacggagtttgaacgacacttctctagggtttgaggtgttttgagtcagaagtttcgcttttcaaaaagctcgttgggatcgtacgttttcggcaaaagagtgcaccatagcaaaaatggcggagtttgaacgacacttctctagggtttgaggtgttttgagtcagaagtttcgcttttcaaaaagttcgttgggatcgtacctttttcgggaaaaaagtgcaccacaagaaaaatgggcgaagtttgaacgaccctttcttaagggtttgaggggttttgaggtaaaaagtttccctttt

SEQ ID NO: 39522 - DNA, 972 bp, Heterodera glycines
aaacaaaacccgggacttttatttacatatttttacatattcgggctttttatacatattatacatatttcgacgttttatacatatttggtacatttttggacttttttctaacatttttcatttttttacatattttacaaaaaaaaaccaaaatttcggcaaatttttcgtacatattttcatatttatttttgaattttgagaatttttgaaaatttagagaaatttcttctgtaaaaataacaaatatttttttgaaaatgtactgctaaaaaatcaaaaattaattttttaaatactaaaaattttgttcatcattttctaaatttggtctttttttattatatattccacttttcctatcaaatgcttttaaagataaagttgctctacagtatagacatacgtttcttaccatatacaaatgagggtgacctgtagttatgtgtggggtttagggacgaaattttgtatgtgaataggacacagttgttcttaacaaaagtgttttcattttctgccaaattattccgagttatgacgtgcttgctctcgagtctctaaaattttcggtctcgaacttcattagtggtgtatatggtaatgctgctttcacaattttttgggtcacaggtacgggtccgctcggtgcaagtcattttttccccttttacttttgcattttgtcaaattatttggccgagtgaaatgtttttcacctcataatactttcagcaaattggtttacattgtgataaaaagcccgtttttaatgcttaattaattaaaaaaagcaacttttttcaaacaagtaattaagaacgaactaattaacaattaaaattataaatttttaagattttgcccgcccttcaaattttggcggaagaagtgagcaaaatggcatgatgaattcattaaattagagctgatgtgaaaagaaatatctaattgtcatttgatttttag

SEQ ID NO: 39523 - DNA, 991 bp, Heterodera glycines
tccccgaaaacgcattactatatacgatgagccctacaaatggtcggttggaaaatggctccataactaagaatagatattctcagaaaaatggctatctctttttctacagccttccacatgaggttttcgccgaaaacgcattactatatacggttgagccctacaaatggtcggttggaaaatggctccataactaagaatagatattctcagaaaaatggctatctcttttttctacagccttccacatgaggttttccccgaaaacgcattactatatacggttgagccctacaaatggtcggttggaaaatggctccataactaagaatagatattctcagaaaaatggctatctcttttttctacaaccttcaacatgaggttttccccgaaaacgcattactatatacggttgagccctacaaatggtcggttggaaaatggctccataactaagaatagatattctcagaaaaatggctatctcttttttctacagccttccacatgaggttttccccgaaaacgcattactatatacggttgagccctacaaatggtcggttggaaaatggctccataactaagaatagatattctcagaaaaatggctatctcttttttctacaccttccacatgaggttttccccgaaaacgcattacctatatacggttgagccctacaaatggtcggttggaaaatggctccataactaagaatagatattctcagaaaaatggctatctcttttttctacagccttccacatgaggttttccccgaaaacgcattactatatacggttgagccctacaaatggtcggttggaaaatggctccataactaagaatagatattctcagaaaaatggctatctcttttttctacagccttccacatgaggttttccccgaaaacgcattactatatacggttgagccctacaaatggtcggttggaaaatggctccataactaagaata

SEQ ID NO: 39524 - DNA, 1027 bp, Heterodera glycines
caaatatattttccaaaagtctgtgacactttctgaaaataattctatactcatgtatttccacttattagattttgcaggcttattgctgcatgttctttgacacttcttcaaaataacctatgccctttattcgttcaaaacagcatctttgttgtttcgctttggattgacaagcccgatgataaatagctcgagcgcaaaacgtgtgcatgtttggaaagtatcgttcataccaataattgagggtttatttttaattgaaattttatgataaaccttattatctcagaagctatttaattgattcgaatgtttttatcccggttaattagagcaacaaaaattggtttgaatcgtgaagtttatcatttctaactcacttctcaaaattgttgataaattgcaaatatatttttccaaaagtctgtggacactttctgaaaataaattctatactcatgtattttccacttattagattttgcaggcttattgctgcatgttctttgacacttcttcaaaataacctatgccctttatttgttcaaaacaccatctttgttgtttcgctttggattgacaagcccgatgataaatagctcgagcgcaaaacgcgtgcatgtttggaaagtatcgttcataccaataattgagggtttatttttaaatgaaattatatgataaaccttattatctcagaagctatttaattgattcggatgtttttatcgcggttaattagagcaccgaaaattggtttgaatcgtgaagtttatcatttctatctcacttctcaaaattgttgataaattgcaaatatatttttccaaaagtctgtggacactttctgaaaataaattctatactcatgtattttccacttattagattttgcaggcttattgctgcatgttctttgacacttcttcaaaataacctatgccctttattcgttcaaaacagcatctttgttgtttcgctttggattgacaagcccgatgataaatagctcgagcgcaaaacg

SEQ ID NO: 39525 - DNA, 897 bp, Heterodera glycines
  unsure (1)..(897): unsure at all n locations
atctaaaaattctttcaattatttaatttntggctaaagaaataggaattagcttttacggcatcttctgacaatgttttaatttaatttaatttttttaaatttttattttttacagaatgtgcatcttttatgattttgatattttgacaattttaactacttaatgtttaagtttaagccaataaatttttggattttttaattaaaaaaaattcaaagttgttcagttattttcaaagaaatatatttatactcacggaatcatttcagcttgtagtctaaatgcatttaaatcaaatgatttcgctgactttatttcaaataactgctttgtccttagtttataattttttaatttaacaaatatttagatttaatcattcatacatcattttttaaattaattttattcttttttttacatttttttggttgttaaagaagaaaaattaataaatttatattatatttttttagttcataaagattttatggttcttatttttcttattttacaaatttattaaaataattatattctctatcctaaaaaggatatttaattatttttttattgtatttttattagataataatatcacatcattatgttttttaaataattttaaaatcatattattataaatgcaatttaaaaataaactgtaatttattttaaataattaattacttgctctttatcttttataaaaatgaagttgtgaactgtttttaaagtgagttaattttattttattaatgcgtattattttttttttanatttattgacatttaaaaaaacaattattctttgaactttagtaaaataaatcgttgtttatatgttctttaagaaaatattaattcagaattttttcttttttaacatttta

SEQ ID NO: 39526 - DNA, 1031 bp, Heterodera glycines
tcataattttttttaaataacacaaattattaattcacttttttggcgacttaaattaattttcacatgattttaaataaatccggatgttttaaaaaataaatttgcttatggattagttactgacggattgcccacgataggagattttcagttgggataggatttcaaggtcccaaaaattttcgtaaagggaaatcgcaattccgaggcaaaaaatgtcggaaatcgaaatttagtgcagctggtgtccagcattaaattgccaatattcaaaaatgtacccataaaattttgtatttacgttttgggggacgagttcgaggcaaatttttttaaaattttgttttcaggggggttcttggaattttctgagtcccaaaattctttattttttttaaataaattaacaatcttttaaattttttgcttttaaatcgctgtttttgtggcaatgttttttcaaaaaacttttttggaacagtgggagggggcggggtccggcggtgccgataggcgccgccggaaaattttgagcgagatttgttaacaaaatttgtcaaaaaatgacaaaatatttggttaatttatgggtttttaggctattaaaatgaaaaaaataataattttaaattaaaatattttttattaattaaattcaattaaaataatggtaaagaaaataaaaaaaattttctgttccatcagggaattgaaccgaagagacaaacaatgaagctcaggaggtttagccactaaaccacataagtatttaaacatttgctttaaatggaataaataatttaatttattttacaaaaatttctgatccctcaccaattccttctcttttctcacccagacccccattcttaccagtcttaatttagtcccgccaggaccgggactggcaaaaccgggaccgggatttcaatttttccaaaaaccgggaaggaccgggaccggaacctgaaaaaaccgggatttcccgccccggtcccggtcccggtcccgctcaactctaattgaaa

SEQ ID NO: 39527 - DNA, 919 bp, Heterodera glycines
ctgcagcaggagaaaaactggggcagcaataaaaaggtaaattttttaatttccaccggggctggcctctccctcccttgattgcctaattttaggaggattttcgcaaatttttagacctccccaattttgggtgaaaatgcaaaaaaattccaagatggcagagggtggacaaggactagtccaaaaaatgctgctgatgattaccgacccaatacaaggggaaaccggcatattgtgaaagccagccaggcaaaagcacaccggcagcatgcttagattaattaggagggaaaattggactaattagttgcaaccgaaacttaaaagtggccaattaaaatgaaagaaaaacgaaatactgtggtcatctgcaaagcaacctcggtcacacataaatttggagaccaaaaagttaactagcgcgttgcgctggtgaaaaatgtgtgaaaacagacagactgcccctgggggatattttgcggaacaaaaaacgatccattaaatcccattaatcctccgccactgtgaaatgagtcattcatcccctgaggggatcacaaaaacagattcaaatcagcagcagaagctactattatttatacatacaaataaaaggcaggcccttggctcacgcagcgggaaatgaaaacggggacaaaacagaagcaaaaaataaatgaataaaccccccccccccccggggttgaatgggcaaatggaaaaatgaatagaaaaactccctcagggcaaaaaccggaaaatcttctatttgtctatttttacttttctggcagttataaaactgttgttcaaagggccttgaaaatggatggaaaaaaattcaaattttattttaagtaaattaagaataaaatgtgggggaggcaaaatgaaaacaacataatttgatgacggt

SEQ ID NO: 39528 - DNA, 1231 bp, Heterodera glycines
  unsure (1)..(1231): unsure at all n locations
gatcagttggggacgaggttgataatgatgaagcttcttggtcagtcgaagctgaaactgctaatgatgaaggcgcttcttgaccagttggagcggatgttgctaatgaagcatcttgatcagatgaagctgatgtcaataatgacgatgaagatgaagcatcttggtcagttgccgacgacgttgctaatgacgaggaggatgatgaaaatggggtctgatcagttggggccgagattgataatgacgaagcttctttgtcagttgaagtcgaagccgacgttgatggagatgaagatgggttcagatcggttgtagctgatgataaattcgccgtttcttctccactcagcttcatcttctgtatgtccatgccccggcacattttttctgccgttttcagtaaatctaaattggcacataattcacggataaaaatctttattcgtttatgattttcatccaaaaaaagtgattaaaagctcacatttcactgcacatgaaatgtaatgaaagtcactccgatcggttgaggagggcataagccgaaactgtgcctggaagtgaaagcaaaagttaaattcaattgttcagcttacattagttgttctgcctaagaatttttgttcaacttcgatacaacctaaaaatatttttcagccttttctcgagaataaagtcgagaaaacccttttcttttgctcttccctggcgtgtctgtattagatctcgactttaaagcaaagtcaattattttctcgaattatggcgtgactcaataccttcggtccgaaaactgttcaccaaacggtaaactgggccaagaatttctcggaaattttttgtgccctacaatatccaattttggtgtttattttaaggaagtccttcagggtgccggaacatccatccgttaaatgatgattgcttatattagttttttcacacttttaaaaatttatttaaacttaaaattaattagattttaattgaaacatttaagtatttttttagaaatttaaaaggatttcctagtaagccgtccttcttacgctgtgctggtgctgatccgcactgttcagcgtgcatatccctcgcccaccgcctcccttttctccgtccatttgggtgtactgtaggcttcgacaccgtctccgtcgcccttctcctacggtcgccggnccaatttcgttgtcggcaccgccgttgtcctcactttgtccctcctcaa

SEQ ID NO: 39529 - DNA, 1042 bp, Heterodera glycines
atttgcatttcagctcctcttaaaagcataaatatttttcagaggtcatagtcaaatttgaaaaatttgtacgcgatgaaacacgcaattttgacgccaaattggtggccctgcgcattgaaaatgctctaaaaactggcgaaaatttggacgactcttcgcttggcgcaggcgcaaacagcagtaccgacgatgttgtgaccacaaattgcgatgttagtcaccacgtaaatgtgcatcatctttttgcccatttcacttaaaatttttaaaaattaaggaaaaaaaatgaaaatttcattttttagagctctcctaaagctgtgaccggaaacgctgacaatgaggcagaaacgctttttgaagagcaatttcaggtgcgcaattggataaataaaaattggactttttttcatttgggaattttaagacttacaattaacgcgttgaaattttcgtgtgtaaatttttttgtaattttgggaaaataatgagtttttaatttttagcattttcttttatttttcaaagttaacaaaagcttattaagaactttcaaactataccaagaatgtttaatttggttgaaaaggaaaaaaattatgattaaaaaactcgtccagtgactgtttgtccaactccgttaaaaatagagcctcaggtggctcaattagaaaaaaaattgtatccaactttccatatgttttttaacaccatttgtagagtaagccaattgatatcatggcagttcgtacaattttttatattgaaaaaaaattaaattttttacgaagaagaaaaaaaaaatcataattttttttttaactcatttttgtcagatgcgttcattggtccgtacgcgcaacttgaggttgaacgcatcaaactcacttgtgagcaaacacttgcccaatcagttgccgatgccgtcgagtttgacaaacattcctatgaaatttcgatgctcaacaaaaaattacgggttgaaaaaagagtttttgaaaaaaattaaattttaaattattttcagcaagtttgcatc

SEQ ID NO: 39530 - DNA, 977 bp, Heterodera glycines
  unsure (1)..(977): unsure at all n locations
tccccccgaaccgatgcgcccagatttatggggagaccgaatccttcgggaatagcttccctatagcctgtactttaattctgcgttggatttttgctccccataattgtttgagtaccccaaacggacacttgaaaaaatcgattttttttgttttcggggcagtccccccgaaccgatgcgcccagatttatggggaaacgaatccttcgggaatagcttccctatagcctgtactttaattctgcgttggatttttgctccccataattgtttgagtaccccaaacggacacttgaaaaaatcgatttttttgttttcggggcagtccccccgaaccgatgcgcccagatttatggggagaccgaatccttcgggaatagcttccctatagcctgtactttaattctgcgttggatttttgctccccataaatgtttgagtaccccaaacggacacttgaaaaaatcgatttttttgttttcggggcagtccccccgaaccgatgcgcccagatttatggggagaccgaatccttcgggagtagcttccctatagcctgtactttaattctgcgttggatttttgctccccataattgtttgagtaccccaaacggacacttgaaaaaatcgatttatttttgttttcggggcagtccccccgaaccgatgcgcccagatttatggggagaccgaatccttcgggaatagcttccctatagcctgtactttaattctgcgttggatttttgctccccataattgtttgagtaccccaaacggacacttgaaaaaatcgatttttttgttttcggggcagtccccccgaaccgatgcgcccagatttatggggagaccgaatccttcgggagtagcttccctatagcctgtactttaattctgcngtggnattttngctgcccataatgtttgagtaccccaaacggacacttgaaaaatcgattttttttgttt

SEQ ID NO: 39531 - DNA, 941 bp, Heterodera glycines
tcgagaaaaatatcgggtcgggtttcgggtcgagaaaaaggccgggtttcgggtaacccggaacaaccctggtgggcacggcctgccaaaattgcagaaatttttctgacttggaaacaagtcatgaccagagaaattctaaaaccagatttttcgtatgggtttcgtcgacgaatttttttggtttcgccgggactggggttaattattcaatggtggcgttaaggattgcagtcgggattagatttttgtatatactttaattaacaaatcttgaatcttgacccttaatttatgacgggaaagaattaccacgatccaattaaatgctattgtgttttagataattcaaatggattttgcaacggggccaacgaagaaattctgcgagatctgtcggagctggattgacttatttgaggataaaattcaagtggaaaagttgatgagtaagccggagtgttttgatttaaaataattaattaattttttttaaacaaaaatgtcatctaaaagcattgtaaaaaaataaaaataagtttatgagcattggaatattattttccattttttaaaccttagatatgaaaatttgtataaataattattaattctttcctataagcccttgaattctaaaatatcttcttatctaattcaatattaattaattaactaattaattaattgcccattttcaaatattagtgcacaagcgttgcttcgtttgcgcaatttgcgactgtccgcttgagccgggcaactgttcccgagatgacgggatcatctactgccaattcatgtgcaacgaccgtgtgccagtgtggttttgttctgcccatatgatgttgggatcgggcgaaaaatgccaattgttgaaggaaaaatggatgaaggaaaatgaggaaaagcaggaaatatgacacaacaaatgattaatg

SEQ ID NO: 39532 - DNA, 1073 bp, Heterodera glycines
gcataaatttattcaggcattaattttcccgaattatgatttatagagaatttaaattgtttttggctatccggtctccaacaaaaaaaagactcggttcgggtccctaaaggtcgttttgtcctcaaaagatgggattgtggagggggggggggggagaaatgccgtccctcggtgaaaaatgagcctttgtgtcaataatttttttattttataccccaatttgtacagcgttcgttcgttcgtttctttctttccattttctacctttcgcctctgttctgtttgtattgacccttctccaattcgtcctatcgttagtttgtccatttgaccttcacaatgattgggtggcgagtgcgtcgtgcccttctccgtttgcccttcgccgcttcttccgctgatccgattcgatgctctctattcgcttcattctcttcactcatcacttcattaattcattcttccacaccctttctcagcaggtggccttcgttagccattccctccccccgggcgatttactaattcattctttcattcattcgtccgtccgtctctccaaaaagggaccgttcctttcctttttgatattttacttaggcttttgatgctacgaattgcttctctttttctgcataacattcactgaaatgggcgatcatttgtcttcatttgcctaaaccctttcaaattttcttctttattaattatttttattttcagccatttttaatttttgcactaacaaataagttctttcttcgtcatctaaattaacactaaataaggcttagttttgaataatttgctctttttcttctctcattttttctttttcttgtcgcgcggcagcaaaatctgacaaaaggcggcacttttgtggcgggggacggacggacgagagaaaattggcggacgacggatatggcgatttgtgctgtttttgttgctgttgccgcgtgaaccgccgattcgctctcctccatttaagctttgtcaatcgatcgatcgttttctctgtttgtgttgtcgccgccgccgaatccgccgaatattctccaatttcaaaa

SEQ ID NO: 39533 - DNA, 1323 bp, Heterodera glycines
ggaactcattgagaagcttcaacaagccaacgacaaagttgaccaacaaatcgcagaggaacaccaattgcgaaatgaagtccttcagatggcaccgcgcgcgatgaagaaatacctcgacacacgctttgaacgactggtgcacaatttagtcaaattttcaaaaattccgttttaaattttagatgaatgccaaattggaattcccccaaatggcggacagtgaacgcaaatccgaggctgagttggccaaggcgaaagaagaacttcgccagttgaaactccaagcagccaaagaggcggaggaacagaaaagggagttggaggaggcgcagcgaatggagagggaattgaaagagcgagtgaatcggaagttggccaaactgagggcattggaagagatttgatggaaaagttgggcattttactttgattacttacacttttgattttactgtacttacatttttttatatttccttaaaaattctgaaaaacagtgaattgcaattgaaattcaaaataatatttatttgtattagattcgtgttttaaattggttttacaaatacagaaacatgcataaatatccgtttggtaatgcaaaaggcgtcacccgcagctccgctcgttcgaatgcgaatcctccaagtgcagcgaccgaatggttccaccgcaaattcggcgctgccattcaactttcggagcgaaagaaaaagtaaagtcggcttacaatcaacaaaatcaaattggtttttaattttagcgaatgcgaacgcaaacaaaaaaagcaaagtaaggcaaaaatgtacaaatacaaatctttaacatttaattaaaaacaacaggttatcaggaagtgaagaaaaatttggagaaatgtttggccattcgacgacaagaagcttacgaacggcgatgtaacttttaacacgcagaaaatgaactgtttgaaaaaaagggtggaaaaggagggagaggataggggagagggatcatgagaaggagaaagagggaggaagatgaggaaaaagaattggaaaagaaaatcgaacaatattattaaaaatagatgggcgtgattattaaaatatatgattaccgaagatgaatttttttttttggaaaaaaagaaaacttgcattatattaaaacaaaatagaaaaaatatataaaagtgggaggtgggcggaattccaatcgggatatttcggggaaaaaacggtgacagaattcagggttcgctttttttattataaattttatttaaaaatcccggaaaattctcttggcaaatacaaggcgaaacccctgttcctcccc

SEQ ID NO: 39534 - DNA, 355 bp, Heterodera glycines
cgtggtgagccgaagttacaaaagtatcaatgtgggcgaagttacaaaaagtatcaatgcttgaaatatttaaatttaattattatttaaatttaatttgctaaataatacatcataacttagcttaagcttagtcaaattaattaaacttagtatttagtgacagcttcaagtatcctctactacttatgtaatttttaaaaaattagtaaaaacttacaaaaagttgtaagcaaaaaagctcaaaaaatttagagtgaacaattttggccctaacttttttgaaattcaataaaattttttgaaatttagcagaacaatagaataatctttgggctattttttcatatcaagt

SEQ ID NO: 39535 - DNA, 1142 bp, Heterodera glycines
  unsure (1)..(1142): unsure at all n locations
gtgaacaaatatgtaaggaagttgattatcacagcatttaaataggactcacgaaattaatttgatatgaattttgcccaattccaattaaaaagcattttttgggtgttggtaaatagctgaaaattttttggccgttgaagagcaaaaaaaaaaagagtcgatgacttgccaaacagtcaaaactttataaaaatttttggaattggcaatggctcttaagattgatcaggacaggcccaattcccgaatcgctgtctattcaagaacccgagaatttaaaattagaatttaatatttttagctgctggcaactcactcagattttttccgtgctttattttttggtccaaatgcagatgaaaacccaaaaattgtgatcgatgacgagggtgaaaatgccgtggcaaattttgaacggacaatttcaatgctgagttcacccgatgcagaattggatggtaaataaaatcggaacattcatttattatattttaatgaactaattgaatgtaagaaaaaatgaccatgtttttgggttagagttggataatctcttccagttttggttttttgggttttaaaagcccgaaaatctttttgcatttaccaaaattttgattgaaatgcaatcaatgcaaaatgcaaaaaataagatcttaaatgactttttctaaactaaaaattcatgaaaaatcaaaaaaaaattgagtaaggaaaattttcattttatgcttttctaagattaaaaaaataaaataataattattaaaaaaataaataaatttcagatgactatgtggaaaatgttcttctgttggccaaccgttttctgtttgattccattgagaatcgttgcgtcaattttcttatgaacgatagccaaaagccgaaaattttcaagtttcgattggctaatcagtgtgccatcattggcatgaaggtgaaaaattggactaataaaataaagtcaagaaaagaacggcagctaatcaaacacgcttcccccctcatttcggccattttttanataggagaaaattccattanatcaaaaattgcaaagattcctgccaatttgtcataatgtataaaataataaaatgattttaaatttagaaagcaattttaaacgacttgac

SEQ ID NO: 39536 - DNA, 78 bp, Heterodera glycines
tctaactcgagatcggctcttgcatttttacaagggaaaatcccccaataaattttaagttttgcaaagttttggcgt

SEQ ID NO: 39537 - DNA, 480 bp, Heterodera glycines
  unsure (1)..(480): unsure at all n locations
tctanngagtcactgaaaaanagcggaaaattcaatttattaaatataagaaaaatttggaagtgtccttttatccaaacatcgttctttagcctaatatatatccaaaatgattatgtaaactttctaacataaaatttgttttaatatgtgatcctaaatgccgaggtcaacaaatttttaaattattttcgaaaaccgtcattttttaattttatgggtcaaagaaatgagttttaaagcggactcgaacctcctcaatctacatattttcaattgcatttcttacaaaacccattgaaatcacactggcaaatactttcagcccaattaacgggattcaaaattgaatcggtgtggcaatttcttgactggaccaataaaataaccttaattttttttggtacttatttcctttaccgggtacttttaacatacattttcagatgcctataaatgtgttttataaattaatgaaaa

SEQ ID NO: 39538 - DNA, 864 bp, Heterodera glycines
cgaccccaactgtccccgaagttttaaaaaacgcaccgcaaaaaaaaggtggaaaaaatggacaaataataaagtttgtttctaaaataaatatatttcatgaaaatattttttaattttcatgaaaaaatttttaaagatttttgtttggatttttcatgacttggactcggtttaaaaactaggactctgacccggctttctgtacccggcaataccctgacccggtatttgcccaaatacccaggcccgtacccctaatttaatatacgattttgaagttttttaaattaaaaataaggctacagaaaaaattgaaaaactctcgcctctcgtcctctcgccaactctcgtgtttttggggactctcgcctctcgccaaactctcgctctcgtctttttggggactctcgcctctcgccaaactctcgctctcgtctttttggggactctcgcctctcgccaaactctcgctctcgtcttttctgagacaagtcacacccctgatatgcagggctcccagatttttggaaaatttgtgtgagattttcgttttgacgctttttaaacacccaaattattaaattattatcaaacattatcagggttgccagatctgaggatttatcctcattttgtggctttttgataggtcaatgaggatttttttggaaaatgaggatttgaggatttttgtggctttttgagatgccagaatctgaggatttatcctcattttgtggctttttgataggtcaatgaggatttttttggaaaatgaggatttgaggatttttgtggctttttgagaaattttgaaatttttgagggtttttggggaaaacactcagaatccttttaaat

SEQ ID NO: 39539 - DNA, 940 bp, Heterodera glycines
ccattgaaacggcacttttaatttatcccatgacttttttctgttctttttgccagaaattggccgagaatttgtcttttatgagcagcgattgtcagggggtaaaggcgtgacaagttgacgacagcacaaaaacgccgtcaacagcacaccgaccacaataaaaacgatgactgaaaagggattggaattggaagggactgatcagtgatcagcagagagagtgagagaggaacagcgaaataatcaatcaatcaggaaagggactgagaatgaaggcattgaggggaaatcgaattatgatcaacgacaggaaaagccaaaattggaatggaatgctgatcagccaggagaccctgattagtgcaggaatgatcagaatgatcaaattaaaccccgggtattatgtttgactagcgggggttgtggcatacgcacccaaaacgaacaccgcaacattggcatggcgttgtgcgtcgctgctctcacagttttgctccgtctgtccttctgctgctgttcccatttctgttgtcccaatttgctccgtttggcttccgtttcccattgcttttcccatttctttttgtccttccctttttcctttttctctttgcctttcttcttcacccattgcttcttctttttcttcttcgtcttccttttctcccttttcggcttcttctgacgatgaccgtgccgtactgctccaatttccgctgctccctccgccgtcctttgccattggcctcccccgtctctcttcgcttttcgaccgatctgtccaccatttgatcagctgccgataattggacaagaggaacgcctctcagatcggtaagtttctatcattataaagacatgtttaaatcacaaaacatatttcattttcttatattgaattgtcatataaaagatcaattgatttacttttttattc

SEQ ID NO: 39540 - DNA, 1224 bp, Heterodera glycines
cagattaatgcggatgactgttcccatgacgggtctctgtctgtggagaatgtgctttgggccaacacggtgttagcaagcggtacagccattggactggtggtgtacaccgggcgggagacgaggtgagagaaccaaccgatcgaccacttattttttgtacactttttcgctaacattttttggttacatgctgccgataacatttacaatattattcaggtcggtgatgaacacgacattgcccgacagtaaagttggcctgctcgatcgtgaggtgaggcaaatttgcgaggaaaaaagttttagttgaacaaagggcttacaattagctaggggcacaaactgaattgtgtctccaggtccagaaaagaaatacaaaaggttacccgccaaggtttcagaaaacggcagaattttgaaaaaaaaccaggctaggacacggctttaagagtcttactcggaaaatatttctaactaacaaaacgtcttgttttaatcagactccggatcctgatgaattcctctaatccggaagaattaaaacccccaaaaaaaccacaccaaaattgtcatcctttgtcgttaaatgaggtgccttccccctcctgaacaggtgaacaacttgaccaaaattttgttcctgttcgtgctcactttgtccgctgtgatggtgctgatgaagggtcctgaccatctgtggtaccgttatctgatgcgctttgtgctcctcttctcctacatcatcccgatttcgttgcgcgtcaacttggacatcggccaaactgttctactcgtggcaaattgggcgggacaaggccatcgcggagacggttaccattttattttgttgaaaattccgggtttttatggtcgagcgatataattaatgccaagtatccttgtatttggtaattatgtcgatcattattcgaaaaatgttcaattcgtattccgaattttcttaaagtcactttttaggtggtccgaagcagtaccatccctgaagagcttggccgaatctcttttctgctgtccgacaagacgggcacattgacgcgaaatgaaatgcgattcaaaaaggttaatttgtatatccaatttgagagagtagggcgggagaaaaattttacaaaaaatcgttttttaagtcttggtaagtgatggttttgaggatccccgtgaatttgcattttatggcttcatttttaaaaacattttgtt

SEQ ID NO: 39541 - DNA, 1112 bp, Heterodera glycines
ccctcggattatttttatccatgcgcttaaaatttttctttggtgaatcatattgtaaataaattgttaaatttattacattttatggctttttgtgtcggacatggcatcatcgtacccactttcgctgctgctgtcgctgcctttgctttcatcgtcgtcggacccactgttttgcttgttgccgtccttattatgcttcttagccattgctcccgctaaaaagtttattttaaataaaagaataagtaattagaaatgtaggataataagaaaacgcgaagaagaaaaaagcaatgaaataacaataggcattaaaaaaataaaaatttattttgcgtctctgcatttattggagtgagagcgtagacagagaaagatagagataaaaaaattttccgaaatctgagtcattcggttttatttattttttgcaaaattaattcataaatattttttcacaaagggttctgaaacccaccaaattttatttacaagttaataagattctctgatgcttttctatcaataacggaggtgaataaaattttaaaaatgatttaattgcgttttaactttgggaaaaagtttacgcttaactgtttagctgagagattgatcactcttattttttgctaattgagcagaagcataccaaactttacagggatactccccggaaaaggactaacttacactgaaatgatcgccgagctagcttgctctagaaaatttttcaaaaatctgagtctttcctttttattcattttttgcaaaattaattcataaatattttttcagaaagggctctgaaacccaccaaattttatttacaaaataagaacattctctgatgcttttctatcgctaagggaggcggataaaatttcaaacatgttttcattgctttttaactttgggaacaagtttaagcataaccttttagtgagagcttgatcactcatattttttgctaattgagcacaagcatacccaactttaccgggatactccccggcaaaggactaacttacgctgatatgagcgccgagctaacttgctcctaaaaaatctttccgaaatctgagtccttttcgtttttattttttttt

SEQ ID NO: 39542 - DNA, 1000 bp, Heterodera glycines
  unsure (1)..(1000): unsure at all n locations
attttgtctttaattacatatttgctttaaaattactgctaattttataagtaaactgcattactaggcggtaatgggcttccgcggttagtgaaaggatggtagtcgtatgttcgtgtgagttaaaccagtcgacaaattccgtcattttcgccggcacttcttcccaaggcacggcgacatgctcgcgcacactgacgtccgttgttcggaagtcgccggcgatgagtgggttagtcgtccacattatctcgcggtgcaggtgcagcaccatctagtaaaaagcactatgacccgacccataaaaattcattttcaaattttcagactttaaattacgatgaattgataggacaccattttttcgttataaaaaaatggccgcaatattccctttttagatgtttttctaagattttcatataacgaaattaacctccagtgttagttcttttgcgtatatgaagttagcgtttaaaagtccaaaataacgcgcgtcatgcttaaaaagagagcgctgatcccataagaattgttgatattccagattggccattattgtgcttaatttcactttcaaacagtttttaatttgctttctatccatactaccgggttttttcaataattaatcgctagaaaaaaccttcgaacctcccatttctgacagggaaagaggtgggtggggcattaaaatgaaacaaaattttgtcgacgacgggaataagcaagatggaaaaagccgaacaacaaagacgatggtgctgcagaacgacgcgttgtacactgctcaaaactcgcggaacgatcaaataattcgaacgccaaggtttatgggcccattttagcataaggatttcagagggnggaaangtcaagtctaaaaatgagcaaaaatatnccatgattttggtgcactccgtcctgtgaaatttttaatattgtcagccaataaacggctaatggaaagtttcangaaaaatgggtggttaaaattaaa

SEQ ID NO: 39543 - DNA, 831 bp, Heterodera glycines
tcacagaaatgttaaagcgctagaacagagttgaaaaattttcattaatttaaaatgttctgctgcctaatttacaaatttttcataggctaactttgaggcctcctatttcgttcaatttttcaattttttttttataaaaatttttttgtaaatttattaaaatagcggcgaatgctttttagttgagcatgtccatcactgatggacgacctgccgatccgtcgtcaacagctgcacttggggtggtcaccagtgctggaagtggtggaaaacgtgttgtgcaagcaaaacataaccaggtgggcgtaaatttttaaaattttcttattatttttttaaatataaaaaaatctctagtaaatatttatttcaattttgaataaaattttctttttattttttttaatataaaaaaaattctttgataaatatttacttctaattttgaataaaattttctttgttatttaaatatttctggattaataattttcttttatttttaaaatgatttttttgttgtttttaattttataattaattaatttgtaaaaagaaattttataattccgtaaatttttaattatttttttaaattaaatttttattttaatttttttattagtttgccattttattcctctatttttccctttcttttttccacccacaaattctcacccttaaaaaaaaattaaaaaaaaatatatttaaatgacaattttttaatttaattaaaatattttactattttttttttctttaaaacacatctcttaaatgacccattttcgggggaataaattctatttggatgatgcccaaaaa

SEQ ID NO: 39544 - DNA, 458 bp, Heterodera glycines
ttttaatgaactgcttttaattaattttttaattactcaatccgaaggtaattaaagcgaattctgttgggcaacggacggtcgggcatggaaatggcatatatttgccattaatccgcacatagttttggtttttagtccggcgcccatgcgaattgttaattctctccaaattgtcaattctgttttgccatcgaaatgtttgttcaataaaacatcaaaacgaggtgaaagcattgccaatttgaggccgagttgaggacgatcaaaatgagggaacatgtccatcaaaacatcggtacaaatccaactgaaattgtggaataattgagcgatttaaaatttttaattcgataaattctcaaagtttcctcaaaattcgtttattcattttctttgccacgcgaacacttcgtcgtttgccaaatgatgtcaccagtgaacccatcgattgctgt

SEQ ID NO: 39545 - DNA, 1249 bp, Heterodera glycines
ttgtgaaattaccgtaaccggaagaccgacaaatgttgacgagtgtgaacaacacattctttccaaagtagcgcaattcaacacgaacagaccttttgatcaattcgcgtacaaaactaactgatttacaatgacaattttgcaatttgagcaacaaatcatatatcccttcttttatcgaaattactgccatctatctaatttatttaagaaattccgttttcgtctaccaggaaatatttcttatgtatttttgatcttgttcatcttcatcactacttatcatgaaaccctttgtcacaattgtatttaagagactctatagccatttgagttgttgataaaatacgaaaacccagtgggtaacacccaaattaatctttttttttcccctgtcaatggtttgtgatacccacgaaactttttatttaacatttcgggatgtgcgcgaccgagacccatctccatactttttggcttagctacttttttgcgggatttctgcattaggctcccgtaccgcgaaattctcacccattaatttttaccccagattgctttaaattttctttccttaaaatttattgttttaaattaaaaatttacatatcatttgagctttaggctacatcaacgattttccgagtttttatttcccagattctattaccgtccgcatttataccgaataaggctgcttaatttgcaataagaacggcagttaatttatagattagaaagagaaatgcaagagcactatgggtacgccccagtggtgctgaaatttggtcgttacttaaaaaaccatcataatcaatatttgcgcaactaattacatgatttaatttccggaaatacgtcattaaaaaattaattaataaatggtataataaaaataaaagcaatgtaaatttaatatttggcaattcatttaataatttccattcctgttattctataaaattttcaacaaaccctattaaataaaaatataatatatactttcttgaatttaaataataattgaaattaagaatgaatttgtttaaatatactccaatactaatctgtatttttttactcctttttttataaaacgaaatcactatgagaaaatcaaaggtggggctcgaacgtccaattttgatgcatttatcaatgataatacattaaaaagtcggtacttgtttggtttacctgatagatttcgtatacatttttagatgcctataaatgtattcattttaca

SEQ ID NO: 39546 - DNA, 965 bp, Heterodera glycines
gagataatcaccactattcatcgcactccgtagagccttatattccgcctcgggaatcattaacattttctttgcaaatttcatgatgttattttttctaataaatgttgggctaaaacactcaggacaggtatcaagacagctcccagggctataccactcccctgttgtatcctttttcttgccgttttctctgaacgagatttggcaatttctctataaaaatcggcgtattgtgccaaccttcttttttgtttgttcgttagtttaaaactaaaactcaatatatttgcacaaatttcaacgattgccaaaatttggtcagctgtagcgttttcgattaattcgttcttcttttgttctgatctggtggaggcaagcttctttaggaatgctgtattctccttcacttcggagctaaatttatacatttttaatttaatttaaattcatattcttatatactattcaattggtaaataaatttccagagtctcatctggaaaaattttgctacataatctgaattcctcatcagaatttgggtgcatgttaatcatgagatagctaaattgattattggtcgcatcatgatatgcatccatgaaataattcagtctttttgggaacagttgtgaccctagagtcctcacttgtaattgtcctgaagggttgcgcattaaaaccagataatgggcgttcgctcttgccgttttaatgtcccgaccgtagagactctgggttacaaaaattacgcttacgttccaattatgggagcccctggtaaagagtaaatcgagaaaagtattctgcatgttaagcattaaatcgtcaagtatcagtaagaggggtttttcctgttctttatcttattcatgtccggaatcccattaaaagtctcgacaccctccccgaataatccctaaaatactatcattcatctcaccataaaaataaagaatttt

SEQ ID NO: 39547 - DNA, 925 bp, Heterodera glycines
catccaggggccaaaccgcactgatgcggaccagcactgttccgccgaacaggtcgaccccgccgggccgactgggcggccaggcgctccagctcggcgcccattgcggccggtgtgttctgctccggcgcgcggtgcggaatgtgatatggggaggcgaactgcggtggttggcacgacatgccgatgcgcatcggcggcgcacggcccgaaagcacacgctgcagcagatgctcaatgcagcgggccaacagtgtgtcggggcggcgcgcgccctcccaaccgcgcagcgacacctcaaccgcctcacaacgcgtgttgcggctacggcactcggtgcgctcccaggcgccaatcactttgcagaaacggtccagtcgctgcccgtcggcttcgccggcatcggcttcgtcatcgctcggcgcaacgttggcactttcggcggcacttccactgctgctgctgctgctgcccaaatttgacaccgccggatctctgctgtcgcgcatcggcggcgctccgctgacgtgctgttgagtgtcggagcgattgatgcctccattgctgctgctgtctcggtccgagtgatcggtgaacgacggccggcctcgcccaatttgacgccaaacattactctataaatgcaaaaagcaattttttgctcatgttcctattttcccatcttgtgaaagcccttcccatgaaatggcactctctcttccaaagcccaagtcgctctcattttccgcaagtaaccgccctaatcacaccaaaaaacacacacacacacacacacacaaggaaaaatgaataaatttaatgaatttgaaattaaaaatgaatataattttattaaaaatggcaaaaaacaatataaaaattggcaacaaaatagaaatatgataaaaagaatggaatggaatga

SEQ ID NO: 39548 - DNA, 1380 bp, Heterodera glycines
ttgcgcgcctgctgtcatcgttagacgtagtggccatttctcagacccttctccggagtcgaacccttatcctccgttacccgtcatcaccatggtagtcagatacactaccatcgaaagttgataaggcagacacttgaaagacacgtcgccggtacaagaccgtgcgatcagcttagttgttctgagtcaacactggacgcccggagggcgcttggttttgtggcgaacaaatgcgctccgctctggggagattggagctttggtgcatgtattagctctagaattaccacagttatccaagtaagaagtcaaggtcaagtaaattatagctggtgtaatgagccgtacgcagtttccctgtctggcaggttaaacttacacatgcatggcttaatctttgaaatgaacacatcagttcaggcaggatcaaccagatagctgctagcgagcgttgccaagcgccgctattacagccgtcttgtaaagacggatagtttcagcagaaacaactccgttcagcgcaagcgtgcgcatgggcagcgaaggagacagagcaagtggtaatgacacagcgctggccaggcatccgagcttcccggacttgggaagaaccatctcgccgctggacacagctccgagggcagtgcacaggcactcacacgagcactccggatttcccggttaggacacttcctcaggccaaaggccttcgggcgcttatgtctcgtgttttttcgaatgcaagcacactggtccccaggcaaggagttccgatccacgaactcatagggcttgtcaaccatggcaatacgccactcactcgtataccaacaccaccaccaactttaggttcagcatccccagtgctgagttccccacagcatttgtgccttaggccacatttacacaagtcaattaactcgccaaatttctttaacacacagacgagctgcatgtttattcatttcgacagctgccaatcgctggagaaactgaggccacgacaaaggtggcaccccagcagcagccatcaccgttcaatgccgagcacaagcgcaagcaagcacttgaacccagacggccgcgctccccatagcgaaatcgcatcttttttccagccataatatcgcaaaaacggcccaaccaccacagtcacccacgccaaccaaccaacgcaaagcacatacgactaggaactttatacaaattttaaaaaagtaatattttgtatatgcatttaatcaaatttctactttctttataaatgttagctaattagtcagcgtctatttattttctgtaaaaatttgcctctttatttaaaattaaattatatagaagttcatgaaataagacactaaatgtatagagaatgaa

SEQ ID NO: 39549 - DNA, 997 bp, Heterodera glycines
attttgaagaggctctccggaaacggattagcatcggggttacgagatagaagaatgtcctaaaaagagatagccatttttctgagaattaattcacattttctgcagctcttagggtaatggaaaaaattttgaagaggctctccggaacggattagcatcggggttacgagatagaaaattgtcctaaaaagagatagccatttttctgagaattaattcacaatttccgcagctcttagggtaatggaaaaaattttgaagaggctctccggaacggattagcatcggggttacgagatagaaaattgtcctaaaaagagatagccatttttctgagaattaattcacaatttctgcagctcttagggtaatggaaaaaattttgaagaggctctccggaacggattagcatcggggttacgagatagaaaattgtcctaaaaagagatagccatttttctgagaattaattcacaatttccgcagctcttagggtaatggaaaaaattttgaagaggctctccggaacggattagcatcggggttacgagatagaaaattgtcctaaaaagagatagccatttttctgagaattaattcacaatttccgcagctcttagggtaatggaaaaaattttgaagaggctctccggaacggattagcatcggggttacgagatagaaaattgtcctaaaaagagatagccatttttctgagaattaattcacaatttctgcagctcttagggtaatggaaaaaattttgaagaggctctccggaacggattagcatcggggttacgagatagaaaattgtcctaaaaagagataaccatttttctgagaattaattcacaatttccgcagctcttagggtaatggaaaaaattttgaagaggctctccggaacggattagcatcggggttacgagatagaaaattgtcctaaaaagagtaagccatttttctgagaattaattcacaatttctgcag

SEQ ID NO: 39550 - DNA, 1366 bp, Heterodera glycines
  unsure (1)..(1366): unsure at all n locations
tagagaccgactaaaaaggcaccaaaactgcaaaaaggcaccataataggcaacaaaaaagtggaaaaaggcatgaaaggcacgaaaatctcgaaaaaggcatgaaaaaaggcattaaaaatttttttattaaggatttttagatgagcaaaacaacgtaaaatttaaccaaataacttaattttggccctttaaattattaaaggttttataatagttattcgaataaggaaaattttaaacctaagacttttttataaagaaaaaaatgaaattttaacgattaatttttgagaaaatttttcgattcttaagggtgtatttactgaacattttttcaagtcattcttaggggtgtaatttcacgattttactgctttttttaatggttttggaaaaacacgccaaaaaggcaccaaaacggcaaaatggcaaaaaaggcataatagaaagtaaacgtagaagcctcaaaccaagtataaaatttgttttttatgcttaatatatctaaactagagggccgaaaaaaggcatatgcctcaaaagtaggtctctactaattatattaagtaaattttttattgaaaattattcgaaccttttacatattcagcaacatattcgcggaacaaatactcgtacagaatgaaagcaaatttgcgtgacctttcccattctggcgcataaaattggttctgcttaaaatcatgaaaatattcgacaattcatataattttgaattaaaaaataaatcaaaaataaaaaaattctatttttgaaaacgaaaatcaaataattacttttcacaaaaatagaaacaaaaaaatatatattttgaaaaaattaacatgcaagaaccgaaatttttatcataatataaaaatcaatttcgttaggaaattaaaaaatttaaattgcgaaagcgaatttttttctcattttttatattttaaacttttttatggttttaaaaattaatattcatttgtcagcggatgctcttactttcgtaatctgctgaatctcatgccaatccattcttagataatacaaagtgccaaggtgtgcctcatatttttcagacaacaattgctttttctcatcaatggttaagccgttaattgcgcaaaatctgtcaaaatgttccgggcctttcgcaagtgcaaccaaagcgtcatcttcattcttgttataatgggattataaaagtatttaaattagctaatttgttaaaatggcaacttacaaccgcagcatttacacttgngaaggcattgaaattgcgatgatttaataaaattagaaaaaatatacaaatgaaataataataattcattgatgtcgctanattgcgtcnaatttgact

SEQ ID NO: 39551 - DNA, 1112 bp, Heterodera glycines
ggaagcaaacccatcacaaatagggtttgggcgccaccgacccggaccgtacatggaccattctccaaccatccaactccttactgcgcaggtggctctccaccttggccctttcccaggggtcctccgaccaatcagcaacctgcaacgcctccaattcatcggcaattgtctcgacatcgcccagctctgggagaggctttacaactcccatgaggccgtgatgactccgctgtctgcccaattctgtccctcctctcggagccgcgccgccattttcgttgcccattcttcccctcctcgactctcgtgctgcgacccaaaagggatgcttttcgtcggtccgccggtccgtggggggaagtgaactcccgccgtctcgcatgcttctgccaccgtccatcagatcaaaattgccagaaaacatgaaagaaattggggaaatgatctgtaaaaatccaaatttatgggacgaatggacgtgaaagagagaaggggttgatgcgcgtggattgatctcccccgagtagccgaatggaaataatgattcgtttggctgggaggggcgacttaaatgtccggggggggggaggggcctttgccgctcgcctcctcctgctccgccccctcccctgtcgctcgcttttgacttccccgcgagcgattggctgtcttttttgtgtctgcccaccagggacgtagggaaattgtctccctctctccatttcggctctctggcccccgttaatgaattagcagcgcagatcgcccccaaaatgacaacggtcaatgggggaggggcaaacaaaggtgagatgcgatgtcggggtgtccaaagcaggcggcaaaaaaggccaataatggtgaagtacaagtaaatggcaccaatgatgagggagaatgctccctctgaaaaattgttcggatctcccttggcagtcgtttgtggcgtttcagtcagtcgttgaggcccaagtgccacgaaatctgtcccggttgtcacgcttattttttctccattagtccatcgatcaaacgtggcgggggagatctctcccctcgaatcttttgcttccgtctttccgatcagtattacaagcagaattgggcca

SEQ ID NO: 39552 - DNA, 1789 bp, Heterodera glycines
aaatttgtggtgtcatgtggcagaaatctgaccatttctcagcaggggtacggagtgaaagtctttaaatcagtgacactgaagaagcagaggaaaaggcgtgctgttgaaagcgtagtggcagactctcaacttcaatcggaactttcctacttaagttttcaggtcactcattccatgcgtttttcatttagccatacaatacaaagtctttgtgagcacttagaccaaatcaaaagatgggtaatgtcagctgttttttctgatccttcaaccttagcacgcattttgttcaattcatatctcttacatgctaagagtgttaccccagggctcataagagtctggccatgtattgaggtcaagcaaaaagattttgaatttgttcccttaggggaaatcagtcaagctggtaaagacaaaagcagatgttttgtacatttaccgatcaaattcagacatggtggagttgaaaggcttgcctttatcgatacgaatagcatggaaataagagcaacttccgaaaagagagcatgttctgaatcgcagtaccaagttgttcgcttggacaacaaattcatagaagttgatcagatcactgcgaaaaccaaaattccaaaaattgaattaattgataaaactgaattaaaatcattttctattccttcaattcccctccatgtttttcaccacttatttttaaccaatacctctgatttttatagtcattttttggtctctgatcccatgaatttgaacgaagtctcctataaaattcatgaaaaagatggtgaaattttgacaaccccatctgaacaatggcatgcattaaaagataatttggtcaaacatataataggagattggacccttgcttggagaggagtcatcaccgttttagttggaattttaatttttgaactgctggtccgggtatatttcatgtttaaacgggaatacagtaggggaaggcacggaaattctcataacaattttaatggcccttccgataattcacaattgccagaaattagatatactcccattaagaatctccaattacgcagaacaggcagtgtaccatgtctttgcatagtttgtgctttgaggacgaacaattcagcagttgtgcccgcacgagtcaattcttcattgatcaattgtctgatcgatacaggcgcatcagtgacaattgcaccccgaagtttggcaatatggttaaacaccgaaatttttaaaacaagtatgtatgcagtcagtgcctcagggcatatgattcattttaaagaaaaaataaacattgaattaatgctggccggtttcaaggtaacaattggcgtttatttggtaaatgacaacgaatttcacaccgccaatgaataccaattgcttgtaggtacggactctctcagaaaactcccaaaaatttcttttgatttcacaaaaatgaaattttttgttggagaaaattgcatacccatgggcccaagtaataagttagctcaaggcttaagaattgcagcagtacaaaacatcacaattcccgcgaattctcagcaaatagttgaagggaaaattgaatctttatttccggttcaaaagaatttattaattgaacgagctgatcagaatgtctcaaatcggaacattggtttgatatcatcggtaagcgcgccccttggggacactgtcaaggttttgctttggtaaatccaacaaatgaaccgatatattttgttaaaaatatgcacgtggcatatgccaatgagttagaggacaatgacggcat

SEQ ID NO: 39553 - DNA, 1021 bp, Heterodera glycines
ttggcttttattcctacggacaccactcgctagtccaccactaagcactaggaaattgtggatgggacgcagccacgccttggcttttattcctacggacaccactcgctagtccatcactaagcattaggaaattgttggacgggacgcagccacgccttggcttttattcctacggacaccactcgctagtccaccactaagcactaggaaattgttggatgggacgcagccacgccttggcttttattcctacggacaccactcgctagtccaccactaagcactaggaaattgttggacgggacgcagccacgccttggcttttattcctacggacaccactcgctagtccatcactaaacactaggaaattgttggacgggacgcagccacgctttggcttttattcctacggacaccactcgctagtccaccactaagcactaggaaattgttggatgggacgcagccacgccttggcttttattcctacggacaccactcgctagtccaccactaagcactaggaaattgttggacgggacgcagccacgccttggcttttattcctacggacaccactcgctagtccatcactaaacactaggaaattgttggacgggacgcagccacgctttggcttttattcctacggacaccactcgctagtccatcactaagcactaggaaattgttggacgggacgcagccacgctttggcttttattcctacggacaccactcgctagtccatcactaagcattaggaaattgttggacgggacgcagccacgccttggcttttattcctacggacatcactcgctagtccatcactaagcattaggaaattgttggacgggacgcagccacgccttggcttttattcctacgacaccactcgctagtccatcactaagcactaggaaattgttggatgggacgcagccacgccttgggctttattcctacggacatcactcgctagtccatcactaggcattaaggaaatggttgg

SEQ ID NO: 39554 - DNA, 1025 bp, Heterodera glycines
cgagcattataacagatcacatgcgcctttcgttgcagcggcatatggccacggtcggcaagccattggccaagccagcacgtgcaatggccaagcattgaaatggccaaagaaatacgacaggagggcttcgatttgctaagcaaagatttgtgcgccagcagcccatccacaagcagtgcagcaaatgctgctgttcaacaccatcaaaacaacaacaattataacaacaacaaagcacaacagtaccaacagcagcagacaccgcaacagcagacaaatactgtaaatacagtaacaacagcggtgacaacgactacgatgatggagggcgacgcgtggttgatgagcacagtgcaagcggaggacaaactgttacaagcgcacacgaacagggaaaaagtattttccattctgaagacattgcgcgacagacacttggacttcagtggatcagcaacaacaaaacagctggtcaaagtgagcagagaagggaagggtcagatcaggtcaaaaagagatgagcaacaatgaatgataggcaaaagattaccaatacaaaccaaaggggggaaaggaatgtgaaccaattttgggtcgagaatttaaattgaaattattggcacaaagcaaataattaataaccgttattatgcattatttaacataattgtcaggtgctcgtgctgtatgagtgcgaaaaacattatgccaactatgaatggaacggtaacatttttaaaccttttgaaaacgtacaggcaaatggtattttcagatttctgtcttggcgaccgaatcattggcattcttctgcaaatggtcaactgtttgcagtgccggcggtgcccccatttttttctgcctcagatggacctgttgaaaaaccggtcgcccaaatcgctagacgaaagtgctcgagccgtgtgggcattggtccggcaactgatgctgaatggcaaagcattggaacagctttgattgtgggaacatcaatgtcaatgatgatgcaccctctcaaccgg

SEQ ID NO: 39555 - DNA, 925 bp, Heterodera glycines
  unsure (1)..(925): unsure at all n locations
agatcggctaaaccttaactgaaacataccatatcagccattcgccatgctgatttgttgnaatcataataaaaaggccccttttgtttaattctgcctttcctataagcacaatgtgtttgatgggctctacaaaatattgcttgtgcaaagcaattattttcttggaggctgtaattttctgtagtcatttgatatgcatctgctatttttctagtcacaaacaccaatatttttcggcccgaattttataggcgtgaaaagtactgatttccaacttctttctattcggatacacccaaaatttgaaaagcatctgtaattcagcctcttttaaatcttaattttctgaaacccgaatttagaaaatatgaatgtatttctgcgacgccttctatacttaattcatccataatgggccaaaaatcataggttaagaccaaaagagggattttagtttcagccggaatttctataaaaatgttcgtgtgtaacctatctttgtctattcggataagtaagaaattgaaatagtcgtattacttttcctcccttaaagctttataatgaaagcgtcgttgtctatttaggatttgccgtcgcaattctgtaattccactttggaatccaaaggaatttgattcgcttttacaaaatagacagtgccgaaatttgtagatcggctaaaccttaactgaaacataccatatcagcgagacgccatgctgatttgttgtaatcataataaaaaggcccctattgttcaattctgcctttcctataagcacaatgttgtcggaactctgggattccgactgccgatcaattgatcagcagaattgaagaaaagaagtgggcgacccttcccccctccctttcccatgccccccgcacccccgtccccctcctctgccccccatttccc

SEQ ID NO: 39556 - DNA, 1550 bp, Heterodera glycines
ttttctgacgattttatccacagaaatttacgagaaatttgatttgtcgcgcaacaatacatttcactacgcaaaaacatcatccgaaatgtaagtcggccatgtcactcctccctcactcctctccctgctcaggcggtggccccacatacggcaattgctcgaggtaacttcccgccgacgaaccgtgtccggaaccggcatgggaattgccagctgccgaactttgcccagccgaccccaaaaacgatgaagaaatcggactttggtttggagtcgactccaaaaacggaggaggcattcctccttgctcgaccttaaacttttttagatcagttttctttaattttagtttaattttggcgtctcttataaactaagggtttaactaaaattcaaattaattttacaattattatggacatttttttgtgttgccaataaaatattgttttttaaagttagttttaaaaagtgattccttaaccaactaccgtatttactgaattagaaaccccaggggttctgtttttcacccctttaaaatgggggttaatccaattacgggcgtgaatatgagaaacttcgccagcaaaacaaaaactaaactgattcttgcaaaaatctaccgtacgaatcacataaaacaccgccaacatggcgtcgtgccatttttgtccaaattgaaaaaatgccgccgggacaaccttgacactgagcacgtcccattcctttcagaatttgaaattaaaagtgtaaaatataccttttttaacctaacaaaatatatttaaaaaaatatacattcttttcaactcattttttctgcctgaaatttgggaggggtcggtgtggttttgatcaggggtgtatcaatagtttaaatttaaaattttaaaaatttcctctcagtccttcccggggacacagaatttcaaaagttggaattcgaattcggacgcagccctggctgagacccctccccgccccttaaaccggctcccattggtaagtgtcccctacttttggcttctttttaacaaatcattctttagccccaattttttttcgctttccctttttacgtatattaatattatattaaccaattggtcaattctcaaaagctgaatttcgcagaaaaatcgctgtccaaaattcgtagttgtttcctcgcgttgaaaaaacgtgcggagcctctctctctgtattaagatttattgttagaaaacactcgtaatttggtcacaagtttttaatagtgactttgaagagcttcggtagcggaaattaacaaatagagtcataataaaaaaaaatagttgggtgaaaatttgttaacaaaaaacatcaaacttaaaaaaaaaattcccggtagcgcctatcggtaccgaagaacccgaatgttccaaaaattttaaaaatcagttttttgaaagcaaaaaaagtcgtcggaacaaaaaaggctatattgcagtttctgaccataaaatatttcgacaaattttctgcactacatcaaaaataaatttttgattcagtagctccaa

SEQ ID NO: 39557 - DNA, 1274 bp, Heterodera glycines
ttttttaaacctccgtaattattgcagacatttggccataaataaacaaaaacaatgataaaaaaacgattcaaaaaactgatttgcttatctcttatgttaaacttaaattagctcatcatttgcaaattcttttcaaagtgcgatcgcgccaaaactgatgtctctcgcttcgattccaacttcgttgacgccccttcgcacgcggaaaaagccgccctcgccccaggcgtcgctccacgagttggcccagccaatatttggtgcttcgtccgtccgtgcagttcacatggccgtatccgatcagtcgaacgatatgaccgccgccaatttcgttggtcatctccaattttaaattttcaaaattagttaggctcttctgtccaatggtactgcgtggtggtaaattccgccagcgtaaaatcggacaaagctgccatacgcaattatgtccacgggcactgtgccgttgtggaagatctcttctttgatcagctgctcccagcccatctccaggcccaaagtgtgccaattggacgctttccaccgattaattagcattaattgccatcattagtgcctttgctcacttttaactttgtcaatgtcgtattcctgccaatgtttctcatttgagcctcgcttttcgcattcgccaacgtatttgaagccccattttttcctttgtttgggactttagtggaaaagggtacggtttgcagccgcctgaagcgccggggcaacggaggaaaagttagaaaagattggtataatgaaatggcaaatacgatacacacaaaccccgccgaaggaagccattcccggacacaacgccattttcgttcagaaaacgccacactttgtatgaccagcctccttggcacctgaaggttttgtccgaatccgaactacccatgttcgactaactctcttttctctcaatttcctttttttctcgttcattacgcctcctctctctctctcattttggccttttctctccccccccctctctctgtctctcctctctctctttttctctccctctctctctctcatttttgccttttctctccccccccctctctgtctctcctctctctctttttctctccctctctctctctcatttttgccttttctctccccccccctctctgtctctcctctctctctttttctctccctctctctctctcatttttgacttttctctccccccccctctctctgtctcttctctctctctttttctctccctatctctctctctc

SEQ ID NO: 39558 - DNA, 987 bp, Heterodera glycines
gggagggaattgagtgaagcccaatcaatttgctattatcacttccctaattgggtttttgttggacgaatgatcgattgattagacaaggaacaaaatgagcagtgatcaattttgttcaatgtcgtcatttcaaatcactgttcatttgtgctcgtttagccctaattttaatgttcgctcattatctccaaattaaaaatgaaatgggcaattaaaatcactttaaaaataaaaggcaattaaaatcactgtttgacttcgttcggcctttacccgcccccaatccaatcaaaaagttcaacggaatcgttaaataaacccattattcgttcaatggaactggggggggggggtgagatcgattgacaaaatgggagataatcaaaagtgtctgtttaaaatgaattgggtgaataccgtgaagactaaaactgatcagctcagagggcaagtgaccaaaatgaaaaaatttggacacatccaaccgcagaaaaaccatcgacgaatcaaagaaaaacctatggagtcagttttacaaaatatttatgttttacagaattcaaagaataaatgaatatataaaaataacaaaataattaataagtcagtgcaatttatcggacggaggtcaggcggggaaacgtcggaagagcagcacaccgactagcgagaggaggacgagcagaagggtcaggacgagcagaagggtcaggacgagcaaaagagagccagccgaggtgggcttcggcgctactataaaagtgaccgtttttgaaaattttcactttttttttggtaaattttttttttgtttaaaaagtcatgaaaccaagtacccgggggttttagaggtcgctgatcaagaatatgacaattatttgggcctattaagaaatttccactgttggataagggatcacacaaattattgatttatattttccctttctttccctctcgcaattgtctctctccccgcccctt

SEQ ID NO: 39559 - DNA, 915 bp, Heterodera glycines
gcagatcttggtggggtacggcacaaaacgaagctaataactatcttttggaggttgtttaccctattatttaatatttgctttttcttttcacattttttgctaacacacaacaaaattacatttaaaaactattgtacattcaggagaattcgcatccacgtttcgaaactattgtcttggacgaaaccgaagatgatggccaccacaacaatcttgtgggtacggattcagacaaagagaatgatgaattggaactttagcgttaaagccctttagatttttttgattactatggttttttgccttttgcgctttttttgttgcaattattcttctttttttataaaatcattccctttccccttggtttatgctcttattgcttctcggtcaaatgatgacctaaacatcaaataaagtttttcagccgttttacaattaattaagagatgtaaaattataaaaaaaacgcattttgttgaaaagttgttgaagagttgttgaagagttgttgaggagttgttaaagttattatggagttgttaaggagttgttagggagttgttgaaaagttgctaactttaccaccgaaccccaccccccagtatcttggtgaaattataacccagagtactgattctttgttttacccttatataacaataaattaagaattcctaccgttttaatttttatttatttttttattcaatcattaacaattctcataaaatttccaaatataatagcattttgatcaaatttggccaaaccatacccagaccatacctaacaatattttaatccccacgtacctgctggcgccagtgttcaaagcgcccccggcgctttaccacagggccccttggggccctggttccctatataagaaggttctacccatgatccaag

SEQ ID NO: 39560 - DNA, 698 bp, Heterodera glycines
ggaaaatgcgtcagtgaaactttttttgtcataaaaacaagttccttggggtttagggatcattgatcacgaatccggtatccatttcaaccaattcagaaccccggacccgaattcgaacaaaaagtcatgtgtctacattttcgaatttagcattttttcaaaaactgcgtaaataatctcattaaaggatttgatggctttcaatttgctttcgtgtatttaaaccgatttttaaaaaaatcccaatttcggaaattttgaattttcgttcgaactcgggtccggggttcggaattcagaacgatgtttttatgaaattttacttctatattaacaatactaatgccatagaactttattttaaaatattgtatcactgacgcattttctggtcatgaatgggtgtgttgctctttaaaataggtaaacccttgttcggagggctttaactagggaggggatttcagaggcgcaaaatggtaaaattgggacgaaaattttgaaaaaatgcggtataaaacttgttgttttttagtttaatttgttttagcattttaatatttgatacttttttagattttggtcgtcgcttttccaaaaaattgttcgtaactttataattgaaattgtttgcctctatttgataatttgataaatgataataaatgttcccccctaatttgtaagatgattga

SEQ ID NO: 39561 - DNA, 442 bp, Heterodera glycines
atatttatcatttcaataaacaattttttaataagtttgttaaataaaataacaaaagtgacaacagaaaaacctactgctgattggagtgtcgccatttgggacaaggaaatcatttttatttttaaaaagtatgaaaaatttggcttaaaagtcgtaaataatttatgcgaaaaacgaaaaatgattgaaaatttaagaaagggttaaggcaaaaattgttcgtttatttgtaagcacggcaaaaaattttgccgcatcacgaccatatattgatgaaataattacgcgacaatgaaattcgggtgtggaaagaaaaattgggagaaaaaaatttaatctctaaaattttatcggcctgtcgaaaaatacaaaacaactcccagccgtatttatggataaaaaacaataaaaaacaaactaaaaatagctatcgtaccct

SEQ ID NO: 39562 - DNA, 224 bp, Heterodera glycines
aggaagggtgggattgctcctttgcctacgtcttctgctcggttgcccaggtcaagagcgacaaggacatccagcagctgctggggcgcgtgctgcgcatgccgtatgcgacccgccgcaagcaggaggccatgaacaaggcctacgcgcacgtcaccactgcggcgttcaatctggctgctgcagagctcaccaagtcgctcatcgacatcgggttcaaccct

SEQ ID NO: 39563 - DNA, 955 bp, Heterodera glycines
gaaaattaaaaattttggtttttgttctagaactgattaaaatacgataaatttagtcgcaaatcattgaaacatttacaaaaggtcattatgtacagattcaaacataaaagtaaaattaaaattttcgacttttgttcgaattcgggtccggggttcgaagagttattgtccatgtttacctgcataacccattccacttccgtgtcattcttgaaactgttcacttcggcggcggatggacggtcgacgcgttcggccaactcgcggaccaaaacatgcgccacagaatcggcagagacactgaaatgggagcaaaataacccaattaaggaaaccattattaaatgggagaaagcaaaggttgttttcgttgaacacctggaaaactgtgacaaaatgcccaatttcggagcacacaattcgatgggcggccattcgtccgctttttcattctctgcccgattttgagtcgccaaagaagtcattccgagtttcagactaaaattaacagagcatcgaaatgtaaaaaggaacaaccaaaaaaaaactgcttaaaaaacccaaattaaaatttatcgtaaaaatagtcggcaaaactttggataaaagcgcgatgagctaaagcaaaaaataaatcgggcgtttaagcgtttaacgcatttcaacaataaatttgcaaaaagagaaaaacaaatgaatgcggaaaagatcaaagaaattttccttttaatttttttattacctataaaatttaaaattaattgcttctcattaataaagcttgcattaaaaattaaaaattcactgatttttttacaagtatgaattcgctcgagggctctgctgaatcttcttcaacaaaaattgtaatttcgattcattttcatattagcattgtcaaattaagctttgttgttggtgcaacaacccctccccaaatgccaatcactgc

SEQ ID NO: 39564 - DNA, 962 bp, Heterodera glycines
ttccccctctgtccggcacaatgtccgccttcacgcgatggtccgttacgaaagtgcgcttcccccttctcagttgcgcgtcacttgttttcgtcacatataaaaggtctgaaacaattttagtccgacggattaaatgtcagcgagtaaatatttacggaacggccaatgaattactcacccaaattagcggccaaaacatcgtcggcatggacagggtcaaaatgaacatttgtgaatccgccgacttccaaaacctgtcgaattttgtcctcaatttgtttgacgcgatccgacctaaactcaaaagtacaaatagtttagcggtactttaggctagttccgaaaaagcaaccgaaatggacccattcactgatggtgcttttggggaggttttaatgtatctagaccaaaatataccaatcttctgattagccatcctaaaaacttaattaacgttaccaaagaaaagaatcgatggtcacttcggcacgtctcttcagcaataatgccctctccgcataatcggcattcattaagtcgacgtactgtccaaatttggcccattcgttgtcattcaacgacaaattcgacggaagcaataaactcggaatggctttttgttttttgctttctttagcaaattcagtcagctaaaaatacaattagaggttattttattggtctccccgccctttcattgcttcggttaccaaccttagtcttgaagagtgacaaatgggcattgtcgagattatcagttagcggaagacccaaatgacgagaaattgacaaaatattttcgcaaatgctgtcaagtgattgatggtcaacctccattagcaaaagctattaagggaagttttaaattagcaatcgaaaaatacaattttaaacagataggtatttaaattttgctttttgtttttagtactggcataatgaatgtggcataatgaagt

SEQ ID NO: 39565 - DNA, 1286 bp, Heterodera glycines
  unsure (1)..(1286): unsure at all n locations
ttcaatttcccactggggattgaagatttttcatattttctttaccattatattaaatgaaattttattaataaaaaaatattccaacttttaaattctcaaaaaatttttcggcatctaatcttttcaatttttaaaatcataataaagcaatttattttttcatttgttatgaaaaatagttttaaagtaagataaattatatttaatttcgatgggcattattttgagtagaatttagattattttgattctcttgccatggttcttccgctttccgtactttgtcaactcaaatgttttttttataattttttttatctttgttcttttattcatataaaaattaaaagtcgttaaaaataatataataatgagaaattattaattcttttacctttttaatcaataaaaaatattcgtttagtaaatttgagaaaatatttcatttttatgaattattggatgaaatattttttataattttataaaacaaagaaattttatgcattattgtttttcctttccttgtatttttttaaaataaataaaaattatttaaattcaattattttaggcataccgacattatttatgaaacagaatttgcaattattaaattatttattgattttaatttttgaatatttgtaagagcttgaaaaaaataataattttgttggttcgtggtaatcggcgatgtttgctctttttatttaatttacataaatgctgcataattttattattaatttaataaacttatttattcttttagtttataaagtttttttttttcttggaaaatttggtattatttttttaaatttcaagcttttttatgtattttttattttcaaagaatttagcaataatattattttttaattaacattttaaatattattttttattatanaatnaataaaatattttaactcttttattcatttttanatatattataatttttnaattattttaaaataccttanttttaaaaatntatttaattataaaaatattaaataaattaatatncttcnataatcaatttttttttaccttttctctctcacaaatcaccattttttnacaaatnattntacaaataaanttattcaattaaaaaaacttttttcaanaaanaataatcatcataatnatcaaaatntcaatnaattaaaatccaaananaaaattcataaaaggtctttttaatnattaattaaaaaattnaactcttaatggcgttctcattttgtgaaatatttttcgcataatta

SEQ ID NO: 39566 - DNA, 580 bp, Heterodera glycines
ccatttttcgaaaaaaatatcacaatagaatccgtgtgggacaaaacagcttgtcagactaaaacgaccccccgactaaaacggccagtctaaactagggttcgagccccgtcaccgcccccgtcaccgcccccgcccccgggggcgggacaggttttttgggctcaaccccgcccccgccggtttatctgtcgttggacaggcgtccaagatgacacgatcatcgtgacagggggggtggcgttggttggcgttttgctctgtttgccattctccgccccttttggccctccgatctcttctttctcttctctctctctctctctgccgctgtcgcccaaaacttgcgattataccaaaaaaatggaagacaaaaataaaaatgaaattaaattaatcagtggcagtccgacgccggggagaaagtgtgtaaagtgcgcagacggcggaactgtgcgcacattttgacggagttgggggacggcaatccttttaagacattgtgtgagttttttcctgaccgaccgtcgcagccgcaaaaagaaggggtcacttttttgccaatttattcagttctgtg

SEQ ID NO: 39567 - DNA, 1055 bp, Heterodera glycines
aaatcagaaccattacacaattaaaactgttcaaaaatgttaaggcaacgtcaaactcataaattcgaacaaatgcgtaaataccgataatttgtttgccgagaaaaggaaccccggcaccggcggtttgaaatgttatgacgagatcaagcaccaatcttatgactgctcctgtcacggtgataagaaatgccttgctgaagaaaaatgggcgcacgacgcctttctttgtccaataataaaggtaattaattaatttattattaattaatgccaaaagacaccgccacagacaaattcatataatataggaaatttaatttttaagtagagtgaagcgggaccgggacctggtagcggacaactgagtaccaaggtttcggttttgacatggacctggactagtcccggttttcccagccaaaaattaacggtttttcaactcgaaaaggtcccggtccggttttacccaaattcccggttccgcttaactctattttttttgtatcaaaaaaccggaaataataaaaaaatagggacgataaactggaataaggataaatatggcaaatgataaaaactctattttattaattaatttgaaaattcaggtcaattcacttcaaatcaaaggaagccgacaacgagtgtttactaacccaaaagattttcgatacaattggactcggattgaggttgattgttatgtgagttggggttttctaattccaaaaatttgtttaattgattaattttacagaaggccgatgcgggcactgtaagcttttggggctacagtaacccggagacaaaggaaatcattcgggtggacgaattacactgtttgacttatgaaactgctggagtgccaaaacggttcaaaagtttgcaagtcgaagaacagccgccgatgaaaaaactgagtccaagtccattcttggccaataatgcttcatcacttatccatgtgttcgtgccatttgttggccatccatgagagaagggcgaaatcagtgatcagtggatctgtctgctgagtgatggtgatcagttgg

SEQ ID NO: 39568 - DNA, 612 bp, Heterodera glycines
ttttatattttcttaaatatttgatgacttaaacgccctatataaaaaactggaataaaatagctgaaattttagagctccttaatttatttgttttgctatttttttttgatttctattttttgtcatcaaattatataaagccattttaggaacttttattattaacaaaaatgttttaaattttgaaaatatttggaggaccaaaagcgttcacatatcctagataagaccggtctgatctaatcttttcaaatgcatttaagaggaagctgtgcgtaaatttatgtaagagaaaacttatttattttctttttttgtaaataagaacaataattataataataattttgtttttttctgaataatgtgaaaatatttaaaattaataaattttgatcgaatttataagataattttaatataaattctttcttttttgattcactataattgaaatgattgttttcgacaaataggatgataaattcgtctttaacaaagtatagttaaataataaagtttaaaaaattgtttaaatttgaaaatttatttttacgaaccgttaaaccaaaatggttgataaattttgttaccgtatttatataactg

SEQ ID NO: 39569 - DNA, 765 bp, Heterodera glycines
ttctttttccttcaaaatattcacaaaatctttttacttttccgacagcaccgcccacgaatgctggccatgtcttttaattttagcatagaaatttttggctcaaattggtctgatattcgtaacgcgttagtcaccaatgttccagctcgtgcaaattgttttatgccaccaattagcaatgaattttgcttttgtagttcgctgttccctattgtgtctgatttttgttgagacggtgatgcttcttccgcgtgagaaaccttaaaaaatgtgccgtagctaagttgattaatcggtaaattacggaccaagcgagggttacacgggttcgggtacccggtcgggcccagactcggatacccagtttgttaagacccggacttgatacacgaatcaggttttcttgacccggaaatctgggagcattatgtaaaatttattttttcctggatctccatgctctaaattaggaaaaaacttatatcattctcttaagaaattgcaccaaaattctaaaatttcgcccggcggcgcctatcagcagcgccggacgaacatttccaaaactagatgtcagttttgaattttattaaaaaactaaatggggagggaggaaccgtttggtttgcaaaattattttgtgataataacgcgtgaaaacttgtgctcggcggtttttggcatcgttgatcactaaatctctaacccgcagttgaacaaaagtcgttaattcagtttaaaggtttatgaccttttttcttg

SEQ ID NO: 39570 - DNA, 966 bp, Heterodera glycines
  unsure (1)..(966): unsure at all n locations
agcatctccaactaaacctgagaatctagtgatgaatagtggcactaaaaacgaaaattttttgaaaaagaatttgtttttcgtgcatttctcatcaaaataaagccgcagaaaaaatagttaaaaaactagaaatccgcgccctagtcatcataaatatgtactaacattttcaaattttccatattactttctaaaaaattctctatagtgtcgaatttactcaatgtcgatatggtccagtgtcgaaaatgcaggaaaacagtgaaagtttttgaaatagttcagtgtcgaaatttctctatgtcgaaaacgtagtgtcgaaattacttagtgtcgaaaatactcagtgtcgaatttacccaatgtcgaaattaccagccacgaataagaagtaggtgaaatgacaaacaaaattattctttaattatggaattgactattatcctaccaatttttgattttcaaagcactcttacttgattttcagaaaccataagggggggggggggctttttgttaaaaaaggatgtctattgtcagttacagtgttcatggtcggctgattatgtatacattgcaaataaaaaggatccaccccaaatggttttccttaaaaaatatcgtcctgcaccaagttaaagagtgattttttaaatgttttcatcaatttaaactcattaagttcttgttttttcattcatttagtaatttaagcgaaatttgatatttttagcatattttcatcactaataattttttgctcaaaaatttccaatttttttgacagattttcttgtttatttttatttgaatattagcgctgggagacgacaaaaccaatttccgccctgtcaatagcctaaatggggtgcatccacagtgtgagcgacaaaatgcgaaggcaaggagcaggcaaattgacgaacaggttnccttttttggccaattattttcaaaaaaaaa

SEQ ID NO: 39571 - DNA, 867 bp, Heterodera glycines
aaaaattagtcggaccaattttcaattttggcatggtcgcggaaaaaaggcagaaaaatctatcaatcgaataaaaagtgaaacgatagtaagatataaaagaggacaccatgaagaacaaaataaaaaaagaatcatttaaataggctcagaaataacggaattatgaatttttaaaaattggaaaaaatttgggtatcaaaaattatgttccaccctaagtatttgattttttaatcgaattcagtaacatgacaatgatcaggcatcaattttcatattaatagttatagttgattggctttaatataattaaatgaagcaaattatttatgttataaatcaacaaactataaatttgttctataaattatttaacattttttttcaagaggcaattaaaattttttgttttctttgtttctattttccaattttaatgaataggaatcaaattagcaaaaaaataatagaagaattaactaactataataatataaaaaaataatgacaacattgacaaaaagtatataaaaacatttcgctttagaatttgtatcgtatttcatttttaatttttaattcaaggttcatttaacgcgctcgtttcaatttccattttagtttttaaatattttcaaaattctatcaaaggtcacaaaagtgcccatatagtccttctgttatcaagagcgccgcaattgtcatttgtttaagtgtgtatattatgtaaaacgaaataaatattttaattattttgaaaaagatttattttcaataaactagatgtaagtgagaatactaaaaggttagatttattaaatgaataaaaatattttcatttcttaaattgagtatcatcgcttc

SEQ ID NO: 39572 - DNA, 1145 bp, Heterodera glycines
  unsure (1)..(1145): unsure at all n locations
aatcggtcagtcggtcaccggcagcgaatggtcggacattggcggggaataatccgcgcacatccgccgtttgatgatcatcaaatcaccagccaaccaatgcgttggttaattgcccctcggggacaaaacaacaaaggctaattgatgggaagggttggcacaaagcaaaatttattttgggagggaaaagcaactgccaaaagacatttacaaaaaagaaaaaacactagaattcattttgtccatcattatttggaattttaaatgaatgccaacttttatttttcctctcctcccctcctctctctctcttccctctctctctctccctatctctttccctccccctctctctatctcccctccctttctctcgcactctcctcactttctctctccttttggggccagnggccgtttttcgtacgaacacatgtttttggactataacttttttctttaccaactaaatccaacattgttggtatcattcgaaagctctttagatgctctattagcctgcaaaactccaaaaaatttcgtcaagttcaaaaaaagttcgagccaaaaaagttggaaaatttggttttttgaattcttctggccataactttttgaaccttaacgagatttttcgaaattttgcaggctaatagaggatacatagggctatcgaatgacaccaacaatgttggatttggttggcaaagaaaaaagttatagccaaaaacttgtgctcgtacgaaaacggcccgtacgaaaacgaccccgacccctcttttttccctctctttcttttctccatttctctctcttcccccatttgccggttgattctttcctatttttcctacacaatgtcgttgctaattgtaagtggaaatggttttgaatggctacagtattttcctcaatgggaatgatcagtcggacggagcacgaaacggagacggaaagagggaaaggaagggaaagggggggggagagcgaattaaacgacacgaatcgttgagggaagggggaataaaggaagggaaagaatggtcgaaccaaacggaggatgaaaaagaaacacagcaaaatgaaagcattaaattgaaaaggacaaaaaaaaaaattaaataaaattttaattcgaattc

SEQ ID NO: 39573 - DNA, 993 bp, Heterodera glycines
gatgttgtttcagttcggaaatttagaatttttaaaattcgaaaatatttgcaatttttggccctcagaaatttggtcgaatattcgaaaattcatatctagcctaagggttgaccaattttacaggaataaagccttaaaaatagagaaaaatcaggagaattttatgggttttatttggattttctagcataaatatgaaaaaagttattccagaaattatggaaaaattcgaatttccagaaaaaaattcagaactcggttctgaaaagctatttgagaaaagtaaaatactacaaaaatccgcaatttttttctctataaaataaattttattttacatttttatcacatttttaaaaaaagatataaaaataaaagtgattttgtgcttcgggtccaaaggggggtgaccaggatttttgagtggaaaaatttttccacccaaaatcttccaaaaacatgtcattaggggttatttgggccgctgatcatgaatacgtaatcagtttttacttttgacatcgtttagacctcagaatccccgtgtgattggggattctggggcatcattttgaggaggggaggggcaagttcggatccgggcggtgtacattatttttctaccatttttttcgtgtttttcaatttttattcatttaaaatattttttgagttaataaataaaaaattatatttaaattaattttttttaatgaataaattttataagtttaaatgaattatttttttaattgatagaatttcatgtattttttaaattaaatttgttaaaaaatattttcattttaatttaatgaatttactaatcactgttgtacctctttttatcactattgtacctcttctaatcactgttgtacctcttctaatcactgttgtacctcttctgatctctgttgtacctcttctaatcactgttgtacctcttctaatcactgttgtacctcttctgatctatgttgtacctct

SEQ ID NO: 39574 - DNA, 797 bp, Heterodera glycines
tataattgcacaaaatgataataaggtgagttaaaatctatgcttttggatggattacagccttctaaaaatattgaagtctcaagggaaacttggttaaaagagagaaagtaaaaaatcagacaatcgcactttaaagcctttcatatcttagcataactttcaaatctgctgaaaatgatgatccattacattttgatagttggaaatatttaagtttcggtagctgttactgcacagccaaccgaaactcctgccggatgccacgcatgcgcctttgcgaagccatcgttcgcaaagccccgggttccaactcctgccggatgccacgcatacgcctttgcgaagtcatcgttggcaaagcccccgggttccaactgctcacgggtgccacgcatgtttcggtagctgttactgcacagccaaccgaaactcctgccggatgccacgcatgcgcctttgcgccggtagctgctagtgcacagccaatagagactcattccccgaatgccacgcatgcgcctttgcgaagccatcgttcgcaaagccccgggttccaactcctgccggatgccacgcatacgcctttgcgaagtcatcgttggcaaagcccccgggttccaactgctcacgggtgccacgcatgtttcggtagctgttactgcacagccaaccgaaactcctgccggatgccacgcatgcgcctttgcgccggtagctgctagtgcacagccaatagagactcatttcccgaatgccacgcatgcgcctttgcgaagccatcgttcgcaaagccc

SEQ ID NO: 39575 - DNA, 1572 bp, Heterodera glycines
  unsure (1)..(1572): unsure at all n locations
aaaaaatttacaaattttttttaaccgcggaaaaattaataaaaaatttttaatttttatcaaaaaaaactgtttcccaggccacaaattttggggaaactggggcccagaaaaccgaatattagttacttggacaggggacccgggaggcccttaatttcccagcgtccgggaaaccccaaaaaaaaaaaaaataaaataaatgaaatttgtcacaaatcaaatgttttcttnacgttcagcaacccggggccaaaagcatttggattgtgnactggcaatcccacatgagcaaatggaatggaaaataacaatttttttaaattttattaaattataaagaataaaaataactcgatganaatttatttcagaattncataacaaaaggcaacaatatgcttataattatgttaaaaaataacaaaaattgacattttgattaaaaagcatattaacatcccttcaattcttgtccattttggatttatccaattttccaatcttgccagccaccttaaaattttaattttacttaatggatttattctcatttccgaaaagaaaatcttagaaagactttgatttattttttcttattcttataaaaaaattttccgtaatttgttaatacttattctctttttgccattttcattttttcgtgcctatttaaggtgcctttttcaaaaattttcatcccttaaatccgattactgttttttccgcaaaatatcaaatcatccacaaagtcggttgaccaattcccctaacaattgatcacagacagccgttttccctggcgacaattggtcgcggttagccttgtaaaatgcacgcaatttgtcaacctccaaattcaaaaaataattctaaatggggaaatttttctttaaaattgaaatgtttttgaaaaattatgccttaaaattgtcgagacgatagtgatcgatcatcaaaaaacggtcgatcaatggaatttcagggcaattgatcagatgcgcctcacagcgcgatttcagccaatccacttggaaatagtcggccaatttgagcagaatgagcacattttttgctaaattggaaataataaaaaatttagcgcttttttaattatttgtggtcctaaatttttccaatattatatccgagggttttcaaggtcactgctcaagaatatcatatccattcagtcattttgatattcgataaaaaaccgaataaaaaaaaaatttatttgctcggtggtttaaaataataattttataagaaatgtccggtgtcaatgttaaaaattaatcgaaatggatgatatccattttcataatcagaataagtttaataattgctgaaattatcaaataatgaatttacgatttggtaaaattggcttgtggatagctgtggttgagatggcctccacaaattccatgaactgctccatgtcgatgcccaactcgtccaaagtgagcgttcgctgctgcttttccttcatgtccacgctgagcattcgattgatcaccggcgaaacggaaagaagaaaatgcaaggacacatcgatctgaaaagttt

SEQ ID NO: 39576 - DNA, 499 bp, Heterodera glycines
  unsure (1)..(499): unsure at all n locations
ttcctcagaattgtttttttttaaatatattcaaacctataaaaagggcggnnngnnnnaanaaaaactnnaagaaaaacctttgaaaaaggaaacaacaaacaaaagaaggggaaaanagnnaaaagaaaagcgcaaaacgcnaagaaaaaacttttgagacagacacacaaaaagaaaggggcaattgaaaaaacaaaaaaaagcaagcggggagggggggggggggggggagttaagaaagaccccgataaaatgaagcacacttttttggaaaaaagcaatgaaaaccgtcaaattgaattagtatttgcattcaccaactacagttacggcatccaaataaacggccgtctcctggacggcagagaattcttcccgtaggaatggaggaagggcgactatatgaacagatctcaaaatttcaaatacgaggtaaaacataacacaaacaaatttgaatgtgaattggacggagcccgtcagttgggctcgcacg

SEQ ID NO: 39577 - DNA, 996 bp, Heterodera glycines
  unsure (1)..(996): unsure at all n locations
cacattttaggcatttgccaatgcttcatctcctgccaatttcattgccatcatttcgtttccgttgccttttgctgactcagttgtgccatttgcgctgaccaacgaattgactcgcgaacaattggcattgaaagtgattgacaatagccatcgttttctgtttgtccgttgtccaattgcgcgagacgaaagcaaatggacaaaatgggagaaggaagcgattggctggagaatttcttatctatggaacagaattgatattcaaattaattatgagcgtcaaatcggagatgggtaagtgaatgctttctcaaaatttatttaggtatttcatttttgtttttaggcttctcgatgaaattcccggcccaagtgatcagcagcagaagtgaatgaatgaattgttgagaagggatcgatcaatttgaattgcggcgttggataaagaatttgatgttcagaaaattgttctttttttgttgcggtgatcaatttgatctaattgaattatgtaattgccaaatgaatttgatgctattttgacctatgatcataaaaattctttactttttttgttgttggaattatcaacataataatctttgttaagccctaatttgtaaggttaatttagtgtttatttcattaaaaaattttccgtggcgtttatctgttaacgcagagcagaaatgttgccaatcaaaaagtggcacttttaccgatcaaaaagcaagcttccgttggtttatggtaccatcatacgcaattttcggcacttttgcagatttttggtattatttgatagcccaaagtgtcctttattagtctacaaacattccctaccaaanagtttaatatctcaaccacnagagtttcatcccgcagaaattcctaccgttggaaatgtttcgtttatttcttaaatctgtctcccgaactcgatntttatccctaactcattttttggatcgaaatgcgaaatggaggtttaat

SEQ ID NO: 39578 - DNA, 816 bp, Heterodera glycines
cagtccccccgaaccgatccgcacagattttggggagacggaatctttcgggaataacttccctatagcctggtactgtaattctgcgttggatttttgctcccccataattgttggagtaccccaaacggacacttgaaaaaatcgatttttttgttttcggggcagtccccccgaaccgatgcgcccagatttatggggagaccgaatccttcgggaatagcttccctatagcctgtactttaattctgcgttggatttttgctccccataattgtttgagtaccccaaacggacacttgaaaaaatcgatttttttgttttcggggcagtccccccgaaccgatgcgcccagatttatggggagaccgaatccttcgggagtagcttccctatagcctgtactttaattctgcgttggatttttgctccccataattgtttgagtaccccaaacggacacttgaaaaaatcgatttttttgttttcggggcagtccccccgaaccgatgcgcccagatttatggggagaccgaatccttcgggagtagcttccctatagcctgtactttaattctgcgttggatttttgctccccataattgtttgagtaccccaaacggacacctgaaaaaatcgattttttttgttttcggggcagtccccccgaaccgatgcgcccagatttatggggagaccgaatccttcgggaatagcttccctatagcctgtactttaattctgcgttggatttttgctccccataaatgtttgagtaccccaaacggacacttgaaaaaatcgatttttttgttt

SEQ ID NO: 39579 - DNA, 1374 bp, Heterodera glycines
  unsure (1)..(1374): unsure at all n locations
aaggatttttttttgtaaacctgaacacagataaattcacaaaaaccccgaaaaggcaaaaaaaagcataataaaagtcatcgtattctccccaaagcaagcggaaattcgtttttcgtgcttaccggagcgtattaagtgcgcaaattttttggtatttgtttaaaaatcccatccgtttgtgataaaaaatagagtatacttagcaaacattttatatggtagttaaataatgaaaatttcaaaaatttaaacataaaaaataaaaatccttaataaattttttcttttttagattttttgataaatatgagtatcgacttttcttttagattcgtaaatttttaattaattaatgttactaaaattgagtcaagttaaaaaggaaaaaatttacagatgataattaattttaatcaaaaatatttgcttacctgaatccaccattataataatttttttaaaatgaatggtgccacgaacgtacaccttcccccttaataggtgattggctggcagtcggatcctcggcggcaatggtggcggagctgatggcgctctatcggtggcgcactaaaaaaattttcttcacgcttcaaggaaattgattgattgggagttaatttatttttgaatttccaaactttgacttttttgaaaaaggactaaatacattagccattaagcgtaagtgaactatttcataaaatcaagacctcgtctatgcatttaaataaattgatttctcctgattgaattttgtaaacacaaaatgaaagaaattctcttacatagcgaattctttgtaacatatactcaggaaaacggtggtttgaaaagatttttttagcttccatttggataaattaaaaatctaaattaatatttaaattaaattcacaaatcgatcataaaataaaaataatgcataatgaaaaatgaataattatgaaattatttattaaagcagagatttaaatttttataaaccatgaagaattcatgtaaaccaaaaattaccaagttattaaatcggacttttgttagtaagcctcaatttcaactaatcaagatacttttaatgcatttgactctgaaatgtgtcagagaattattttacgaatcaagctgacatttttacaaagcatacctgcctcataaatattaagcacacaaaaaatttggaaaatagaagaaagaccccaaattaggcgttcataattataccttcaaaactttgaagccatgcaacaattttaattgggcaaaaaaatcctgaaaattttcctgtttaactnttttgtgctaatcanaaaagtcaattacaccacatgatcagagagcattcctcccagtgtctgaaaagcctaatct

SEQ ID NO: 39580 - DNA, 1529 bp, Heterodera glycines
gcccaacgattgcctgcataattggggaccaattcactcttaacgggacggagacaggtcggaaaaggagtggtcaaacttgcattttccaatctctggcccattacaggttttactttgagaaccccggcattttcgccgacgctcagacgacggaactgaaaaagacgaggtgagtcggccatgcgcagggggaggagatatcagcaacacccgcccccgtgggggggtggggatttggaaggaccgatcgtttcggctaagccaaaaaggcatttttgcagtctttcgcgcattctttgcgacaacggcgaccgcatcaccgaagtgccgtcccaggccttccttctccccttctctgctggcacttcctcttgtgcctcagtcgtccatttggacctttccaaatggcgagaacagtgaacaaatcaaaggaattacatttttatggcacattttcctctgtcatttgccatttcccccgttgcccaaaatttcagtcatttttttacagtcaaagtgatgacagatcgaactctcacttcatttgtcagctcacttttctgtcctccacaattcattcgctttttcttgtccatttattaattaattgccatgtccgtttttctctcactttttttctctgttttccttttcccaattcacttttcacttttcttctcccccctcccctctcttttcatttcccatttcttttcagttcttttacgggtctctcttctctctcctcgcctctctctctctcttccgcacttttttcaattaattacataaatttctcctcaaataatttgtaatgaaaaaatgtttttgtacaaatcagaaaattacgataaaattcgataatggttaaaactcagaagttcgaaaagcaaaaattcataacagattgcttttttggatgagagttttcgacgtttggctgaaaatttacactgtattggagttccaactactgtaaaagtgttaatggtatactgtaagtattagtaatattttgtggaaagtcaagctttaaactttacaaatgatttatttgctgtttttttttgcataattaaaaagcttttttcggtaaaaaaaatctgacaaagacaaaagtaaaaagtaaaaagcctattgtaataataacaataatttataatcactttcattaaatgttattttattattattattggcatgtcaaattcactgggcaattgaggcgacggacgccgcgccgctggggaaatggtggggcaagcaaattctgtcaagcacatcccgcggaatgtgttctcggagaatggcattttccgcctccaatcgaatcacctaaaggggaaaagcctaaaaagtgaacagagtcaaatcgaggaaatagccaagcgtaaagaaataacaaattgttattatttcggagtcgatgaagcaacaaatcgaaaaccccaaaaaacagaaaacgaaaagttttgtacttccgtaggaatattgatgtaggaaacatttaaatcttgaaaaaaaca

SEQ ID NO: 39581 - DNA, 1003 bp, Heterodera glycines
  unsure (1)..(1003): unsure at all n locations
tcgaaaatatctcaaaatttcgtcaaactcactaattaaagcaaaaatctcgaaatgactaaatattttatttaaatatttttttggaattcatatttttttaaaattttagttttataccattttaacgtagctggcgcagtatgggagtggaggcttaactattaaatttttaaacatatttcaacagttgcacagacgtgacaggtttttatgcaaatggaaaaacccgaaaatgaaaagaaaaaaaaaagttaaaaaaccaattgaaaatggaaagaaaaaaactattgctagctaaattggtagtgaggtgttctgagcgacaatgtcgtgataaaggagaaccataccaatgaaagacagacaaaaatagccacaaaatttggacaccaggtattgcacggaattccgattttcgacatttttggggtcaaaattccgatttaggatttccggaaaatgtttgggcctcggaatgcctgccaacccgggtggacattagctacggatgagttcgatcaatgtaatgcgtaatgtattggtaagttggtaatttcgatattttaaagcctttttttgttgataaacccactctttaggctattcttatcatttctccgcaaaaacagaagttgatgggcgcaaaagcagccataatgtgtagcattagcatttcacaaaattaccatatgaacaaaatttttttattttttttgtatggtgttatatttttgggggtttttgattgattttgtaaatttttagttgtgtttggaagaaatgggtttttttgaataaatttacaaattttttgagaatcttcaagccctaatatttttgaaaaataattggtccgctattcgctggtatgagcaaaaaaaaaaaaggtcgttcgggcgaaagtttttcaaaaatacacccctaagaatcgggcgaagaattttcaaaaatacacccctaagaattgatttggngaatacgtaccccccccccccccccc

SEQ ID NO: 39582 - DNA, 835 bp, Heterodera glycines
  unsure (1)..(835): unsure at all n locations
atctcgtcgccnggttgcaaaaatgctactgccagcggcccagtagcttttgttgctgtttttgttgttggacattttcaaaatgagatatgagtaaaatttaaaaatataataagtacatagtgtagtgatgcagtcatacatttgaacttacgccaaatgatgctcatttgcctcctaccaattattgatttattcctctgacctcatttattcattcatccccattttgcccttaacaaataggtagttcatcttttactttttttgtgtcaattggacatcgcaacaataagttaatttataaattttaagagatataaacaaattaacagacgcaaaatttaaatttgtttttttggccttttgaactaaattttagcagttaggtacttcaaaaatttccctgttcataacaaaataattatttggcgctatgttttaattttcaaaattacaaaaatatttcgtaatacaccgaaaaaatgatgatatcccagtccgcaatcccgcattttttggaaaatgcgggatttgcgggattaatcccgcgggatccggtcccgcaaagaattttgaattccaatcccgcagctggatccgcaaatttgactttttgtgaaaatagtcaaatttatggaccattaacagattttgttcccgatctctttttaccgtctgctccattcgaaaaatcttcatcgacccttttaatgcatcccgccagtccctaaaaatttctttttcaaaacgtcaggtattttttcttttttggaaattatttggaatttaattgaaattttttcaaaatttccataatttcgcaatcccgcac

SEQ ID NO: 39583 - DNA, 1077 bp, Heterodera glycines
gttttttctaaaaaagttttaccaatatgaaaaactctgaaattttgcagggtgataggaatcattttaaagtattttcatgcaaaatttccagcaattctggtgatcctgaaccaaattaccaaaatcaacttgagcaaaattgaagtttttagtcactaaaattcacatccctaataattatatattttgtaaaattctgatcatgaatcatgattaggtctgtaacgtacgatgaaacagccgcacaagacggacgccagaaaggttcgcaacggcaacacgttgtttaaccagttcaattgcggcatggaaacgcaacatcttaataaatttcttatttatttgataaagacgaaattttacaatgcacaagtaaaattggcaacataaaacttacttcagcggagattggctcctgctgttccattttaatgcaaataaattgtagaaaatagcaaaaagtgacgaaaactccttaaataattaatgggaaaatagaaaaaatcatgaatatgtgtaaaaaatagacaggaatttaagtgcctggctttgggctcgggcttagattctgattttcgaaaatttaacgttcctggatcgggtggtccagtaaaatcccgtaaggtgcccgtgcctgtccattctctaatgaatatattacgacaaaaaatgaaaatgttcaattatttattgctcgttgcttagaacgaagttatgccagcagcgttttgagaaagatataaaattctataatttgctgtaaaaaggttttattatatcaatttccagaatatttttttactcattcaaaaagttattctacaagcaatttatttaaaatcattttttaattaaaattaacaaaggggtttttgaatctattaaaacggtgaaggttcagttcggcgtgccgattaattgtaaaaatttaaaaattttggacatttttcttgagatggaccaaataaggtaaacaaaagtatgaccagcagacccggatttctgaaatcagaaccgtttgataagcctcgaaagcggtgctattagcagaaccttggctgatggagggtaaaa

SEQ ID NO: 39584 - DNA, 1540 bp, Heterodera glycines
ataattggccgtcgtcgtgcaaccgactaatcagcgcaaaatttccctgaaattgttgttgcagcatatttaataggaaaatttaaaatttttatttccgaaaaattcggaggaagctaaattcaaactaataacaagttttgttttttgctgtgaatttgaaatgcagttttttaatcgaaaaaataagtgccaaattctccaagaatacgtaatccattgaatttcatgtttggatggacaatttcgaacaaatctgacaaatgggtaagtaagtctgaccagcgaatcgtcctggtgccgtgccaaatgcacgtagaagcggtggatgccggactgagtgggcacagccaaaagcagcaacttgcggcgcacaatgcacagttgggtgcccgggatcagcttaacgaagggaaaaggtgttcgcaattggacccaaatttaggcgcttttccgtttttgtagctctcccggccaccatctataaaattatacttttttctttcaaccattggagggattctttttttgaatccaacttgaattgtgttcgaactttgaatattgagtcaatttcctggctcaattaaatagaaaaatgcattaaaaatatcgaaccagtgattgtgaaaaattaatgcatagcgacgcgtcaatcaaatcgcggtcaacagagtattcattgaggaataaattcgctccttcggcacgccttaaaaattgacattttgagtattgatgaaagagaattctattagtaagacaatcggtcaaaaattagtttaaaaaattggaaatttaaccccaaggacatagtggttttggcacaaaaagatttagtcggttggccagtgtgaaaatgcatgccataaaatgaagcgactctgaagaccgccatcactgcttgaaaatgagccggcggatggcggaatttcggcggtggtcaacgaacggacaggggtatctgaaaaaggtaaacaaaccaatttggagaaaggaaaagcacactgttcacctgaactaattttgataatgcgcgagtgtcgtgtcggtccaaaataggaattgctaaatgccaattcggtaccacaaaacaaatccatttttggctgttttgtcggcaataacctgtcaagaaccaaagactgagtagtgacaccgaaaatgtttgttgcaattcagtattaagtatttcataccaatactttcaagatttgttcaagcgctcaagtaaaactgtactatacccgattttatgtaggtcaaaggcgtatacaaccaaaaaataggttattaaaaattaaaaaaccgccaagataatgaacaaaacagaacgccaaatacgagaagaaaacttcaaaaaattaattttctaaaaaataaaattttttggaattttcttttatcaaaaatattgaattttatgcttctagaagaaattatagttaaatttgcaaaattattttacggtcggtgtaaactgcaataaatttactgagagacacattaaacagtttacccaaaaaaaaaacaaaagcat

SEQ ID NO: 39585 - DNA, 1498 bp, Heterodera glycines
  unsure (1)..(1498): unsure at all n locations
cacaagcaatgcaatctgagcaccagccaacatttacggcacaagcaatgccatttgagtaccaaacacaagcaatggcacctgagcaccagccaacatttacggcacaagcaatgccatttgagtaccaaacacaagcaatggcacctgagcaccagccaacatttacggcacaagcaatgccatttgagcatcagccaacatttacggcagaagcaattccatttaagcaactgacacaaacaatgcaatctgagcaccagccaacatttacggcacaagcaatgccatttgagcatcagccaacatttacggcagaagcaattccatttaagcaactgacacaaacaatacaatctgagcaccagccaacaacatttacggcacaagcaatgccatttgagcatcagccaacatttacggcacaagcaatgccatttgagcatcagccaacatttacggcagaagcaattccatttaagcaactgacacaaacaatacaatctgagcaccagccaacaacatttacggcacaagcaatgccatttgagcgccagacacaagtaatgccatctgagcaccagccaatatttacggcagaatcaattccatttgagcaccagccaacatttgcagcagaagcagtgccatttgagcaccaaacacaaggagggcaaactgagtaccaaaatcaaccaacatntacggcacaaacaatgccatttgagcaccgaactcaaacaacttttatcaagcaagcaaatcttattaggtaccaatcacaaccagccgaaaattgcaactcaagttcgcctccgccagttttctggcattatgaaactgacaatgatcttaatgggatttttgccccataaaatgacgtttatgaaaaattccgaaagatttaaataaatatttacgaaaacaccaaaatatttacaaaaaattctttattatttataaatatggttataaatagagtgctcagttttcagcacaaaaaatcaccgattaagcactgtaaacagcaccagattttttcaaaataagcatgaaaaagcacaaaaaaggcaaaatcagcacaaaaaattggaaaaaagcataaaaattaagagattaaatgcaccaaaaattgaaaagtcgtcaaaaaaacgtttatttgctccctgactataaaaaacctccaaaataggtgctaaaaatggtaatgagatacataattttaaaaaatcaaaatcttgtcaaaaaaataaattaaataaattttggagatgaattattttgataaagtttttcatttcttggggtgtattctgaaatctttcggatcgattcttaggggtgtatttttcgtttttattgcatttttattaataaattttttgaaaattgctgaaaatattttaaaaagttcctcaaaatgacgaaacagcacaaaaaaagcaccaaaatgccaaatcagcacaaaaatcgagaaatcagcaaaaatcagcatgaa

SEQ ID NO: 39586 - DNA, 956 bp, Heterodera glycines
ttgtgccaattaactaaatagctaattttgatgatttaaattaaatggaaatatataccatttttaaaatttttttggctttcattcatttaaatttgattttatatttattgacattttatcggtgtaagccaatgaaagagaaaaaagaatccctatttttatttgtcgtttgaaatttttcttctcgacaatatctctcatccggaaattataatcgtcagtgggaatatttaccattttttaaaatttatttgcaatttcctatttatttaaatttgatttaatgtttattggcattttatcattgtaggctaatgaaagagattaaagaaattgtcgtttggaatttttcttcttgacagtatctctcctttggcaattacaagcgtcattggtcataatcaattgttatttctgtgatttaaaaatttaattattttaagttaaatactgcctttgtatgagtatctattattttttcattttaaatttatttagtaaatttaatttagtttattcgcattatcggagatataaggttgagaatacagtttttcgtattgaaaaaataatttaaacaaatttatttaaataaaaattcaaaaaatgaaaaaaaatttgagaattttcaaagttcttcctaattttggtctttagggatgtattttttgtacttgtggtgcacttcccgaattttttgttgaaaatgtcgaaatatggaggaaatttaaaagatgaatataaatatggaaaaatactgaaaaaacgaatcatagagcttcgatcaagttaaaatactttttactagggtagcacggtaccgatacttttgacgaaaaccggtaccgatactagccggtactggaaaacccgagaccggtaccggtacttaggttttcaaccgataccgataccggtaaccggtactaaccggtacttttttgaggtaaaaa

SEQ ID NO: 39587 - DNA, 429 bp, Heterodera glycines
ctgttatttgccataatcccttcttcccccccccccaccttcttaaaacgttcgtccttaactttgcctttctctctccttttctccaacttggcatttggcaattttccctttcccaaattttgccaaattttggcttttcattctgctcttccaacgcccagcccctcccttcctattccgttttttgcttatgcgaccatcgaacatttcacgcgtctctcccccccccccccctccttccagcattttatgtcattgatgtgtctcggctgtccattttggcactccatttcaattttccaatttagttttgtgtttgtgtttatcctaacccttcgtccaaactgctgctgctcctggtgaaaagcaaagtttgcccaatttggccattcctcaaacaatccctccctcctcccctcctccccc

SEQ ID NO: 39588 - DNA, 922 bp, Heterodera glycines
attataagtagaaaccggatttttaggtgctaaaaatcctgaaataggtactaaaataagtgccaaaaaagtgcaaaatagatgttaaaaacgcccaaaatgccaaaataggtgataaaaactggaaaaattcagtgtttttaagcacaaaaaattcaaaaagtgactaatttttttccgacctcacaattgcaactggtcaaaaaaataataaataaattttgaagacgaattttgtaaaaatttacttttttagggatatatttttgaaattttggtcaatttttaaaagtgtattttctcagaaatctttggaatcgattcttaggggtgtattaggtaaaaaagataaaaatccggactctaattataagcattttcagataagatgaatgagaattttaagaatagagctaaaaaaatccagtttaagccggcaacacaagggcctatttaaattgggtcaatctcagttttaatatgtcaaaagaagattttagactaataaaaatccatataataagtagggctccaatttttaggcaaaaggctatttttttcctgagctccccgtggcctgaaatgtacgaaaaacatgttcgtttgggctgttgttaagctacttttcgagttattagtgcctattttctaggcttttatttttagcgcctaaaaagcctaagaaattttgcaagagcctatttttgccttttttggcgttttgccgaaaatttgttaacaaaaatgcattaaaacaaaaaaatacacccctaagatcgattttttaggaattttaaaaatacacccctaagcagagattcaaaaatttctgaaaataaatcccctaagaaatgaaaattttctcaaaaatcgtctttaaaaatttttttggacaattttttgaatttaaaaaataatgtaa

SEQ ID NO: 39589 - DNA, 1821 bp, Heterodera glycines
  unsure (1)..(1821): unsure at all n locations
aaaatgaaaaaaataaaaaatctaaaatataaaaatacaaattttataaaaagaaatccaattgggagataaattaaatttaatttaaattaatatctcataattaaagtaccgtatggtagctcaaagtgacagtcaacgcacacggaatggcccgttgagcgtacggtacccaccgtctcgccgttcagtgtttgaaattcttgatcaactgaaatgagttaaatatttattacctaaattaattaataattaagtaaaacacatatttttaactttaaaaatgttttaaaaacaatcatttcatcttttttaattttaaaattttttgtacgaataatttttacttcgtatttattatttttttaaaacaaaaattattttttacttcattgctttaacacatgcaactaattattttactctttttattgcataaattaattaattcgcctgtttataattatgttaattattcgcccataatgttattattattattattattattcaaattaattattttccctttttttataattaaattattaattttcccatttatttttaatatttatggcatttttttcttgccctggagccatcggccgggccccgcctcttgggcatagccaatctgacgaagtggcaagaagtgaacaccgagcagtttgtcccacaacacgcccttgttccacagctcaagtaccaggccctggtccagctgatcagtttcactgaaatggcaaacaaaaatgatcagagtgatcagagctaacacaacaaatccaataggatttggcaaatttggtgccattaattcttggggaacctttgcccaatcccggcacaacgttcgacccgagtcggggtcaaatgccgggccgaaaatatccccgaaaatggtgccaaaacaggcggagtgatgaatgtataaaattaaaatttgaaaaaattattatcaaaaaaactaaatgaaaaattaattgcatgcctaatgaggcaattataataattatgcacataactcattgaataatttattataaacgtttaaatgggaaaaaaaaatttgtgagtaaagtaaaataaaatcagaggtgccatactaggccggtccgtcaggacggcatatgtcagtggcgggcactttgtgccaaataattcctttttaaattaacggcagaattttaattcactctatattaagttaatttttgttcaattcacatacattgaaataaattaagcaataaaaaatgaaataaatggatggatgagtcatcagagtaaattttttgatataaaattaaattaaaaataaattcaattttaataaattttatttattttatttatattctcttacaacacaaattcctgctcccattgcggctgattgcctttgacagcgattgttgttgacttcacattttgtaattttaacgtcacataggcatggaaatcttctggaaaagaattttagaaaatttaattttggcatttttaatttttttttaataatttaatttatttaaattatttaatttgctaaccgattgtgccttgaagacgagcctttttcactgaataattaaataatttttatttatttgcgtttcattttatttattttatcaaattattattattataattattattncataattgtttaanaaaattaataanattttttaattaatttttgattantttatttattttatcaaattattattttatgatatattattatttcataantattantanttttttnattaatctaaataattttcgatttatttatttaatttt

SEQ ID NO: 39590 - DNA, 1371 bp, Heterodera glycines
cacttttgcgtttttttatcggcaaacgctccaatgaaaaaggcccctcaaagagaaacaaaacaaaattaattctatgctaattgtatgttttaatgaaccaacaaaacccctttctcttcgggagaggcgatgtgaaaggaattcgaaaaggaaacggacgaagagcgaaggacggagaaaggcctaacggaaaaggaggagggagaaggacacattcaaattaattaatgaatggtgactcacttaaaacgcgccttcacacgacagtcattcaagggaattgccagcgaattgcgcagtgcgaaaatgagagaaaagggcgaacgattggacgaacaaaggacgaaaggtgcggaggcgaagggcgaacgacggacatggacaacggacaggggaaggggcgcggaatttgggtccaccgacggcagagaggaccaaacggatggccaaggcataaaaatggcactaaagcaaaggaaaatgaacaaaaacggcattttggcatccaatcatcgctcactttggcttctgttccgtctcttccgctgcttttcgttcccgcgtcaattcactgattttcgagtgccatcgtccaatttcgattttattattctccgactgatcgatcattgaaagaaaggccaaacagcagccaaaaagactgaatttgaaggaaattaagccttgaacacagcggcccaattttgggctcccagtacaattatgcttattttttacttagtaatcagaacgccaaaactttgcaaaacttaaaaattttatggggattttcccttgtaaaaatagaagagccgatctcgagttaaaaacttaagtttcacaaaataaacttggaatcgttagagggggtcaaaatatgggcctatgcaaaattttaagaaaattggtcaataggaaaatttttttttcaagggcaaagttttttctttttctcttattttgacgcactatttccatgtctctaacatataaaataacacatggttcatttttttgctaataaactattttttaaatttttatttaactttgaaatattcttcagaattttctcttcaaaatgagcacaaaatggttttgtttggtctattattgaaaaagttataagctaaaaaaattcataaaatcaagggtaaaatatagtgtgtaccttttactgtttgtatttgttcttttggcgttctgtatttattattattttatttatttgctttaaaaaattgaaatttatacacaaacacaaggaggaattgaacttgagagcccctttttggtgactaactcacagaccactaagacgaaaaatccagcataattgtacatggagcccaaaattgggccgctgtg

SEQ ID NO: 39591 - DNA, 1586 bp, Heterodera glycines
  unsure (1)..(1586): unsure at all n locations
ttaatgttctgcatagaataaaaaataatgtatatttttttctattatatttttgttggcggatttacgaaacgccctgccggatttacgaaacgcccatagtggcggaatttacgaaacgaatcagcacgttattttagatgtaaaggtttatagatttttaaaataactatcgttaaagtaaattatgagtagagttattgtcttttttattttaatattttaatcatgtttaaaaattcttaaacttttaaggttttttagaagaatctttatgtttaataaataatttgtaatattatttaaattataaaattgtttaatgttatataatatgaaaatcaaaaatgaaaaaattaattattttactattaaaataatcaaagatttaatgaattgataaagctgaacattattgtaggtcatttagtattaaaaaaaattgcttaaaatcaatattttttgtattatgttaccaatttattatttaaaagcaaaatattttttgaataagtcagaataaactgttaaataatgttaaatttaattcgttttatgtatttagctttcaaaatccgaaatttaatttaatatattgattatttattattttcatattataaagaattattaaactctttatattgcatcattagtttttgtaatagtttatctgttctaaaaatattttttgtggctgtgccaaatttagtttttttttaaattatatacatttttattttttaatttataatttaatatctatttttcccatttataataaaaggaaatcattntanctaaatgatctaagatntcatgtntagccataaataattattnataactnttaaattaaaaaaatatttgctgtaaactaaaatattatacggttaagtcttttatgcttgttaataaatccaatcaattacttttttatttatttcagttgcattttattatcagctttatcgtgttctacttctttttgaatatccgtgataaatataaaacttttaaaaattaatcctaataaaaaagcattcatttaaaattatttatttgtgttttgctatttttaatatttattttttatttttaataatttatctatatattaaaaatttttgcttctatgcccgattatttcatgttatcgaaagaactgtgtatatattaaataaaaaataagtaatttaaaataaatcattaaaaattacggcaataaagtgtatttaataaatattaaacttattatttaattgcacgggaactttttccgcaccttgttgctattagatttaacttcgattttcttttaactttaattttttgcgtaatttctcgaattaaaatttttttattgtgtgcttaaaaagtaatatttaaatataataataatgtttttaagtaatttgctagtgcttttttataaatttgattaattatttgtctaaaatttagttctattataaataacaacatatttattctatttgaaaatattcagttgatttattcacttaatcatatcttaatttaatatattgtcttatctgctgcaatatttgataaaatttatgcat

SEQ ID NO: 39592 - DNA, 663 bp, Heterodera glycines
ttcttaggggtgtaaaagtcgcatttcgcgccaaaaagcgaaatgcgaaaagcgaaacgccaaaaaatgcgaataatgcgaaatgcgaaacctaggcacatccctgctaaaggattgtctgtatttaaagcttttgttgatttgttgcattttaattataatttttatgattaatcttgttaaatctaataaaatacgcattaaaattgcatgaatgtgtaaattttggtgaaaatttacgattttcgactttttgttcgaatccgggtccggggttcgaaattggtcgaaatgaatgtcatattcgtgatcagcggccccgaaaaccacaggaaatgtattttcatgacttttttaaaaaattttcaaaaaggacaactttttaactagcgccgtaatgtctaaggtgtcgaaaatttgtttaaatattttttatataaaagaaagatttaaaaacggcttagaaatcctaaaattgttattttgagcaaaatccttcaacgaatggcaccctatttttgaattcatgccattctcatttttggtatactctctccacccccatggcgcataaagtagctcaataggttagactcgaatccaattagcgccgtggtgcactctttttttaagtggtgcgaaaattggggattcaatgaaaaa

SEQ ID NO: 39593 - DNA, 690 bp, Heterodera glycines
cccccccgaaatgaaaatttttaaaaattttccagcaaataatggaaatttttttcgaattcccccccccccctcccaaacgaaaattaaaaagtttaataggcaaatttcgtaacaagtagcactcaaatttccaaaaatgtttcccggcggcgcctatcggcaccgccggacctccattttccactatttttacaagttttttgccttaaaacggccaaaattgggtcatttttagtgaaaaagtgcagttgttacccagcagtggaaaaaaaagttattggttaaatagcaaaaaaaaaaggtcttcaggtcgggtaccccccccccccccccgaaaaatgtttctagatacgcccctggtgcccgtgccggatcgggacagtccatcaaatcgtccattttcacgtcgccccggcacagctcgtcaatttcttcggctggcacgcgatttctgaggtccaaaatattttttgtcaaaaaattaaaaccctaaactaaaccttagctcaaaaaagattaaaaatttttattcgaaacaaaatgcgtgcaaattcgaacagtggctaccgtatatttgtcctccagatggatcgcctaactgtcgccatccgacgagggtgatcatcggcaaaacggcaagaatgaagggaggaataaagcataatcaacattggatctcctcatttc

SEQ ID NO: 39594 - DNA, 930 bp, Heterodera glycines
tttgaggcatcgccgcgagcataaatttttgtgcaaaatggaaaggtgggaatgatggtgggattattaaattaccatatgtaaaaatgcgtaatcaactatttgcctaaatatacaagcaaaaaaataaccttatgagggggctgtccattctcatcccttctcggaaaattttccagaccctaagaattttccttcaaaagccctgatttcaagccattttggcattgcagatcacccaccatgaagggatgatctgactgatcaagtcagtgtaaaaacttacctccgggaaagaaaatttaacatttcttttaacccttttacaaaaaatccaattcttaccagtacatttttactcccgcatttggtgagaaaattggagatgagtcccggaaaaatcccacggaaagaacggtgcaaggcaaatttgcttgcgagagagagagagagagatatgtacagttactgtactgaaactataagagaaaacccagacgaaattcaaacttataaaaaggccggttataattctaattcagtgaatggtattatcttttaacagttttaacatcactgattgtgaacatggcgaagacgacatttcaaagttggcagaaaaactggcgaatgatcggattcagacggaaaggaatttgaaagtcgaagcggaattggcaaagaaagcagcgatttccgcgcagaatttgggtctgccggttgttgaacacataaacagatatatcgacgcaattaatcgtgcacaaaaggtgaaaaacggcaagataacatgctcgagtcctgtaaacagcggggggggggaagggcaactgaccgccggaacacccgattcgtcctccaccctcattcactcctccgattttgtttaagaatcttagtttttcgtttttgcaaatttttgtaaatttt

SEQ ID NO: 39595 - DNA, 785 bp, Heterodera glycines
aatggtaattgtatttttttttgtaaatattaattcgtttcaattttcaaaaaaggttgctttaacctcaccctcgtccccgcaaattctgcgctttggcatggcattcggcgaaatgaaccacgaatgggttggcaacgaatggttgccttcacttggtcttggcaaataccgtaccgagttcatggagtgtctggtgagggtcgcgtttgtatgggactcagaagcccaaatcggacccggtcatgtaaaattagggtactcaaatcccccggggacgacatctttttcaatcgtttttttgttgttgttttttactatcaatttttccgtttcaaggttgatgcgcgaatgttggaacatttgagcaaaagagacctcagcaaaatgaaaatgatcgacagttttcaccggtgggaaaagaatttgaatgaaaaagtcaaaaaatattatcctcggcttttcattattttgattggcttattttgatggttctttcaaggacaagcttacactacggcattgtgtgcctgaagaaattgaattatgatcggaagcaatggaagaacggcgaaacgcatcggaaaacgtcaacagaggtgaaaaagagggaattcaatgaaatgcaattaataattggcgatttgcaattagatctaatggtctgatcaaatgagcgggtcattaccaaaactattcgaattagcgaattccatcttttttcatgtgttagagacacgaaaatagtacgccaaaacgagaggaaaagaaatgcaaaaatttaa

SEQ ID NO: 39596 - DNA, 1005 bp, Heterodera glycines
acccgtattttttgtaccccgatcacattctgaaaaaaataattgatgcgctaaccctaagtctccccagttattctgcgcattgctttctccaacgcgagggcaaagccgcgaatttgtttcattttcctcctttttgtcttttttcatgccgatctcgaccctaactcagcaacgcgtgggcgtacagcagcggcgactgcagcattcaatgcagctcttcaaaagctgtccgaacatatttttctttcttttctaacgcatctccaagcggagttacacccatttttgtacccgtattttttgtaccccgatcacattctgaaaaaaataattgatgcgttaaccctaagtctccccagttattctgcgcattgctttctccaacgcgagggcaaagccgcgaatttgtttcattttcctcctttttgtcttttttcatgccgctctcgaccctaactcagcaacgggtgggcgtacagcagcggcgactgcagcattcaatgcagctcttcaaatgctgtccgaacatatttttctttcttttctaacgcatctccaagcggagttacacccatttttggacccgtattttttgtaccccgatcacattctgaaaaaaataattgatgcgctaaccctaagtctccccagttattctgcgcattgctttctccaacgcgagggcaaagccgcgaatttgtttcattttcctcctttttgtcttttttcatgccgatctcgaccctaactcagcaacgcgtgggcgtacagcagcggcaactgcagcattcaatgcagctcttcaaaagctgtccgaacatatttttctttcttttctaacgcatctccaagcggatttacacccatttttggacccgtattttttgtaccccgatcacattctgaaaaaaataattgatgcgctaaccctaagtctccccagttattctgcgcattgctttctccaacgcgagagcaaagccgcgaatttgtttcattttc

SEQ ID NO: 39597 - DNA, 1256 bp, Heterodera glycines
ttgcttttcctgctcttatacaaggccaaaaacttttaaatcgattttggttctcgactttttcttacgaattctggtcaggggttcaaaattggtcaaaatggatgccggatgagccgcttttcctcctaaagaaaaattggatattttcgttaaaaatgccttcgatttctcactgttcactgcaattacctatatttttatagaatctttcttaaaatatgtaaagtaatgtaaaaattttcagatcatctaattaattgaactttgtttcctcatttaatcaattgttgttgtgaaatggaggcaatggaagttgacagcaaagcatctggaggtggcgaaccgatgaataacaataacaacggttattactaataaataccccccatttatgtctgtccaattttgtcttttttagcgattgtactttaactaacaatttgggcaaaaatggaccctccgccctagccaaaatattattacataaatctgtttaatcctccacggttcttcactttaagccaattcgtcgtcaaatccgcgcaccgttctcgatgagagtggtggaccgaaaaagatgagccatgaactaagccgagagttcatcaaagacattgacgaatggatagcgcagttgtacgagtgcaagcagctcagcgagacacaagtgcgactgctctgtgacaaggttggccatttcaaatttggtcaatggaaaattgccgtaatgtcccgaaatgtaacaaaaattgcgttaccaaaatgccattttttgttgggttggagttgtttacagtgtagagcaactaacttttcttagagacaaccaaattaaacatactttgagatatggttcgatagtcctaaatcttttctattagaaatgaaaaattccaaaaaaaaacatttcgtaaaatttgccaatagtatcacatattttttgaattaatttttattttttaaaagctataaaacacactttttaggggggttttcggtcacaaatttgacatccgtttcataggattccaaatttcggacccgatttcgaacaaaaacacaggctaatagcgtatcttttttatcgttatcgtgtggtactcaaatgcatgtttacaatggttgtttcaacaaaaaagttacaaaatccttaaattgctattattccactctaaaatgattccagtttgtttcggttttgcaatgtttttacttgccccattgttgtgacttggatgtgttccacatggccg

SEQ ID NO: 39598 - DNA, 1023 bp, Heterodera glycines
  unsure (1)..(1023): unsure at all n locations
aaaagagatagccattttctgcatnagagaataatttaaaattccctgtagaatagaatggccatgctctccgcgcccctctgcccatgctgggaacatttgtatggtacaaaatttctcgcaaaaaagagatagccatttttctggcatagagaataaatttaaaaattccctgtagaatagaatggccattgctctccgcgcccctctgcccatgctgggaacatttgtatggtacaaaatttctcgcaaaaaagagatagccatttttctggcatagagaataaatttaaaaattccctgtagaatagaatggccattgctctccgcgcccctctgcccatgctgggagcatttgtatggtacaaaatttctcgcaaaaaagagatagccatttttctggcatagagaataaatttaaaaattccctgtagaatagaatggccattgctctccgcgcccctctgcccatgctgggaacatttgtatggtacaaaatttctcgcaaaaaagagatagccatttttctggcatagagaataaatttaaaaattccctgtagaatagaatggccattgctctccgcgcccctctgcccatgctgggaacatttgtatggtacaaaatttctcgcaaaaaagagatagccatttttctggcatagagaataaatttaaaaattccctgtagaatagaatggccattgctctccgcgcccctctgcccatgctgggaacatttgtatggtacaaaatttctcgcaaaaaagagatagccatttttctggcatagagaataaatttaaaaattccctgtagaatagaatggccattgctctccgcgcccctctgcccatgctgggaacatttgtatggtacaaaatttctcgcaaaaaagagatagccatttttctggcatagagaataaattaaaaaattcctgtagaatagaatggccattgctctccgcgcccctctgcccatgctgngaacatttgtatggtacaaaaatttctcgcaaaaa

SEQ ID NO: 39599 - DNA, 412 bp, Heterodera glycines
tgcattttaggcaccggaacaaaaggaattgatcaatttaattgtgatgaaaagtatgctgcaaattgagcaaaaagtgcgccgaattcgctactcacagacgccgattccagaattattttacacacaatgtgatacatttgaatcaattttttcacgaaaattgaatttgattgaattgaccaacgaattttcggtaagcgaatccataaaaaaattgatgaatcctttgaattaagactaaaccgacccaagcagttccagcattatatcttgaaaaagtacgtcactttggacccttctgtatagggccagcacccgttctcatggatttgttatgtgtattcgaaattcgcaaaacatttccattctttgcgcagcttgacaacaatgacaaggtgcagaaaaataa

SEQ ID NO: 39600 - DNA, 1007 bp, Heterodera glycines
ggggggggggggtgctgactctgaacagtcggcgattttctccaatctcttaacacaaatttattcaatttcttctcgacaattaaatgaatacttctcgattccccccgcccgcggtgaatgtttctcaaaatgcttctcaatttgccagcgatgaacaaaattaaacaatttttattaaatttaacaatcattttcaataatttgatctcaaataaaaaaccgtcagaaatcatttttattattccgctttaattattgatgaggtggtgaattgaccatacattatacccataaatatgtaataaaagtctgcaataaacgagaaatgatgaactcttctcttgatcagtgatcagtctttctgatcagtttcgtcctctcttccttccgcctcccctttgtctttgtcctccgtccatccgtcgtcccttccgtcgcgtctcggccgaattggcaattcgtcccaatttggcctttgtccggacaatttgcgcaaccgctcgacatcgaagtgaattcggttcaaaaggctcacggagacttgatgacaagtgaccaaatgccgtttcatattgcctttgtacaaagtgacgaattgacaccagcggcactgataccttacaaaagagcaagggatttgtagaaacaactcattaaacgacaattaattacggattggaagggtccacggaggcaggcgaaaggcaaatgccgccgttgttttgctggtcgatcgccgcatcgttcactgaattggcaattttgttaagcctttggcattggctaatgtggcggcgaatgtcccctttgaggcgggggaaagagcgattgcctggcaattagtgaatgaattacgcaattagtaagcaaaaaaagacactcacagaacggacaaattgggttggtcaacggttgggggggagagggaacgctcggccgacttgatggcacagaattggcccagcggaacaatagaaagcgactgttttttaatgattaattgt

SEQ ID NO: 39601 - DNA, 1295 bp, Heterodera glycines
gcagctgcctcacgagccatgcttttggggtgcttccatacgttggagctgtggtataccgctcagtgctgcacatgttaaagcctgtgtatggctgctgcgtggcaatgtgtcggtggcgggctgcctcgcttggttggttcgctgcgccaatgtggggtgcacgctcgtggggcgacctaacggctgtgttggcgtctgtgcgtcgttgagcggttgttgtggcaggcacataacacactgactggggatggtggtttcgttcccggtcttacgtgccgtaactagcggtgtgtttgtgcttgctgctacgtccgtggccgtgatgagacgacgtggtagggcccgtgcttggcctagcacgtggcttaagactcaatgagtgtcagctcgggcaccgccagctttttcttttttttcattatttttttttacacttctgttgaagaatgaattctagtcttatcggtggatcactcggctcgtggatcgatgaagaacgcagccaactgcgataattagtgcgaactgcagaaaccttgaacacaaaacattcgaatgcacattgcgccattggagttacatccattggcacgcctggttcagggtcgttaccataaaatgcactgcttgtgcgttgcttcgtgggatcatgtacttgtacgtgttcttacgttacttgctcagctcggctgtggggttttggtgtgctggcgcgaacttgtggttctaattcgcgttttacggaccgtaactcaagcgcaccaatgctttgcatgctgtggcggagtgcctggattactggcattcctgctttgatttttcgacctgaactcagacgtgaacacccgctgaacttaagcatatcagtaagcggaggaaaagaaactaacgaggattcccgtagtaacggcgagtgaactgggaagagtccagcgctgaatcgcagctcctctggggttgcgaggtgtagcgtatagaccgtgagcttgggttggcccgcttgttcaagtttcccttgaccggggctccagagaaggtgcaagacctgtccaactggcggtgcctacccatctttacgtgtcttggagtcgggttgtttgggatcgcagcccaaatcaggtggtaaacttcatctaagactaaatacggccacgagtccgatagcgaacaagtaccgtgagggaaagttgcaaagcactttgaagagagagttaaagaggacgtgaaaccgatgaggtggaaacggacagagcagaagtatctggtctgcattcacccgtttgttctgtacg

SEQ ID NO: 39602 - DNA, 1033 bp, Heterodera glycines
tgtttgctccgataaataatccacatggattcaaattcatccaacgccaagaaaattattgtttctttttcaatgtgacaattttccattgtttctttattgtcctcaagcactttggcatatggattgttgagtctcagtgtttggcgctcgggcggaatgccaattctgcttttgattctttgtttcagtgtttgcaccgtgtttccattgttcatcttgatggtgtacggtttgccaccatgcaaaacgaaaatttcaaattcaaaagtcgaagcataaacgattccgagtcttccaatgccataatctttcattgttttgttgtcatcaagcgcaatgtcataatggctaccatgtctaattgtcagttgatgtgcataaatagtacgaatagagtgaaaactgtcaatctcttccgcgatcttgcgcttcaaagttgccacagtggcggtggcattcacgaaataaatgtagtagggcttcgatttccacttcacaacaccatatttatcaatttcctcctcctcatattccaccaaaatttcaaatccatccactaatacataaatatttgcctctgcctttatgccatgttgggccattgtttttttactgacctcttcatcaagcacatcacaatctgcttttcccattgtttcttcaattcttgttgctcgtgcgtcgcatcaagcagtactcgttcattaattttctctccaatggcactttccaaatcagcaagatcgaatttgtacaagttttgacgtgcggggtcaatgttcatcacaccttggaccttcttcttcaaaactgacacagtgtccgttcctttcacccaaacggcgtgttttttgcctatataccacacggcaatttcaaattcgtccaacgacaagaaaacgggttcattatgcgaaatttcaccagaacacggaatgccatatggttttttgcatctcaaggtttgtctttcgggtggaataccaatttattgtttgattttatactttaaatctgccacaagaataga

SEQ ID NO: 39603 - DNA, 1090 bp, Heterodera glycines
aaagaattgagccctttgaaaaaatcctgaacgaaatccgattggaattttttaaaatgaagacaattcgcttcaaacgaaccaaatcagtcaagcaatttccaaccgaagggtcaacgaaaacactgcacgaaattgatttattcagatgagagacgaatgatttgtccgaaggactcagtccaggcccagccagaaacttacgaacaatcttgaacgaatttacacagatttgaaaaatattatgcccttttcaagacccttttcgcatttgaaatgtcggttttattggcggcactgcgctcattaaaagtcacgatccctgccacaattgacccatagcatgccgacatgacaaaatgtgtggcattgtttacaggcaactgctgcagaatgatgtcacgcatttttgggaggcccaatttcagtgaaattgtctgcaaacatagttttcatgagtaaaaagtgcctatttctaccgtttttggcacaattttaatgaagccaaatgagttgccacgatcggtttgagttgccgctttttgtaaaaattgaccaaggggacggacatcgtcaaaatgcgcaagttggctgatcacactcaactgtaacaaaagcaaaacaaaatcttattatgattgtattaacaactttctgatcaaggcccaatattttggtgcgttctttcaaatcgtcaaaactttcaatttcaatgatttcttcgcgcatatttggcctgtcctgcactgtcaaatttttgtagtttttggccattttgttgacaaatccatgatcattcaaagtgacgaaattgtccgttgaaacatcgtaaagattggcgagaggcgccttcacctcggagagaagaaagcgaccgctaaatatccgataaaatggattttagagaaaaaaagaagcaacaacaaacatataagaatttaaaagacaattactttaaaatattgccttttaaaaaattattccatataccgtacttactgaattagtacctccatctgaattagaacccccctttcgaggggggttgaaaaatagaacccccgggggtactaattcagtaagtacggta

SEQ ID NO: 39604 - DNA, 1037 bp, Heterodera glycines
tttcacccgcactcaaaaggtcagtgttttttttttattaaaatatattatttcttggcttttggccatgccgtttgaaaaactgaacacggattcatttaaatttattaaaaaatattaaattagaaagtaaattataaatctatgtattaaaaataagtataataattgattacaggcattctacatatctttttcaatttccgaacgtgtccttgatttttataataaataaattaattatatattaaatatttttataaagatttttatttcatttattattcttctattcataaaaaattaaaatataatattaatattgtgtatttttaaatacaccttttatttaaaaaaatagaagctttatttacgaataattaaatgaaagttctcgccaaacggacgactaattttgcttcttaatcatcgacttgagttgtacaatattataatgattacattatcatcatattgcacgaaatcagtctatttaatgaattaaaacaaataacaaactggcaacagatcgactggttgatttacttattaatttattcaacattatattgcctaataaaattatcggatacctacaaatattatttttaataaatgtttaattcaaatttatttaatttaaccgttgtcttttttatataatcttcctttcgttttgtttatttttttataacaaatcaataatagccatttttgtttgttttcattatgtttttctgaaaaattcctacttcatgaaattatttttttttgtttttcttgcctttctgccgaatatgagatctcagtactacttgctgtttagacttttttgtttcagtattcagtatcaataaaattttcaactgtttagatttgggttcggatcccgtgggcgggggtgacttaccaaattttagagatttttggctaattttttaagaaaaaataggtttttggggggccggcggggccgataggccgcctggcgaattttgaaatttacgagtggagactaacagatgtttacaaaaaaa

SEQ ID NO: 39605 - DNA, 2342 bp, Heterodera glycines
  unsure (1)..(2342): unsure at all n locations
aacatttgtagaaggaatgaattgccaatgttatggaaattaattgctacattgaaatataatagataaattatttgttctttttttcgcattaaccaattaataatgtttttgttgcgtaacatttgaattgacatcactgatttttattgacttgtctggataaatccaattaatcattgtttataaaaaaataaatttattttataaaagcgcatcctaattttatttgatttatataaaaatgaatgtctgtatcaaattaatatttaattaaaataaataaacattgaacctacagaatcatttgcaaatttatttcattttgaactcagataaaattgctgtggttctctttttcatctttatatttcttaaaattttagaatatttgaaaatgcatttttcgttgattcaaatgatgatgaccattttcacaaaatgtgccttaattatgggaatgttagaaaattcggaactaattgctgttggcaataaattagtaacaactgtggctcatgaaagccaaatgataccaacgctttctacaactttggtgccggtcaagatccgtgtaaaataccgtgaaagtggcgaaccagggcatgtctatgttacagtaggagattacggtaacaatcattagaatatgttaaatgctcctaaaattcagaatttgatatgacgcggtcaagtgctaggcgtagaaaattgtaagttttggcgcaattttattgtagaaatgtgaatttattcatatcccttcgaattaatgacctgaatacacacaaaaaaaacaactaaatttcggagtttggattggcatttcttgccatccgagtaaattacattttaaaacggatatatttttttataacgagcttagaaaatggactatattactagatagggaatgaaatattttgaaaatattgatttaatacttccgttgacattttttttaccaattatgcccaaaaaattaaaatattgaaaaataatttatttaattcatttttaaaaaaatgtttaagtccaattttatccgttttcccttgaccattccttaaataaaaagaaaagaaaaaggaaaaaccttccaaggccggggattttttttgagaccaaaaaacgaaaaaaagtttttttaaaaaaaacaaaggttttggtttgaaaatccttccaccccaacccaacccaatttttttggaattttgggtttcattttttggaaaaggaatttttggaggcgggaaaacccccccccaaaaaaaaaaaaaaaaaaaattttttttttttttttttttttttttatatatattaaaaaaaaaaaaaataaaaaaacacctccggggggggggggccccacgggggggggggggggaggaaaaaaaaaaaaaaaaaaataaaattattttttttttttttttttttttcccccaacaaaaaatttttggggggaaaaaaaaaaaaaaaaataaaaaaaaatttttggggaaaacccaaattattaattattttttttttttttttaaaaagtgccccgtttttcccccgggggaaggggggatttttaagaaaaaagggggagaaccctttttaaaaattttttaaaagggaaaaaaaatggcccaaaaattttttctttttttttttaaaagaaaatttttttcgcaaaattttagggttttcaaaaagttttttttattcaggggaatgggggcgcccccgttattaaaaatttatttcgtcagaaattttttttgtgggggggttattgggccaaaaatccttgtttaaattgattttgtcaggtgaaaatttttgtcgagaaaaattttaaaaaatttatgtaaaaatttttcttgactaaaatcaaagaaatttaaaaataaaattgacgaatttnaagtttttgataaagcataaaatganatataaaanttaatttgaatattattaatatntaaaacaaatatgtacatnttctgtggttattgttgttggtgtcttgttgatcgattgctgaaaaagcaatntaatattatttttccaattaagttttatttacaaccaaatgttgatcggaatgatggtgctctattaagggttgatgccgcttaaaataatgaaattaaaattcaaaaacaaaaataaaaatattatatattaataattgtgccagattttccgaatattcgtttatttaaaaatattttaatgacaacaaatttataataaaaaaaatttgttcaaaaatattgatcagctttattaattttgcaaaaatggaagtaatgtatccgttacaaatgtccaagacttttaattatcattaatta

SEQ ID NO: 39606 - DNA, 1255 bp, Heterodera glycines
  unsure (1)..(1255): unsure at all n locations
gagctcgcattttgaggcatatgcctttttttctacgccctagtttcgatatattaagcgtaaaaaagcatttttccacttggtttgaggcttctacgttgacttttattatgcctttttttgcctctttcgggattttcgtgccttaaatgcattttttggcattttttttcaaatattgatcgacaaaatttgatatatatatatatatatatatatatttttgataaaaattttaggtgtaaaacttttcttattcgaaaaagcaatattaataatcatttaaatgaccaaaaatgaattttttgattaagttttacgtgttttgctccctataaatccttaataaaaaaattttaaatgcctattttcatgcctttttcgtgattttcgtgccttttaatgcctttttttcaaatttttggtgcctattatagtgcctttttcgcatttttggtgactttttagtcgtgctctacttattattgtatttaactcacaattatccaaattattattacagtcgattgtgtgcccattcgctcatatcttttggccaaaaaggttgaacggattcgttcaaatgcaattgcaaaatgaaaacatgggtaagcgatggagtacaattttggcggtcccaaaaacatcgggaccatccaaacagggctcagaaagtcacaaggatgtttatacgtgaacatttgaatctgaataagcatttaaaaattaaaattatttttaaaatccctgcatttttaatttgcattcatttaaatttttaaaaaagctttgggattacccgatatcgtaaaaagaagacaatccaaaccagtgaattaataatgtaaagaatgatggtgttgacaagtagaagcttaaaaaataattatgtatttaaatattcaaaaatttgggttaaaaacaatttttcatgaaaaatttcaaacatttttttttgcatctttcgatagccattaatgttaatctttcattgctttttcaaaaaaatttgatcttgtttcaaaaaagataaagacgaaattttttttaacaatttttgtcatcttttttttgaaacatgagaaaattgacgatttttttgtcgaataacagtacgagttcgtttttaccgtataatccatagaaataaaagaaactttcacctttanattcttatgaattgnngatgcatttttgttgtatttgtggatcaatgaacaaatttgcattagcancacgccaagcaanaaacagt

SEQ ID NO: 39607 - DNA, 502 bp, Heterodera glycines
gtttaggattgaattagaacaaaataaatgttatattcggaatctacgcatcaaaaaacccgagactcatttacgatttggcaaattatgtcgtttgtcgtttgaataagccattttttcgtttgtcgtttgtctctgtcgtgtgaattgtctccaatcacaattgacataatctaccgtaaattggtcgtttgtcaccaaaataaagttgttttggctttgaaaaataatcttcaatacggcaagtgggccggcatttcggaaaatgatcgacaactgctggattgaagttgctgaagaatacgccgaattggggcactttcgatttaaggacaaaacagtgaagcaattgagaggggatatttggcaaaaaaagaaggaagcggcattaaaaaatatgatttttcacaaaagacaggcacgggagcaacaaaatttgaagaggtcttgaccgaagcaaactaatttaaactaggcatttaagtgggagctcgtaattttg

SEQ ID NO: 39608 - DNA, 1005 bp, Heterodera glycines
aaaaatggctatctcttttttgttatccaaattgcgcattaggtattttcatacagtgcgtagcacaggttgcctttcttatccggccaaacgaagcattagtagggtgttggacacagacagaaaaatcgtaacgtgcccaaagatagctatctcttttttgtatccaaattgcgcattaggtatttcatacagtgcgtagcacaggttgccttttcttatccggccaaacgaagcattagtagggtgttggacacagacagaaaaatcgtaacgtgcccaaaaatggctatctcttttttgtatccaaattgcgcattaggtatttcatacagtgcgtagcacaggttgccttttcttatccggccaaacgaagcattagtagggtgttggacaccgacagaaaaatcgtaacgtgcccaaaaatggctatctcttttttgtatccaaattgcgcattaggtatttcatacagtgcgtagcacaggttgccttttcttatccggccaaacgaagcattagtagggtgttggacacagacagaaaaatcgtaacgtgcccaaaaatggctatctcttttttgtatccaaattgcgcattaggtatttcatacagtgcgtagcacaggttgccttttcttatccggccaaacgaagcattagtagggtgttggacacagacagaaaaatcgtaacgtgcccaaaaatggctatctcttttttgtatccaaattgcgcattaggtatttcatacagtgcgtagcacaggttgccttttcttatccggccaaacgaaatccaaattgcgcattaggtatttcatacagtgcgtagcacaggttgccttttcttatccggccaaacgaagcattagtagggtgttggacaccgacagaaaaatcgtaacgtgcccaaagatagctatctcttttttgtatccaaattgcgcattaggtatttcatacagtgcgtagcaccaggttgccttttcttatccggccaaacg

SEQ ID NO: 39609 - DNA, 924 bp, Heterodera glycines
aaaatggctatctctttttttgataaattttatacacatacaaatgctctcgagcatgatagggagggcggtgcgcaatagaccttttatttttgagggaatttttaaatttatactctatcccagaaaaatggctatctctttttttgagaaattttatacctcacaaaagcgcttgcgtatgagacggagggctgtgcacaatcgccattttatttcacagaggatttttatatttagaggttatcccagaaaaatggctatctctttttttgataaattttatacacatacaaatgctctcgagcatgatagggagggcggtgcgcaatataccttttatttttgagggaatttttaaatttatactctatcccagaaaaatggctatctctttttttgataaattttatacacatacaaatgctctcgagcatgatagggagggcggtgcgcaatagaccttttatttttgagggaatttttaaatttatactctatcccagaaaaatggctatctctttttttgagaaattttatacctcacaaaagcgcttgcgtatgagacggagggctgtgcacaatcgccattttatttcacagaggatttttatatttagacgttatcccagaaaaatggctatctctttttttgataaattttatacacatacaaatgctctcgagcatgatagggagggcggtgcgcaatttaccttttatttttgagggaatttttaaatttatactctatcccagaaaaatggctatctctttttttgagaaattttatacctcacaaaagcgcttgcgtatgagacggagggctgtgcacaatcgccaaggatttcacagaggatttttatatttagaggttatcctaaaaaaatggctatctctttttttgataaattttatacacat

SEQ ID NO: 39610 - DNA, 943 bp, Heterodera glycines
tcaggcctaggtagcgaagctccgaaagcgcgaagcgctttttcccagctaaatagccgacggttcacgcacccgctagtttactatatatgttatattgacaaggaagtttcgtttgcaaaaacaaaatctcccggccgaaggccgggagcgccctgaaagtagtggaagggtcttacaactttttgaggagaatccgggaaaactatagaaaaaaatttagcgcggacgactgagtcccagggacggatttctcattttttcgtgcatttgggggcccgtaactttttttctaaaacccaaatcaaaaaatgtctgctgtgagggggctaagttgaagtgttttctaaaaaaaaaaaaaattccaagcctctatctgcaataggaaaggctgtaggttcgtggactttttcagtaccaactttgtccagttcagtcccggttgaataactcattagggtttgatctgggcggggagttaccagcagacttattgtagagttcaatgagctggatttttccagtttttaaaatttcgaaaattttcaaaatttttcgagctaggcctaaaaaacggttttcgggtttttgaattttaggaatttttaacgaattttcccagagaaacgaagaccacttccaaaacatagtttttcgagctctatcgattggtaatttttttggaaaattttcgattttttcccggaaatagaaaaaaattttggcctgagcgggacatttgagtcccgggcctataactcgtcaggggttgattttagcgaaaaattgacttaggacatttttgtagagcattttaaatgctatcgaatggtgtgccatatagccggaaattttcaaaatttttcgagctaggccccctagaaattttcggaaattttttttcggacgaaaatgggggtgaaaaatatttttctggggtaaa

SEQ ID NO: 39611 - DNA, 1029 bp, Heterodera glycines
ttaaaaaaaaagttttttgggggtccgggatgcccgggggggggggattgtctcctgatatttcggcataatttcgggacaacttgcataagtattatattttaattgattagggtgctaatcgctgtctcgtcagtcagtcaagtaaaacacggttttctcttgtgtcttcccactggtcctcctcctcgtcctcacctgtgcagcagcgatcagcagccgctcgttgtccggcccgggcgatcagttgcacgcccgtgggcagtccgttgtcgttcaggcccagcgggcacgcgagcgcgggcagtgccaacgtgttccacaccgcggtgtaaatgatgtccatcggggtgaaaaaacggttggtgtgcagcggcgccacggtggtgaaggcggggaagatgaacaggccgtcgtcgccgagcagcgagatgagctcacggcgcagctggtcacgcttgctttcaacctttgggggcggggaatgcatgggtttacggggaaactccatgccaacataaaaatttgtttttaaagtttgaatcattttggacataggcgaaaaaatgtctggatcgaatttttttcttcaagttttttttaatttgaaatttttttgaaaaatttcacggggaaatttttgtcccactgcctccgccgcatgcaaattttccaaaaaattaattttcccaaaaatccataaaatagcaaattttggtgaaaaccttgggaccgttcctatttttagcatttttaaaaaaataaaaattcaaataggggggagggggaaattgtaataaatttaatctttttgaattttaatgaattttttgaaattatttttgccccccccccctaaagaaacgctctctcacaaattttctctgcgcgtcgctctgttgcggcaatttgctgcgaatgccggtgataatggcgggcaaagtgtgctcggaccagccgaacgggtatttgaccagctcggcgaagcagttcacctcgtactgaaaatacacataaaaatgcggaaat

SEQ ID NO: 39612 - DNA, 740 bp, Heterodera glycines
atttaaaccggttcaaaaaccggttttaacgctttgccgcgcagttttttgatggtttaggcgttttcagcaccttaagaaaacataacatataaaagtgtttttatgcaattttgagtctgggacctatgatggatattttccctaaatttcttccaaggcatttgccaatgccttttctcgtgccaatttcatcgtttacattcaatttcgcttctctgtttggagtattcggattcgtagtccgacctttgaactgttcaacaattcaactggggagcgattgacactgaaacagatttatgataagtatgttattaatcttacattatcaatcatttgggttcggtgggaccgcagttggccaaaaagccaaacataaatttaaacttcaaaattttagatttcatttgtaattttttcttctaaattgtttttttttaatataattcacccatcatttcgtgatttttaacgtaaattttttcagtcattttgtcttattttgaagaaaaaaaaattccgaactctgttattgcatcagtacatggttggtactaatcagtagggatacgatttttatgtttttacctatttttcccctaactcgcagtgacctgataagcacgaaaaatatgttttttcagttgttgttaagctacttttgaagtttttaaagcccatttcttggtttttactttttagaatctaacctaaaaatttcgtccctactaatcact

SEQ ID NO: 39613 - DNA, 1390 bp, Heterodera glycines
  unsure (1)..(1390): unsure at all n locations
cccccccccctttcagttaattattttatttctttttagggacgatttgtttcgaaatttattctgttgcgttattttgaaattctgtgctcaaattgttcctttcgttgctgaagtcggtgctgtgataagagactttgtcaattgcgctctaatcactgtcctccaggcaatttgcttcagaatttgttcgaatttgccttttccacaaatttcagaattgcacagaaaattttttttcttcgaacgacagaatcaaagaatgtgacgatgaaattgcgatgcattggctgctgatgggtcattccgcactgaatttggtcattcgttatgagaacgttgtcagaatgaacagacaaaacgaggactacagagagatcgccagagtcattaattgggattaattaatgtaaattgaaatgttcccttaattaaggaatgggttgaattctttggtccatccgcagcaaattacgtctttcattggtttttgcatttttccaacattggcaaaatgccgccacaatttttcaccaaaacgctatgtaatgccacccaatcgattgacattgaccgtctcatcaaagccgaaattccaattgaatttttgcaacgggcgaccgattgctgtcccgaagacgaactttcgttcttgcaaaatttcgaggggttttttcgctgttcgtttgtttttgttatggctttacattttctagttattccgatgagagacgctcccgacttctcccgacttcagttttgttcttcaattcgttgcctgaaattcaattcgcttctgccaccgttttaaaggggtccattcgaataagaaatggaaagggaaataaaagcttcgccatttgaacaattcagctttttgtttgaaatgttctcatcggagaacgccaaacgcggctcatttgctaagaaaagtttgaatggaaatgaattggagtccgaggccaacgagggggacgcggaggacattgggaagagtttggaggagcagtcgcatcagttggcactgccacggcttttcaaggcacttctctcttttgagtttgccaattactcccgtctgaacggtaagtacgtatgcatacaattccacgccaatttcaaatgttctccagaatccgaagtcgaccctttgctgctttcctgggatgttctgatgcgtttttttggagatttggacgtcctttcccgggttcgcttttgcgatgccatcgatgtcaaaaccctttccaatgcgttggcccatttgtttaattctctctccgaccccccggngcataaaggttttcccccctccccggcaataattactntctttttgcttctttcgatgcatttgcgtngttctaatgtcgacgagctttcactggcc

SEQ ID NO: 39614 - DNA, 800 bp, Heterodera glycines
tccaagaaaaggaaaggagtgctattaagcaccggaacggtctaattttggcactcacatgtccacgcccataaatccgttgccaaattcgctgggccaaatgtgatacaaaacgatggcgtaaacgccgatcagctgaagaccgaacacacacgggccatagagtggagcagtagccgaagaaaacggcaccatcggcggaagaaaagttgcaaagttattagccgaaaaagggaaaataaatgaaaaagatgggagaggagaaacgaagggagcgatttggagaaggaattgatggaaatgcaaagtgatttatgaacatgccactaatacagagaagaagctttcccgagatgaagataatggaccaattgagataaattaattgatcttatatgatcgagcaaattagggagaggcagctcagctggtagaaagaacactgatcagcaaagccagagacgccggttcaaacccgacccgccccaatacatttttcctcaaagacttccccagcagcttgttcatgcccgggatgagatagagaagaagaagctcccacgagacgaaatgaagattaatggatcaattgagcgaaaattaagagaaaataaatgaaaaaaggagcgacgagaagcgaggggagtatttggagaaggaatggatggaaatgaaagtgattttgcgaagatgcaacttttgcgaaaagcaaagaaaacattttggggttaccgcggattttgcggcgaaaatgtgaagcattcgcagaaaaggcaattggtaggaaagtgagacgaata

SEQ ID NO: 39615 - DNA, 831 bp, Heterodera glycines
tatttaattgattcgaatgtttttatcgcggttaattacattacgaaaattggcttgaatcgtgaagattatcatttctaactcacttctcaaaattgttgataaattgcaaatatatttttccaaaagtctgttgacactttctgaaaataaattctatactcatgtattttccactcattagattttgcaggcttattgctgatgttatttgacacttcttcaaaataacctatgccctttattcgttcaaaacagcatctttgttgtttcgctttggattgacaagcccgatgataaatagctcgagcgcaaaacgcgtgcatgtttggaaagtatcgttcataccaataattgagggtttatttttaaatgaaattttatgataaaccttattatctcagaagctatttaattgattcggatgtttttatcgcggttaattagagcaccgaaaattggtttgaatcgtgaagtttatcatttctaactcacctctcaaaattgttgataaattgcaaatatatttttccaaaagtctgtggacactttctgaaaataaattctatactcatgtattttccacttattagattttgcaggcttattgctgcatgttttttgacacttcttcaaaataacctatgccctttattcgttcaaaacagcatctttgttgtttcgctttggattgacaagcccgatgataaatagctcgagcgcaaaacgcgtgcatgtttggaaagtatcgttcataccaataattgagggtttatttttaaatgaaattttatgataaaccttattatctcagaagctatttaattgatt

SEQ ID NO: 39616 - DNA, 941 bp, Heterodera glycines
agcacagagagcgttctgttccgtcctccgtgccccccatcgaccgaccgacccccgtccgtccgtgtgtcatcactcacattcctgttaaaaatgttggcagtaagtcgatactaggaccgatacagacaacagcagcagcaacaacaacaacagagttaggcgccacggacagacggcggggccaagacggaggggacggtcgggccattcattcagtcattttatttgagaaaacatcgccgccgcctcgtcgtccccccgggggtttctccctttctgtgtcctctccgttcccccatttttgtccgcccactcgcaagtttcgcttcccctttccgccccccgccttctcccgttccatgtcagcaacagcagaagacgaagaagaagaagagcattagaaccccccccccccccctccctattataacccaccacaaagtgtggtggtgtcgcttccgctgttgctctcttatctttcctctctctccctccttcctttcccccttggattgctattactgtaagcgccacagtaagcccaaataaaatgtgaaagaaaaatgattgggtgcagaaatgcataaattgaagagaagtgaagaaaaaaagtggtcattttgtcgtgcatttccactaatttggtcaatttaaaattttaattttatgatttaattgtcggatagtcagaaaatttaattaaaaataaattaattaatcttgttcaaataaaataacaaattaattttttggcattgattttctggacctggaaaattttgggactatgtctaaaaattgtttggcattattggtttacctttcttttttttgccgattttggcaccgatgccaaatgaacaaagtagagctcggtattttgaaaaaagcctggacctggacctggattttttttcacattggacctggacctggat

SEQ ID NO: 39617 - DNA, 975 bp, Heterodera glycines
aacagatataccgaaatttttgtattttttaaaaataacttttatgcttattttatattttagttttatttaatttttccattttctgttttttttgtagagcaaaaaagatcctcatttgtatttggacgtgtccgaagtgcaatggggcaatgtgtacatttttgacttgaacaaaacggaagtgatcgctgttcggccgcgcagagttgcggatgaattgaggaagttggaagagcgggaccaaccaccggtgaagagggagcaaccaaaacgtactcatttttggaatttagtaaaaaaaatattaaaggtgggaggttaatttaccagtcaatcgaaaaattactcccaaaattaagggacaattatatatcagttaatttaataatttttgaatataattaaacaattttttaatagattttggggttatgaatttgcgcgagcattggacaaagttcaattttttaaatgaacataactttatcttgggaaaggtcctaaaatgtacataaattttgaatcaaagaaaataattatgaaattgctttaattatgaaaaattaatttttaattgaacaagctccaagcggggcaatcaaattccaaattaattatggtttaaaaatttttttttttttaaattaactatatttaaaatcagagggtcaaaaatgaacatttttaagcgcaaccgcagccacaaccacaacctcaacctgtgacttttcaaaaaattctgtccggtttggtttggccaaccactgaaaagtacaccctgctggtgtcatcgcgtgattttgatttggatggacgaggatcaccgatcaaacaacgcgccaccaatcccgacccgaccagagccgagacaaactacaagggcacattcgacgtcaaaatggcactgacggaaaggccggaaactttttacgtgtgggtttcaagtgccaaggtaagaaacggcagtgtgag

SEQ ID NO: 39618 - DNA, 451 bp, Heterodera glycines
gggggggttacaacggattaagtggccatacactactttcgaacctgttaaatactcaatacaagaaaatacatttcaaaaaattttgcaagatttaaaaatgtaaatcaaaaaaggatttattgtcataagtttttagtaaaggaaatatgcataaaaaatactaaaatatgtatgaaatatgtgcaaaaaccctcaaatattggcagctcacttttaaagactattaattattattttttaatttattccttttaactccaattttcatcactaatttttcactcagacccccgttcttaccagtgcttgattttcctggttcccgtttgccctaccgggaccgggacctgagcttttcaaaacccgggaccgagaaccgggatctggacctagcagccctaataattaatcaatcaatcaatttatacgcaaaagcgtgacaccgaca

SEQ ID NO: 39619 - DNA, 610 bp, Heterodera glycines
tgcataatgatcccctctccgtttttccttgttgaaattcgattagaggtctgttttcctcatcatcttcatctgatgcggtgtattcggcttgatcaatctgctctgcgtcctcgcgttgggtaggaaaaatgttgctgtcgtcgtaatcagcagacggctctccgaaccgctttggtgtttttcgtcgatgttgttgttcaatttgtttacggatcgatttaattgatttgctaaaattgaaaaacaaaattgaaattgatgcaatgtcaaatgcgcctacaattcgcctggtaaagcattacataaagactaaaaattaagcatccctcgaaattcttgtcaattgctttaagttccattttttaagtaatattgattgagttgacgaatcgtcacattttggctgggttgacgaatcgtcgagttgacgaatcgttgacatttggctgagttgacgaatcgtcacattttggctgggttgacgaatcgtcgagttgacgaatcattgagttgacgaatcgttgacatttggctgagttgacgaatcgtcgaattttgactgagttgacgaattgttgagttgacgaatcgttgagttgacgaatcg

SEQ ID NO: 39620 - DNA, 379 bp, Heterodera glycines
  unsure (1)..(379): unsure at all n locations
gcgcggggcagaccccccgaaccgacgcgcccagacagacggggagaccgaagcccgcgggaagagcaccccaaaagccaggaccgcaaaaccgcgagggaggcgcgcgccccacaaaagaccgagcaccccaaacggacacgagaaaaaaccgaaggccgagcgaccggggcagaccccccgaaccgaagcgcccagaacgagggggaggccgaaccccccgggaacagcgccccaagagcccgcacgccacagccgccgcggaccggggccccccagaagaggccgagcaccccaaacggacacacgaaaaaaccgagnccgcaggccccggggcaggccccccgaaccgacgcgcccagaancaaggggagaccga

SEQ ID NO: 39621 - DNA, 1492 bp, Heterodera glycines
tgtcaagatgataagcattggtacaaaggattcaacatcgtctgcctaaagaaaataccataacatcataatgcactagcatagtctttgaaaagcaaaattcaaaaaccgaattaaagcaatcatttcacttacatttccattattgaacacaaatgaaattgtattaagaagtttgtagaaaaaattgacccaaagaaatccactaaaatggaatatataagaggaaagaaaacggtaaaacacctcaggatgcaaaaacaggagttagtccgaggtgtaaatctgcaaaatccaaaagagtgcatagaatgtgcatcggttaatacaaatgtgaagagttgaacagcatcattttcgcttctaaaaaagttaatcgctcatttgatgtcacgaacaaatcaattcattacctcatactccttttcaatgggaagcaaaactgttttattgaacggagaatgttttcatcagaaaactccaaaggataaagtacctaaaaatagtataaattgataggtatttacttaggtctgtatgaaatcgaaaaaaaattatctgatgtgagataaagggaattttatggtttgggtgatagccaaacagaaccatcgggcaaaaatactaaaatgtcatccttactaaaacatgcctttgtttttgtttgttgaaattcttttgccgcttcaacttcgcaacacacatcaaaaatagtaggcgtgtccaatctagaaaaaatttaagataattaaatttgttaagtaatattttttaaacctgtgcctagaagccatcagtttgagagaagaaagaaaattaaccactcgcacattggttttttaattaggataatcagacatcaaagaatctgaagaaaaggctcgagagtccactcaatgacaatatttttatcatacaaaaaaagatagttttcaacaattttttaagattgcaaagtaaatcataaattaggtaggtaaaaatggtcattcgacgtgccatatgttttcgacagggttgatttctacattgagtgattcgccagtgtgatttcgaccggacctttaagtttttcttttttatattttccataaaaaaatattaaattaaaaaaaaatagagatcttttaaaaattgtattaaacatccacacgtatttaggtattagattttaaatgcactaaaattaacatacagtgtaaggtagaccgaatatgggacctacttggttactaactcctcacagaccactgacagaaaattcatattatttgaacagaaagcccaaaattgagtcgctgtgaggagaaatgttttcttacaaacaagcaaagctaacaatacaaatgaaatcattcatgagatttacctatgtatttattaacagtcacttattgaaaaaaatgccacttatcaatacgagagatagcaagacacaacaaaaagagaacgaggaaaatgatgggaatgcaccctattgagacctatattt

SEQ ID NO: 39622 - DNA, 1166 bp, Heterodera glycines
agttgaatgtttttgatttggcgttaaaatgccattttttaaatgtgtattccaatggaggtttttggccaagccataaatgccggaaatgtgtaattccgtcgcaaaaagctcccggaatgcggtgccgccactgacggtatccggaattccggacaatccgtcagtggataatctttcggaagacaattctatcagtgacggacaattcatcagtgaaggacaattcgtcagtagaattcgtttcatccaagtacatctcgtcgataattaaaaaaaaaatttgttgacggattgtccactgacagattgtccataaccgactgattgttttactgacagattattattctggattcccactggcgcacatccagtagcgacttttgccaaaaggcccaccgcttactgtatgccaattagctacagtatattctttttataaaaccagcaggaagaaatgtgtgaaattgctcttgcagagtcggccacccatactgtattttgcagacagctacttacagtatatgtaactgttacaaaagcccatcccaattctacagtacccttcccctgctgccgccgccgtcctccattttcgctgttgttgttggtgtcggtgttgttgtgctgtcctttttgtgccgcatgaagtcgatcattctgtcctgcacaatgtccggctcggaagcagcttcatcttcctcatttcgtgactctgtcgaaatggagcgaccgccgccgccgccagcagtgatccatcgctcttaaaaatgcaatatcccattttaaaatatttcttttatctccgaatgccgtgctgggtcgttttataaaatccaccaattttagcgaatttttcgacaaaacatggcataactttgcttaaagtcaatcaaattttagattcttggtaccattcgatagcccagctttttctctattagcttggaaaatttcaaaaaagttaccaaatttaacataagttatggcagaaatagtacttattttcatacaactttttctaaagttgaccaatttttatttttattttgcgggctaatagagaaaaagctcggctatccgatgatacccagaatatacaatttttattgcatttaagcaaagttatcccatgttttgtcgaaaaatttcgatataattgg

SEQ ID NO: 39623 - DNA, 797 bp, Heterodera glycines
cagttgtcaacgccgcgactgcatcgttattatatcagtcgatagaaattttcgaatcgcttttaaatcgtctgttttgcgtcccttgatcttcactccgagccgagttactgcggtctaaacacgttttttggtagaattgcggccagaatttaaaaatacagtttgctatggcttcgcatcacccgcttcaacgggtgctcagtgtaaatatcgactggccattcaaattctgcctttccagccttatggaaagatattatggaacttttggttccatctcagttgtcaacgccgcgactgcatcgttattatatcagtcgatagaattttcgaatcgcttttaaatcgtctcttttgcgtcccttaatcttcactctgagccgagttactgcggtctaaacacgtttttggtagaattgcggccagaatttaaaaatacagtttgctatggcttcgcatcacccgcttcaacgggtgctcagtgtaaatatcgactggccattcaaattctgcctttccagccttatggaaagatattatggaacttttggttccatctcagttgtcaacgccgcgactgcatcgttattatatcagtcgatagaattttcgaatcgcttttaaatcgtctcttttgcgtcccttaatcttcactctgagccgagttactgcggtctaaacaagtaatcggaatagtgctcgccaaattaaaaattacgggaaaaacccaagagggacccttttgatggcaaaaagaaaggtgttttgagaaaacaaaaataaaaccaaaaagg

SEQ ID NO: 39624 - DNA, 1071 bp, Heterodera glycines
ggagaaaaatggggaagaaaaagaagtaaaaaattagataaaaatgcaaattccgatcattttctcgccgcttctcgctcctgttcctcaattgcgacggaagttgctcccgctcgaccacttctttcttttccctctcttctcccggcgggggagtgccaccgggtgatcgagcgcaccccctccaaaatagtcctcctcctcccgcgacagcacccggggttttccgtcgccaacaccgaacaccaaaaagccttcccacaaattgcctctctcgtcgcatttagcgacataaattatatttcaattgagaattcaaaaaaggatcgatcatttctcaaataattcattcattcattccgctgatcactgcttggcaccgctgggctcgagaacagttttccgttgcttttatcggtttgagacaatggcctaatttaattacaatttaatttgtgaaaaggaaaatttagggttcttatcctttttgtccccccccttgaattttttttttaaaataattttttctagactaattttatacgctgaacacgaatctagcaatcgttttggccgattccgaaccctggacccgaactcgaacaaaagtcgaaattcaaatttttaaaaatttacttttatgttagaatctgtacagaataaccagtattgatgtttcaatgaattgtgactaatttatatctagtattaatcaattttcgagcaatggtgaaaaattttttaaaatttgaattttcaactttttcttcgaattcgggttcggaattaatatgaatggatgtcagattcgtgatcagcgacctcgaaaacccccagggaatggtgtcctgatttttttaatttttattatttttttcgaaaaatggaggggggacaaagtacattttttaccgacaaaattctgtagttgactagtcaaaacatttcacgtaacacacgcaaagagcataagagctaaaaataaacgttcatatatgttgtcagcgcataaaataccctagaaaaaaatattaaaaaaaaaatcaagggggggggggggaccaaaaggga

SEQ ID NO: 39625 - DNA, 939 bp, Heterodera glycines
aaaaaaagagatagccatttttctgagaatatctattcttctgagacagcaattttcaaaccgaccttttgtagggctcaaccgcagatagtaatgcgtttttggggaaaccccacatgtacaacggtgtagaaaaaaagagatagccattttctgagaatatctattcttctgagaaagcaattttcaaaccgaccttttgtagggctcaaccgcagatagtaatgcgtttttggggaaaccccacatgtacaacggtgtagaaaaaaagagatagccattttctgagaatatctattcttctgagaaagcaattttcaaaccgacattttgtagggctcaaccgcagatagtaatgcgtttttggggaaaccccacatgtacaacggtgtagaaaaaaagagatagccattttctgagaatatctattcttctgagacagcaattttcaaaccgaccttttgtagggctcaaccgcagatagtaatgcgtttttggggaaaccccacatgtacaacggtgtagaaaaaaagagatagccattttctgagaatatctattcttctgagaaagcaattttcaacccgacattttgtagggctcaaccgcagatagtaatgcgttttgggggaaacccccctggaccaacggggaaaaaaaaaaaaaatagccattttctgaaaatatctattcttctgaaaaagcaattttcaacccgaccttttgtagggttcaaccgcaaatagtaaggcgtttttggggaaaccccccttgtacaacggggtaaaaaaaaaaagatagccattttctgaaaatatctattcttctgaaaaggcaattttcaaaccgaccttttgtagggctcaaccgcaaatagtaatgggtttttggggaaaccccacatggacaacggggtaaaaaaaaagagatagccatttt

SEQ ID NO: 39626 - DNA, 1010 bp, Heterodera glycines
ttcgtccgaagggagttcgctcccctttttttccttctcctcacctttgaagcacacaagattaaaagcacaatttattaagtagctcaaacttgggcaattaaacccgaacaaaaatgggggggtgacagtgacagacggcagggggtaaatgaatgccgcgatttgtggtgggggaaattgaaatttggggagacaactccccagtggtgattagtggaaaacaaatgttgaaaatgagatagaattatgcatagatgaaaaatgaggacggaagagagcagggggaggagccccctaacaaattggcgaaagaaatgaaaataaaaatggccaagttacgcaatgacaaagagagggggaggagaccggaggaaacgcccccgaataaatgttgtcgaattacaattcaaagaaaagacagcgaaagagtcggccaaaggccgatcggataaacaaaatggtaattcagaagaaatggggaggggatgaatgaatgaatggaatgaaaaaatgtgcaaaattgggataaaagaaatgttttcggataaatgacggccaaaggccagcgaaaaatgggggattggcagattgggaaaatggcgaagaaatgcataaacaatttgcaaatcggagaagtgagacgattggatacggtaggcgaagaaaagagagagagagagaaaataagaaatgtgaataaaataagaaatggcaaaataaagaaggaggaaattgtgagggcactgtcggatgaatcaaaatggactgtcgggattggctctcccggtgaagtgtgggatccgtccggctcatcggcgccatttctttcgttttgcgtcctccggtgcgcgccgcggcggcgctgcggggtgatcaaggacgccgcctccccattgattttcctcctcttcgaccaattccaccggcgtaccgtcctggttgaactccaggaagtcgacctccccccaactgcgccaaggaattctcccgctttcttcctccacctt

SEQ ID NO: 39627 - DNA, 1528 bp, Heterodera glycines
cagccaaccatcagtgatttgcgatatcagcagcccttttgggctttagtccctgctgaagacaaacaggaatacttccttgaagtgaaattatcattttggaaagtaaatttgttttttctctcttttttcagattatcaaagagggcactgtcattggcactgtccgtctccacaacagcgcccatcaaaaatcattttggtccattggccgttttgagccgtgtgacatcaaattggagcatccgtccgtttctcgtttccacgccattttacaatacggagaatgtataaaggggagaccgggatggtaaaagatggaggataaaaggggttttaccaatcaaatgttttctctttccaggttcatcttcgacatgaacagcacccacggggtgaggctgaacaagcagccgctcaaaaaacgcacttacgtcccattgcacaacggatttgtgttccaaatagcgggtcggaattaaatattttaaattgaatgaacaacttttggcaatgtttttcaggcagttcacgtcttttcactgtttgcggtggtcccaaaagagaacagaaagaagaagaaaacaaagaaaaggcacaaccaatgggaaaaacggagaacaaaaaggacgcagaagaggaaggagaggacgaagaagaacaacagctccgatactacgagaaggacccgttgggatggctgcaaaagtgggcaaattcaacattttttaaaatttaaattgttgacggagaaaacgaactttcagatactttgagcgcgaaggacttcccatgcactttcaggtggattttgaattttaatttaaaaaattcataaaaaatggatcccgatattttgtccggtatttttcagtttacaaaatcgtcgtccgatggaggcggcggtggcgctggggatttactggcagaatttgaggacgaacagaacaaaaagaggggacgacggcattccgacgagggccattggacctgttcaattgagtgagtgccgaaaaggcgccttttccttttctgtttccgtttttaggttggttagcgatgtttctctgaccagtggcaatgtggtcactgtgtcggccccttccaaacgattggcccaattgcaatgttcgctggtcgcatgcgaacggctgaacgacgcgtgtcttttgcgcatttcgtccctttggaacaaacgcaaaaattacacggagaatgacttttacgacagcgacgaggacacttttttggaccgaactggacaaattgaggagcaacgggaaaagcgccggaagcgatttggggtagtcaatttgaccactgattaaaattgatttgctttccttgccctcacccccgcgccattttccacacaattcctccaccgatcccttttcctctaacaatttttgtttaaaaatcaaagctttacatttactttttagacgggtatttttgcctcttccgctggccatgcaaaaaattatgcagagttgataaaagaattggcagaaactgaggccaaatt

SEQ ID NO: 39628 - DNA, 1254 bp, Heterodera glycines
gaattaaataatatattttcttgtaagatttaaggaataatggcaaattgaaagccaagaaagctttaaactgtggcagctttgaaaggacaattgattgataaatggtaataaaatataattaactgactaattgattaaactcaaaattggtcggcttttccacttactttcccaattcttcgtccaattttccgtaagcattcgtcacttctttcacttcgtcctttcttcttcttctgctgttttcttcccgctcttttctcttcctccgattgttgtctttccattctttccaatttcgccttattttgttccgctttcactctaagcaaataaataattgtgtaaatttgaattttttgttcattttctcgctgatttatttccgttttggccaaaaaatagtccaaaaagtgaatgtccaacagaatgtgctgcattccgccgctctgattgtgaaaattgaagcgaaactaattgtaccaccgattaagcgctgaacaaacaaaaaaaggcattgctaattacatcattaatattaagcattatattattattataatccccataattaaacatatattattagataattaataatcatttgccagttttttaattacttgttttaattttgcatgctttttatcagtttttctccgggaaacgctgacgaaaatggggaaaaggcaaataaaataaggaaaaatagacaatgatacattttcaattatagattgacattaaatgacgaaaggatgatcttaatattcgattaaaataaatagagaaatgtttaattaataattaattaattattttatttaaaataaaaataaaagtaaaaaatagtaatatttattatattaaaaaatataatataaattatgtaagtctaattttgaatggattgggcataaatatcgatcttttcaatttgtatcatttcatttcctttgctttgttttgtttcaattttgtgttcatcgattgcttttccttctcattggcaaaatattaaagcattgggcgtattaaggcttaaatgtgctttttccttcttcagatttggcattgattgggggaattccctttgaaattcattcccaattacataatttaaatttctgttaaaaattgagctacgcaaatgttttttattctttataccccaatttttcatcagttttttattgtgtaatttcgaaattgcacattttctgctcgaactgatcacttttccatgccaat

SEQ ID NO: 39629 - DNA, 1241 bp, Heterodera glycines
gtacatactaaataaagtacatttttgaccattgaaagtagtgctttatattgccattcttcaaattaaacttttgctaaaattccatggacgaatcggcgaaaaagacgctaaaacaaattccactgctgaaaacaaatgcagggccacggtaaataaacaaaaagtttacgcattttaaagtccaaaatgagttaggaaagtgacacatgacaaaattcatacagagaccttgccaaaacacttgtttttttttaaattttgggtaggagacagggacgatcatttattgttgttaacccaaatatcggcagatatttaaaaaataataattttttgcttattgccagagacggacccctttggcttgaacggttgaaggaggagtacaacagtttgatcgcgttcattgagcacaacaagcagggcgatgccgactggtttcgacttgagtcgagcgcggatggcactcgatggtcggtgaatttggcatgtaaattggtgatgattgttaactttgttttctcccccccccccctttcttacaaaaatgtttcattttttcatgaaatccttgggtttccgggatcgctgagctcgaaaacgacattgattttgtcggacggatttttcgaatttaattttggtgtgaaagcggtttatataatgctgaaagcatttttcgaagtttagtcatttcagcgatgggctggaattcggaattgttgcacgtaattaaattaatgcggtgttttttttaaatttttggtgccattaaatacgcctgccgtttaacgaacccttgtttttaagtaattgcttggatctcgattgttaaaatgggaaaatggcttttgttggttttatatggcatggaaaacattcaatttttgtttaggttcggcaaatgttggacctaccacaacaaaatcaaatacgaattcgatgtggagttcgacgtgccgattacatacccaaaaactgctccagaaattggtgggtaaatggaaatagaatttaattacttacttctcttctggattttcatattttcagcccttcccgaattggacggaaaaacggcgaaaatgtacaggggaggcaaaatttgtttaagtgcgtttttcattaaaaaaataccgaaaattctattttttctcctcgttttttaggtgatcacttcaagccattgtgggcgaggatggccaatttctctttttttaaacttagaaaaatttaaa

SEQ ID NO: 39630 - DNA, 1167 bp, Heterodera glycines
tttttgcacccaaataaatttattcaaaatttggtttattttaggcgtttgccattcagtttttgacgacgatgaagaggatgttgctcgtcgttttacagatggtgctggttcgtctaccacttcatgcggtaataaaaattcaaaacattgtaaaggataatatctaaattttttttttttttgcaaataataggccccttttcctttgaattttttttcggcggggcgtgcaattatttatgggcctgcaaataaacagcaaaaaacaaaaatttttcccacaggcaatcgctgtgaaaatggcaaaatgccgttgctgatggagtgcccgtcaccgccttcctcctgcccaatggacgcgtccgttttaaatgaccatgattttgatgtacaccacaatcgccgctgtcgctccatcactctgtccccgccggcgtcatcaaattgttgccatcgccaaagcaacgggggcaccaataaaaatattgatattgggtgagtgggtgaataataattgtaattactaataaaagaattttcggtgcggtaaaaattccattggaaaaattgagaattctcaaaaaaaaaaaaattttttttttttggaaaattaagaagacattactttttttgtaatttttaaactttgcatttaaaattgagacaaaatttgtttgatttcaatcgaaaaatgtggagttttaaaagaaagtctccattaaaaaaaaattttttttaatataatttttaaaacgtataatcactaaaatatgtattattttttagaattcttgacgacaacaacgatgaccaactgttgttcataccaaggacagcagcagcagatggaaatcaacgtcaaagccatcgccttttgctttcgtccaccaccaccagtcagtcgtcctccgtgtccgtctccacctcgttgatcaaccaaaacggcaccaaccgacagcatcagctgcagcacaaccaacaacagggggtgtgttttacaatttggagttcggcacgaccgatttttggggtgcactatggccaagccctgcatccgtactttcaccccttccaaaaaaagtttttttattttaaatttttcatgaaaacccatttttttgaacaatttttcgatcgtaaaattgggttttctttgattctaaa

SEQ ID NO: 39631 - DNA, 939 bp, Heterodera glycines
tagtaacttaccgataaattcaaatttgtcatacattgaacctttactgatttttctacctggctgactcagcgagagatctgttgagggatcttgaaacattccgtcacaaaaattgatgcacaacgccaaaataatgacaatgagcagccgcaaaggtaggaagaaacgcattttgttgaattttagtcaactttaaaagatggggaaaaataattggtctttttatatctaatcttttttttacaattcattgggagcagaattaagtaaaaattgttgaaaaatttggtaagactgtcgatggtgaacactcttaagcaaaaaaaaataattttcaattttttgagctaaaacagttaaggttttggggtcagaggattcgacactgattgacatcatttacacccttttggactattattttataaaatgatggattctgcttatctcatgccccctatttatgcggcccatcagtcattatctgacaaattgatgtggatttgtctgccccaattgtgcgcgaatttctttgtgattgtatccacgccaataatatgcactttcacgaaaacctgaaatagacttttataaacacgctattgcccttaacatttattactttacgtttattgattaatttaatatttttaaattttttagtgtcagttaatcaaaaaaataactttaaaaaatgggcaaattcaaaatataattttaacgtttcctaaaaattaccggataacctttttgtgcagttggtccgaaaaattcatagtaattttggaataattgccgattttacgaaattccattgtacgaactgccattggagggggttgagaaaaaatgatttttttgaaaatttagagaaaaagaaaaatttttaaacgaaataataatttgatgttcttttaaacaggaaccgctcagttg

SEQ ID NO: 39632 - DNA, 580 bp, Heterodera glycines
  unsure (1)..(580): unsure at all n locations
gaaaaaatcaagnagntgatgaaaaatcatagataaattcaatgattttcaaaatctgagttcagattcgtgatcagcgcatttttaagcttagaaaaaatagctgcgaaatttttaacattttttttcatcgggacacacattcttgaccattgccctacccccccccccccccccggattatccccccttaaaattttataaaaaatcgaaagttttttagttttaaacttagaggttttccttagtaaaaaacataaagtcgctatattttaggcccaggccgagtatttggaggcggtggcgaacaacgaccacctgaaaatcagagagttgcaaattcgctatagcactcagcgggctactgaccgccgcacttcgccttcgcaaaggccgcgtagtccaaccgccgtcgggggagcgggcgcattcgatccggaaacaccggggccagcagagagggcggggggcgaagacggcaaaatgggaggagtgaaagtgggggaaagggggggggaagaatggcgtgggaaaatggcactttttaaggaaagaaagggagaagagagagaaggggacg

SEQ ID NO: 39633 - DNA, 1431 bp, Heterodera glycines
  unsure (1)..(1431): unsure at all n locations
ttaaataggcatattaaaagagcctattttttgcctttcacaagagatttataaaaaaggcaaaatcgccttaattaataaggtgaaagtttgaaaatgtttattaaanaatttaaggatgaaatataattaaaataaatcaaaagaaaaaaaantcaatttatttttctaaataaataaaaaacattgtcagaggcagtgcctgccgaaaaaaagacaaaaaaattttcgaaaaaaagctaaaaaaattgaaaatttaaataaatttacaagtgaaaaaaggaaaaaagcttacaacaccttcgattcccaggacgtctccgttccaagtactaagaaggcccaactttgcttaacttgccagatcggacgggatggcgtgctttcaacgtggtatggtcgtaagcgaaaggaaagcaattaaagtaatttaaataggcatatttaaaagagcctatttttttgccttttcacaagagaatttattaaaaaaggcaaaattcgccttaaattaataaggtgaaagtttgaaaatgtttattaaaaaatttaaggatgaaatataattaaaataaatcaaaaagaaaaaaaataaatttatttttctaaataaataaaaaacattgcaaaaaatttttcgaaaaaaagctaaaaaaattgaaaatttaaataaatttaaaagaaaaaagcttacaacaccttcgattcccaggacgtctccgttccaagtactaagatggcccaacgttgcttaacttgccagatcggacgggatggcgtgctttcaacgtggtatggtcgtaagcgaaaggaaagcaattaaagtaatttaaataggcttatttaaaagagcctatttttttgccttttcacaagagaatttattaaaaaaggcaaaattcgccttaaattaataaggtgaaagtttgaaaatgtttattaaaaaatttaaggatgaaatataattaaaataaatcaacaagaaaaaaaaatttatttttctaaataaataaaaaacattgtcagaggcagtgcctgccgaaaaaaagacaaaaaaattttcgaaaaaaagctaaaaaaattgaaaatttaaataaatttacaagtgaaaaaggaaaaaagcttacaacaccttcgattcccaggacgtctccgttccaagtactaagaaggcccaacgttgcttaacttgccagacggacgggatggcgtgctttcaacgtggtatggtcgtaagcaaaggaaagcaatgaaagtaatttanataggcatatttaaaagagcctatttttttgccttttcacagagaattnattaaaaaagcaaaattcgcctttaattataaaggtgaaagtttgaaaatgtttattaanaaaatttaaggatgaaatataatttaaataaatcaaaaagaaaaaaaaatttattttt

SEQ ID NO: 39634 - DNA, 1094 bp, Heterodera glycines
  unsure (1)..(1094): unsure at all n locations
tttttatatttgtcctatttntgggtttgttaattgtccttctaggattttaaatggttttgctaattccatttgttctctttttcctcccatctttccttttcattccgtgccaatgccaataattcctctcgtccctttcacttacgtaagctaagcccttctctcttctcgccggcccattatttgcggatgcaaatccattaaacagtcattcttcactaatctttcgttcatcacctcaaattaaattgacgcggttggcggagagtgccaaaaaaaagggagggcaaaatgcggggaaggaaaagcaaacatgcgaatttacttattgtttttggtgctgcttaattgctttttgatgttattcttttaattatgcttattgagttcgtatgttcgcttatttacattttccgtcccctttctttcctttcctttccccccgggggtcattctctcccttcgcttgtaaaagtgccaatttcccttttctcctttcgtcctcgtccttttttggtcaattacccattcgtgtgcccatttggccttactttgcttctcatttgaatgcgtccaatcgctgtaattccttttcctccttttctcttctcttttctcttccctttttccccttttttctcttttcttccctttttttccttttttcctttccctccgccggttttcctctgatgatttattgcaatttgttattattgttattattattattattattatttcttgttatttttctgatgggttttttcaaggaaatcaaaaaatttaaaaataatttccctttttataaaataaaaaataattccttttttttgcccttaaaatgtttaaattcgtccgtcgctcattcaaatgaatgaatggccaacttttccttctccatttattcgccgcccattgtcagttgcaccggcaaaaaggtcactttttttgtgtctgtcctccgaaagccccgggcattaattaattaattatataataattaattaattaaaatttttcctaggcactcaccgattcggcccttcgcccgtccactccttctgatcgcttatttggctctgtttttt

SEQ ID NO: 39635 - DNA, 1059 bp, Heterodera glycines
tactgttgagcagaaaaagagatagccaattttccaaatttttcccaaacaaacgcgcagagaaacaaatcccagaacaattagtatcggcgtaattattctgagaatgcggttggaattcctattactgttgagcagaaaaagagataatagccaattttccaaatttttcccaaacaaacgcgccgagaaacaaattccagaacaattagtatcggcgtaattattctgagaatgcggttggaattcctattactgttgagcagaaaaagagatagccaattttccaaatttttcccaaacaaacgcgccgagaaacaaattccagaacaattagtatcggcgtaattattctgagaatgcggttggaattcctattactgttgagcagaaaaagagatagccaattttccaaatttttcccaaacaaacgcgccgagaaacaaattccagaacaattagtatcggcgtaattattctgagaatgcggttggaattcctattactgttgagcagaaaaagagatagccaattttccaaatttttcccaaacaaacgcgccgagaaacaaattccagaacaattagtatcggcgtaattattctgagaatgcagttggaattcctattactgttgagcagaaaaagagatagccaattttccaaatttttcccaaacaaacgcgcagagaaacaaattccagaacaattagtatcggcgtaattattctgagaatgcggttggaattcctattaatgttgagcagaaaaagagatagccaattttccaaatttttcccaaacaaacgcgcagagaaacaaattccagaacaattagtatcggcgtaattattctgagaatgcagttggaattcctattactgttgagcagaaaaagagatagccaattttccaaatttttcccaaacaaacgcgccgagaaacaaattccagaacaattagtatcggcgtaattattctgagaatgcagttggaattcctatttactgtgagcagaaaagagatagccaattttccaatttttccccaacaaacgcgc

SEQ ID NO: 39636 - DNA, 724 bp, Heterodera glycines
aaacagaaagagaagtaagagaactaaaaaagctgaaatttacataaaaacattggcacaacgtttaattgttcatttaagaaagtgctcgatgagttcaaaaatgattaaaaattatttaaatgtaaaataaaaaatacattttttaaacgaaaaaacagaaaaaaataaaacaaatttgaaatatcattcaaaaaaaatttcattttgaaaaggcattagagaattaaaaattcctattttttaaaatttgttaatggcacaaatttttttagttatttttttacttttggcacttaaagcccatttgttttggcattttaactactcataacgacagaaaggtagtaatgacgtgatgattaatgaatggcaccggcataacccattaatttaaatgggagaagggtgcgaaaaaaaggcaattgtacttagaaattgaattattgccagccgccggtcatatagctgccgaatggctctaaaaagcgtgccgccttatcgtcggcacaaaatgccaccatcccccagttaatgatgatgatgatagcccactgttagaggtgcggcatttagctgctgcaatagacaagttttttgtgtgttggttttgacacagtcagctcagcgggcggctgtcaattggcatggccaatgaatgccaacgctcgccggccgctctatcaaatgggcggacagatgggagggagcgcgggtggcagaa

SEQ ID NO: 39637 - DNA, 911 bp, Heterodera glycines
ccccccccgcccttcaaaattttgaaaaaaaaataaaataataggagactcagaattttgaaaattttttataaaaactgatgacaagctaatgtgataaaacaggttaattcttttcctttcagtatccctgcaaagtttgaggcgcttctgataagtttctgaaaaaaaagttaagcctaaaatttggcctgtttaaaaaggaattaaaaatttttaaaaatttatctcatctcccatttttgatagaaaaagcatcagagtgcctaaactagcatgtaaataaaatttggtgcgtttcagagcattttctgaaaaaaatatttatgaattaattatgcaaaaataaataaaaatttctaaaaatttgatcgtccataaataatttgtaattgatcaggggctcaccaaattttgcagggatacgtatcggaacactacaaatgcttactaattttcctagattttttaaacccggtgaaaattttttgcagacaccaccacttttgcacttaaaaaaatttcaaaaaactttaaaaattcatagaaaatttaaattcataggtactactgctaaatcaacgcagagacgccgttccttgacctttttaggcccctgcaaaatcaggtgcgcttctgatcactactcgaaaaatgagtgattgaattttcattaaaagttaagcctaaactttttggcctgtttaaaaaggaattaataatttttaaaaatttattcatctccctttttgatagaaaaagcatcagagtgcctaaactaacatgtaaataaaatttggtgcgtttcagaaccctttctgaaaaaaatatttatgaattaattatgcaaaaaacaaataaataatgaactctcttccttaataattttcctgcaccgaaggtactcactc

SEQ ID NO: 39638 - DNA, 673 bp, Heterodera glycines
ctctctctttgtctttcgtccgatggcaccgattaatcgcatcggaccaaacgccggcgggaaacgaacggatcatttgcccatccatttgacacacaaattgagcggtaggtaatgaatgagacgggggggggggggacggacgggggacaaaggccaaagatcggtcggtgcaaaacgcaccgctgcaacggatcggggtcatccgttcactcactcactcactcagtcatccattcgttcgttcatttattcatttgctcatttgctgctgatcggctgatcagcgccggagggttcggtagatgagcaaaatgggcgggggggggacaaattcccaccgaaagaggcgcccccgcgggggacggacgaacgaccgaccatttgttatttccctttgtcatttgccgcattattaacccgctaatgagtgcaataaaatgactttgcaaatcacccaaacttttccggtttaattttatccacaaaaatttttttccttgcaaaaaatacttaaaattacgtcactgaaaaaagggatgtaaagctgcgctttaaaaaagctgcacttccgtttgatcgaaaaattacatattttaataattgtcaaacattggcaccgcccccgaggggataaaccgccaaaagcccgcaaaatgcaaagacacggcta

SEQ ID NO: 39639 - DNA, 949 bp, Heterodera glycines
  unsure (1)..(949): unsure at all n locations
gaaaagatataaaatctgaattccgaatacaaattcttcctgggtaccccagaaaaatgaatattttgaaaaaacacccaactttttgttcgaattcggatcaagggtccagaatttgttaaatccgagttcagatttggattcagaaccctcgcaaaacccttgaaaactgtttttgaagcataaaaaaatagggactgcaattcattaaaattgcaacaaaaacgtaatgaaaaagcaccaaccgttggccgcgtctcttatgggtgcaagggaactgttgacaacgcccaacttttcctgaacagagcgcgactttgctggaccattatttgggcaataaaaagaaatgatataccgaaacgaagtccctcaattggagcgcaaccaagcggaaattgccgaaaacttcctcaccaaaagtggccggcctgccaatggtgtcgacgggccgtgcagcacgtgcggccgggacggactcggccttgtaaatgggcaactgaaagtgaagcgaaggcactaattgatgggacagattatcgttaattgactcgagaacaaatgaatttttacaattttaataacgtttagtccgatgaacttacgtcttggatggcgacaagttttggcggtggcggcgattcggaggcactgctgcccatttttttgtttgtttgctgaaagtgtcaatggcaaaacaacacgcaatgatgcctctccttcacaaacatttatacatcgtttaaattgcattttgcaacaatctgtgatcgaaagcgcatttggtacgatgcaacccgtttttatccattcaaaaacaaaaatagagagattcaaaaatggtcgaataaataagaggttcaaaaatagtggtaaaaaaacaaacaacggacaanatttgcgctccgttcatcgtttcccctcgtgggacgcactccgtttgctcatc

SEQ ID NO: 39640 - DNA, 712 bp, Heterodera glycines
tttttaaaatttattcatctccctttttgatagaaacacttcagagtgcctaaactagcatgtaaataaaatttggtgcgtttcagagcattttctgaaaaaaatatttatgaattaattatgcaaaaaacaaataaaaatttctaaaaatttgatcgtccataaataatttgtaattgatcaggggctcaccaaattttgcagggatacgtatcggaacactacaaatgcttactaattttcctagattttttaaacccggtgaaaattttttgcagacaccaccacttttgcacttaaaaaaatttcaaaaaactttaaaaattcatagaaaatttaaattcataggtactactgctaaatcaacgcagagacgcctttccttgacctttttaggcccctgcaaaatctggtgcgcttctgatcactactcgaaaaatgagtgattgaattttcactaaaaagttaagcctaaactttttggcctgtttaaaaaggaattaaaaatttttaaaaatttattcatctccctttttgatagaaaaagcatcagagtgcctaaactaacatgtaaataaaatttggtgcgtttcagaaccctttctgaaaaaaatatttatgaattaattatgcaaaaaacaaataaataatgaactctcttccttaataattttcctgcaccgaaggtactcactcggccgcttcgcggcct

SEQ ID NO: 39641 - DNA, 962 bp, Heterodera glycines
atcgctattctcttctccatccgtctcatcgctattttctttctcataatccaactcatcactactctcttcgttctccgtctaccatctttgttcatcactgtcttcgtcagcagtttgtagacacaatggaggcttcccaataactctgtaaaattgaaaccaattgaacaataattatggcaatttctttatggtggtttaatgggccggcagctaaagcctaaatttcacattaatgaaccaaaaatagtgttaaacagaaggcttttatcaatttcaatttagctttttgaatgcaatatttacatttttggaaattttgccctaatttttaaatctagaaattatgatgcttcagtggatcagtcagtattcaccgccggcgaaaatatttgcaatttggtttggttttcaaaatggactgagaaagagacagtgagaaggaagagagaaattagaccaaagaaaaaacaagtagggaggaacaaaaatgaagttaattcgaaaaataacaaatctaggaacaagcactaataatcacggggagctaaaatagcaaaatattcgaaatagtgtatatttaagtttaaacttccagatccccaaagtaaataaatgcgatatcttatttaaatggaaaagcaattttgatgcatttacgagtacaaaatatgagtaaatctcacaatatcccagaatctttaactaaataaaaagtaagttacgtctactcatggcaaattttttcagaaatgaacttacttgtacacttcttgaatagtcatattgcgtttggtgaatagggttattgcaagctgaaatttatgtaaaaaaattattataaatattcagcactatttcggttattttatgtttacgaatagatgataggtatatgttataataaacatatgtgatatttttgttattcttaaaactacgtcagcatttttagaaaa

SEQ ID NO: 39642 - DNA, 1573 bp, Heterodera glycines
  unsure (1)..(1573): unsure at all n locations
gtgcgctctacagtatgtataaattactgtcaaaattcaatggtagccccaaaaagcaatttgaatatatatttaaaaanatatttttaccaattttaaattttttggtcgatcaggaatttaatgaaatgggggaccgcccatttacttggcccaatatttgacacttggattaatcttaaaccaacccaagacaaattctttgcccattttcttggccctcatttggtcttggtttaattttaaacattcgtccaaaatttgacacttacattaattaagcaaaagtgaaaccattagatgggattgacaaccgacaaattttatttttacattcttaaattttttaaaaattttattaagccggtcaaagacatgggcagcaccaagttgggaacaatgaacggcacaaatattatgagaagcgcaccgaatgccaacagcacaaccagcagcaacaattcacttacaaaacgttcatgctgctgttgtccgtgctgttgctgctgtacgtttattgtgaatttgtgaaaaggaaattatcatttaaatttaaaaagaattttttatttaatgcaatttattttttttaaattatttcttaaaatgttttttcatttttttaaaataattctattaaaattgaaagaaaatttatttatttctttcaactttttcttttttttattattttttttagctaattttggaattttttttcctcgctaatcttttttttatttaaattttttcaatattttacaaaaaaaaaagtatttaggtaagccatgttgctgttgtggttgtgggtgtggctgctgcggttgttgttgtatgattttttcgcaaaaaattttattaaattaaattaattttttttcatccaaaataggcaacaaatgctgctgctgtccatgttgtggtgggggttgttgcggaggtcaattcaataaaaaaaaatttcgaaatttttttttaaatagcctaagaatatttataggcccacctgtctcgccctccctcggaaatttaaaaaaattcaaatgaagaaatgaaacacttttctagtgttttttttttcaaaactttatggtgaattactatttttttcaaattttttcaaaaatcgctagaaattttttcaaaatttttttcttgaaattttcttataaacaattttctacgattttttttaaagtttttaaaaaaaaaatttgggaggcgggagaatgtaatgcatccttttcaccactctgaattaggaatatatattttgaatttgaataaaatttaaaaattatagaaaaacattttaatccttcccggcttttcattttcagagggttgccccaatattaaatgggctccttgctgtgagtttcgcaatttttgatgccaaaccaacaatttttattttatttttgaatttattaaataatcaaatgtgaaggggtgccacagcaagaagagaatagtgccatattcagccatattcagaaaaatttctaaattattcgaattgacctccgtttttcataaaaaatcaaaaaaaaatttccaattttgctctaga

SEQ ID NO: 39643 - DNA, 1183 bp, Heterodera glycines
  unsure (1)..(1183): unsure at all n locations
ctctagagtctttttgatagaaaaagcatcagagtgcctaaactaacccttcaggggatnnggngcgnnncagaacccnnncggaaaaacttttcaagaaccaaccccgcaaaaaacaaanaaaaacgaaagacncagaanggcgaaaannnnnnggagccagcnagcncggcgcncannncagggnaagnaagnncccnaccggggagnancccngcaaagnngggnacgcnncggcncaangagcaaaaaanangagggancgaannnncacnaaaaaagnnaagccgacannggngggcanagnnaaaaagcanagaaaaaaganncaaaaggaaaaaangnccccgcaccgaagggacncacncggccncnncgcggcggagagagagagagagagagagagaaagagagagaaagagagagagagagagaaagagagagaatgagagagagagagagaaagagagagaaagagagagagagagaaagagagagagagagagagagagagagaaagagagagagagagagaaagagagagagaggggagagagaggcacatgccgaattcggacaaatgccccccccccctctttttagggtcaattttaattgtttataccgcgaattaaatgaaaagtcctttaaaattgcatcatctcctccattaacatgcgattttttttttaaatttattattcttcaattttttctgatcggaaaaattccgagaatgatttttcctgcactgcacagtttgtcaaaaatcgcatttgcaaaaccctaatttagaaaaaggcccaaatagaccaaccaacttaatttttacatttaaaaaggaatacaattggcacataaagtataaactatattttattgttgtctattcggttataaattctgcgtgaaaataccagtaacaaaacttacaaaatttgatcaaaaatgaaaatgtgtttgttcaccgtcgttttggtttctgtgtgttccactccaaaactggcaattccgttaaaatcagttcggattttgggattaaaccaaatggaggggaacgaaatgaagtaaaaatgccaatgattcaacatggnaaatggggttcagttcactcatcagtcagttcaagtcaaagggacggctgcagcaccaaactctgcccgtagcgaagtttgtcgccggc

SEQ ID NO: 39644 - DNA, 831 bp, Heterodera glycines
tttaaaaatggaattgaaattattcctgttttttaaaatataaaaaaatttatgattaaaaaagagagggacaaatctgctacgaaaccctacaattgtacaagaaaattaaaaattttcattttttacaaaatcaatattttaaactaatttatgcaataattacaaataatttcatattaatttaataatttaaaagttttgtgagaagcgacggacaaggcaattacaataaaactttaattatttttatcctgccaaattattattggaaataataattgaataaccttcaaataaaagtctaattcaaaaacgaaaaaataaaaacaaacaatgttgaaatgaaaacaatatagaaaaagaattaggtaaattgaaaatatttgacaaattgaaaaattaaaaatttgcattaaatttatagaataaaaaccagtgatatgattgaaactatttaaagataataaatattcgcaaacgttaaaattaaaaatttgtttaaaaaagtttttaatacaattaaaaaattattgtaaagggaaaatcatttagcagtaaataagctaatttgaataaagcaattgtcctattaaattagaaacttaaatttattaaataacagctcattaaattttatcaaaacaataaatctctttttaaaataaattaaaaaaaactgtgcaatagaatatatatcattaaaaacacatcaccaagaagaattattaaatttaatgataaaattagctgtgctttacaattttgaggtgcaattcttttacgataagattttttattaaatataaataaaaaaataatgcatttaaa

SEQ ID NO: 39645 - DNA, 814 bp, Heterodera glycines
ccccccccgtaaaaaactgttcaatttcaaaaattttccttccacccacccctccccccacctcttttacaccggccactctcactgcgaaggggtggtctcccattcattttggtgccctttgcgagcgaaagcggagccccgacatttgcggcccgacttttacagtcccgacatttgcggcccgacttttacagtcccgacatttgcggcccgacttttacagtcccgacatttgcgcctatgtccaaaattggattaaaagttgaattttttcaagccctgatagcctaacagcattaaaattaagaaaacacggtcttctaatttattaggaacataattctttattctttttttaatttactgacgatcaaatgaccggatacattcaccttcaatcagggacggtcccaggattttggcttgggggggggcacctccccccgtgcgacgaccttttttttttttttgcttttcacacccgttttttatgtggcgcggttttttcagggggtccggtggggtggatatctcatttacgccatacaattcgttgcctgcattgatcattcttctccaatccttcccaacccccgccacattccatccaaagaacttatgccgtggataaataaccaaaatgtttttctttttctttttttgctctttttaattttggaaacgcatgaggcggatggcgtcgcaaatggctccgtgcagagagtgtgagttgttggaatatttatttgctcagagatcactcttcccctttggggcttcccccttgtctctttttggccactcctactct

SEQ ID NO: 39646 - DNA, 670 bp, Heterodera glycines
ccacctcttaatcactttttgtcttttccttttctcctctcttaccttcggcttttgccccgtcgtccgtcccaatctctcccctcaaatcagaggtgagaatttcggcacaaattggaagaagaacaaaggaaaggagaaaaagggaaaagagaaaagcaaattgggggaaaaacggagaaaccatcgcccgagggaatttggggaattcgaaaattgaaacagaaaaatgggagggaattcgatcggaaatgggagaaacgaagtgacggacgatgggacgaaggaaagtgtgaaataaacaaaaggacaacagacacatttggaggaggaaaaagcggacaaaaggcaaaatgagcaacagaacagcccatggagagagagagagagagagagagaaagagagagaaagagagagagagagagaaagagagagaatgagagagagagagagaaagagagagaaagagagagagagagaaagagagagagagagagagagagagagaaagagagagagagagagaaagagagagagaggggagagagaggcacatgccgaattcggacaaatgccccccccccctctttttagggtcaattttaattgtttataccgcgaattaaataaaaagtcctttaaaattgcatcatctcctccattaacatg

SEQ ID NO: 39647 - DNA, 1601 bp, Heterodera glycines
tcaacctgttggttgatagtctcgacttggttctctatgagtgagcggaataatgcgaattagcgatcggaggaggctggaaactgaaatcgctgacgggccgacaatgttgcgaggaccgaaattggccaagtgaggaggacaccggtcggaatgacttggctaaaaggagatggaaaggtgaaaaaaggaatagcaacagacagtcctttggatgacaaatccaaatctaacaaaaagcgtaccgttcacattccatcctcccaaaattggacagtgctcgtacgaattcagttgttgttgttgttggtggtgcagttgttgtgcaacaaaatgaggcgattggcgttgcgaatttgtaccagaatgggtggaatcgtctgtatcttaagagagaccaaattggaattagaaaaacgcagttgtggttagcgttcactaaatttcgtaaacaaaaaaatgaaaaatccatcaaaattagtggtaggctatgcaataagttctgacttctcacattcccttcacacctgatccggcactgctgtgcgcctgactgccgagactcgacggttgctcgtctggtgaaatggacgtttggttctttggtggaagtcgccattgactcaatttgcttccttcctgctaaaggcagagttattttcggcaattttattaattgttttaccagcaatggcttttgactgttcaaatagtgagtcgtctgcggtgccataatgtccaatgttcccatcatttttaaatcttgaaattataaacaaaaataagaacatacatatttgaatgtaaattacaaaacaatgaattgtcgagatcgactgaaaagtgcttaatttttttaatttccaaatacatatttaatttttatttcttacgtacaaaattttctaaaattttcttagcacgttgagtaaaatattaatagtccaagaaagggcgtttacatattaatttcgtgaagaagagaaatagggaaggaaaaggatggagaaaatgggagtctcatgaattgaagtgagaaaaggaaaagcagcagaaaggggagggaaaagtccaactgacgggggagggcagcaggacacacccatcagactcagtaattgtagggacagcaaagatcgataggcttttgctggttggaagaatggggggggggaaggaatcccgaatacatatttctatggattcatttgctttaaatatattttattcattaaataagaaattttcaaaatattttttgaaaattaatgagaaaatgatggtttttgtcttgtcatcaaacggcgcgtaaaaggcctaattagtatcataaaaaatattatttattggtttgatggaagcaggcgaaaatataaagttaaagggaagaaacattggagaggaagtgacttttttattaccaaacggagtttctgtactgttcatatatcatccacacacgcatatggattatttgtcgatttgtgttggtaagaggggaacctccaaccaaaaagtgctttctttttactgctcctgctgctgttgctgctctgattgaatcggaatggagttttaatgatggacggacggacgaatag

SEQ ID NO: 39648 - DNA, 903 bp, Heterodera glycines
cctggattttcctggatttttgtacaggaaatccaggtccaagtcaaatgtgaaaaaaaatccaggtccaagtccaggcaaaacaggaaaaaacctggattttcctggacgaaattttagaatttattttttcaagtgaccaatgttttttcaagttttcaaaaacagattaaataaatttaaaaacacattattattattaattagatatttttagatgcttctaagcaaataattaattttttcaaacatatttttgatttttaaaataaatttcaaaaaatccaggtccaggcctggatcctggtctcgaggagcctgaatttttcctggacctggattttcctggatttttgtccaggaaatccaggtcaaggtccaacatggaatccaggtccaggtccaggcttttttcaaaataccgatctctaatatggagacaaaatttaaaatttttacttagaattgatttaaatttaagaaattgctggatgcttggaacaaaattctttagcctaaaaacgatgaattttttttcggaaaataaaaagttttggattttaattttatttccaattttggcttgtctatcatttacatgaaattattgtaaaagaaaacatttttgtaaaaatatggccttcatgggtgtcatatttctggaaaattggcttttgccactttttgtcgcatcatccaaaatgttttttggcacccacaacaatggcaaggctcggcgagagtgggcagtacttttggcacactgcgggagccgagccgtgccgttgggacaaacagtcctgtgaatattggcacaacagtaccgggacccccataataatgaatggaaggaggaaaagggccccccccctccggggatcccttaacttgaaaaaggatctt

SEQ ID NO: 39649 - DNA, 874 bp, Heterodera glycines
accgtgaacattatttctattgagtccccccccctcccacgccgttcagagcacgacaaatatttcaacaaaaattttgaaatcatgtttcccactcccttctcccaggggtattattttgtaaagtcttttttccccaataaacttgtcaaaccccatttttcgcaccgtgaatgttatttttattgaattctgaaccgttttgagtagattagactataaaaaattgaaaattttgaaatcatgtttcccactcccttctcccaggggtattattttgtaaagtctttttttcaaaataaacttttcaaaccccttttttcgcaccgtgaatgttatttttattgaattctgaaccggtttgagtagattagactagaaaaatttgaaaattttgaaatcatgtttcccactcccttctcccaggggtattattttgtaaagtctttttttccccaataaacttgtcaaaccccatttttcgcaccgtgaatgttatttttattgaattctgaaccgttttgagtagattagactagaaaaaattgaaaattttgaaatcatgtttcccactcccttctcccaggggtattattttgtaaagtctttttttccccaataaacttttcaaaccccatttttcgcaccgtgaatgttatttttattgaattctgaaccgttttgagtagattagactagaaaaaattgaaaattttgaaatcatgtttcccactcccttctcccaggggtattattttgtaaagtctttttttccccacataaacttttcaaaccccatttttcgcaccgtgaatgttatttttatcgctcttagagccgttttgagtagattagactagaaaaaattgaaaat

SEQ ID NO: 39650 - DNA, 688 bp, Heterodera glycines
cgaaatgaaaattttaaaattttcaagcaaataatggccttttatggaatttccccccccaaacgaaaataaaaaaattttatagacaattttcgtaacaaatagcactcaaattttcaaatttcccggcggcgcctatcagcaccgccggacctccattttccactatttttacaagtttttgccttaaaacggccaaaattgggtctttttaatgaaaaagtgcagtttttacccagcagcgtgaaaaaatttttaattgggtaaatagcaaaaaaaaaaaaaataggtcttcaggtcgggccccccccccccgaaaaaattttctagatacgcccctggggtgtacccgccggaccccattttaccatatttttgaaaaatggagaccaaaatggcaaaaaaaaattattttttggcgaaagtggctaaaaatttttaaaatacatccccataattcgggatttcaaaaaaaacgaaaaatacagccctaaaatcgactgaaaaaatacacccggatatttaagagaatttttgtctgttgcctttattaatgctaagaatatgggcattaattaagtaagaaaaagaatgagctaaaaaactgaggtggttattcagtagacgcgtaaaatttcccgattttttttttggtaaaaatcgagaaaactcataaaaattactaggt

SEQ ID NO: 39651 - DNA, 1292 bp, Heterodera glycines
  unsure (1)..(1292): unsure at all n locations
cacggcggggcttaaaagcattgtactgcataattaaaagctaaaataattttcgtatattttttcacaatttatttcaaaaagccaaaaaaaatgattcaattttgaaacgaaatagtgcacaaaagggagggatggttagacgaaaagaggaatttttagaaaagagcgcaccccatctgatattcccatttttccgttccacaactggccaaaggcgactgtgctcattgacacgtagttgtccaataaggtacttggactttccacagtaaaatgtggtacaaaattttggaactgtcccgcctcacggcggggcttaaaagcattgtactgcataattaaaagctaaaataattttcgtatatttttcacaatttatttcaaaaagccaaaaaaaatgattcaattttgaaacgaaatagtgcacaaaagggagggatggttagacgaaaagaggaatttttagaaaagagcgcccccatctgatattcccatttttccgttccacaactggccaaaggcgactgtgctcattgacacgtagttgtccaataaggtacttggactttccacagtaaaatgtggtacaaaattttggaactgtcccgcctcacggcggggcttaaaagcattgtactgcataattaaaagctaaaataattttcgtatatttttcacaatttatttcaaaaagccaaaaagtccggaaccaattttaaaaactaaaatagtgcacaaaaggggagccgccgcacggcggggcttaaaagcattgtacagcataattaaaaccgaaaataattttcgtatatttttcacaatttatttcaaaagacaaaaaaaatgattcaattttgaaacgaaatagtgcacaaaagggagggatggttagacgaaaagaggaatttttagaaaagagcgcccccatctgatattcccatttttccgttccacaactggccaaaggcgactgtgctcattgacacgtagttgtccaataaggtacttggactttccacagtaaaatgtggtacaaaattttggaactgtcccgcctcacggcggggcttaaaagcattgtactgcataattaaaagctaaaataattttcgtatatttttcacaatttatttcaaaaagccaaaaagtccggaaccaattttaaaaactaaaatagtgcacaanaggggagccgccgcacggcggggcttaaaagcattgtacagcataattaaaaccgaaaataattttcgtatattttttcacatttatttcaaaagacaaaaaaa

SEQ ID NO: 39652 - DNA, 1383 bp, Heterodera glycines
tatataaagccttttatcgcggcataaatatttacaaatttttgattttttgccttgttatgttttattatgtttaataatttttaaaattaaaaatttaattaaaatcatggcaagttttcattttagacatagtcaaaaaaaatcattggatttttaaaaaatatttttatggaataaatattttattttaattcattggaataatcttttagatattcttgattctggccttttatttttacattgagagaagccctttagttttaatttattataatttaatgaattttatctcttggtaggtattctactggtaatattctttttcaattcaattccctttattttccgtttttttcattttaaagatttttttaaattatacttttcattatgcttttattaatccataattttgtactatcattttttattatcatatatacgtcttttaatcattcctcatgcatatgtgtagaagtaaattatttcaaacttatggaaggtttgcatgtgagtttctttttttaatataaaaataaaacttcattagttttaattattttttattataatttaaaagtgctaatatattttaactatttagttatatttaatttgtttttttatatttttatgtataaaataaactttttcttatatttattaataaatattttgggatttttttggctgcaagcagcagtaataactcgccaagcatttttatgggtaattgtatatcttatatatcaatcaatataaggtttaaatcaggccgctaactcttgttgactgcgctggattcgtcaaaatcttaattgctctcggcattatatttcagaatttagttgcacaaaattcatatttctattttaattttaaggtagaactcaaatcgaaaactataaagtatattgtgatatttttttatcaatcgaagatttacagtaatttattattttttgttttcactcgaaagttttttgtttcatcattatttttatttaaggtctatttttttacagttattcattaattatagaaattcccaggctcattcataaacaatttgacttaaaataattatttttaaataatttatcttttgacaataataaaaaaaataccaaataagttagaagacttattttactaattatttcataagttctgaaatttttaatttatttttactgtttgattcaaagataattttatgttaacaactgattggtcaaattttaattctatactgtaatatatttcagtaataattcaattttacataaaaatgtcgctcttccacagcagatggtccaattgttcccatccttgataacacacttattgtaattggcgcaaatattttatttatta

SEQ ID NO: 39653 - DNA, 796 bp, Heterodera glycines
  unsure (1)..(796): unsure at all n locations
tttacgccgagctttcaatctagtaattctttcaaatcctttagaggggncaaaacccatcagagctggaaaggggctaccctttgaaccaactcttacagaggccaagagaatatatatcagatttcctagcacttcgtagcgcaaaaaacctttttgatcgatctgatactttccacgtttttcttttgtatttttcagttcgcttcttgatccaattcaaatgggcgggatttgtttggctgatattcttttcctcctttactggggtagtggttaggaacttttctactaatttgattcggcttatcagaaagagcataaaaatttgcttaaattcgatggatagtgaggtttatattttgcttgggatcgaaaaagttgggccgctaatgtcttttatggctggtagccgcaattgtcggaccgcaaatgtcagggcaccgtctctatgatagaacacaacctatgtcaaacacaaggacaattcttggaaattgaggactcaaaaattttaaaaaaaaatgtttttttaattttttttttgccaggtgttgggccagtgcaaacatccgttccacatgcattgcattgtgaagtggacgaacacgcaaagcgggcagaagcccgcctgtccgctgtgtcgtcaggagtggaaatttgcgaccagctgattttttgcggggaaggcgaagaagactaataatgacttaatgtttttgttagggttggcaattattacatttataaattcttaaatgtataaataaataatcgtaaaataatgtgttgactg

SEQ ID NO: 39654 - DNA, 1015 bp, Heterodera glycines
  unsure (1)..(1015): unsure at all n locations
ttgtttcaaccgcgcagagaacctgcgccaactgcctttggcagccaaattngagagcgaaagngaactgcgcgaacttctttctgcttaagtgctcaaagtcggagcaagaagaggaagcggaaggctgctgtttggcgtcggcgttggcgtcggcacgcgtcgcttttcgagaaaaaaaaaaccaaaaaacgcggcgactgaatgaatcctgttagcaaactgagttggttgattggtccgagtcctgccagcaaggagggggtccttcccgtgccgtagtgctgcagcttccaccaccaccaccaactcctaacctcccaccaccatttcctacataactgcccaactttctcctcgtccccccccctctctctaattgcctccattcttcatttatttattcattcattttgtcttcgtgttctcttcgactctgctctgctgctgtgctgctgctgatgaagaacagaattttgggggatgttgttgagctccgtgcgctatatgccgatgctcaagattaaatcccctctctcttccaatcattcgcataaactgaatcaaggaggaggggaaggaacaaatgggagacgggagagggggagggggggggggaaagtgtggttggttatgtggcgccatcatggggtttgggttgtccggattggcgccgccgatttgattagtggcgacagtgacgaagacagtttcggctaaaatggattttggagatggacgagaggagaggggaggggggggggaagttcagcactttgtctcctgacttatgggatttttgttcatcgaagttcagagcatgaagtgataaattgaatttagtggctggtttctgcgccgcaaaacgcatctttccctcttccgccgatcaaaaatgaaatgaaattgaaatgggaagcaaagggaacgcttttctctgtgctctgatcagtgattgatcagataaccatgggagtggtgccattggaaaaaaacacacacaaaatgttgggca

SEQ ID NO: 39655 - DNA, 981 bp, Heterodera glycines
aaaaaatcgattttttgatatcggggcagtcccccgtaaccgatgcgctcagatctatgggagaccgaatctttcgggagtagctcgcgtatagtctgtactttaattctgcgttggatttttgctccccataatgtttgagtaccccaatcggacacttgaaaaaatcgatttttttgttttcggggcagtccccccgaaccgatgcgcccagatttatggggagaccgaatccttcggaatagcttccctatagtctgtactttaattctgcgttggatttttgctccccataaatgtttgagtaccccaaacggacacttgaaaaaatcgatttttttgttttcggggcagtccccccgaaccgatgcgcccagatttatggggagaccgaatccttcgggaatagcttccctatagcctgtactttaattctgcgttggatttttgctccccataattgtttgagtaccccaaacggacacttgaaaaaatcgatttttttgttttcggggcagtccccccgaaccgatgcgcccagatttatggggagaccgaatccttccggaatagcttccctatagcctgtactttaattctgcgttggatttttgctccccataattgtttgagtaccccaaacggacacttgaaaaaatcgatttttttgttttcggggcagtccccccgaaccgatgcgcccagatttatggggagaccgaatccttcgggaatagcttccctatagcctgtactttaattctgcgttggatttttgctccccataattgtttgagtaccccaaacggacacttgaaaaaatcgatttttttgttttcggggcagtccccccgaaccgatgcgcccagatttatggggagaccgaatccttccggaatagcttccctatagtctgtactttaattctgcgttggataggaagtcccccataattgtttgagtacccccaaacggacactg

SEQ ID NO: 39656 - DNA, 964 bp, Heterodera glycines
caaacaaaaatgggtaatgggcaacaaaaaaagtcaacccttatttattaggatgaaagtactggtttccaaggacagaaagagaaaattttatgacaattaataaccgcctaaaagcaataggaaaaaaattttttgcttcaaaaaaccaaaattaaaaaattatgattgatttcacaggaaattttcttgtgaaaagatgcattttaacgagtgtaaaataagtttaaaggacgcgtccttggaaattagattcaattaggcgaattttggaattttaacgaatttttttaagaaaaatgtgaaatttgccttcttaacagcccttaatgaaaatattttaaattttacaattaaaaaaatgtagccccaggctggctgtatatatgtttttaatgagtgacgtcataatggcattttccaatgtgcctattttgtttgtgccaaaagggcacacaaattgagctgctaatggccggggatgaataaatcatcatgcattcttcagaaagttgttgatgaatgagatgacagacagcagctcagttggccgacgatttttgcgtcacaaaattggcgtaataataacaaaaataaagtgttggcaatttatgtttttttggaaacgaaataattgtggtgtcattagtggcagaaaaaaaaaactagatttgagaaaaatggaacagaatgccaatggaacagaattaaaaaggatgaccggtcggggagctataattaatagagaccggatttttgaaatggccgggaacaggacctggaaaatggacggggatgggttccggggaccgggactcaagttttttcgggattcccggtactttgcccaaaaaaaaactgggaccacaagtcagggtaaatccaggcgagggttcggtcccatccgttcagtctctaataattaattccccataattaacattccttaatgaaattgattttt

SEQ ID NO: 39657 - DNA, 144 bp, Heterodera glycines
actttttctatgccatgagtgagaaattctgcgcataaaagggcacccgtggccattcacttcactcattccatcgcccgtcactcattttcttccctttcctttgtcttccattcattccgcttttccctccccatttctcaa

SEQ ID NO: 39658 - DNA, 1009 bp, Heterodera glycines
taatggttaagttttatttcatgaatatacttaaatcttacataaattgcttaaatctttcattattaaacaattttttttgcttacctcggattttccactgtaaaatccaatgtaaatttttttacaattttctatcaatataacatcatccactggtataaatttctcaaattgaccatgtttatcagtgaaaatattcgagaccagtaatctctggccataaaaaatgttaatcatctaaatgataatttaaaaaatatattttaaaatatttataagtttatatttaatataaaatatatatatggttattagtgctacaatttttaggttttacttatttttttctggactacctatggactgaaatggatgaaaaacatgttttttcggttgttgttaagctagttttcgaattattagcaactattttctagtcttttatttttagaatctaaaaatctaaaaaataattttaaaaaataatttacaattattttggcgttttgcccaaaatttgttaacaaaaatgcaataaaaacgaaaaatgctcccctaagaattgacacaaaaattccagaaaaatacacccaaaaatatgaattttgactgacaatcgctctcgtctttctcccgaacaactcaaaatgttacttgtttgcaacgtgaatctcaatactgattttgttccaaattctgttgctttttgagtaaaattttacgattacatccctaaatttaaaactttttggcacctattttcccatttttactaccttttatggggttttttaaagcctaaaaaacattaccacagtttcatcattctctttgacctctctatagcttaattcgccttcaattttcttgccaattttaactgttcctgtcaaaagtttaaagaattcatcttcattagcgtcgtcatcactggtaacgtcgtcgtcattagcattcacattgtgttcaccataaaagtatattttgatcaaaacaaccaataaaa

SEQ ID NO: 39659 - DNA, 450 bp, Heterodera glycines
agggaagttgaccttgaccatatggaaatgggccatggcataatccgcatgattggctgcatacttgggctactgactttaaaatacaaattcttttttaaattaattattttttcattattcgaaaaaatgaaaaataaaaacctaaaaattaaacaagtaaacagattaatttattaaagtttaatgaaattttaaacagattaatttattaaagtttaatgaaatttaagaattttcaatattaaaaagactcaatttataatattggttgtttaagaaaccaaccggaacattgcaatgtgtgacaaaattgaggcaagactcttccaaatcaaagcaaggcggcacttaaaataaacaagctatttgtaataataaaaggatcagtctgcctccaccaccgccaaaaattgagccgatttgtccatgatgccaagcgggaagagg

SEQ ID NO: 39660 - DNA, 1294 bp, Heterodera glycines
acctcgaacagttgccgttcattttccacgccgaaaatcgcctgccaggcaatttggcaagaaaacgctaaatgaaaaaatatggaaaataaatgaagaaagcagcccccaacccaaccttgatcaccgaagcggctgtgtacacgctgatgtttgaaatgttgacgaggcggccatgttgctgcaaaatgggagattttttacgatttttatatagtatttgccacattaatttttcaaggaagagggtttaagcgctcaataatttttgaaaaatgtctcaaaattagctcccttaatatcattagggattgccaaattaaatcgtaaggttaggagcggaaaaaaaaatatttttgaattatttttcaaattttatcattgactgtgagaagtttttgagttagttcgaaatcccgactcgctaacagatttatcgcttctttcctctatccctagatcggattccacctctacaaatgtgtgtgcccacttgatacaatgtaatttctgaaatggcactttctaccgatagcccttccaccagaaaatgccaaaatcacaaaagcattttgcttttttaaatggaggcccataaagccaaccaatgctgccaccacttaccataatatgggacagtttgcgcacttgcgcctggttgcccggcgctcgccaaatgtccttcttcaacgggccctctttgttcactttgagcaaaagcacctgaaaatgggaaggcatcttcaatctgttaggccaaccaatcaatcatcttatgacaaataatcattattttgttgagattggaataaacaattggcaaatgataaagtttggtgaacggaaggatggcaaaaattgatcccatttttatgggttttaaacattggaaatgattttcagcatgacattcattattgtgaatgccttacaaatttatttataaaaaatcaatgaatgaatcattaaaaactcattgaattttgaggaattgggatatttcgaatccaacctatatagatatttttttaaacaggaaattccaatttgtaaacatgtctttgtattattatttggtaataccaaccaaaagtgtcgccggaatgtccggacaaaaggcctcgttgacgggaacgccaaatttgactctgtgaaaataaatggcatttttacgtcgtttgttggggccacaaacttctcaatgcgtcctctgtaccgctgctccatctcatcactgccgcacaacactaaaaaacgcgtaaaaattagacaaattaaaatgtgaaaaatatta

SEQ ID NO: 39661 - DNA, 131 bp, Heterodera glycines
tgttcgtcggcgcgcgccgcttccgcaccgcgcttgagcttgccgaacaggtcgaactggtagctgaccgcgaacttgccgtcggccaggttgatcaccggcagctcatgctcctgcaggaacgattcggc

SEQ ID NO: 39662 - DNA, 1134 bp, Heterodera glycines
  unsure (1)..(1134): unsure at all n locations
tagaggtagtagcccaatatcctaaatttgtttttttactatttttgtataaaatttatgggggaaaaaattactcctcaagctcatccgcaataattgtcctacgctcatgcaactcaacagcgaactaaatgtgggaattgcattaatgtttttactaatttttattttagatttaaaaaagatgattgaatgaaacgaaattgactattttatgaacggttttaaaatcatcaaaagtaagactgttaaaccctgatgatttttcaacattattttagcagtttttagtttaaaaataactaaataccctttcaatcgcactccaatttgcttccaggaattctttggccgcttcagtcgactcgtcgatgacctttttgattgctcgatccagagctttcttcgcattcttccacgtggcggcttccatcccctttttcaaagcagctaaattttacttatgccacttacaagggaacactccgattttaaatgttaagaattcattgattcagtttggttttttttcgctacagctccaatgatcacaaaaatttttccaaattcttaaaaaaagatcgaaaaaatacttttaaaattatcaaagctttatgcatattcaatcccctgttagcaacgttgggttttcacagcataaattaaacctcccgcgcgttcacggtggcctcttcaatgtccccttcgtctccgtggctttcgcccaccaacaacaattccaccgctctgcagggcctgaatttgtttgatcaaacaatttctcggctgcactgcacttgccaacatcagaccttcattttctggcgtggcaatgttcgtcgcagaaatgaaatcatgcggcatgtgtgtttgcatgatcacggcgaccgaatgggcggcctcatgccctgcgaccaacgctggcgtagagtcccctgtgtctcgtgccatctttatccccttataaaacatcgcattttctgctgccattttttctcggcttttcctcggggcattttctaaagcaatattaaaaagtagagtgccacgggaccgggaatttttgccaaaaccgggaccgggacttgccgggacctgagaagccgngaccgggacctcgattttttttcggga

SEQ ID NO: 39663 - DNA, 639 bp, Heterodera glycines
  unsure (1)..(639): unsure at all n locations
aaaaatcttaacaaatcgtactaaaatcaaatttttcccggcggcgcctatcggcaccgccggaccctcccccctcgcccatttcccaaaagttttttggaaaaatgcgccgcaaaaaattcttaaaaatctgattttttgatcccaagtgcactgaaatttacgatttgttaatttcctcaccaaaatttttaaaggttagactaattaataaccctttgctcattcgttcctcgccccagtgcctccccttgggtaatatttattagagatcgacattttgaaaaatgcctggacctggacctggattccatgttggacctggacctggatttcctggacaaaaatccaggaaaatccaggtccaggaaaaatccaggctcctcgagacctggatccaggcctggacctggatttttttaaactcattttaaaaatcaaaaaaatgtttgaaaaaattaattatttgcttagaagcatctaaaaatatctaataaataataataatgtgtttttaaatttatttaatctgtttttgaaaacttgaaaaaacatcggtcacttgaaaaaataacttctaaaattttgtccaggaaaatccaggtttttcgtggtttgcctggacctgnacctggattt

SEQ ID NO: 39664 - DNA, 1117 bp, Heterodera glycines
cattaaattttcaaccaaaattaataaaaaaacaaatttctgttttaaaatcatagacacataaaatcgtagatttgatgattttgccctccctactgctatcaattgaaagcttagtctgtctgtggaatttttaagtgccgaaattctggactaataggaagaattattcttgaatacctatactcgaaaaaaaattgaatttcatgttttccattccctttctgtggatggttattgaatggatgcgtaaactgtgcaaatacataaaattgaagttggccctcttcccccccccccccccaagccaggaaactcgacttttaggctttttgttcgaatttcggggatcagcggggggttaaaaattgatcggaacggttggcgcgatcactgatcagcaaacgcgaaacattcgccgaaacgtgaattcaaaaattgtgggaagggagaaaagcgtttagccgccgcccccactttcggtgaaattggtgcgcacagcccatggtcacacgcgtgattgagctcaatttgcgccggcacatcatgcatttctcccgcgcatttgcatagcgtgcctgaaaaatcggcaaattaaaaaaagacactgaatcaattagtgtacaaattgcccccccccccccccctcgcgcgtcactcacaagtccggctcgtccaattgcggcacgcgctttcttggcatttcgacgattgattttgatggtccgtgctcgcgctgctgatgcccttgtcctggccgttgttgctctgaccatcctgaaaaaagggcacaaaatttaatacattttgaaaaccgaaataaacaaaacaaaaaaaaactgacgggaattatctttattgtacagcagcagcaggatgaagattcgaccgatggagggaaaagaatggaagtgagtgcagcaattaaatgaatggatggttttggtggggaattcaccgcttaaatacggagaaaaatgccattttttctcagtcatacagaaatttgaacttttttttttgtccattttttggtttgaattcatcaaattcactcttccgctctgtccattttctccctccgtttgtccctttttaattgtcctaccattttttt

SEQ ID NO: 39665 - DNA, 1372 bp, Heterodera glycines
ttgagaatttaatgaaaagccctaaatgttaagttattctcgaccacattaaataataattacgttataaaataaatccactggaaaaataatcaaatatcaataaaataaatcatttcaatcaatttaaggtaaataataaaaaagcttttaaattaaattaaaaaaatttattgaatattaacaggtcgaaaccaagacggtttccgtttttacgccacgagagtaaaaaagtaaaaagaattaattgtcgactctagataaaaaataaacctgaaataataaatattacattattaaaaaatgccataataattaattatgcttttggttttgtacgaagaggaacaaccgacgagattattataaataaaaagaatataatatccatattttttgaaagttatttatttcttttatttaagaataataaaaattatattaaaaaaaataaaatcaaacacttttaatttaatataagattatcattaagaattttatttattttttcttataattgtcaagttatcatattttatttatttcgtcatagcaattttatattaaactaatgagataacgaaaaaacaaagttaaaaaattatagttaattcaaaaagaaaaaaattaattataattaacaataaaaaaattactttctaaaatttatacaatttccataaattattatatattttttgcatcatttaaatttcattaaaatagattgattataaatgcaattgataatttttctaatttaagaaaaacatattcattaattgaacaaaataaataataaacaatgaaaaatgtaaattctttaacaatatttaaattaatacaatttctaatatttaaataacacaagaaggaccatttttattgagatgaactttaattctgggaaattgatcagcttattagttaactaattgactgtactgcatctatatcagggttcggattcatccttgaaaggcaaggacgtccttgaaattgggccctctcacttgaaaatttgaaaatatctttgaattcaagatgcctatgaaaatgagtactcaaaaaaacagtcaaaattttatagttttttataattttataccaatattttttattattttatggcatttttttgtgcaaaatctgttactaaaaccattatatccgttattgggaagcgagttttatcgtatcatccgaaatttaagtacatactcatgaatatgctgttaataattgttatttaacctttcttcatttttttgcttttaaaagtattaaatgaaataaatttggtataataatattcagcacttatatactttctgttatttagtactatatttgaaaaaaaataacctaagaa

SEQ ID NO: 39666 - DNA, 961 bp, Heterodera glycines
  unsure (1)..(961): unsure at all n locations
gagaaaaaagagatacccattttttggccaggaatttttttggtaaccatttcaaatatggtgtaagtgtttggtagagccggattagagaggcaaattgttgttaccaagtttgcgttcaaatccccagaagaaaaaggagatagccattttttggccagaattttttttcgttagcatttcaatatcgtgtgagtgtttggtagagccagactagagaaggcaaatgttggtaccaagtttgcggtcaaatccccaagagaaaaaagagatagccattttttcggcaagaatttttttcgttagcatttcaaatatcgtgtgagtgtttggtagagccagactagagaaggaaaatgttggtaccaagtttgcggtcaaatccccaggagaaaaaagagatagccattttttcggcaagaatttttttcgttagcatttcaaatatcgtgtgagtgtttggtagagccagactagagaaggcaaatgttggtaccaagtttgcggtcaaatccccaagagaaaaaagagatagccattttttcggcaagaatttttttcgttagcatttcaaatatcgtgtgagtgtttggtagagccagactagagaaggaaaatgttggtaccaagtttgcggtcaaatccccaagagaaaaaagagatagccattttttcggcaagaatttttttcgttagcatttcaaatatcgtgtgagtgtttggtagagccagactagagaaggcaaatgttggtaccaagtttgcggtcaaatccccaggagaaaaaagagatagccattttttgggcaagaatttttttcgttagcatttcaaatatcgtgtgagtgtttggtagagccagactagagaaggaaaatggtggtaccagtttgcgggtcaatccccnnagaganaaagagacagccattttttcggcaagaattnttttcgttagcatttc

SEQ ID NO: 39667 - DNA, 946 bp, Heterodera glycines
ccccgggagggggggggcggaaactgtggcccatgggacagcatttgcgggtctcggacggataacagcactcgaagcgatattttggccgaaagggtaaaattttgcgggaaaataagtgccaaatggcattgcccgaggcaaaggatgaatgaactgtttgataacggaaggaaaaaccgatgattggacacacattctgtgttccgtgcggcgaaaaagtcgcaattccttgcaattttacgacgcattgtaaaaggcagacaaatttagagggggggggggggggaattataaaaatgcccaattattaaaaatattaaaaggggagagagggaaatcagcaaagtgattggtcacccactgatcagttgcgcaatgccaacgggcaatttcaatttcaatgaatattatatttttaaattctgaattcagatcgctttatttctcctccaattttcttttggctaaatttcgaaaattgatgaacaccccgaggcatacccctcttctgcccccttctctcctcctcccctctccgatcactcttccggccgttggctttgtaaagagtttggcccctccggggacaactgcccccgggggctggaagattggattatcggaggattattaatggcgttttttgggtttggagtgagtatcagtgatgagaagaattcataaattatccgccggccgaatttcgcggaacattgcgattggccagggcacctcggcagaaaatgaatgattgttttgctgagggccaacaaatcgacatttggaggaccaataacaaagtttgccgaattggaaaaaaatagggaaaattggagggaaggggggggggggattaaatcgaaggggattaattaacagggaaagggtaattaacactaattaacagacaattaaattaataatccaatttgaaaaaataata

SEQ ID NO: 39668 - DNA, 119 bp, Heterodera glycines
atcccggataatggcgtaacaatcccagaacccatgcacgaaaggacggcccagcaacggcttgataccttgcgtgggcattacctcccggatatcaccttcaggccaactggcgatga

SEQ ID NO: 39669 - DNA, 885 bp, Heterodera glycines
gatctggtggtcaatcacaatgttccccgctgttctaaaacgtatgtccatcgtgtcggaaggtcggccagggccggacgttttggggcggcggttactttcgtcacacagtacgacgtgcttttgctcaaaactattgaggtgaggtgggaacggaagatgcatgtccttcccttacggtattgttttgaatttcagggggtaattggtaagcaaatggaggaattgaaagtgagtcacaaagaagtgtcgctctacgctggcaaagtattggccacaaaaagggaggccgaaattcgaatgcaacggcgaggctttggagaacgacgggaaatatggaaacgaaaggaattggccacggaaggactgagtgaagaagaaatagagaaggcaattgagcaatggaagaacggcggaagaaaaatagtgaaagctcacaatcaacacgaggcagaagaaagtcaaaaggggagaacaaaagagtgaaaaccaacacaagagaatgaccttgaagaatgccgcatttattctttaatgtcctcataatcagcaataaaactagttggaaaatataattttacactttctcatggatataaattcaaagaatttaaaattattagacgaagagatggaaagtagcttttgttcccatcttcaaatggcagaatggtccaacccgcactgctccaaactgttgttgtacagaatttcacacgcgatttcgtcttctgcgaattggtgcactttggcctctttgcagtcgctagaagaacaaaatgaattttacaggatcccgcgccgtaaggacctgtaatattttcccggaacgccgttaatttgtctacttagcgctaaaaacaacggtgtctgagctccggcccg

SEQ ID NO: 39670 - DNA, 1178 bp, Heterodera glycines
  unsure (1)..(1178): unsure at all n locations
aagtcaaatacattggcagacaaaacagcggtcttgcttcgttgggtggaacggaaggcgatgaattcgagcggggaattggaggggaaagggaggggggggggaaattggaagaaaggggagggaatggaagaaagggggagggaatggaagaaaaggggagggaatggaagaaagggggagggaattgggccgagtggaacggaccgacggacgcaacaaaaagcacgggaattgataatgcaaactttcaaaaaataatcatgccgtgagcaaattttattttttcgcaaaagttgcaagaatcaaccaaccacagcaaacattgggcgggggggggggaaatgtctgccgacgcattgccaatgagtgatcaattggcgaagcgcctctccccttaataaaagtgattagctcgaccatcgtatgcctcccaatctgctcaatatccgcctttctattagcggatgctttcaagattctcgcgcaatgttttcgtacttttattggcgatttggggggaaggggtcaatctcttcccaccattaatagcagatgaacaaatttcacaattaacaactaaatgaatcacactaatggctccgtctgctggtgcctttttgtggtgtcttccgtttctctgtttcccttttgcctccgattgcgtcggccccccttttcctcgcccccctcccgccactcctcttcctcctcttctcggtcttcttcttcctcgctcttcctcctcctcctcccccaccacaatccaccgctccttctcgtccttgcgcttttcctccctctcctcttctccctcctcctccgtccgtttccctcctcttcttcttcctcctcttccgctttttctctgttccgtcccctcccaccgctcattcgtcgcatttctctttgtgtgcggaatattatgcagaagagaattgccaaaaggatgaaaatagtgagcagaaacagaaggaagagcagcagaggttggtaaagttggccggtggctaaaacggaaaatggcaaaggacagaaatggcaacgaacactcggccacattcctggagatggcctccacgttgctgatgatcctgccgatgtcgtcacccacctaataaataagtgcaaatggcatcattnaattaagcgtttgtcccacaacgtncgcaactgtc

SEQ ID NO: 39671 - DNA, 118 bp, Heterodera glycines
accggttgattatcgttgtatagcaaataatatagcgatgagcatggcgaaacaatcagcgggatcaaaccggatgcgggtactcgggaggtaaaacgaggcgtggatgcgatcctgg

SEQ ID NO: 39672 - DNA, 1351 bp, Heterodera glycines
ttgaaaatttgagtgcactttgtttcgaaaaattgcctatattcactcatgaaatttttaaattttcgtttggggggaggaattcgaagaatttttccattattcgctggaaaatttttaaaaattttcatgcctgggaggggggatcttggattttctgagcccaaaattctggatttttaattaaattaacagtcttttaaattttttaaatgcctctttttgtggtgctgttttttcaaaagattttggatttattgtggcggtggtccggcgcgccgccggaaaattttcgaaattttaagtgaaatatgttaacagaatttgccaaaaaaggaccaaatatttggttaaatttgcagttttaggttgtttaaaaaaagaaaaaataataatattttaaaatattttttattaattaaatttcaattgaaataatgtaaagaaaatagaaaaaagtatctgttcggttggggaattgaacccaggagattaacaatgaatgtcagaagatttagccactacgcaacataaggaaacaaaaaaacactttaaatgaaataaataatttaattttttctcaaaaaattctccttctccaccaatttccttctcgttttctcgcccagaccttattcttaccagtgcttatttagtcccgccgggactggcaaaaccgggaccgggatttcaattttccaaaaaccgggaccgggacctgaaaaaaccgtgaattcccgtcccggtcccgtgcaactctagaatttacataccgtattttctctaattatcccccatggggatgataattattttaaccttcctcatgaaaaggggggaggaataataaagattgggtggcagttagagaaaaacgacgacaaatgtgttcttgtggcacaaataagaaagaacagctcactcatcgattaatgatttttcgctatccattttttgagccgattataatgatactcgaaagtgccttcactgttgcccatgtcatgaaaatcatcaaaattccactcttcacaatgacacttccaaactttggcatccttatattccttggggaatatggcacgacaagagacgtcggaatcttcattcgatgccggattacggccccattcaggctagtgatgcttgccaagtttcactgataatgagtggcaattaaaaaccaatttgcgaggaaagggcacttaattaagtcggcaaatatatatgtatcatgaatgacattccgaggccccaaaagtgctcggaaaagcgtaattccgaccctataagtgctgaaatcggaagtcagaattttttatataatatattaaattttctaagtaatttt

SEQ ID NO: 39673 - DNA, 1328 bp, Heterodera glycines
attagtcagtgatagacaattaatattcaaaataataaatttgatttttatactccgaaccaaccttgtggtcctggtgcgcccggaggacctgtaaatggcagaaacattaagaaaaataataaatattcattattcaatttttggaaaacccaagggccctttaatataaattatgtttttctgacaatttcacaaagtgtggcgttttgatttgccctttttactcaccgggtggtcctggcggtgccccgttaatcaccttaattttttgagggttgaaagtgccatcaatagctacgattgttttttaccttccccggctctcctggggggcctttgtccccgggaaggccgggcggtccttgcggcccctggggccccggcggccccggcagtccgggcgctccatctctgcccgatgaaccagctggcaaatttaacgaattcttaaaatttcaaacaaatcccaccttcgccttgggggcctggcaaacccttcggccccggtggaccaggcggacctttatgaggaaaagttttcaattttcatggagactattattaccaggcggccctggagggcatttttggcacgggggttttggaggctgaattttttagtttttttttcaaaactcatctccacgtctcaccggtccgggtaaaagcacgccatctcttcctggaggtcctgggtttccaggacgtcctggggcactgaaatagggcacaattcttttatccacttaccccgggcataatttgctttgtctaactgacccgggccgtccgtctctgcccggcggtccgggagggcccggcgggcccacttggcaactgcagcagctgccgccctgcgggtttccactgctgcccggcggcgaaccgccccccgctacagcacccgctagcatttgggcatcatacgccgtagtgccaacagtttgacgcttcactcgtgcagcggtcacagccagcggggcggtgccgttgtcggaggacgtcggcaaaccaccagtaatcgcctggacgtgcagcatttcgcgccacatatcacgcgagcgcgtctaaaaatggcatggcaaaaatatagtagatgcctgaaatgctcgattgtctcagttttgattagatgaaaactttgggttttcgtggtcttagtctcatcccgagtctattctcgagacttcttcagtccagtctctaattttttataaaataaattctctctttgtttgccatcgtaaaagtcttctcggtgaccaattaattattttagcaatgaatgaatgattcgctttctctcaccttgcaaaagtcgactt

SEQ ID NO: 39674 - DNA, 914 bp, Heterodera glycines
ataaagaaattaattcattaaaaattataattcacaaatttaaatacataatgaaattaaaaaaaaatccgcaaaatttttcatgccctaattaatttgaagaaaaaacacctgtggtcaatggcatggcaaaaaatcattaccactcaaaatgttaacatgatcgagacttttgagaattacttcaaaattttcattgaaaatttagattttgttgcaaatataatgaaaattttgaaaaaaaaactcaaaaaatccgccaaatttttcatgccttaatttaatttggagaaagaagatcactgatggttaatggcatgccaaaaaatcattttctgtaaaaatgcttatatgagagagattttttaagattactttaaaattttcattcaaaatttagatttatttcgaatgattaattcagtagcaatgaatctgtccggtctatacaaattaaaaaaatatatatatataattttttaaaatatttatttgaatttttaaaatatatatttttatataaataatattttttgaaattgatttaccgcaacaacagtcacaacaacaatcgccacagcagcaaccgtcgccgccaaagccgaaaccgccgccgaagaaagcggacacaacacacacaacgctgagcagaacaacaaatgtgctcatgaacaagcaaaattgcctgcttgagaagagacgaaattatgttgaaatatggcaaaataaaataatttaaaacaaaaataaaattttgcttctatttcccaataattaagttaagattttccaatatttatactaacgataaattcatttaattgtttaaaataatttatttatatggaagtgaatttaaaaattaaattaaaattatagcattaactggtgtgaatattaaaaaaaaaaattga

SEQ ID NO: 39675 - DNA, 974 bp, Heterodera glycines
  unsure (1)..(974): unsure at all n locations
ctttattataagctatttttccaaagccaacaacgccctttcttccctcttttctgttagtcatttctcattggtgttgactatccaacattcagtgtacaaatttgttaaacctctcaacattttaaatcaaaatcctaataaaaatttcgttgaatttcttcgcctcttatttgtgcaaaattttcgaaaaagtaattttctatttaaaattaaaaaattcagaagcaaattcaagaattttttttatttataaatgcattttttaccacatgaattatgtttaaatttttgcgtttcgaattcattttgaaattaagaaaaataaaaattgataatcatttgatcatttttagcgcactttaagcaccgccgttaggcagcgcagttccaaaatttattccatgccacagatattatgggcaggacacgccaagtacctcaaacttgggtaattaaaccgaagaaagaagtgcagtggggaagaatgacgcctaaaatgaaggaaatattcgatgctgtgcgaactctttgtgacccctctctgactctgccaatgcaacagttgtccatttttaccactattttctctcactcatcgtctgctcgtctctcctttattataagctatttttccaaagccaacaacgcccttttctccctcttttctgttagtcatttctcattggtgttgacgatccaacattcagtgtacaaatttgttaaacctctcaacattttaaatcaaaatcctaataaaaatttcgttgaatttcttcgcctcttatttgtgcaaaattttcgcaaaagtaattttctatttaaaattaaaaaattcagaagcaaattcaagaattttttttatttttaaatgcattttttaccacatgaattatgattnaatttttgcgtttcgaattcatttttgaattaagaaaaataaaattgataatcatttgatcatttttagcgca

SEQ ID NO: 39676 - DNA, 829 bp, Heterodera glycines
  unsure (1)..(829): unsure at all n locations
ttaaatactgaaataagtagtaaaattgttgacatcagtaacaganaggngctaaaaacgcccaaaatgccaaaaaccttcgaaaagaggnggnaaaagnggaaaaaaccngngncnnnaggcacagaannaaaaaaaanggnnnncnnaatattttgtgttaatggaactttaaaaaatatatatgaatttttaatcattattattagtgaatatgtagagaccagcacgggatttatccagtttgcacttgcgggatttgcggtattataaatatttttgaataaatttattcaaaaaggtcctgatttttacgattcgtatttgaaaagtagaaaagttcctgatttttacgatttgtatttgaaaagtagaaaagttcctgattatacgattcgtcctgaattggagaaagacaatatgaaaaatagaaatctcctgatttttactattcgtatttgaaaaatagaaaaggtcccgatttttacgattcgtatttgaaaagtagaaaagttcctgatttttacgatttgtatttgaaaagtagaaaagttcctgattatacgattcgtcctgaattggagaaaggcaatatgaaaaatagaaatctcctgatttttactattcgtatttgaaaaatagaaaaggtcccgatttttacgattcgtcctgaattggagaaagacaatatgaaaaatagaaatctcctgatttttactattcgtatttgaaaaaatagaaaaggtcccgatttttacgatttgtatttgaaaagtagaaaaggtcctgatttttacgatttgtatttgaaaagtaaaaatgttcctga

SEQ ID NO: 39677 - DNA, 936 bp, Heterodera glycines
gatgcgtaatcagaaaaaatggtcagattttatgaccaaggacctcgaaatctatgggaacatagttgtcgcgaatttttcagacaaaaaacttgcaaacagcgaaattgggtcctacttggtcttaaaataaacgcgttttttgagttttttaactttttcatgtcttttaaaggctgtaacttttgcgagaaaactaataatttggtctctgaagacacgtataactcccgatttaattttgggtacaagttttttgggtttctatattagctgaactctatattatgtataacatgctggaagtggtaacatggtgaccacattcatcattgccaattttgttgccaaatttcaaaaaaaaaaattaaaaaaaaaatttttttagtcaaatgccattccaacaaaatccattttttttctttgctttcagtgtccgtcgtcaagtggtcaacatcccatcatttgttgtccgtctcgactcccaaaagcacattgatctgtccgcaaagtcgccgtacgctggcggtcggccgggccgtgtcaagcgaaagaatgcgaaaaaaggtgccggaggcggcggctcgggtggcgaggaggaggactgatcgacgatgatcagttgataatttttttttgttcgacaccccctttttgttgaaacacaatgttgattaaagcgctttgttataacatgttcactaaagacccaaattttgaaatgaactgggccgggcttaccggataaaagtgtgacaaatactatgctgacatgttttcatgacaaacccaaaaaacagcatttgaaaatttgcgggggtaatagtttagatggtacacccccttttttaaaaatttttttcaattttcaaaaaatcataaaaacatgtttctagaggttttcgaggtcgctgatcagcaatccgacatccattt

SEQ ID NO: 39678 - DNA, 1084 bp, Heterodera glycines
caaaattaaaatgttttgttgcatagcattaatgttaatccctccctgagggttttcccgcattattttggattattatacttcctgcaattttacaccgcaacctcccccgtcatccgccaaaaagaaaagatttttaaaaatatttggaataacttcttttttttcaaaattattataaaaaattaatattaaaattattctttgtttaaattatttaaatatttgcatcaacatttttcttttatgtgtatgaaactatttctttatttagtctaaagattaaattttaaagaatcaaactgaattttctccccggaattcctttgaaaattgtttgcttttcttaaaagctaattttgttgcattttttgacaaattccggccctccatatatttatgtgagtatgggataataaaggataaaaattgaaacattcagaaccatcccagccattttttgacttttagcgaaacgctttatttattgtgtgcacaaatataaataatatttatttgcgttgtagagtttgtaaatgtatgaattagtcagcagttttgagcacaaaataaatttcatatgtgtcattttttgataaaataaattttatcaaagttattaaatgtcgtttttttaaagaaaattctattggtcctttttgacttttatttgtttaaaattgtttgttaatttttgttattattactaagaatttcacatctacatatagttttattattgtttgtcctttggaaagtttccggcttaaaatggatatataaataaggctttattgcaatttaggcgtcaaatcaatgatcatctcagtttcttaggctaattactaggtcaatgcttacacggcatcaaatgtaagctcaagtctatataatttattttgggtttttggataaatattttctaggccaaagtccaccgatcaaaaatggctctagtgcactttatgagtccaatttcagttctttggtcattacttttttcttgcttggtcaatacctacattcttggtatcaaatgaaagcttaaagtcccaggaattcataaacacaagaaaagagcaaa

SEQ ID NO: 39679 - DNA, 201 bp, Heterodera glycines
cctttttatttgagagtttgcaatttcctcaaaaattcgaatttcgtttttgcccaatgttttatgggccctgtgcttcttctgcccattaatcatttacaaattcgccttcgcatttgtttttccccctgggaatgtgccaaaacatcccaatggattttcaacttatccaattcttccctaatcacattatcccccctc

SEQ ID NO: 39680 - DNA, 892 bp, Heterodera glycines
gaaacttacaagggaactatcgaactgtgattttgtgactatgtgaattgaataattaaattcaatatattttttaaattatttttcttaaaggcccattttcggtcaaatattttgtcaaagatagagaactttttggtgatcattaaaaaaatatataattataattaatcatcattttagacttgtttatgctttttaaaagtgagcacttttatcgttttttcgcatctttgaccgattttttctgatattttttggcatcggaaacaaagttcacaatagcaactcaacatactctacaagataaatgtgcttttaaagtgagatttgggcaattacagttcgatagattcccttgttaggaaggtaccgtacatttccttttttgtttgcctaccgtggtctcgtactgtgacaattgtttcgctcctttgctgttccgggcaattgccgcaatccgaggatgcttttcgctgtgccacttttcgctgcttccgctcctccaaacacttcacaaatgcactacggtaaaagcagtgtttgacctcggcattcttgctgatcaaattctcgaaaatctgtgcacatttttttaatctgttggcattttgatcaatgcaaaaccaaaccttttccatgatttttagcatgcccctggagtatgacttcggacattctcgcagatgacggaggtccacaattaaaataggaggatatttgtaacgaatggttttttactctttgtactttgaaatactggtgatgaattgccattttctaaaaaattttatcctattttcgaggtattacagtcataatgtccccatttgtctgtcagtggcattgtgccgtgtcacaaaccttcttcagctgtagctattgttgtacc

SEQ ID NO: 39681 - DNA, 968 bp, Heterodera glycines
aaaaaccatcaaatggaaaatttttgacagaaaactattcataatttcgcataaaatagatcaaattttataatctagatatttttcgatagccctaagtgttttctactatcttgcaaaatttttaaaaaattctttaagtttaaaaaaagttgtgacctgagaagctcaaaaacccatggttttttgaacattttcagtcataactttcttgaaacttaacgaaactttttgaaattttgtaggctaatagaaaacacttaggcctatctaatgatatcaagaattaaaaatttagttgcttttgagcaaagttatatcaaaaaatattttcatttgatggttttttgactaacgcccattatgatggtttttgactaacgtcatagcaccgtccaattttcctttggtgtccaaaattccgacggtgtccaattttctggtgtccaatttaccaccccccgatttggacgaacttgaattttacataaacgctcccgattatgtgagtttgttttttcaattcctcattgggtttctcgggttttagttttttttacaacgcacccactgaaaaaatttaaaatttttatcaaattttttataagacttaaatttacataaaagctaaattttaggtgccgatccgtttctgaatttcgcgcaaatggaattttcgataatgaattgtcaaaaaattgtcttaaacgcaaccaaactaattaattcttgtctaagcaggttgataataagtgaatataaaatttggttgcttttgagcttaaagctatgaaaaaaagcatttgcatttggtggattttatattagccaaccaatggtggcagaatttattttataaaaagttaaatttttttttctagttctttacgtccaaaacgggtcggggtcacttcggcgcggaccatttaggcgccgcaaatttgaaatgctataacttttttatttgt

SEQ ID NO: 39682 - DNA, 326 bp, Heterodera glycines
ctaagacagggcttcgatctgtccttatttataagatttgtccttatttggagggtccaaatcttacagaataaaaatgttcggcgctagtttaaaagaggagtcttttgaaaattttttcacttttttttttgcctattttttttgtttatttattttgacgcaaaatgtgttttttttaacagatggtacgaatgacaaaaaaagcaacaaaaaaagtgaaagattttgaattttatcaaaaaccaaaggggagacccttttgtttcgcaaaattttttgaaaaaaaaaatcgagaatatacttttaatcgccataattatgct

SEQ ID NO: 39683 - DNA, 743 bp, Heterodera glycines
tttctagggagcaaaacacgaaaaacttaaacaaaacccttgattttggccatttaaatgaatattaatattttatagtttttcaataaggaaatttttaaacctaaaattttttatcaagaaaaaaaatgaaattttgtgtaacaacttttgataaaatttttcaattcttaatggtatattttctgaatttttttagatcatttcttagggtttattttcccgattttattgaatttttcggaaaaaacgctaaaaaggcaccaattcgctaaaactaatctttggggtttttgaatgaaggcaacacacgttttttggctgcctttttcgatcattttcccaacctatagtacaccgttcaatagaggtttcaatagccctacaattttactcagaagagattttcgtttttttctattaatagaaatagtttattacttttttggaaaaaataaacaaattcaaaaaaatcgaaataaaccgaaaatttttcctcagttttttcgggttttaaccgaaaccgttcgaccgaccctcttttccggtctctactaaaactcatattgactgtacaacaaacaaatttataaatagaggattttatagcatgtagtttaaatggctctattccagtttatgcgtccaatcaatgtttacgcgtccaatgagtgaccaccctcacttttttagatcataactttttttcttactttgtcaatccatgcattcttggtatcatt

SEQ ID NO: 39684 - DNA, 919 bp, Heterodera glycines
aatatcgtgtgagtgtttggtagagccagactcccctaaggaaaatgttggtaccaagtttgcggtcaaatccccaagagaaaaaagagatagccattttttcggcaagaatttttttcgttagcatttcaaatatcgtgtgagtgtttggtagagccagactagagaaggcaaatgttggtaccaagtttgcggtcaaatccccaagagaaaaaagagatagccattttttgggcaagaatttttttcgttagcatttcaaatatcgtgtgagtgtttggtagagccagactagagaaggcaaatgttggtaccaagtttgcggtcaaatccccaggagaaaaaagagatagccattttttgggcaagaatttttttcgttagcatttcaaatatcgtgtgagtgtttggtagagccagactagagaaggaaaatgttggtaccaagtttgcggtcaaatccccaggagaaaaaagagacagccattttttcggcaagaatttttttcgttagcatttcaaatatcgtgtgagtgtttggtagagccagactagagaaggcaaatgttggtaccaagtttgcggtcaaatccccaggagaaaaaagagatagccattttttgggcaagaatttttttcgttagcatttcaaatatcgtgtgagtgtttggtagagccagactagagaaggaaaatgttggtaccaagtttgcggtcaaatccccaagagaaaaaagagatagccattttttcggcaagaatttttttcgttagcatttcaaatatcgtgtgagtgtttggtagagccagactagagaaggcaaatgttggtaccaagtttgcgggtcaatccccaagagaaaaaagagatagccattttttgggcaagaatttttttcgttagcatttcaaatatcgt

SEQ ID NO: 39685 - DNA, 1316 bp, Heterodera glycines
tagaatttggtttgttattctaaattattcacctatattagacgatgattttatagccgattaaattgaatatttataaattaagtatttaaaattaattttctttcattgttgataattaattaaattttcatttgatatactttttaagttgtgaaggagaccaactctattgtaaacccataaagaggaaataacgtaacctgaagttggtcatatgcaccaagaaagttacgattaaaggaattacaaggatttatttatagaaaatttgatttattaaatagcaaattatttcattaaagtatctttatggtgctatttaaaacaactcgtattcgatactcttgtcaccaaatgtacgagagataaaattttagcatttttataaatgtatagaggtttctgtgcaggcgaaatctaagttgatcataagaaataaaaaaccattagaaaatctgaaacaaatatagaagaatttaaaagggaataattaaatggccaaaactgatgttttcatataatattcaatgaattcttaataaaaagtaaataaaagggaataataaaacgcaaaaaatttaatattagccaaagttaattgtactggtgattgttcatatttcttttggtatttcagcgctatcagccataaaattggtattgtatttttgaatttaattaaatattatttttattaatattaatttcctatttttatttattcgtttcacattgaaagatttttggcaatattttatttcaaagatgatttcatcaatcatcaaaaatttgactaatctttatttttattttgttgtttcggcatctagcaattttttctaaggtccaatgctcgttaattctataatctgtccaatgctgcgttaattacataatcattttttatttacattattatttttttataggtttttattttaatttgtgttataatttttagtactcaatattttattagttttggcatctatttttctatgtggagtaatcattgtcgagacgataatgttttttaattttctcgtatcatttttatcaaatttgcatcaggaatattatgttgcaagatatcactattttcatttataagcttctaacatacttataaagtataagaatattactcattctctattatttatatatatgagaccatcataaaaagctttagttacttttttaaaaatgcagtacatttgagcattttgttcattttattttttttgttatgtccgaagataacaaattaaataagtttatttgccgaagaaaaataaataacaaataaatgc

SEQ ID NO: 39686 - DNA, 937 bp, Heterodera glycines
cgggacaggttttttggcctcacccccttaaacgcccccgggactcagacctgcgcaatccccgttccctttaacttcgcccccgcgggggcgcgggggtgaaaatacacccctaagaatggcatattcgtgggataaaagattaaaaatttatacaattttgaatttttttttacccatctttgacaaatttttatgaaataaaattaattctgcttttatttctaaatatatttgtggattattggttagtacttcaactctaacataattttttgttatgagttagataccggttgacgttttcttttgaatttatttttttctgattaatagacaaaaacacccataaaaattgaccattctttgcataatttgttaacaaatttaactcgacttttcaaaaaaaaaattccggtggcgcagataggtgccgccggatgaaaatttcgttgaaattaaaaagttcaattttccttgagtaaatcaggaaaatttaatatattataaaatatttttacaaaatacaaaagaaaacaaaaatgtatcgaaaatcttaatttttttgatgaatatctgttagaaaatagagcctaaattttaaaattcgccggcggcgcctatcggcaccgcggcccccaaaaacctattttttcttaaaaaattagccagaatccctaaatttggtcatcttttagacaaaatctgtgcaatttattccaaaaggaattgattcgatgcgatacatcgactaaaggaatgtgtagccaaacactcattcataaaaattaattttttgtgagattttttgggagctaattcaaatcaaacccctgcccccgggggcgagtcatttggtcacccccgcccacgcgactctgacccccgccaaccccggttcccgcgaaaagccacccccgcccacaaggctcgaacc

SEQ ID NO: 39687 - DNA, 1013 bp, Heterodera glycines
  unsure (1)..(1013): unsure at all n locations
gagaaatttatacgttacaaatgctctcgagcatgatagaggggcggtgcgcaatcgccatttatttctcagagaatttttaaatttatcttatatcctagaaattgactatctcttattntgagaaattttatacgttacaaaagcgctcgagcgtgagagggagggcggtgcgcaatcgccatntaatttctcagagaatttttaaatttatcttatatccaagaaattgactatctcttattttgagaaattttatacgttacaaatgctctcgagcttgataggaagggcggtgcgcaatcgccatttaatttctcggagaatttttaaatttatcttatatccaagaaaaatgactatctcttattttgagaaattttatacgttacaaaagcgctcgagcgtgagagggagggcggtgcgcaatcgccatttaatttctcagagaatttttaaatttatcttatatccaagaaaaatgactatctcttattttgagaaatttaatacgttacaaatgctctcgagcatgataggaggggcggtgcgcaatcgccatttaatttctcagagaatttttaaatttatcttatatccaagaaaaatgactatctcttattttgagaaattttatacgttacaaaagcgctcgagcatgagagggagggcggtgcgcaatcgccatttaatttctcagagaatttttaaatttatcttatatccaagaaaaatgactatctcttattttgagaaattttatacgttacaaaagcgctcgagcgtgagagggagggcggtgcgcaatcgccatttaatttctcagagaatttttaaatttatcttatatccaagaaaaatgactatctcttattttgagaaattttatacgttacaaaagcgctcgagcgtgagagggagggcggtgcgcaatcgccatttaattctcagagaatttttaaatttatcttatattccaagaaaatgactatctcttattttgagaaatttta

SEQ ID NO: 39688 - DNA, 853 bp, Heterodera glycines
gccttaaatcaaaatgggaagaatgattaaaatttgaaaatttaattacaattgcctaccatttcggcatttgtcccattgttggcattggcaccgctgtcgctcatccccgctgccgccaccttaaaccaaaattggaaaattattgatcaaaattcagaaattaatcacaattacttaccccttcacaattggtccgattgttggcattggcactgtttgttccgccgttgttcaccgccgccgccaccttaaatcaaaagggaatattgatcaaaaattcaaaactttaatcacaattacttaccccttcatcattggtcccattgttggcattggcactcatttcacaactgttgatcacattatccagttccttaaaaacggaaaaaaaatttaattttgaattttttaaaaatttgagtaaacccactttattcgccgttcgctcatcttcattcaattcaacattactttcagcttgaacaccttaaatgtgagcgggaaattattacggtaatagttcgaattcgggttcggggttcgcaaaaatacctgtcgttttcgtcctcgtcgaacatttgtctaaaatgggaaagggaaaatttattttcgaaaatttatttttttattttttttaccgagtgccaggtgtttgccgctgttgtttctgtgcctcccggtgtgaaaatctgttgaaaaaaaatcgaaataattttggacataaaaaaaaagtaaacttttttaaacaattcgctggccactcttgctgcgattcgtttttcatgacaaggcgcaccaccagtgcgcctcgcaaagtttttttgcatctcaaaacaagaacaaaaattag

SEQ ID NO: 39689 - DNA, 1173 bp, Heterodera glycines
aatttgagccacaaatggaattaatgttttaacttttaaaattgattgacaattgtaatttattccattttgtataaaaaataagtttttttagaacttttcccatcccataaagaacattaaattttcattaatttttgatctctgctgaataaatagtactgaagtgatctgataaaaattttatttggttgaaatggaaaaaagaatattgccaacttccattttctattcgatgaccaattaatttttggcctcattacggttgaaattcaaaatgaatttgcgttttttgatggcatttgccattccgtcactttttcttttgggcggtgactcgcaaaatgccctgcagcgtcagatgcgatcggatggtggccgtgtccacgtcgtccggcagtttgtagctgcgcttgatctcgcggcttatcgagccgtgctcatccgaccgttcttcgtggtgacaatagacgaacagatggtcaccggccaaactgatctaagcggaggaaaaaaagaagaaaaaaatggtacaaaatattggatttattaaaccaattatttttaaatgcctcaatttcgtcgggtcgaaaaaaggccgcgtctaagccgacctcccagcggtcgtggccattgtcgacacgcacaacgccatccttgtgcttcaaatgggagagcatttagggacggagacaaatccggcattttagcagagcaatgggttctagtcggttttacgcgtcccatgacactttacgcgtcccatcatattttacgcgtcaaaaaatgtttttcgaaccgtcaatcggaaactttataccttccgaatagtctaattgttcttgtttgtatactttgatcatcgaaatgtgcaaaagcaactctaagcacacttaatgatgtcaacagaaattcaactaatataagaaaaaagtttacaaaagcctaagcttaggcctagtctaaccataagccattgttcgagttgcctgtgtataagttgtcatgataaccttaggtttaacaacgaaatctttagttaaaaactttactgaatacctgacaaaaaaaaagtttttctcttagttattaggacaactattataccatgagaccagggatggcacggaattccgaaaatttttggggcctcggaatgccatccccgccatg

SEQ ID NO: 39690 - DNA, 893 bp, Heterodera glycines
agggaaactgcgtacggctcattacaccagctataatttttttgaccttgacttcttacttggataactgtggtaattctaggagctaatacatgcaccaaagctccaatctccccagagcggagcgcatttgttcgccacaaaaccaagcgccctccgggcgtccagtgttgactcagaacaactaagctgatcgcacggtcttgtaccggcgacgtgtctttcaagtgtctgccttatcaactttcgatggtagtgtatctgactaccatggtgatgacgggtaacggaggataagggttcgactccggagaaggggcctgagaaatggccactacgtctaaggatggcagcaggcgcgcaaattacccactctcaacgcgaggaggtagtgacgagaaataacgagaccgatctcttatgaggccggtcatcggaatgggtacaatttaaaccctttaacgagtatctatgagagggcaagtctggtgccagcagccgcggtaattccagctctcaaaatgcatagaattattgctgcggttaaaaagctcgtagttggatctgtgctagccgtccggtgcacactttgtgtgttactggtttggttggcttttctgccggtctctccccggcgttggcctttaccggtcggcgtcggtgggctggcgagtttactttgaacaaatcagagtgcttcaaacaggcgtttcgcttgaatgttcgtgcatggaataatagaagaggatttcggtccgattttattggttttgctgaccgagataatggttaacagagacaaacggggccattcgtattgctacgtgagaggtgaaattcttggaccgtagcaagacggactacagcgaaagcatttggcaagaatgtcttca

SEQ ID NO: 39691 - DNA, 382 bp, Heterodera glycines
tccaggggcgtatctagaaatatttttctggtggggggggacccgacctgaagaccttcttttttttttgctatttaaccaataactttttttccactgctgggtaacaactgcactttttcactaaaaatgaccaaattttggccgttttaaggcaaaaaacttgtaaaaatagtggaaaatgtaggtccggcggtgccgataggcgccgccggaaaaaatttttggaaatttagagttgctacatttgttactgaaatcttcgcctatataaagcttttttttttttttcccccccccctaattttcgtttgggggggggaattcgaaaaaaattcactttatttgctggaaaatttttaaaaattttcatttcgggggg

SEQ ID NO: 39692 - DNA, 1197 bp, Heterodera glycines
aaaaaaatataaatattcaaaaatttttgaactattgaaaaaatatttattgtaaaaatccaaacacaaaaacaataaatattaaatgaatttcttttttccaattagcgcaccgatgccgaactaatttatcaaaaacatcggccaaaagtgagcttgcccgctttggctatgaggtcaaattcgacacagcaaaatgcggcagcaaatgcacaccggcgcagttcgtccatggccgatttgggaggtgcaaaaataaatttgtgattgattaaaatttttaacatttaaaaatatttatgtaaataattttaaacggagaaaatgaatgctttcagcaaattttaaaaacatttttgtaaatttttcaagacttggtaaaacaatgaagcaaaaaaaaaaaaattagacattcaaatttattaataaataatgctaaactaattttatctaatttgaatatttttttaattattaaacttaattactttttcgctcgaatgaaatcggttggccatgcaatgaaaacggcggcggaagatgagttacggtatgaaatcattcgatttgccgcccgaaccacagcacatggcattccgatggtaaaaatttattatttttagagaacagcaaaaaaaattaaaattttaaaattaaattttaaatttgaaataaataaaaacctgaaattctaaatttatcaaaatattatagaaaattaaagacaacgttcttaattttctggcaaatttgggcagtattttgaagcaaatttataaggacaaatcctagttctattaaatgcatacaatcaaagatttaaaagattaaaagatttattaacaaaattttaaggggttcctgaaaagccgagtttaaaatgaatttgaataaaattttaaggctttcaataaaacccgaattttcaggaaaatttaaaagaattatattgatttacttaaacagacactttcagtgaaaattatatttaaaaaaactttggaaatcaaataaaaactaaaggccgcgcatgccaccagaatggaacgcccaaatgaatgtggatggccatttctttggcattcggttggcattttttggctcaatgtgcacgggggtgctgcaaaaaatatggccgcagggaccaaatccccactgttcaggggaaaaggacgtaaaaaaaaatttaaaaaaatt

SEQ ID NO: 39693 - DNA, 776 bp, Heterodera glycines
ataattataatttaaatacaccaataagttaattagtaaaaaatggtaaaagaagaaattaaattattagtatgcacgaaatattaataagctaataagtcaatttcatttatccaagctgcagcaagatgcggcggatcagaagattaaaaaagataaccaaaatttaacaaacaaaatttagctttttacattgaatttaattaaaaaagcaactagacggctctgagggcatgcgtgccgagtttagagtgccgagcctagccgtttataaacggtgaaccgtcacggtctagaccgtcgcggttgttagtacagtagcagttaatggtgcgtggctggctgttcgtgcagcagcagctacaggaacatgcgtggcattcgcgtttaatttatttaaaaaatgatatttaattttaaaaaataataataaaaaaagcaattttttctcgctgggtggttgggagaatggggggcatcccttttttcgccgaatgtccgcaatttcataagccaatccaattggcctgattattttaaatattttttaatttaaattcaactgtttgccgacccgcaatgtcatgatcagttggatggctttgtggacaattcccaggcggggcaaacccacaaaatgttggcaccggagcatcgccaaaaaaaagaaagggccaaaaaagggaaaattggtgaaacaaatgaaagggaacaaaaaatttataatacccggagaaaatcttgccttggatgaaaaaaaaaaatttaaaaaattt

SEQ ID NO: 39694 - DNA, 1284 bp, Heterodera glycines
gaaaaaatactcataagaatcgacactaaattttcaagaatacatctatatgaaatgaaaaattttctcaaaattcatctaaaaaatttattaatttatttcatgacaaaattagattttaaaaattctttatttcaatactgatttgggttacttttggtgatttttgagtaaaatcttacgctcttacacctaaattttggcttttttagagcgtattttccattttaaatgcctatttttgagggtttttaggactaaaatatacctttttgcgatttttagagccgaaaaattgcatccctaatcattagggttggatttatatagttcaatattgataagatttcaaaaagctaaaatgaagagaaaaataggggcgaaacgacaacaaaaggacacctctgttttctaggcagaaactaattgagggtgtagcataaacaacaaagtaaattaccaagaatagttaatttttaattcctaagaaatcgaaattcgggtagccctttaaataaaaattaaaaaatttgtttttataaaaaaataatcttacaagaaatcgtctcgaaaaataatccaaaagtccagttacggatcaaaaagcaaaagactgtgtacatttgtaatttttaacttttggttttttgattatttttattttttaaaacttagtacgacttgttataggtccaaaaaaaaatatttatttttaatgattgttaataaaataataatctcaataatttaagatggaaattaaaaccaaatcaaactgtacaacttctaatactgtctacaatattaacaaaattgatgaagcgtaatttgaaattatttttaacaaactataacgccaattattaattaatgtgagaagtttcttgtttttatgttggcaattgaagtggaaaattctttcttaaggattcaggaaaacattaaattaacattaaagttctcatttttatgcattttgcaaatttgataaacccagttttgtcatttaaatgccaattaggttttaattgatgtgtgaatttttgttttttttatgcttgcacaaaggtgcatcgtcattccttcgcattggctgcccgtactgaatccgttggtctctgtgtcagtgactttttgtcgttttttagagaataaaagaataaaaaaaataggggaaaagcgacaaaaacgccctactttgtaggctaaaaaaaattagggtgagccttaataatactacaaattaccaagaataagtctgaatttttttcttaataaatcatg

SEQ ID NO: 39695 - DNA, 1050 bp, Heterodera glycines
gcgctccaccgtcacggttgtagctgatcatgaacttttttgccatgttgattaagtcaagctgttgttgctaaataaggcgagaggcttttttgataggtctgattgtcactaatcagcctattttgatcactattttttccctgacaagcccattgatcactaaactatttttgtcactgatcagcccactgatcactatttttgtcactgatcagcccattgatccactgcttttcgctaccttcttttgttgttgttcgcctcctgcttctacccgcatcttctgttgctgctgcttcccacgcttaatcatctgctgctgatcagatgccgctgctgctgctggcggcactatttgccaatcacccccggcggcacgcttactggccacaaaatggcgtgtcggtatcccaaacagtgccgggatggaaaagcgaatgtgtgccgtgggttttgtggtgccagaatttcccgcattttgttccagttcctgttagtaattaattactaattaattaatactaattagatccgcaataatttactgacgcctgctatactgaaatctttatgaacttttctgtatgcttttatggataattgcatccctcaaaaattgtctaattcctgaaattcgtaaattctaattagttaaatcaacccgggttttttttggcacaataattaattaattacctcgatggcggcttcttctctttggcggttgttttcctccagcatttgcttcaccgcacccgccaccattgcctgttcacgttgccactgatgagaaaagaaaaattattaattaggcaaaaaaaaacgcatgcatacagtaacccgagcaaaataaattattgctctacagtaactcaaataattactgctcgttcccggttaaataattagtggtcgttcaataatcccaccaaaataattagtgctcctacagtaaacccattaattagtattcgttcccgttaattaattcgtgctcatacaatagtaccacataataattagtgcccgtaacgcatacagtattcc

SEQ ID NO: 39696 - DNA, 920 bp, Heterodera glycines
ccccggtacaggactaacttaacctgaaaaaatgacaactctacccagattttaaatttttttagaaattctgagtttttaactgtttatttattttttgcaaaattaattcataaatattttttcagaaagggctctgaaacgcataaaattttatgtacaagttaaataaggctctctgatgcttttactatcaaaaagggagatgaataaaatttttaattgctttttaaacatgccaaaaagtttaggcttaaattaaaaaaattttcttcggttctagctctttcaataagtaataaaatcgtaccaaattttattggcatactccccggtacaggactaactttacctgaaaaaatgacaattgtaattgattttaaatttttttagaaattctgagtttttaactgtttatttattttttgcaaaattaattcataaatattttttcagaaagtgctctgaaacgcatcaaattttatgtacaagttaaataaggctctctgatgcttttactatcaaaaagggagatgaataaaatttttaattgctttttaaacatgccaaaaagtttaggcttaaattaaaaaaattttcttcggttctagctctttcaataagcaataaaatcgtaccaaattttattggcatactccccggtacaggactaacttaacctgaaaaaatgacaattgtaattgattttaaatttttttagaaattctgagtttttaactgtttatttattttttgcaaaattaatcataaatattttttcagaaaatgctctgaaacgcatcaaattttatgtacaagttaaataaggctctctgatgcttttactatcaaaaagggagatgaataaaatttgtaatttgctttttaacatgccaaaaaagttaggctttaattaaaaa

SEQ ID NO: 39697 - DNA, 934 bp, Heterodera glycines
atttgcaccccgcaatgtgcctggtattcggacgcatcctccagggaattgcgcgaggcggccgctcgcgaagtgcgcagagcactcaccggcgcaattcctgaagatttgaaggcatcgttcaagaataatgcttttaaaaaatctcattttatttatttttttaaatttttctcttttgttcaatgtaataagtagggatgatatttgtaattgctaaaaatctgccaaattagttagtttttagtttctaaaaaaaaaacccccaaaatagttgaattttatccaaaaagcaacaaaattaacaaaatcagtattgagataaataatttttaaaatcacaaattcttgttaacaaataaataaattttagagatgaatttttgagaaaatttctcatttcttaggggtgcatttttgaaaattttcgggtagatttttagaggtgttttttttgaaaaaaaatatgttttttttcgtgcgtttcaggccacgaggaactaaagaaaaataataatgaaaaactaaaaatcgtagccctagtaataagagatgctttgctaatttattgtaatttttaattgggttttaatataattaaactcttttttcgaaattccatttttaaaaaatgccaaattcaattttcgccgcttttcagaattgtgtgaaccgtgccgaactgatggctatgaaacggctgatcgccgttggccaactctccgctttgggctcctccgcctcggcgagtgctgctcctatgccttctctgtttgcggcccagcaacagtcttcaatgttggcacagaagcagcgcgtccaaatgccgtcgatggcatcgggcggtggcacggccaatttttcgtcgctggctcaccaggcgatgttcaaagaccatcatggaggagcagcacaaatggcacagatcccatta

SEQ ID NO: 39698 - DNA, 949 bp, Heterodera glycines
ccccgcgcccataagcctcgctttgtcctgcttcagcttcggtttgttggacacaggcaaatcgacgaagggaggcgtttcgaagccaaatgatttgcagacctttcaaaaaatgattctgtaaatttccttaatgtttcgggaaaactcacctgaacgaggtccaatgtgttcacattgtaaatctttttcagtgaatgtgagtcatacgcccgaatgtaaccccttaaacaatctgtaaaaacgaatcgacaatccgtagccaaagggcacaattttcaaattaggggggggggggaggaaaagcaaaatttaccgggagttaaaggaaaaccgtttgactgagaagatttcgccaaaataccagttgtactaggatttttgagtacaaatttaaaagtagtctcggatttctattattttcacgatccctatccgtttttgtccaaacgaaaagatggcggcttttccccaggctacggcattcgttgtagcccacttgtacgcctctcgggccgatttgttcaagtaataatttcgcgatatcacttcctccagttgaggttgaatattggccaatttattccacgagaattcgtactcattaagagtcactttcgctgcctgtcaataaaatttgttttttaaattttccattgccaactttgagaaagcgaaggaagccaagctcttccggcctcaaaatgagcagagcgtgtcctgtgcccgtgtcaccgcgcgccgtccttcccacccggtgaatgtactcacgaggctcatctggcggatcatactggcaaaaaatgggataaccaggcccataaccaaggagaggagaacgggcccaggaccccaactttatttttgaaaattgacccaagaatggcaaaaatatgcattttattttgtttattttggcaaagaacggctgcgaatttctgcttcttct

SEQ ID NO: 39699 - DNA, 951 bp, Heterodera glycines
tataaaacgtccaattaaaattaaattttaaaaatttaaaaacttttgcgatgcaatttttggaaataaaaataaaaatatgtgaagggaattttgttaatagatgaaaaattttaacaaatgttgtagtctttgaaacaaaaaaataaaattttaaaaataaatttaaatttaaatagacaaataaaaaaacatattaccttaagttaattaaaataaattaaaaaaacatattaccttaagttaattaaaataaattatctcaataaaattttatataaacagagaaattaacacaaattgagaattaaatttaaaaagaaataaaatcaatttaaaacaaattcaaccaaatcaacagtaacctgggaaatcgaaatgtgtgattaaatagaacaatcaggtgaaacataataatcaaaaatatttacaataatatttgtaatatctgatataaattcagtgattaatcaaaaacaaaagtaaaattaaatatgtaattatataaataaaaagaaaagaatctaaaatttatttaattatttaattatgcatagtttataatattagaagccattcaaaaaattgaataggaaaaggcaagctttaaaattttagacgacattaattcaaaattttagaataattttaaatatatctatgattagggcgagaaaaatgtttacaaagtgtttaaatttattttaatatatttttattaaattaaaatttttaaataaaaatatatatatgtgaaaattaatagacagtagcgagttactggacagattgtaatttacattaaactattaattcaagaaggtgcaaaaaaattactttaggacggactaaataataataatacaatagtaatcttcaaaattgattaaaaatggattatatcactgaaaaagataacctctgaaatattaaaagtttaaattttattaa

SEQ ID NO: 39700 - DNA, 841 bp, Heterodera glycines
  unsure (1)..(841): unsure at all n locations
cccccccccccccccccccccccccccccccctttttttttcttttttttttttttttttttttttttttttttttttttttttctcctagtcggtgcgtatagtctgcttcacgggggggcggggggggggggggggggggggggcggggggcggcggggcggggggaccccccctctccgccttttttttttttcttttttgttttgtttgtttgttttttttttttttaaaaaaaaaaaaaaaaaaaaaaagagaaccccaccccgcccgccctcttttttttttttttttttttttttttcctccccccccccccccccccccctctccgatcggagggcgggggggtggggggggggggggggggggggaagaaaaagcanngatttttttttttttttttttttttttttttttttttattaaaaaaaaaaaaaggggggggggggggggggggggggggggggggggggggccccccccccccccccaccctcccccccccccccccctttctcttttttttttttttttttttttttttttataaaaaaaaaaaaaaaaaaaaaaaaaaaaaggagaagaaagggaagagaagggagggggtgtggttttttttttgttttttttattttttatacataaaacaccacccacaacaaaaattttttatttttttttcctcccccccccccccccccccccccccccccccccccacacaacaaaaacaaaaaaaaaaaaaaaaaaaaaaaaagaggggggggggggtgggggggggggtgttttttttttttttttttttgtgagaggaaaaggaaaaaaaaaaaaaaaaaaa

SEQ ID NO: 39701 - DNA, 532 bp, Heterodera glycines
ccccccccccccccccccccccccccccccccccccccccccccccccccgccccccccgccccctcttttttataaaaaaaaaaaaaaaaaaaaaaaaaaaaaaaaaaaaaaaaaaaaaaaacaaaaaacaaccccccccccctcccccctctctttttaataattttatttatttaaattattattttattatatgtggagggggggcggggggcccgccccccccgccccccccccccccccccccctcttctctttgtggtgtgtggggggggggggggggggggggggcggcgccccccccccccccccccccccccacaccaccccccttttttttttttttttttttttttttttttttttttttatttatttaggggggggggggggggggggggggttttttttttttttttccccccccccccccccccccccccccccccccccaaaaaaaaaaaaaaaaaaaaaaaaaaaaaaaaaaatttttttttttttttttttttttttttttttttttttttttt

SEQ ID NO: 39702 - DNA, 926 bp, Heterodera glycines
tcgatttatgggtgtacaggatgtttgtcgaaaccccctcgtcaggcctttaagatagacctgccattgctattcccgcaaatatggagtctagtcagcccaatcgattgctattcgaatggtttggggtcattggcccaaacaaaagttgtgctgcttcttgcaaataagactgagccaactgtaaacagcaagccatccaaatgcttcaatgtaaaaaaatttacatttggatgcaacctttatttttcctcgcctctcttttcgaaaagaaaagctattagcaagcgtgtttggaccaattctaaaacaaatcggggtaattaatttaatctgactttataagataaatgggaatttaagcgaaggattcatgcaaaataatgatctatagaaattctcaaaaaagtagttcctcgcagattcgggaaccgtttctataaagctagagacatatgcgctaaccataaaaaagatgaatcattttttgaaaaatttatatagttcgactaaatttgctaatcgatttatggtgtacaggatgtttgtcgaaacataactcgtcaggcctttaagatagacctgccattgctattcctgcaaatatggagtctagtcagcccaatcgattgctattcgaatggtttggggtcattggcccaaacaaaagttctgctgcttcttgcaaataagacttagccaactgtaaacagcaagccatccaaatgcttcagtgtaaaaaaaattacatttggatgcaacctttatttttcctcgcctctcttttcgaaaagaaaatctattagcaagcgtgtttggaccaattctaaaacaaatcggggtaattaatttaatctgactttataagataaatgggaaatttagcgaaggattcatgcaatataataatctatagaaattctcaa

SEQ ID NO: 39703 - DNA, 243 bp, Heterodera glycines
cggtgtcatctatgttactagatcggggatcgatccccggtcggccgctcgagcaggacctgcagaagctagcttgatggggatcagattgtcgtttcccgccttcagtttaaactatcaagagagggaggtgggtggcggaagaagaaaagggtggggggagtatgagtatgatggtcaatatggagaaaaagaaagagtaattaccaaatttttttcaattcaaaaatgtagatgtccgca

SEQ ID NO: 39704 - DNA, 1200 bp, Heterodera glycines
  unsure (1)..(1200): unsure at all n locations
gggggggggggggttggggttttatttttattttttttttttttttttggggggggggaaaggggggggggggggggcgcccccccccccccccccccccgcgggggggggggggggggtgtttttttatatataaaaaaaaaaaaaagagggggggggcggccgcccctcccccccttttttttttttttttttttttggggggggggggggggggcccgcggggggggggttttttttctccccccccccttttttttttaaaaaaaaaaaaaaaaaccccccccccccccccccccccccccccctttttttgggggggggggggggatttttttttttttccccaaaaaaaaaaaaaaaatttttttttttttttttttttttaagaggaaaaaaaaaaacaaccccccctgntggggaaaaaaaaaaaaaaaaaaaaaaataaaaaagagaccctgtttgtttcccaacaaaaaaaaaaagggtccttttantatctactttnnntnccggggggncgccccccccccttttttgggggggtgttttaaaaaaccatttttttttgtttttttcgggggggtttcccccggggaattttttttgggagggggttttttttttttaaaaattttttttaangggnnnnnnnnnnnnnatttttttttttttttaaaaacttttggggggccaaattttaaaatccttaaatttggggcaaaaattttttttcctttttccgtcccacccttttaaaaattgaattccctttttttcaaaaaaaggaattttggaaaaaaatcggttaaaaaaaatttaatttggaataattttcatctttttccccaatttttcagtttcttcaagaggttttaccagccgaagaaaagattggcatttatcagnttcatgncanncngatttncgtggnaatttactctcaattattttacccatgaaantttcgagtcattggcgaatttggacattngggacaatttcgatggacatggaagaaatgtccgaatttgcaaaagaaccaatgaagagttacagattaagtgatgataccgtatacataaaggggttttcttggaaaatattggcacaaataaaagcgaagactaaaagcactgacaatgagaaatgtttggccattttcctttggtgcaatggcccgagggaaggtagaacaaa

SEQ ID NO: 39705 - DNA, 237 bp, Heterodera glycines
aaaaaaaaaaaaaaaacccccccccccccccccgcggggggggggggggggggggggggggggagaaaaaaaaaaaaaaaaaaaaaaaccccctttttttttttttttttttttttttaaaaaaaaaaaaaaaaaaaaaaaaaaaaaagggggggcggccccccccccctcctttttttttttttttttttttttttttcttttaaaaaaaaaaaaaaaaaaaaaaaaaaaaaaaaa

SEQ ID NO: 39706 - DNA, 852 bp, Heterodera glycines
tgatgttaaattatattatacacatgaaaacgatgaccattcgaatcagttggataaagcaattgaggctatggaaaaatggtcaaaaataaatgggttagaaatttcaactgaaaaatgttttgttttatatttagggaaaaataatatgaaaaaagaatattttattaactcacaaaggatttcagaatcggataatgttcgtgacttgggaattataattgactcgaaactgaatttttcagaacacataagcaaaattatacgaaacgcatatcttagaattttctaaattttgagagtgttgaaaagcagggaaataaaaactctaacagcagcctataaaacttttgtacgacctcaattagaatacgctaccgaagtttggaaccctaatttaaaaaaagatatagacaaaattgagcgggtacaaaaattttttacaagaaaagcacttagaaaatgtggttttgtgtacaaaaaatatggggaaagactaaaaatcacgggtttacacaaattggaagaaagaagaaaaatcaatgatttaacaacagctttttaaataatcaaagggttcaccagcctcgatgctgggaaaagtttctttttctcagaaaggctcaggaggcctttatttttgcgagtaaagcgccacacggccaaaacacaaaataatttttttcataggatagtaagaaactggaataaccttccagtggtagcggtgcaaattaataaggcaaaggaattcaggggtttactaaaagcaatgagttctgagtaggattttccatgttgccatatttacactatatttttatcacctgtgaatttttaacatttgattta

SEQ ID NO: 39707 - DNA, 380 bp, Heterodera glycines
  unsure (1)..(380): unsure at all n locations
ggggggggggggcgccccccccccctcttttttttttttttttttttttttattttttttttttttctttcccccacacacaacaaaaaaaaaaacaaaaaaaaaataaaaattttttttttttttttttttttttttnttttgtttgttttttttggttggaagcaaaaaaaccaaaaaaaaaaaaaaagaaaaaaaaaaaaaaaaaaaaaaaaaaaagaagaaggggggggggggggcggaggggggggggggcgggtgggggttttttttttttcttttttttttttttttttttttttttttttttttttttttctaccccccccccccccccccacaccaaaaaaaaaaaaaaaaaaaaaaaaaaaagaanaaaa

SEQ ID NO: 39708 - DNA, 780 bp, Heterodera glycines
catctggagtgcctaaaataacttgcaaataaaatcggttcggggggaatgccccgaaaacaaaaaatcgattttttcaagtgtcctttggggtactcaaacaattatggggagcaaaaatccaacgcagaattaaagtacaggctatagggaagctattcccgagggattcggtctccccataaatctgggcgcatcggttcggggggaatgccccgaaaacaaaaaatcgattttttcaagtgtcctttggggtactcaaacaattatggggagcaaaaatccaacgcagaattaaagtacaggctatagggaagctattcccgaaggattcggtctccccataaatctgggcgcatcggttcggggggactgccccgaaaacaaaaaaatcgattttttcaagtgtccgtttggggtactcaaacaattatggggagcaaaaatccaaagcagaattaaagtacaggctatagggaagctattcccgaaggattcggcctccccataaatctgggcgcatcggttcggggggactgccccgaaaacaaaaaaatcgattttttcaagtgtccgtttggggtactcaaacaattattaaaaatttttagatttttattcatctccctttttgatagtgaaagcatctgagtgcctaaaataacttgtaaataaaatttggtgcgtttcagagcagtttgtgaaaaaatatttatgaattaattatgcaaaaaacaaataaataatgaactctcttccttaataattttcctgcaccga

SEQ ID NO: 39709 - DNA, 910 bp, Heterodera glycines
ttttaatataagcaatgaaaaggaaaatcccttcggatgaggatgtaataatcagctgaaagcggattaattacgcatttttttattaagggatgatttcaaaattaaaaaaaattatttaagtagcattgaacagcgtacaatttttggtgataaggtcaaaaacatccgagtgatgattgttctgtttgattgttaatcggctcttcgatttcactttttgttcgtccgtcattctcttaatttcttcttgtcttttcatgttcgtttatttgtcttttttttttgttcggagtttgtctttgtcttttaattaagtagggaatttcgaattaatttataattttgaatttattattgctgaaccctcttattctcattgaaaaaatgacaattacgatttacacagttagattaacaaaagaaatcataagttctatatgctcatcagcagaaaatctgcaaagccaaagctacaaccaaatcgatttaatcaatgactcatctgatatactgtatgatcatgtcaagaacaaatgtcgaagaagtctcacccattctactataagcgcatcatcatgcagaagacgaacaagacgtgatgacggtgggccatgcatgttccccttctgattcaagcagtgaataggtcacgttttacgcgctccaaaaattcccggtttttcagcccgaaaaggtcccggtcccgctcaactctaattttaagttgtaaacgcgttcaaagtttgaccttataatttcttaacggagcatataagtaggtagatttttttaaaaagtggcttttttatgattttgggaaattgtttcaaaagctcttttaaatttgtttgattaaaatcccttttccactattaaattggctttaggaacttttccgataaggaaa

SEQ ID NO: 39710 - DNA, 438 bp, Heterodera glycines
ggacgacgatggcacaactgagtatgaggtcacatcactggccctgtacgacaaggcgccatgtctcgtctgcggtgctgtgaggtattggtttggataccaatcatgcgatgagacgttcctcaaggatgaggagctgctcgaccacgtaaaattagcgagaacggggatttaagaactgaaatgcattttatagattgggtataccctcgctcgtctgatggaagctgtgtatacccatgcagctgttggtggtgtcatcgacatcgagagggcccgcaaaatgtggggaaattggcgataaatgaacaagtaatagacaaaaaaattttagcgtcatcgcctctgtggacgtgcacgcagaggattttgctttgtttgggttgattggggaagaaaggttgcccttggtaatgatgagtcatgacatgtcaacag

SEQ ID NO: 39711 - DNA, 910 bp, Heterodera glycines
acaattgcgactgtgtttaggtttttttttattggctcgacggaaattgcattggacaagggattttaatagtcggcaatcaaatttttcttctttttttttgcgtattcacagacagaggagagagagagtaaggcagctttagtaaaatcgaattttattacattttactgttggatctttgttaaaactcttgggtttcctttattacgggtgcaataccactcatttttggtttttaacaaagcggcgctgaacatcggctcaatgatcaactccattgtacgcgtccgaggccatggagccgaatgtttggttggtgagccaaaacggatgcataaaacaatgagaattatgcctgcaacttttaggtggactccaagttccaacaaggcattcagacgtgctttttcgccactttggacggctcttttggctacgttcgaccattgaccgagaaaggcaatgatcgcaatttctaattttaatgtattttatttttgcaaacattttaagtattccgtcgcctacacatgcttcaacaggtacaccaacataaaaaaattggctgcaacatcggcttttaaattaactttattttgctttttaggtgatgaatttgcacgtgccacaacctggcgggtgaatccgcgtggctcaagagcaggtataatttgaaaaataataattgtcgaatcgcattttatctatttgtgtagcacggcctcagcgtaccggcacaaatcagcaaatttcgttggccaaaaacattgtggacggcctattagtgatgcaatatttgtatttgagcgtccaggacaagacggatttggcacggaagttgggcaccagtcgttaccaaattattgatggtataatttttttttaattttcgcgaatttgcggaaaa

SEQ ID NO: 39712 - DNA, 1328 bp, Heterodera glycines
  unsure (1)..(1328): unsure at all n locations
tttttttttttttttttttttttttttttttttttttttttttttttttttttttttgttggttccgcccngctaaaaaaaaaaaaaagaaaaaaaagaaaaaaaaacaaacaacaaacctcccttcccttcttcctttcttcttaaataaaaaaaaaaagaaaaaaaaaaaaagaaagaagaaaaaagaaggaggggggggcgccgcccccccccccccccccccccctcctttttaatttattttggggggggggggcggccccccccccccccccccccccccccgggggggggggggtggggggggggggggggggggaggagaaaaacaaaaaaaaaaaaaaaaaaaaaatatgtttttttttttttttttttttttttttttttttttttttttataaaaaaaaccacccccgcgccggcgcggggggggcggggggggggggaggaaaaaaaaaaaaaaataatatttttttttacttttttttttttttattggaggagaagaaaaaaaaaaaaaattatttttgcggcccctttttttttttttcttttcccccccccccccgcgggggggggggggggggggggagaaaacaccccacacccttttttttttttttttttttttggggcgccgcctttttctcaaaaaaaaaatttttttttttccccccccccacctttcctccgccgagggggagagaaagttaagggggggccccaaaaaaagagggtctttttaaaagggggtttttaaaaaatttttttccccgagataaaaaaaaaaaaaggcccgccgcggggggggtgtggccacctgggggagggggacccaaaaaatttccctaaatttttttttcaaaagggggggaaaggccaaaattttgaaagcccccttgatatttttcccctggcccccccgttgaaagggggggattggaaacccaatgccaaccttattttttaaattttggcccgcatttttaccaaaaacgtgttttaggccgcagtaactcggctcagagtgaagattaagggacgccaaaagagacgatttaaaagcgattcgaaaattctatcgactgatataatancgatgcagtcgcggcgttgacaactgagatggaaccaaaagttccataatatctttccataaggctggaaaggcagaatttgaatggccagtcgatatttacactgagcacccgttgaagcgggtgatgcgaagccatagcaaactgtatttttaaattctggccgcaattctaccaaaaacgtgttaaagacgcagtaactcggctcagagtgaagattaagggacg

SEQ ID NO: 39713 - DNA, 1209 bp, Heterodera glycines
  unsure (1)..(1209): unsure at all n locations
gggcgcggagagcaatggccattctattatacagggaatttttaaaatttattctctatgccagaaaaatggttatcttcttttttgtgagaaattttgtaccatacaaatgttcccagcatgggcagaggggcgcggagagcaatggccattctattctacagggaatttttaaatttattctctatgccagaaaaatggttatctcttttttgcgagaaattttgtaccatacaaatgttcccagcatgggcagaggggcgcggagagcaatggccattctattctacagggaatttttaaatttattctctatgccagaaaaatggttatctcttttttgtgagaaattttgtaccatacaaatgttcccagcatgggcagaggggcgcggagagcaatggccattctattctacagggaatttttaaatttattctctatgccagaaaaatggttatctcttttttgcgagaaattttgtaccatacaaatgttcccagcatgggcagaggggcgcggagagcaatggccattctattctacagggaatttttaaatttattctctatgccagaaaaatggttatcttttttttgtgagaaattttgtaccataaaaatgttcctagcatgggcagaggggcgcggagagcaatggccattctattctacagggaatttttaaatttattctctatgccagaaaaatggttatctcttttttgtgagaaattttgtaccatacaaatgttcccagcatgggcagaggggcgcggagagcaatggccattctattctacagggaatttttaaatttattctctatgggcgcggagagcaatggccattctattctacagggaatttttaaatttattctctatgccagaaaaatggttatctcttttttgcgagaaattttgtaccatacaaatgttcccagcatgggcagcgggngcgcggagagcaatggccattctnattctacagggaatttttanatttattctctatgccaganaaatgggttatctcttttttgtgagaaattttgtaccatacaaatgttcccagcatgggcagagggggcgcggagagcaatggccattctattctacagggaaatttttaaatttattctctatgccagaaaaatggggtatctcttttttgcgagaaattttgtaccatacaaatggtcccagca

SEQ ID NO: 39714 - DNA, 814 bp, Heterodera glycines
ttagagaccggaactttgaaatgaacgggaccgggaacttggtgatggaccggaaacggagcattcaacagaaaaataccgcggatcgcgcaccgcggattcaatttcccgcggtcgcggatcgcgcaaaaaaattgccgcgaatcgcgcatttaaaaactcaaaattttccaattttttaagattctctccctcccccttcccttatttgtgagggggtttaaaaataaatcttttgaatgcccggaggcgttattgttttgttttggattaaaacaaacgaatccaatccataaggcggatttttaaagaatatttatttttcttttgacacaaaaaatgtgaaaaaattaattttcagtgcagccgagaagcaccgcactgaacaaacgcagcgggaggatcacaatgaaaattgaaaatgtttttgaatttgctcgagagaataagcgtcgctacagcgatgcagtgaacatccggggattttcatggagaatatgtgcagaaattcaaacaacaatggatgacgggaataaaaacaaaaaatgtttgggaattttcctccattgcgaagaaccggcaaataagggtgaggaaagaaaaaaattgtttctatgtaattaaaaaagaagagtgccacggggaccggaacctggtagcggacaactgagtaccaaggtcccggttttgaccgggactagtcccggttttttcccggttttcccagccaaaaattcccggtttttcaacccgaaaaggtcccggggctctaatgcactttatgagtccaatcgacttttatgagtccaatcaa

SEQ ID NO: 39715 - DNA, 579 bp, Heterodera glycines
aagttaaaaaaaaattggcgattttgtgctcaagccgactccaaccgaatgcaaccgctggcggggagcatggcgatcgcgttagcgatggcacatgagggcgtggccattgccaggccaatgcccatttcagggaccatgaaccctttttagggacatgggcccacattctgtccttatggccattagccacaaggacaaacatgccactggcgcttattgggcgacagcgactatttcagctacacgtcttatcagacgcgtagccaaatctggctccgcacccccaggcaagggaaatgcgtcgcaattgtcgctactcgctaagcgagcagcgagcaaacgcagccggccacgaggaccaaccgcgagcagcgggaaacggcgtcagcgagcaatcgcacagcgtcgacagcaatcgtctttctttatatatgatggaaaataaatgctctatttttcgatggtatataaaataggcgaggaatgagtggcagcggggcgcactgttatgcactatttcccgcgctgctctcgtttcttttctgaccaataaagcaaagttgaatgtactatttc

SEQ ID NO: 39716 - DNA, 933 bp, Heterodera glycines
tagtgctttattcacgctacaacagaagacaaaagttggtgtccaattcccggtagggatataatagtgactttcagagatagccattttttgtcaataactatttttcgtgcgttttcaaacacactattagtgctttattcacgctacaacagaagacaaaagttggtgtccaattcccggtagggatttaatagtgactttcagagatagccattttttgtcaataactatttttcgtgcgttttcaaacacactattagtgctttattcagcgctacaacagaagacaaaagttggtgtccaattcccggtagggatttaatcgtgactttcagagatagccattttttgtcaataactatttttcgtgcgttttcaaacacactactttcagagatagccattttttcaataactatttttcgtgcgttttcaaacacacaattagtgctttattcacgctacaacagaagacaaaagttggtgtccaattcccggtagggatttaatagtgactttcagagatagccattttttgtcaagaactatttttcatgcgttttcaaacacactattagtgctttattcagcgctacaacaaaagacaaaagttggtgaccaattcacggtagggatttaatcgtgactttcagagatagccattttttgtcaataactatttttcgtgcgttttcaaacacactattagtgttttattcagcgctacaacagaagacaaaagttgtgtccaattcccggtagggatttaatcgtgactttcagagatagccattttttgtcaataactatttttcgtgcgttttcaaacacactattagtgctttattcagcgctacaacagaatacaattggtggtgtccaattcccggtagggatttaatagtgactttcagagatagccattttttg

SEQ ID NO: 39717 - DNA, 1662 bp, Heterodera glycines
  unsure (1)..(1662): unsure at all n locations
ttgaaaggctcattaaaaaatgaaaaaagaatagtttaaaacttaaaatgattaattaaataataattttttatttgcttttacaaaataataaatttgcgtttttgaaattttgaaatattaaaaaaaaaatttttctaatgatgtttacgcttcaacgccggtgacgggtccgagttttggcgcttcagtcgattcatctcctgctgcagtaggcgctccggacgcgtcagcagcgtcaccgttgcgctgctttcagtgccgtccggtgccttcgcgtacggcgtttgttgctgctgttgttgcgacgctgcacgcactggtggacgcggactgccgcgtggcatcgtgcgaaatgtgcgtcgcgcagcgctaccggcgctactgcagccgcccgcactgcgcgtctcgttgcctcccgccgagcgcatgcttgttcggtattcgactggtgcaacgtgcgtcagcggcgcatcgtcgtccagcggttcaatgctgccgcccactgtcggcgacttcaaagagcgtggtaatttatttacaattaattaatagggttaagagtttggggcgggaaaacgcttttgaaatttgttttcgaccttgttcattgttatcagaatgtgttggaactttgcaggacaatactttgacataagggctaccagctcgaaaaagttcaaattttgtaattaagtaaaaattaaaaaaaaaaattaagttttttgtgaaacttgaaaaactggcaaaaattctgattgttttcaaatcattctgacaacaactgaatatatacataaaagctaggaaatcaatttttttttcaagcccgagaaattttcgtgccccaaattcttaaccctattaatttaatggttaatttaatttttaatttaattatgtcataattttgtaaaaaaaaacatatttctcaccggcgtttcctcatttaaactgccaaattttttgattttggccacattattattatcattgttgctgttgtgattttggataataaaaatgttgggagatgcagaatttttgtctttcatcaattatttaatttattttttatctaaaattaaaaaaataaatatttaataaaaaataattatcaataaatgagaaagaatttattttatttattttacgatggaaataattttaagccaacaattaataaatttctccgattatttataaagtaaattcaaggatagaaaataaaaagtttagaaaaaataaaattatattttttattacatttttaatgtttaaaaattcattttagtaaagaaatctaactataattataatttttttaacatatcaattcagggtagtgaaaaaattgttacaacaatttttttttagagcttggtacccgaaaatcgcataagttttgtgcttggccaatgaaataaatgtaaggcaattggcgcataaattaggggcttcatgtccacaataattagtcgcattattaccgcttaggggagcaattacgcagcgaaaaaattgatttgaagtgaaatgtggaaagtttttaacaattaatgaaattaaaaaatttcttaaaaaatttcttataaatcacgataaaaaaataaatacattataattacatatattatcacccgattgaattgaatntcactg

SEQ ID NO: 39718 - DNA, 843 bp, Heterodera glycines
cgaaagctttttgtaaaacggccaacaaacaaaaaaataatttatattaagtgaaatcttaaaaacatattttaaatttatcaataaaaatcaacctaggcttttgttagcaaaagttatattttttataaaaaaaataataaaaattggtcaacatctacatatttgagattttaacgtaaccatataattgtttaggtattataaaaaacctattattgagatatttttaaaaaggcgtttaaaaaaaatttgcctattgtgcctatttgaggggtttaatacatattttgcgggatttttttcctttgtgcctattttgcgagaaaaaatattttttataaaattaggtttttacttattaaatattaactgacaaatgaaataatgttgtcagataagaaatgtcgatcaagttattaatttttatgaaaaacaaacctttgctaacaaataaacctaggttgatttttatgcaaaaattaaattgataaatttttaactacacccgctacagcacgtcttctatccaatatggagatccagatttttgggtatttaaaaattgaaaaatatattttatttaactcaacaattcatttaggtcgtacaccctcttccagaaataacttccaaaccagtattattttttaaatttattaaaaagttttttcttataattatgttaaagataacataaaaaagttgtggaaaatgagattctttagagatcattagagattgatattagaactcgttttgagcggtttttaaggagacaattctaaagactttctggaaaaccgaaaagcaccaaatacaatttctccttcaaaaatattt

SEQ ID NO: 39719 - DNA, 924 bp, Heterodera glycines
  unsure (1)..(924): unsure at all n locations
ttaatagaaattacatttaaattgcattaaaaattccattatttcattatattatacaattcttcttgtgattagaatcattttacttgctgagcatcgcttggaacagcttatttggaaatgatcgtcctccgaatgataaaagtgtctttagccccgggtcgtattccttaaaaattaatttaatatttttatgctaattaattttaaccttgcctttaatgaagtaaaccgtccataatatcccttgggatactctgaagtcattgcggtgtccgagggatcataggctctaaactgtcgaatatgaacatttatgataattgttttaaggaattattaaacattcgtaattttatttggatttgttttaagtcttttttttttgttttatttgtgattaaaaatttttgcaaattaatttaaagaggcgaattaattatccgggttttttcaaatgtcagggctcaataattaataatgccacttaattaattggtattatggtaattgactttgcgctaaaatcttcgttcatccacccgaaggagtagaaaaggtgcgtgcacagtccggggatgtactgctcgggctcgaacttggcctgcccctctctgaacacggcccaactcgcgtagtaacaggcgcggacaaagtcggcggaagagacgcccgctgaagcaaaaagtgggaatcaattaaaataaaactaattaaatattatttaaaaaacctaaaataaaagttgccgtggcaatgaaaaatattttaatcgaaaaataggcgataatttttgaagacattaattagggcaaataaattaattaaatctctgaatattatgattattacaatttgataaaaataacattgggcaattcaattatcaccgnaattttttaaaaatgcaaagtcaataatggg

SEQ ID NO: 39720 - DNA, 1451 bp, Heterodera glycines
  unsure (1)..(1451): unsure at all n locations
aaagggcgattaagatttttcgaatgggtcataaaaagagatcggaatcacatctgttaatggtcaataaatttgactattttttgcttttcaaaaatgctttttttcggcgcaattttttcaaaaactagaaacaaagaggtccgtctatgccgataggcgccgtccgaattttttttttttgaaaatttttatcaataattaactgaatttgaccaaaaaatgacaaaatgtcacaccttttgactcaattctacaggattaatgtctatccagtggtgtcgatagacgccgccgggaaatttttttgcaaattctaggtgaaatttgagatgaaaattgaatttattttgattgattttatcataaatttattcaaaaattttggcattccgtcttttaaaattttcaaagaatgtatgcggatcctgccggatcccgcacaaaaatcaaatttgcggatcctgttgcaggattggaattaattttttgccggaccggatccggccggattaatcctgcattttccaaaaaatgcaggattgcggacttgggatcctgcctgcaaaatcctgcgcaggatccggtcctgctccgggctctagtgttaatgttatatatattttttttaaataatacaaaatgctcaaattctaagattttaacccaaaaagaaacattttacgatgatttttttttccaacattttttcccgtaagtgctttcaatttttgaatttggcaccaatcaacaaaaaaatcgatagaataacaaaagatacactgaccaacaatttcattatgttatagccaattgaatcatcaaaatttaaaacatttaaatttgatgtcatttttccattatttttttattagtattctcaaaattttccaattttttcggaaaatttttcagtctttaatgaaaaaagacccgcatttttaaaaaataatctagggttaactatttaacttacgttggttgacttctagcagttcgaggaaaaaatatgattttgatggttttcgtatttttcgcaaatcaaaaattttgatcaaaaaatattaattatttttaaattgcttaaaaacccagctaatgttctaccactaaaaatggattgatgaaattaaataaaattaatattatttcaaattttaatcattcacgaacaaagaaaaacaaggattaacaaaaaggcatttacatattattgaacaaaaataagtgctaacaaaaatggctgaaggcggtgccattttnggaattttggctacaaagttttttataaaaatttttttacagattttatagaaaattatgaaaaagaaccataaagaaaaaaacctaaaggcggtaaaccaattaaaatcatttgtaattggtaaatttagagtaaactgcacctttgaaagagttactgcacctttgacttcataatataatagtcg

SEQ ID NO: 39721 - DNA, 685 bp, Heterodera glycines
  unsure (1)..(685): unsure at all n locations
ttgtgctcncagtgcaaataagtttatttattatttagttatcagaacgccaaaactttgcaaaacttaaattttttagagagttttcccttgtaaaaatagaagagccgatctcgagttaaaaacttagttttctcaaaataaacttggaatcgctagagggggtcaaaatatgggattatgcaaaatttcaagaaaatcggtgcatagggaaaaattttttagcatagcaaatatttaaataattttaattaatttaagccaagtccacaatttaaggccaaaccaaataaaatttacaatattctccagaattttcccttcaaaatgagcataaaatggttttatttgctctagtattcacaaagttataagctaaaaaaaaattcataaaattgtcaatgctgtacgtaaccaacgcgttttgaatatgattttttattgacacgaaaacttttattaataaaaaaataattctgccttcttctttaaaaaaagaaatttaaattaacacacaacataaggaggacttgaacctgagacccctttttgttgactaactcacagaccactaagatgaaaaaaccaacttaattgtacttggagcccaaaattgactcgccgtgttaactaaaaatatgagatgaaactttttggagattgtttaggcgtattgttagtcaaa

SEQ ID NO: 39722 - DNA, 892 bp, Heterodera glycines
ggaaaaaaatccccggaaggaggagaattttaattaaatccattccttcgggggggaccgtgccgggtgccgcggggtaagcagtgctggttcgttttcatcacggcaccgaaccttttggctagtcagcaatcgttgcttaacttgccagatcggacgggtgcgcatgattccactgttccaagcaccccaccaaaagcaaaacgatataaccaaaatataaggaaaaatttttaaaaaatttttttctccatcttcctttttgatactaaagcatcagagtgctaaaattaagttgtaaataaaatttggtgcgctttagagcactttctgaaaaaaatatttatgaaacaaaaaaatcgataaatctgggcgcatcggttcggggggactgccccgaaaacaaaaaaatcgattttttcaagtgtccgtttggggtactcaaacaattatggggagcaaaaatccaacgcagaattaaagtacaggctatagggaagctattcccgaatgattcggtctccccataaatctgggcgcatcggttcggggggactgccccgaaaacaaaaaaatcgattttttcaagtgtccgtttggggtactcaaacaattatggggagcattcatgcaacgaagaactacaatacaggctactcgctgactattcccgaaggattcggtctccccattaatatgggcgcataggttcggggggactgcccctaaaccattataaatcgattttttctagtgtccgtttggggtactgaaacaattatggccaccacaaattcaacgcagaattaaaaaacagggtatatggatgatattacggaaggattcagtctccgcattgatctgggcgcatcggctcgagtggactgccccg

SEQ ID NO: 39723 - DNA, 783 bp, Heterodera glycines
cttaatcgcttagaaaatgcttttaatatcttttaaacatatatagatttcgaatgatatcattgtttggtcagatcaccgctgaccggcagattttgaattggaaggcaattacaaatcaatctttatttactacaaagggggacgacatttccaggggctccctatcattcgtcactgaaactaaatttaaaaaaatttttggcttaatttcaataaaaattatctttaaagtactaattggtttaaaattctataaaaattgattttgggtaatttaaggtctttccctctaatgccatttggtggcgccttttcataagcagcaaagaaatgttaccaacgctgaaattctttaagcacctcgtttaactaatttcttgatgaatgcatctgtatgatccctgatcttttgttgaagttgaatccaattggttcttttatgaaaaaaaccgaaacttaagtccgcaagttgctggaaagttgatggcaagtatataaaatataaaacaaagattttttaatgttaaactaatattgcgatcacacatagatccaaatacttttgtacattggcgtgtaatttttataagcttacttctattttggtgctttgctttatgtgacgtttcattttgcgcttttcgcgaaatgacttagcaccctctgaattagacctttcgagtggggctgaaaaatagagcactccgggggttctaattcagttcggcgttgcactgttgacggttattggagttgatcggggctcactcgagaaatagg

SEQ ID NO: 39724 - DNA, 1074 bp, Heterodera glycines
agaagaatccccgaaggagagaaggtgctttaatccattccttcgggggaccggtaccgggtaccgcggggtaagcagtgctggttcgtttcatcacggcgccgaaccttttggctagtcagcaatcgtggcttaacttgccagatcggacgggtgcgcatgattccactgttccaagccccccaccaaaagcaaaacgatataaccaaaatataaggaaaaattttttaaaaaattttttctccatcttcctttttgatactaaagcatcagagtgctaaaattaagttgtaaataaaatttggtgcgctttagagcactttctgaaaaaaatatttatgaaacaaaaaaatcgattttttcaagtgtccgtttggggtactcaaacatttatggggagcaaaaatccaacgcagaattaaagtacaggctatagggaagctattcccgaaggattcggtctccccataaatctgggcgcatcggttcggggggactgccccgaaaacaaaaaaatcgattttttcaagtgtccgtttggggtactcaaacaattatggggagcaaaaatccaacgcagaattaaagtacaggctatagggaagctattccggaaggattcggtctccccataaatctgggcgcatcggttcggggggactgccccgaaaacaaaaaaatcgattttttcaagtgtccgtttggggtactcaaacaattatggggagcaaaaatccaacgcagaattaaagtacaggctatagggaagctattcccgaaggattcggtctccccataaatctgggcgcatcggttcggggggactgccccgaaaacaaaaaaatcgattttttcaagtgtccgtttggggtactcaaacatttatggggagcaaaaatccaacgcagaattaaagtacagactatagggaagctattcccgaaggattcggtctccccataaatctgggcgcatcggttcggggggactgcccagaaaacaaaaaaatcgattttttcaagtgtccgtttggggtactcaaacaattatggggagcaaaaatccaacgcagaa

SEQ ID NO: 39725 - DNA, 1055 bp, Heterodera glycines
gttttttgtcaattctttgcctgggttttcttctgtactgaataaatgtaatttgaacttttcgtgccgtttgtcttcaatcgctttcttcaaatcgtccaattccttctcattctgcagtttcggctcacatggatccattttgaaaaattttgctaaatttttcccaaatttagcattgaattcgtcatcgaaataaaaagttgaaatttggtttaatgccttcagcacgccaattaaactttcggccttttcattgacaagaaactccggcttcactacggttttcttctgtgccgtctggaataagtattcatataaaatgtccacatattgtcgaaatctgtggcattctttttgctcattctggtcaaattcttttccaattttttcacatttccaatgatttcgcagcgcaaacagaaagccaagatgagcttggtacttttggatcaaatgctttttcaaatcaaaattgtggaaatttgtcaacggtttcggataaaaattgaccaattctttttctttcttataagtttcatatatttcatcaaaaaatgtctcgcctttcacaaattcgatgaatgctttgtcttcattttgctataaaatatataaaaaaaagttttgcttttaattaaaaacatcaaatatttatatgatgtttaaaaatcccgaaaaaaactaattttattaaacagaattaaattttaataatatttggcacataaatacaaaactcacaggcaatggatttccacttgaaatgggtagtaataaagaataagaaatgattatcgaagaaattgtagcagcaaaataactcattggaatacgctaaatgctttttgttaattggaactaatttcgcatccctaaagattgattgttctctggtcatttttctaaaaaattttcgtttttcacttattaaatatttttggcatttttcaattttttaagtgaaagcttacaaatcaaagaattggaatttttggtacaaaatctgttaactgatctgagcaaacaacaaagaaattcccaccggaactctg

SEQ ID NO: 39726 - DNA, 1381 bp, Heterodera glycines
agccccagggcattttcccggaattgcgcaaacaggaatgccaatgagtacgcgccgctgttggcacgggtcgatggcgctgtacaaacggtctgttgaaacatggcaacggcaaaacggaggagcagcgggactgggacttggagcagagtgagtgagtgggtcaccatccaaattatttacaaaacaattcaatgcgaattacaaatagtggactgtgttcttaggtcccgtatatttcatatatatgtattttttaatttcaattgccgaataaaccctttttatgcggtttttatacgaactcgacctcaactcggctgcctgtgtgctgttgcgcggtctcccattgtgcacggaccaatcggatcgcgaggcgggggttagcccattttaaaacggaattattttttgaaatgcaatttgttcataccgtcaaaggagtggtactatcacttcttggaagcctgtgacacggacccacggacgcggccgttgctccgttacattgacccgtactatgagaccgacattggagagtgtctcgattttatggagagcatattggagccgtgatcattttccccatgcttatagaaagatggcagcattcaatttttcgctcctactttgtgttccttcacagcatggtccgcttccgcacgctcaatttgctcgttcaactgttccacttggcgctcaagttctgcccgaacttcggtcaatgtgccataattatgcaacagctcctctatcaatcgctccacactgtccaaatcgtcgacatcggcacaagcgataccatcatcagctttggtggtggaggacaacaaaatttggttgaacggtgccggaattggacggccaatgatggaagcaacaaatttgtgcaccgattggcggactgtggtcagctctagctcaagctgttgcactcgttcattcgcttcacgtttcaatgcttggaccgcttcaaattgttgtgcatggatttggagctgttcagctgccaacgctgtcgcatcattttcaacatcattcggttgaatttgttgctgctgctgttgatcagattgatcaccagcagtgttcgacagagttgcacaatcagcaacgttagttggagacgatgaatcgatgggaccgctactgtcgtcttccaggttgagtacggtagaggaaatgcactgcattgattctgctgtgaacaaatcgtaatgtaaattacttgacgtaggaacactgaaaaggtggtgagaccggatttcggcatattttgaataattcgagatttggttggcaataaaaacgccaatttacagggaatctaaaatttccgaaatttttctttattttttttgttaaaacaaaatgggatttt

SEQ ID NO: 39727 - DNA, 1481 bp, Heterodera glycines
acctcccggttacaccgcaaagttcaaacatggtgttgttgacaaagatgtccgcgaattttctatcacaaagggtggacattctctgagcatggactcttacgtggaagctgatgggaccaccaaagattggactttgaagtgttccccaaacaatgaagaagcgaagtcgacagtgaaagtcgaccaattgggcccgatcgaaaaaccgcgcatcattttggaatttgaccaaaagaaagttggcaagaacattggaggttgatgtgtacagcaaggacggacgatgcgtatttaattgacaaatgacccgtttaaatatggccacatattctaaatgattttaatttattttcaaaaattacaaaaaacaaattatttgataaatgtggtttttcgcttacacataatttgtttgttttttgttgtttttgggttttgcaaattaatttttgcgtctctttaattagccttgaagcgataagtgaaaagcagagcctttcttttaggactgattaagcgcacctttcaccatttcataaaaattttcattttaacacttcccctctgtgcaaaccaaattgtcgtcgtgaaaaaagaaaaaactaattaaaagttttacatttgtttcctagaattttttttcaaaaaattgattcgaacgaagatacaaaattcaattcaaattgagccgcggtgaacaaaatgtttaagccaacattgctcacttattatcattgattcattcgagatcaacatgcttgtcatgcctcagtgcaattatgaattcagaccggttggcatatgatgtgtttgtgccattctgccagtcccaactaatttgattccgaattaatgtccaacaccagccccgtgccaaaagtttcagcaattcttgcgtcttctcattcacaatgacgaaactttggccgtaatcatagcggctgttaaggctttcatcctctgagcgataatttttctttggcacattgacaaaataattaacaggcgatgtgtcattgatgaatttctgaatgatttcattgattaatatagtaggcggtgatttttaggggtgaaaaatccaatttaggggcctaaatagcggcaaaaaatgcgattagtggcctaaaaattgaatttttcagtgaattttggcttctacattttttctttattcattttctgtttgtctttaatgccccgtttcggtgagtgccctcccctccacctccttcagttgcttgatgctttcgttggcatccaactcggagcaccagtggaaatatttggggcggccgtccgcgcgcggcaaatgaagccaattaaacagtgccacatttgttcgatgaaaggcatcatcaacaacagcataaggcattggcaaatgagcgcacgaaattatgcgaagctcagcacaatccaacagagagacggggaaatcattccaagcgtagtacggagtttgaggatttgaaatt

SEQ ID NO: 39728 - DNA, 1740 bp, Heterodera glycines
  unsure (1)..(1740): unsure at all n locations
tcccttacctacattattctatcgactagaggctgttcaccttggagacctgctgcggatatcggtacgatcaggcaggagattcaaatagcttccctcgcattttcaagggccgtgtggagcgcacgagacaccacaggaaccgcggtgctttacgggcgcaacatccctatctcaggctgagccacttccaggcacgcacaccctaaaccagaaaagagaactctggctcggactccacacgacgtctgcgagttcatttgcgttaccgcgcaaaacagctcttgcgaaccgtcatttccctagcctggcgtgggaatgttaacccacttccctttcggcaaccggatggaccaactgcgcaagcacagaaaagtcgtcatccgtagtgtgttacggcgttagccggtgccttaggatcggctgacccacattcaactgctgttcacgtggaacccttctccacttcagtcttcaaggatctcacttgaatatttgctactaccaccaagatctgcactggtggaagctccggccgggcccacgcccaaagccttcaacgcaaccaccacgaccctcctacacgtcatggccagactacgcgacaagcacgtgtacaagccaatgacggtggagtataggtggcccgctccagcgccatccattttcagggctagttgattcggcaggtgagttgttacacactccttagcggattccgacttccatggccaccgtcctgctgtctatatcaaccaacaccttttatgaggtctaatgagcgggcactttggcaccttaactccacgtttggttcatcccacatcgccagttctgcttaccaaaaatggcccacttggagctcaaacattcaacgcctggtttcagagtcaagcaaccctggcttcatacccatntagagtttgagaataggttaaggacatttcgtccccaagtcctctaatcattcgctttaccgagtataactgcttaacgagctccagctatcctgggggaaacttcggagggaaccagctactagatggttcgattagtctttcgcccctatacccaagtcagacgatcgatttgcacgtcagaatcgcttcggacttccaccagagtttcctctggcttcatcctgctcaggaatagttcaccatctttcgggtctcagcgcatacgctctgtctccgccccatcgcatgcgatcgagacgggactatgttgcgccccaacaccgcagtgccagggatcacacatcagctccgtaagaagccttcactttcattgcgcctttgggttttgaacacccaatgacttgcgcatacgctaaactccttggtccgtgtttcaagacgggtcgaacagatgaccggcttttacaccgagaacgcacaactgagagcccgagctggaccgaactggttgctggtacgtgtcgcacgcgaccgccaccgacccccagctcgagtcaacacggacccgaaaccattgcacaattcacccagagtaaacagcactcccccgatccgggtaccagaccccgaaaggctggcctcaagaccgagctcacgcagctactccgagcatctcagcgcactccgcctgcaaatgccccattcgccactgaacagaaggacagcaaaccccagtctggaggctagcaggccaacgtacagcaacaaacgggtgaatgcagaccagatacgccagctctgtccgtttccacctcatcgg

SEQ ID NO: 39729 - DNA, 1141 bp, Heterodera glycines
  unsure (1)..(1141): unsure at all n locations
caaatgaacagatgagggaatgggatgnaatgacatgaaagtggacaattatgaggagttagaaacatgnaaggaagatgatgaaatggatgagagatagcatttactcttaaaccgatctttgttttttgttttgatattgatgataattaaaaacaaattagtttgtattatgttgcacagaatacacttatttatccaaatttttaaatctccattttgtcatttcatttttggatttagccttgccgtttcaatgttaacattctggtaatcattaatcaacctcttaattttaaagtggttaaatttagtcccacctgtggcacaattctgactctctcagacgggaaggattactgcaagcagttcagctgtggttcttgctcctatacattgccaatttccaagaaggttttggcttcatttattccttttatatatatttttagctgacaagcagaatatacagcaaaaagaaagaagatgagaagataattgggggcaccgaaatgtgggaaaacgcccaagtgacaaatggtctgttaggctcaaagctgagaaaatgcgcatttgtgtgttcagagcgatgcccaagttgttctcatgacaaggcctacttccagcagatacagacgaggagtgccgacgaaccgatgaccattttttatcgatgtgccaattgtggacaccgatggaaggagtaacggatgaaatccgaatttaagtccatgttttttagttagctgcttgttgatcaaatcaaataatattgctataaagggaaatccaatttagcgcttggtaaaatgatgttctaacccagccccttctgatgagaagattcattttttgccattgttaaaaatgcctccaaaagaaaccaatcatatattaattggtaatatttgaaattgatttcccgggaaaaaaaaattctttttggttttggggcaaaaatactgctttcaaacctgagctcagaattttgaatttttggtctgtttttggctctaatgcactttatgagtccaatcgaattttttatgagtccaaacagagtttatgagtccggtcaaatatttgtgaatccacataaatgttaaaattttgattcaactttttgaatcattttatttta

SEQ ID NO: 39730 - DNA, 640 bp, Heterodera glycines
gggggggggcgatgtctgaatgactcacagagagagaaagagatagtccatttccggacagtgccacagtagtagcaatcggtgccatttaacttttgattgtttatattccatcaatttgcagcttcaattttaggacgaaattgccttttcccgatgagatgggggggggacgggagaaagaaagggtgtcattgtcatcgattcaatttcagaaaaagtgaattggggggatctcagcggcagatatatttatttatttgccctgctcaatgaggccaaccaaaaggcgtttccccctttttccatctgacggccgatgtttgggacattctctccctccccctccccttttttccttcccttcgtccgtcgtttcgttcaccttcgcttcgccagcagtgaccccagcaaaagcccccccccccccccgccgattctttcgtccatccgccgccggttgttcgtttgagtttgatttttggaagacaaaaaaagaaacggaggcggcggaggtttcgctttgagaaaagcaaacaaacgaagaaacaaggagatttcaaataatgggaaactcaattaataaattaaagtgtaaaaacgattaaagaaaatccttagttttgtgttactgtaagga

SEQ ID NO: 39731 - DNA, 1014 bp, Heterodera glycines
  unsure (1)..(1014): unsure at all n locations
gacgatttaaaagcgattcgaaaattctatcgactgctttataacgatgcagtcgcggctcaggtgaagattaagggacgcaaaagagacgatttaaaagcgattcgaaaattctatcgactgatataataacgatgcagtcgcggcgttgacaactgagatggaaccaaaagttccataatatctttccataaggctggaaaggcagaatttgaatggccagtcgatatttacactgagcacccgttgaagcgggtgatgcgaagccatagcaaactgtatttttaaattctggccgcaactctaccaaaaacgtgtttagaccgcagtaactcggctcagagtgaagattaagggacgcaaaagagacgatttaaaagcgattcgaaaattctatcgactgatataataacgatgcagtcgcggcgttgacaactgagatggaaccaaaagttccataatatctttccataaggctggaaaggcagaatttgaatggccagtcgatatttacactgagcacccgttgaagcgggtgatgcgaagccatagcaaactgtatttttaaattctggccacaattctaccaaaaacgtgtttagaccgcagtaactcggctcagagtgaagattaagggacgcaaaagagacgatttaaaagcgattcgaaaattctatcgactgatataataacgatgcagtcgcggcgttggtgaagattaagggacgcaaaagagacgatttaaaagcgattcgaaaattctatcgactgatataataacgatgcagtcgcggcgttgacaactgagatggaaccaaaagttccataatatctttccataaggctggaaaggcagaatttgaatggccagtcgatatttacactgagcacccgttgaagcgggtgatgcgaagccatagcaaactgtatttttaaattctggccgcaactctaccaaaaacgtgtttagacacgcagntaactcggctcaganngtgaagattaagggacgca

SEQ ID NO: 39732 - DNA, 1592 bp, Heterodera glycines
  unsure (1)..(1592): unsure at all n locations
gatcaattacaaaattatttatggacgatcnaattttttgaatttttttaagtgcaaaagtggtgggtgtcttacagcttancaaggcncaattaagcttatttccagaaaatctcgcatgaattctcatttttaaattttttatagatttttaaatatttggatatttttttggcttaccaaaacttcatcgaacctggctctttctattctcattcaaatcgctccaaattttttttacagcttaactaggcccaattaagcttatttccagaaaatctcgcatgaattctcatttttaaattttttatagatttttaaatgtttggattttttttggcttaccaaaacttcatcgaacctggttctttctattctctttcaaatcgccccaaattttttttacagcttaactaggcccaattaagcttatttccagaaaatctcgcatgaattctcatttttaaattttttatagatttttaaatgtttggattttttttggcttaacaaaacttcatcgaacctggttctttctattctctttcaaatcgccccaaattttttttacagcttaactaggccctattaagcttatttccagaaaatctcgcatgaattctcatttttaaattttttatagatttttaaatatttggattttttttggcttaccaaaacttcatcgaacctggttctttctattctctttcaaatcgccccaaatttttttacagccacgaggccgcgaagcggccgagtgagtaccttgggcgcaggaaaattattaaggaggagggttcattatttatttatttttgcaaaattaattcataaatttttttcagaaactgctctgaaacgcaccaaaatttatttacaagttgaataaggcactctgactcttatattatcaaaaagggagatgaataaatattttaaaaatttctaattcctttttaaacaggccgaaaaagtttaggcttaactttttcagcgggtttaaaaaatctagaaaaattagtaagcatttgtagtgctccgatacgtatctctgcaaaatttggtgagcccctgatcaattacaaattatttatggacgatcaaattttttgaaatttttttaagtgcaaaagtggtgggtgtctgcaaaaaattttcaccgggtttaataaatctaggaatataagtaagcttttgtagtgttccgatacgtatctctgcaaaatttggtgagcccctgatcaattacaaattatttatagactatcaaattttttgaaatttttttaagtgcaaaagtggtgggtgtctgcaaaaaattttcaccgggtttaataaatctaggaaaattagtaagcttttgtagtgctccgatacgtatctctgcaaaatttggtgagcccctgatcaattacaaattatttatggacgatcaaattttttaaatttttttaagtgcaaaagtggtgggtgtctgcaaaaaattttcaccgggtttaataaatctaggaaaattagtaagcttttgtagtgctccgatacgtatctctgcaaaatttggtgagccgctgatcaattacaaattattt

SEQ ID NO: 39733 - DNA, 745 bp, Heterodera glycines
  unsure (1)..(745): unsure at all n locations
gaagaggaagacccacggtccatttggacgatgggaaaagtcgaaaagcttttgaaggggagggatggactcgtgcgcacggcacgagtacacacaaaaggaaaaactctggttcgagcgattaaccttttgtaccctctagaaattaacacttctgcggaggacgaagtcagtcaaattcaagtgactgccattatggattcaccaagtgctgtgatggaaggcggggacccgcaaactgtcacaacggagtcaagtctgcctccagggacagtgatgcaggattcacaaatcgtcacgacagaatcgagtttgtctcctatcagaggaaggaatgagcggcaagctgtgaaagagagaagaattcgaaagagacagccaacggaggaagtcagaggcaaaggcaaaccgaagaagaatgggccatatgatccactgcgaccgggcaactacagaattcctcgccgaaacccgttctttccgtcacaagtagcgtacaatgagcaaacacgcacgtatcgacgacgacgggtaggacgattgatctttcgggattgaggaagttgttcgctggattggggggcactgaattcgtgagacgagagctgtaagagaaggctaacccggctctaagagatgaaaggctgcaaaaaataaagtcaaatcatggaagatgacgccagcgcgtcgctgagcgtgnaagaaagcagcagaggagaaatggaaaatcaatgaaggattctca

SEQ ID NO: 39734 - DNA, 904 bp, Heterodera glycines
ccgatttgggaaattttcgtgccaaaaagtccgggctctaatgatcacccccgaggattggtctgattgtggtagtgcaatgatttttgatcagcatcaaaagttgtactagtaaaaatttcatttttttatcaaatgcacaaaaaattaaatgttcttcaatgttttgtacttaaaattttgaagcagaaaatttaggccaattttcgaaaaagaattcataaatctttttttttaatttttcgatttttgtgtgcttcttaagaattaggggaaagttatgcttggtaaagtgatcaaattcaccaaaaatggattcaatgataaaatttaaaattataaaaattttattcattttcataatgtcactgtccaattgttcgcttctgtctaaatgtccgggagttagtcggtatttccattgtttcaaatcgttataatttcggcctaataagcctacataattcctcaggctaaaaaatctccgttattcgttggcacaaaaaggattcggatcggtagacctggaaaaaactcgcggaaatcattattcgggagagctaaagaaattcccagaattttctgtaggcacggaaacaaaccggtagggtcccaactgcgtcccgccaactgcgtcccaaaaaaactccattatatttttaaataaaaatcgaaaataataataactatgactaaggctatgtcatatacttttatatattttttctactcctttgctacaaagaaaggagctgaaaaaatacatttatatgttttgatttggtgaagggttaatggcattttgctatttttttgcaccctaataaaaacatttgtccccctaaacaaaattgaacccgggaataaatgcaccaactttaaattgcctgaaaaattttgaaaa

SEQ ID NO: 39735 - DNA, 813 bp, Heterodera glycines
agatgtcattgaagcagatgccggcgctggagatgctgcggttgtggtcctgaaaaaccaaaagataattttgccaaattatttgattgctaactgagtcagcgtcatcacagatgtcattgaagcagatgccgaggccgaattcttttgctgcttgggcttgttgtttgaccccttggatgcagatgctggagatgctgcggttttggtcctgaaaaaccaaaagataattttgccaaattatttgattgctaactgagtcctggcagataccggcgctggagatgctgcggttgtggtcctgaaaaaccacaagataattgccaaagtatttgcttgctaactgagtccgcttcatcacagatgtcattgaagcagatgccgagttcttttgctgcttgggcttgttgtttgaccccttggatgcagatgctggagatgctgcggttttggtcctgaaaaaccaaaagataattttgccaaattatttgattgctaactcagtaaacgtcatcgcagatgccatcgtaccagataccggcgctggagatgctgcggttgtggtcctgaaaaaccacaagataattgccaaagtatttgcttgctaactgagtccgcttcatcacagatgtcattgaagcagatgccgagttcttttgctgcttgggcttgttgtttgaccccttggatgcagatgctggagatgctgcggttttggtcctgaaaaaccaaaagataattttgccaaattatttgattgctaactcagtaaacgtcatcgcagatgccattcgaccagatgccgaggccgaa

SEQ ID NO: 39736 - DNA, 760 bp, Heterodera glycines
ggggttttaagtgccgcaccccctcattttctaaaattgctccgtctcacttgagacaaattgggggccgttgtcagttaccaaacattgtggtgatccaaaaaatgcgaatacttctcgtaaataatttacgatggcaggtgaatgagttgagttcatttgacacacaaatggatacttagaatatgcgtcaacaattataagaaaattcgtcccccaaattggacccgcgaggtctgcgtggacccgttcgaatggatatttggcctcaggccatttatattcggggtccacacgcggttcatttgacgcatttcgttgacaaatgtgacactctttcacataattttcaacttcctcagaccaattaggccaccacactaagtctctggttcgggctttgcatctcacaatgccaaaatgtgcccgatgaatcatttttaaaaccctttttctcattttctgtggaattattatttgtcttcccaactttttccgaattattttcccatcgaggtataatttatctctctctctaaagtacggcatcaactcatcatcatcgatcggttccacccagcttgcctttatctgtgacagtactcgggacagtatactatcttcaaatgtctctttttctatagtttttcgatgtaaacctatttcttcatcaacggtcaatacaaaaggaatgtcctctctgctttttccttctatttgttcccatttaattgcaactctcgataatgcatctgccact

SEQ ID NO: 39737 - DNA, 1248 bp, Heterodera glycines
tgtttggcattttgtcgctaattgccaattttaaatttttttttaattccattatgccctaccatttgttgtttgctgttgcgcatgacggcgcatggcacggaaatggccggcctgcaatgagcagccaaaagtgcctttcttgcccgatttttgctttttgcgctgcttcgaacggtccgtttggcctcggtagctgaggccgaaaaatttttccgggccctgaaaaaatttaaaatgggtacgatttagcaaaaaaaaaaataattaaaaatttttctagttttatttctttttatgtcatggattaaatgccgaactcggtctcgagaaagtttggttctctagcagctttactattgagtcaattagatgcccttgatttattaccgtactgccaccgtcttcctcatcgtcactttgctgttgtccgtcatactgtacaccgttttgtgcctcctcttcctcctccacgtcatcgtcgtcgtcctcgttgtccatgttgatgtccaactgttcttcgtcctccattttggcactgttgctgccatgggacagcgcaaagccgcgtccgcgttgcgtcagctcggtgatcagtcgggcgccaattgagcgcgcgctttgctcgaacatgttcaactgtacttcgggctcgaccgctggcggtgtactgtaaaaagaagtaatggtattacaatgattagtgagattattaaagaggttttattgatttttaaaaatataaacttaaatactgttttagtttggtttaaagaggttttaaaaaatacgaacaaaaaaccaaaattcggtatattgtgaaacagaaaaggaaatataatagaatattgaaatttaaaatggggattatttgtctcaattaaggcttgtatttaaatgtgatttaaaaatcgagaatttctgaatttggaaaacttatttgtttgtaccatttcaaagaattaaaaagtacatacggttttctcaaaagtttaaggtaattttcaatatctaatcaaattggcatttttattttttcttttatgaaatttttatttttttttgaacagaaattatctattcgcaaatattacgtcattgctggagcgacgctctgttggtactgaactggctggactgaagtggaaatgccggatgccaatgtgaccgcaaccgacggcattgcctttgttggcttctcatccacgggcgtaagcgtgccactgtccgtgctgttccctcctcgtc

SEQ ID NO: 39738 - DNA, 1404 bp, Heterodera glycines
  unsure (1)..(1404): unsure at all n locations
taaaaaaanaattataaaataaaattttactcgtttttntgagctaagtccgctcaacaaatgcaaatctccatnttccacatttgtcaagctttccttgaatgccaacattaattgaaactcctcatcagtcatggcctctgtaaaatcattttcttggcttaattctgatgatgatgatgatgatgatgatgataatgacgatgttgttgcttgagggtgtgttgttcgtgttgttggtgaatgcgtttgttgttgttgtggtggcactgattgtggtgaagaccattggttggccccagctgttgttgtcggaaaatcagacaataagttacctttaaaaaaaaaattcgaattttaaagatgacaacaataaacagtataatgccaaaaattctgcggggttactgtaatataaaaggttgttgctgatttgcagtaatcgaatcaattaggacagttttatacctcatttatcgcttttggaaactactttatatatatttatttttacaataaatgaaattatattcataatctaatatcatttgaaagctctatgtgttctccacatttaaatgtcaaaattgaatggaatcattcaaaggtaataactttcggcgccaaaaaagccaatttttgagggttttagccataagttttttgcaaagtgacgatgattttttttaaagtttttgctggataatagagaacattccataagagctatcaaatgatttaaaaattttgatttggttgatatcgaaaaaagttgttagcaacggcgccgaaacggccggcgccgaagtgggcggtttccttcgcgaccctccccccccttcttcagcggcgacccccactgcattgtcataaacagatagcgacctagacaaccaatggttgtacatgatgaactttttggacttgaagggcgagatttaaccaaaggacgacgtacttgtgctaattgcacccggcatcgtcggagccgttcatcgttagggctgccaggtgatggggatcagaatgtatgtgaagaaggagtaattactggacatcttacctctgcagattgcgcgaaagttagagattccgccagcacgttatgcagtaaggaaaagtatgatgtaattgatgttcatcattaagggtcggctcgagtttagcgccactctggtcatggaccgacttcccctccgcataacaatggggattgtttcgaattgtgactactcgggcacaatcacgcggagcccgttcgctctcaaacacgactaatgtgcgggaaattgcaatcatcgccaacggccgctgctacacacaaggcccttacgatgtgtactacagagatggtaaatatgtgagcgcttaaaacggtacgaatgaggcggtcgggttcccaaa

SEQ ID NO: 39739 - DNA, 1293 bp, Heterodera glycines
tattcttattgcgtttttatttctttttgtaagtatttcaccaaaatttttaaaatttgccaaatttttagttgaataaaacattaataataaaatattatggaatcttttcttattacagattttatttttgtagtgacgtcacattttgtcttacaacaataaaaatgtcagacaatcaaatggaagcggaaaaaaagatgaaaagacaaatgtaaattaaaaatatccaaatttagccaaaatagactttgtttttaaattaagttcaatttgcaatgataattgtcttaaagtgttcgaatttctctcgccttttaaacttggcattgaaatggcatttgtcagccgccgatttgacgctttggtggacgaacattttaaaacacgcaaatggacattgggctttctgaaaattgaatgccgtaaaattggagataacggcacaaccgaaatggaaattgtaaatctgcagcagcagaaaaaaatgccaatgccgcaaaaaccgttgccaaacaaaatcatcgctttcagaatgattattctcgagtaatatttgatggtagtaaaattggtgccggaacaagctcaatattttttatccggctcatagttctttttcaaaaattttccaatcggttcttaaagataagtcagaaatatctgtctattacgaaactttcagttgtttcgaccaaaatgtcatcgactttcttcaaaattttcgtcaaatttttgcctctggcacaaatttatgcattggttactatgatatcaaagatgacattgtggaatttgtcgtccgcaacatttggccaatgctcaaagacaatatccgcgggattcattaccacattgaaaacaaacagtcccatcagttacaacaatttgtcacttccattcttaacgagtgccaaactcttcgctttctattcctatcggcactttccctgtttttcgaccgatgaaagtgccaaaacttcgattgaacaagctctggtcagttggcttttgacgccacgttctgatggaattccaaagttgattgtgtgcagtcaaattcgagaacaccaatggaggccgaaaattataagcattaaatcggtgattagcaacagaaactgaggtggaacggaacatatcaatttttgcgtataaattaattgtcatcgactaaaaattggctcagaaacctataaaatttaattatcccgaatttattaagaaaacacttaattttttctgttcgcgttccacctcatagttaattgctaatattaacctttttttccg

SEQ ID NO: 39740 - DNA, 946 bp, Heterodera glycines
tgactagagcaattgaacgctaacggacgacctaatggaaaaaaatccccgaaggagagaatttaattaaatccattccttcgggggaccgtgccgggtgccgcggggtaagcagtgctggttcgtttcatcacggcaccgaaccttttggctagtcagcaatcgttgcttaacttgccagatcggacgggtgcgcatgattccactgttccaagcaccccaccaaaagcaaaacgatataaccaaaatataaggaaaaattttttaaaaaattttttctccatcttcctttttgatactaaagcatcagagtgctaaaattaagttgtaaataaaatttggtgcgctttagagcactttctgaaaaaaatatttatgaaacaaaaaaatcgattttttcaagtgtccgtttggggtactcaaacaattatggggagcaaaaatccaacgcagaattaaagtacaggctatagggaagctattcccgaaggattcggtctccccataaatctgggcgcatcggttcggggggactgccccgaaaacaaaaaaatcgattttttcaagtgtccgtttggggtactcaaacaattatggggagcaaaaatccaacgcagaattaaagtacaggctatagggaagctattccggaaggattcggtctccccataaatctgggcgcatcggttcggggggactgccccgaaaacaaaaaaatcgattttttcaagtgtccgtttggggtactcaaacaattatggggagcaaaaatccaacgcagaattaaagtacaggctatagggaagctattccggaaggattcggtctccccataaatctgggcgcatcggctcggggggactgccccgaaacaaaaaatcgattttttcagtgtccgtttgggtactcaacatttatggggagcaaaaatccaacgcaaaattaa

SEQ ID NO: 39741 - DNA, 730 bp, Heterodera glycines
  unsure (1)..(730): unsure at all n locations
tctcgcccttcactctttccacttttccatactttttcttcctcgttccctctcttcccctactcccgaccctctcttctctntctcgtcccctcatcccaattcgtccacttccatttctcatcttccctttcccctcctctctcccccttcccaatttgttcctccttctcgacagcccttttcgtctgttttctgtcccaatttctcacattaaaaggtgccctttgtgtgatttcttcctctttcccttccctcagggcattgctaattgtaatacctttttctttccttttcttccctttgctctccactttttatttcctgatcaatccgcgtttttcatttaattggttccgaattcattcattttccaataccaaatcagaagagcttgtcttctatcttcttatttattcgatacacatattttgaatatttattttttattattatttctttttttgcccctcccccctcattaagcaaattgctatttccaaaattggacctcacgttaacatttgttgggcaatacattaagtgtgctgccgctgctatgctcttttcgactttttccctttttagcacttaaaggcttttacccgccggcgttaataaataaatcccgcattcatttcattcaaattggccaacccttggcaaatccgtccattcatcgccccaatttccaattaaaattctggaaaacacgaaaacgccaagtcgt

SEQ ID NO: 39742 - DNA, 1222 bp, Heterodera glycines
  unsure (1)..(1222): unsure at all n locations
ttttatgataatagggncccggatttatatggacaaaaaaacccaaaatatagattataatatggatgaaaaaatcgcaaaatatggacganatatgaacaaaaacgcagaaatattgacaaaaaacacgaaaatatggacaaaaaaatctctgaaaatttgtttgaatttagaaaaaaaatcataaacccataaatttttaagaaaaaaccatttttcatgaattacagaattccacaattgggaactcctggttatcatttactgaaaaatattgaagttgtaaaaaattcaaaaattagtaattttttctaagaaatcatattaagcgaatgttgctaatgaaattttttgcacaatttttgatatttaatcaaaaaatttttgatttaagggacgtgttttccaaaaatttccaataattttccatgtgcaaaaaaatatgtaaatccataaaaatccgggccctcccggacttttcgatagctaaggacatttcgaagcaaaggactttatttatttattccaaaaaacgtttattaaataccgttttaaaaacggagcataattaggccattttgctggcaataatcacttaagagactttttgtgacatttttaatattgtagcatatttatttgttaattgttttgtcgaaatttttaagttttcatttcttaaatcatgttaatattgtaaatttggaattgctaatttgccccgaattcactatttattttcataatcacaattaatttaagaaaaaattgtcaaaaaaatcaaaaatcattaaatttccagcctagcgtttgtcatcatttgtagtaatcaagcatattaataaaaaattgcctaattcattcatcaaatatcagaaaaattaattttttggcaatttattctttttacatagctaatttccacaatttaaaaaaataagctttgatttaaataaagataaattcaaaaacgatttttataaaatttaattttagagaaatagtgaaggaaatgaaactgagcctattattcctttcaatcggttttttgactgctcaaattaatcaaattgaatttgaaatgaaaaatgaaataaaacaacaaaatagaaaatattcattaaaagaatggcgccaaaattatgccgaaatttgcaagaaaattgacataagttctgcagaaattataagatggaaaaaacaatttggaattcggtgtaga

SEQ ID NO: 39743 - DNA, 910 bp, Heterodera glycines
agtgattaaaagaggttcaactgtgattagaagaggtacaacagcgattagaagagtgattagaagaggtacaacagtgattagaagagtgattaaaagaggttcaactgtgattagaagaggtacaacagcgattagaagagtgattaaaagaggttcaactgtgattagaagaggtacaacagcgattagaagagtgattaaaagaggttcaacagtgaaaagtgattagaagaggtacaaaagtgattagaagaggtacaacagtgataaaaagaggtacaacagtgattagtaaattcattaaattaaaatgaaaatattttttaacaaatttaattaatttattaactcaaaaaatattttaaatgaataaaaattgaaaaacacgaaaaaaatggtagaaaaataatgtacaccgcccggcttcgaacttcgccccccccctcaaaatgatgcctcagaatccccaatcacacagggattctgaggtcttaacgatgtcaaaagtaaaatctgatcacgtattcgtgatcagcggcccaaataacccctaaagacatgtttttggaatattttggtgaaaaaattttttcaatcaaaaaccatgtgctcccccctttggtcccgaaccccaaaatcacttttatttctataacttttttcaaaaaagtgataaaaatgtaaaataaaatttataaaatagagcaaaaaattgcggatttttatattattttacttttccaaaatatcttttcagaaccgagttcagaattttttactgaaaattcgaatttttccagaacttctggaataactttttttagtttcatgatagaaaatctaaataaaacccataaaattctcctgattttttgctatttttaaagctttgttgtatgaaaattga

SEQ ID NO: 39744 - DNA, 791 bp, Heterodera glycines
ccatcaaataaataatgaacaaggcaattttctcattggtaatgcctcaggcaatgacctcttttttcttttctaacgggaatttaggatttttgttttaacctattaaaacattttgccaattcaaaatgacttagaaatcccaacaaaaatcggttataaaactaaatcagggctcgcaagtgtgcttttgtggttatttctccatagcctatttagtaaaaacattttcttttttgggtttgcgaacaaaaatcgggatttttgtttacataaaattttttttgaatatatacccctaaaagcagtattttttcaaaaaaaaaaataccgaaaataatttttataaataataaatatccgtggtgggattcaaactcaattacccttccattctgtggaatgtaaactcccatcaaaactgacataatttctattttggcgtgaaattaaaaaatattttggtaaattttttagggttttccaatgttcaaaactgttaattattattaaatattaccacttgttcttggtgctaggtcaaaattaggaatgtgtgaaaataatttaattaattttcgccaatttgacttctttccaattaaaaacaaattatttttcaaaactcgtgagaacatttttcaactttcgtctcggcgatgaatcaatttgattcccatgcgcaaaacaatgttagtttttttagataacatttcataatgcgtaaacttaattgtatgccttttaatctcagtttttcgagaaggtttttaatttattatctatttttt

SEQ ID NO: 39745 - DNA, 1033 bp, Heterodera glycines
ctgatcattggccttgtttggccaactcatccccccccccctatttccctacgttcaatcgggcgaaggtgtcggtgagttcgttccgctccatccgtccacaggtgccggacgacagtccgctgatggcggacgcgttggagtcgcgttctccgcccgcaaaataagaggcggaaccgccacccagcgaggaggagcgaccgccgcccagtgaagaggcaaacggctgaacaacacgaataatgcgaaaataatacccttataaatgaatgccacggcacattttccacaaaagtctcgagaggaaagccccactcaatgatcaagactctcgattgggccagcacctgtaggttattgtgctgctggtggtccgtgcttcccccgggcgcggacgccgcgtgcggtgtcaaagtgccgccgccctctgccactgtccgtcctccgttctccaatatcactgagccgttctcgccacctccaccagcggcggacaaaagaaaaggctgccgctgtaaaaccttggccgcttcgtaggcaaacgcgtcgattgtgtctaaaattagacaaattaaggggtacgctaattgatacggtatgcactaattggatacgaagggcttattaaggagggggggggggggtgagagcaatgtttaaaaagtgaaacaaatcagcgagaaaatctgtgtgaaaagtaaagaagacagacagttagagaaggacaagaaaaaagtgatcagagtcttactctgtgaaaaattcggcgatacattgaaaggaaagttggcgatctaagaaataaagtgataggaaatgttttaggaatgttcagagccataaatggtaagtagtaattcgtattagttatcaaatttaggaggaaattagtgatcagatcgctgtggttgatcagaaaattagcgaaaagtgatcagaattgatcggagagattggtcagagtcaagcaaacccgaatatttggaaagtgataagaaagggatgaattggcacagcactcagagttagtccg

SEQ ID NO: 39746 - DNA, 1369 bp, Heterodera glycines
aaaaggttggcaaatgccggccgtgttacgcttgggctgctctctgctccgctactgtttgttcccgggctaaatactctagttgttgagccacaactgcagtcagtgggacaaggtactgtaacgatttgtgaggtgtttattattgcaattttaaaatatgttaggtttgctccattggctgacattttggcatttttcggggataagttccccttccccgagtggtgtcatccccgaatccccccattcctccatcccatcaattgcatttttctgcacttggattctaagtaagtgctttgattccgttccatgcttgaaatagttagccctacttaataacgaaagaagaatttagccaattttcgcatttgtaattttactccaaaattttgagtcgaaatcttatttaaaaaatctcattcaaatttttttcaactaaaaatccattaatttgcaatttggttaacatctgtcgagggaatcccatcaaatttaacaaaagtatttaaacatttgatttaaatggcaatcgatttgcacagcttttggattcgaatttggcccatggcttttggattcgaatttggcccatggcttttggattcgaatttggcccatggcttttggattcgaatttggcccatggctttttgattcgaatttggcccatggcttttggattcgaatttggcccatggcttttggattcgaatttggcccatggcttttggattcgaatttggcccatggcttttggattcgaatttggcccatggcttttggattcgaatttggcccatggcttttggattcgaatttggcccatggcttttggattcgaatttggcccatggcttttggattcgaatttggcccatggcttttggattcgaatttggcccatggcttttggattcgaatttggcccatggcttttggattcgaatttggccgatggcaaccattttcaaataattttcagacattacagtagtatatagcgtcaaaaggttgcgggttggttgcgggtgtttcccgcacgagcccgtgcctatgggaggggtgcagccctttgaagttgccgccccatcaaaaaatccacgatggggggtgtttcaaaaccaaaacctattggaccactttgaagttgccgcctgaccaaatccgatttcccaaattgttgcgggtgtttttttcccgcgccgcgcagcgccgcgggaaggtcatcaatcatccacctgtcaccaaagtgacaggtggaggaaattcaatttaacttttgcaaattttaatctcaaaccttttagcgttttattttctcaatcctgaaatttttttatgatgattttttcggatcctgaaa

SEQ ID NO: 39747 - DNA, 1118 bp, Heterodera glycines
catctgcgagtcctaggtattcgggatatgaggttggaatcgctcgcataggaatgctttttggcttttcactaagcgaaaaaaaatatcatgaaaataatttggaatttcttaaaatcattcctagcataaaaaaatttaaaaagaaaaaatttgtgaggttttttggtcaacaataataaaaaaaaaccgtgaataatttgtaaaaaaattttccaatttcctacatcttttggcaccttcaaaatgttaatacatttttaaccgtccgccaatcgaaaagtccattttttccgcttaaaaatggaaatttcatgcgcaagtttttctcgaatttcgtcaatgacgtaactcttcaattttctcaaattttgctcagatttccttagcccattggaaaatttgctgaatttttcgtcaataatttcgtccatttcatcaaataaattgttcttcaattttttaaaatttgtttcaatttgtttctccaacatgtctttgacattgaaatataatgacttttgttggagtttttcaagcacagcatttacacgatcgtactcaatcacttcgccatctcgaaaatcaagtgcataatttttgaaaaaatttggattttttatcacaaatctttgaatttttcctgactaaattaattataatatttgttttactcaaaggacataaaaattttcagaaaatttagttttttgtgtattttctcgataataattaatgtgactttctaattggaaaactatgccaaaaataagtgtccaaaatatattcatcaaaattaatatatttttaactttgttttgtattttttcttctataatgatttgctttgtcatatttagctattttcaagtatttaaatttaattaaacgaatttaaaaaagaaattttgcaaaattttgcccctcaagacatgaccttttcctctcgcacccaaatgtacaagttttctggattgccgcttatcggcgtgtcaaattcgcccatgccgccatgtgatccaagcattgccctgatcggccgctctcctcccacaaacattttaaatctcccgttgctattcatttcaaatttgtttggcgaaaatgtaaatttgtaa

SEQ ID NO: 39748 - DNA, 239 bp, Heterodera glycines
ccatccctttaagattgactaaacgtcttttttactattttaaaaataatgtctccatccctttaccagtgacaaagggatggatccattttaaaaataatgtcttcatccctttaacagtgtctaaagggatgaagacattatttttaaaatggatccatccatttgtcactgccaaagggatggagacattatttttaaaatagtaaaaaagacgtttagtcaaacttaaagggatg

SEQ ID NO: 39749 - DNA, 1312 bp, Heterodera glycines
  unsure (1)..(1312): unsure at all n locations
aaatttttaattaaaataggttattgctcnccgacatttttaaatttctccagccattctcaacaaattttgtcgggcaatttcctccccaatctgcggcttttcttctccgcgaaagtcggagcttaaccctaatttaaatcacgcttaaggcttccaattatatggtgagccatatttttcctggactgtgaaaagccagaaacttcgttttgtttgaatcttctaagatggaattacgtttcaattttccatatttgtccatatttggcaatttgtccacccatattttatttatatattttggtatttgtttaaaatttctgttggaatggccacgatcagttaaatcagaatttttaaacttgaataagtattcagtaaaaaaatgttttttttaaatgtgcccatattttgtaattttatgtctatatttcggcggttttaagacatatctttgttttttaaatcaaattaattagcagccttaagcatgattttcaatttgttaggttttttttattactgcttgatgtagaagcttgatattcatcagcagcctttttacttggttcagcaaaaactgctttattcacttggcccattagtgtcgagacaaaacttccaaaaagtcgtttcccttgaaccacaccggtttcgagcactacaaaataaaaattgcaattcttttcactagagtcctatttttgaaaaaagcctggatttcctggtcaaaaatctaggtccaggaaaaacccaggcttgtcatggccttgttctcaggccatgacttggataaaactgtttgaaaaaatcaattaattgttaggaacacctgtttttatctacttgaataataatgtgtttttaatctatttaatctttttcagataactgaaataaaacattggtcaatctgaaataataaattctaaaatgttgttcaataagtccttgttttcgtgcaaaacctgaaacggattactgggtccaggtccagacgatttctacgtttcacttaatagaaaatcaaatttacccttttcaattgctcctgcttcggcttggacagatgaaataggtgttaaagcttctaattttttttaaatattttattgaaaattattcttttacattataattttatttgaaaatttttaatatattaccctcaatttgaagtatctcttttttatgtgaatcgtcataatccgctaatgacggntcactcgaatctgaatgtttaaaagtaaattaaaatgtncacattttgcaataatgctactgtnttcattgctgatcgtagtcactg

SEQ ID NO: 39750 - DNA, 862 bp, Heterodera glycines
  unsure (1)..(862): unsure at all n locations
tttccgggaacgggatcgggagttgaaaatttaccgggacgggagtcccgaacgggaatcccgtagaaatcccgctcccgttaaaaatcccgttcaccgaaaaaagcgggactcacgtaaaatcccgcgggagtcccgatcccgccggtctctacctattaagatctttcgaataaaattacctaaatttattgaatgatattttattttggcgccaattttaaatttaaattttcatggttcgatgaaaaagtcaaaaatgagacaaaagaatttgtccaagaatgtaagctttttccctaaattttgttttcattgttcttctactcgtttctttcgttggttaagttcacgcaggaaactaacaattaaaaatgccagaagttgaagacgatgaatttgccgaaatgcgccgttcgagaagatcgaatgtgtcaaaaaagcgacaacagaatgttttggaagaactaaagcaggcgcgcgcaacaggcaaagcctatcggaaaagagtatgtgaacaaaaaagcgtaaaaaatgagagaaaaataatgttaaaatgggaaacaattcaatttggcaaagatcaatgaataaataccctttggttaggtggatgatttggttgaggacctttacatggaagttgatgaagccgaatatgaagccaaaaaacgcgagcaccgttcctttgttgaaaatgatggtttttcatttgttttgcattataatgtagcttttataattaaggtagtcattattacgatgaggaggatgattctgaggacgaatttgaagaggaggagcgttctanaaaattgaaaaaaagcaaaaagggtaattaatttcggattgatcagcaaaa

SEQ ID NO: 39751 - DNA, 815 bp, Heterodera glycines
tccccccccccccccttattgtttcccctcgtttttctgttttctaagaaaaccaaccttgaaaatgatgacagacggaacggcacagactttttgtgccattgaaacttcgggcaatgactccgcgtcgactttggctatatcgaaagcattctgtccgtattccctctgaagttccatcagcaaatcgtccaactgcgcgcaagaggaggcccaaggggcggaaaagtgcacaaaaagcgatcttttgctacaattacaaaaggacaaatggaaggaaattcggagaaatgaacctttccccttcggtggacgaaacgaatgcttcgaattgatttttgttgcctatcactttaagcattattcgttggtcactgtcacaaatttgctgagataaataaatttttggataaattttgggtggtgtccaaaaaatcagtactctggactgaatcatacaactagtaaaaacgcacgaaaatatgaattcaaaagctatgtattgacaggcaccaaaataggtaaatcatcaatttttagtaatgaattttaggtagcaaagcagaaacgattaaaaaaaatatttaattcttaataaatacattattcaaaaaaattaaggcgctagttaaaaagttaccgattttgaattctatcaaaaagtaaaaacaaacggggggacccttttggggaatagtttagatggtacccccccttttttaaaaaattttttcaactttcaaaaaatcataaaaacatgtttctagggggtttcagggccgctgatcacaagtccaacatccattttgaccgat

SEQ ID NO: 39752 - DNA, 1212 bp, Heterodera glycines
acagagtttgcccattccactttaaattgtaaaaaataatgattaagtccattaatccggcaattactagagtagctttcttgcaaactttcctccatagaaacttctagccattcatcaagattttcaaacttcatctaaaattggcattttgtcaatttgcattttttaaaattccttttaccatgaatgttaaatttttgccatcgtcccatttgaacaggtcacggtacaccgctttaattatttccattgctgagcttaattggagccggccttgtgccacacgaaaacgtggcgtcatgcgccgcgaacccgacacgtagccatgggatgccaatgccatcatttgccaaattttacagaactcaaccaaatctttctggcattttttcatagcccagttcttttggcgttttcatttgtccgctctcacaatgccaatcctccaccatatggcgcaaaaagtgcgttttgctcaatgccaacgtcttttccatgtcggctgtctccggttccgtgccgtcttcgacaatcacttcaaatggccaaacaatgccaaaattgctcagcagagcaagcaaagcgtaaatgatgatcagaaatttgggtcggaattggcacatattattgccgtgctgttgcgtttcataaatcgctaaaagcggcttaaataaggaaaatttagggctataccaaaattttgcaatttttcgcatcactttttattttaacatattttgagatttttttagaagacataaatttcttaagaaaaggttaaattttttttgaaaatgtaccccttaaatttaattttttaaaaaagaagatttttaaaatgctttaaacattatctaggcctaacagtattttacggcattttttcttattcacctttttctaaggtttttttttttgtttaaaaaactcataaaattttttaaatattttgtagataattcttaaatcatcatattttgcgatttttcttacatataaaattcccagtcctaattaatcataaatagaattcattattatatgctggtttttatacaaaaattaaggaattcttttttttaaatttcactggcatttatttgtcaatgttcacaatcaccttttttttgccaaaaagcgccatcattgatttatgggcgtccaaagtgcgtggaaaaatgctaatattagtcgcttagaaaattttat

SEQ ID NO: 39753 - DNA, 960 bp, Heterodera glycines
  unsure (1)..(960): unsure at all n locations
tagggaagctattccgaaaggatcgggtctaccccatatatctgggcgcatcgcttcggggggactgccccgaanacaaaaaaaatcgattttttcaagtgtccgtntggggtactcaaacaattatggggagcaaaaatccaacgcagaattaaagtacaggctatagggaagctattgccgaaggattcggtctccccataaatctgggcgcatcggttcggggggactgcccctaaaacaaaaaatcgattttttcaagtatccgtttggggtactcaaacaattatggggagcaaaaattcaacgcagaattaaagtacaggctatagggaagctattcccgaaggattcggtctccccataaatctggcgcatcgcttcggggggactgccccgaaaacaaaaaaatctattttttcaagtgtccgtttggggtactcaaacaattatgggagcaaaaatccaacgcagaattaaagtacaggctatagggaagctattcccgaaggattcggtctccccataaatctgggcgcatcgcttcggggggactgccccgaaaacaaaaaaatcgattttttcaagtgtccgtttggggtactcaaacaattatggggagcaaaaatccaacgcagaattaaagtacaggctatagggaagctattcccgaaggattcggtctccccataaatctgggcgcatcggttcggggggactgccccgaaaacaaaaaaatcgattttttcaagtgtccgtttggggtactcaaacaattatggggagcaaaaatccaacgcagaattaaagtacaggctatagggaagctattcccgaaggattcggtctcccctaaatctgggcgcatcggttcggggggactgccccgaaaacaaaaaaatcgattttttcaagtgtccgtttggggtactcaaacaattatggggagcaaaaatccaa

SEQ ID NO: 39754 - DNA, 989 bp, Heterodera glycines
aatagtgtgttgaaaacgcacgaaaaatagttattgacaaaaaatggctatctctgaaagtcacgattaaatccctaccgggaattggacaccaacttttgtcttctgttgtagcgctgaataaagcactaatagtgtgtttgaaaacgcacgaaaaatagttattgacaaaaaatggctatctctgaaagtcacgattaaatccctaccgggaattggacaccaacttttgtcttctgttgtagcgctgaataaagcactaatagtgtgtttgaaaacgcacgaaaaatagttcttgacaaaaaatggctatctctgaaagtcacgattaaatccctaccgggaattggacaccaacttttgtcttctgttgtagcgctgaataaagcactaatagtgtgtttgaaaacgcacgaaaaatagttcttgacaaaaaatggctatctctgaaagtcactattaaatccctaccgggaattggacaccaacttttgtcttctgttgtagcgctgaataaagcactaatagtgtgtttgaaaacgcacgaaaaatagttcttgacaaaaaatggctatctctgaaagtcactattaaatccctaccgggaattggacaccaacttttgtcttctgttgtagcgctgaataaagcactaatagtgtgtttgaaaacgcacgaaaaatagttattgaaaaaatggctatctctgaaagtcacgattaaatccctaccgggaattggacaccaacttttgtcttctgttgtagcgctgaataaagcactaatagtgtgtttgaaaacgcacgaaaaatagttattgacaaaaaatggctatctctgaaagtcacgattaaatccctaccgggaattggtcaccaacttttgtcttctgttgtagcgctgaataaagcactaataagtgtgtttgaaaacgcacgaaaaatagttcttggacaaaatggctatctctgaaagtcactattaaatcc

SEQ ID NO: 39755 - DNA, 1241 bp, Heterodera glycines
  unsure (1)..(1241): unsure at all n locations
gagtgaaattgagatttgagtgtggtgcggaccatcaactgtgttcaacgcttcggcggcaaaagtgcgacacattncgcattgtgtggacactgtgagtcttagttggaattgtattacgaaggccaaacatttttgttttgcttaacaaacaacatgctttcatttgattaaccaaataaacttcgttacgcttttaattattcgttatacactaatgcgcttttatggcccttaaaatttaaaaaataattagtatttaattgatttggtgtgtaaattccggtcaagttataccctcttggtacaattgaaggcgtttaagagcattgttttgttttggatttcaatcaatcattttggagaattacaggtgaagagcgacatcagtggtgaccaaacgcttcggcggattccaagtgaacggacaaagctgattgattggacggacatttgacttctgttggtggacaaagtgaattccttttcctctattaattaaattaaacaaaattaaacaacaaaacaaaaccaaataaaataaaaagggggaattgaaaaaaagggatcaaaatcaaaaattagaaattgcttcggcagcacaaaggcaaagaatttactgaagtttcagtgtgactcctttggttgacattttaaaacgcttcggcgatacaaaggcacaagataatgcaaaataatgcggagcttggtaaaatattttatctgaatacgcttactgctataggttcttcaaatcctttatctcaaatatttgatggtgaaactgcttcggcattttatgagtggcaaattaaatttctggattatgtggatgtctttggatcaaattggtcggaagcagacaaaataaatcgacttaaattacacttaggtgctcatacgcgaacaatttttgaaaaacttttgccaaccgagaaggatacattaagcaatgctctgaaaagcatcaaatcaaagttggatagtccacatttcagggaattagcttataggaaattggctacttgctatcagaaagatggtgagtcagtggacgagttcataaaacggttagttcccctagtgaatacaacgactgaccaatttccatcaggagcgagggaggagatgctctgtagatgtctaatagagaaagtgaggcctgagtatcagcgttcgctttcattagtggctccattaatagggaaaaatgatttcaaaaaactgacgtcttacattca

SEQ ID NO: 39756 - DNA, 1418 bp, Heterodera glycines
  unsure (1)..(1418): unsure at all n locations
tgccgaagtgtttatcatntcagcaattttctgatcacttatttttggattttcttttntaatttgccaataaattttcattttttccattttttctttctccgttattctcttacagcgaattccgaattgtccccaaactcttcgctattttcgaattaattttatcccattcttttgttgaatattttcttcctttttgctttattttttctttaattttataatattttccaattatttctcttttttcttcccattttccaccaaatatttcgtcaaatgacttttgttccaatttatcattagctgtttcatttggataaattagagcaattaaaatgaaaattaaacagactaatataaataatttcattttcttgaatattcttgaaattttgtttaattttctttaataaaacccaaatgattaaattttattattaatgagcatttatttattcgtgaaatcatttctcagaaaaacaaattggattttctagtaaaacaaactataaaacattaaagtattctaatggtcttcaaaaaataaatcagcaaattattatttattttttaattaaaatttctcaaaacaaaaatgccttaatgattttaaaaatagttttttttaggaatattctatgtagagctgggaattataattattcaaaatcccgaaatatttaaataaatatttacgaaaaaatgccgaaatattaaccaaaatattgaaaaaagtccgaaatattaagcaaatatataagaaaaatgagaaaatttggtaaaaataaactgcttataacaccttgcgatacttagacaattttattttattttttcaaaatttctttaaattgagttgttttacatatgttttacattacaatttctaatttaatagatgttttttgcttgctatgattttatgtcattatcgctattttacacatggctcgttcaaatccggaccaattctttgaagaggtgacatgccttggcattattgtataatattttttagatttatatatatagattttatgtttaggatgttgaatgttgacaattaggttcactttggttaaaaaagcaagctttcgctcataatcgtctagatatttggaccttttgtttaaagcttgttaaaagtttatttttttaaattaataatattttttatataaaatttattatattttttttaccaaaaatacatctttactttttatgataaacatgattaagcaaaatattttcaaaaatttcgttttattttaacgaaataatatatntttcatttttgtgtaaaattcctgtgatagaatanatgtgtacagaaattgtttttattttaaaatatttgtttaatttccaaaatattctnncaattcataccttttttccatttaattttt

SEQ ID NO: 39757 - DNA, 945 bp, Heterodera glycines
aataaattctatactcatgtattttccacttattagattttgcaggcttattgctgcatgttctgattttgcaggcttattgctgcatgttctttgacacttcttcaaaataacctatgccctttattcgttcaaaacagcatctttgttgtttcgctttggattaacaagcccgatgataaatagctcgagcgcaaaacgcgtgcatgtttggaaagtatcgttcataccaataattgagggtttatttttaaatgaaattttatgataaaccttattatctcagaagctatttaattgattcgaatgtttttatcgcggttaattagagcaacgaaaattggtttgaatcgtgaagtttatcatttctaactcacttctcaaaattgttgataaattgcaaatatatttttccaaaagtctgtggacactttctgaaaataaattctatactcatgtattttccacttattagattttgcaggcttattgctgcatgttctttgacacttcttcaaaataacctatgccctttattcgttcaaaacagcatctttgttgtttcgctttggattgacaagcccgatgataaatagctcgagcgcaaaacgtgtgcatgtttggaaagtatcgttcataccaataattgagggtttatttttaattgaaattttatgataaaccttattatctcagaagctatttaattgattcgaatgtttttatcccggttaattagagcaacgaaaattggtttgaatcgtgaagtttatcatttctaactcacttctcaaaattgttgataaattgcaaatatatttttccaaaagtctgtggacactttctaaaaataaattctatactcatgtattttccacttattagattttgcaggcttattgctgcatgttctgattttgcaggcttattgctgcatgttctttg

SEQ ID NO: 39758 - DNA, 815 bp, Heterodera glycines
acaatagaagtcgaccctggctttatccaatgataccaaccatatttataaccacttttcttactaacagttcgcgaggttcccttgttagccttttatgtgaaaaccaaaaacggccaaattaatagaaaaactgctaaatctgaatcgatcagggcttaatcacaaattcaggcaaaacaattgctcagttaaaatgttcacgtaccaacagatggccacaccaacagtaccagcatcggtcattttcgtccgcaatgccatcctcgcggtaagcactacacgggcattcttggcaagcttaacaaatgttgctcctctcattaattaatttctatttcattacctccttctccgctggtggtggccattaattttcgctttttattttctttaaaattcctaagatatttgaaatgaataagcaacgaaaaatgtgaaggtacacaaacactttcagttttaattctgaaattgatagataggcaattaattaattgggtggatggaactccccgccattggtggagggaggcaaataaatgttctatttacggaattaagtggtaaattccccccatttttgtgtgttttttgccaacagattatctctcctcttcagtcccgtgacttttagtaaataaaagggaaagaaaaattaaaggttgtattaattggtctttttagtgatggaagtcgggacgaaggcgtggagaaagtggaaaaaagggggaaggatgggaaagaaaggggaaaaattggggaaagttgaaaaaaagggggggggggggggggggaaagaggggaaaaagggg

SEQ ID NO: 39759 - DNA, 1317 bp, Heterodera glycines
tttttgaccattgttacctccttctttgttttatcttcgtcttcctcctctttaggggttttctttcctttctgctttaactcctttttgcccttttcttccgactcttttttggccattttggtctccttcattgctatttgttcttcgttctcatcatttccgctttctctttcctctttttgtcttttgcatactttttcatatgcaaaattttcgattgttaattcctttaaatgttcttcaatgcgacttgtcccttcaataccaaatgctgtgactaatctattttgctcttttttagcattttcaggtgaaaaatgcactgttacttcgcaatttgcttcttcttttgctctctgcctcttccttacttttttcctccttccatccactaaaattatttaaatttataaataataatttaattaattttaactcttttttccctttgcaatgagaaagaactcaccacagaaagaccttagcttatgaaaagcattcaaattaaatgaacataaagaactgtattaaaaagcaacacagcaaaacgttgttaaaatatataaattattaaggaatacgcacaaatagatttttttacaaaatatttttttcaaattacacccaccaaatgattctgttgcttcaaattggcattcatctaaataaaaatggattaaatacaaaaatcattaaaaataggcaactaaatgctcttaatcagtgacggggcaattctctcccaaacgaaaagtttaaaatattttaaagtgacaatggcatactaactgatgctgcacatgaaatctgttcattcatcaactgctgtactcccaagatgtgctcgtcttccccacaatgaatacggccaattgtgagagaagaagaagcagggaggggagagggggggggatggcaatccgacccctcgaaattagcttcgacttgaaaataagggtgttcactctcgacgaacagactgtactaaaaatacactacgacacagtaatagagcaaattttacgttatggttccgatgaccccgctgaccccataagtggtacatatccccattatattcatcctaatcttatccaaggcaaagtgattactcattccctcacaaagcattatcaacccatattcacaaaaggtattattaatgattcattccaagtcctcgaatttggttatcgaaagtgattgtataatttatttctgtgtatattagatttcttattgaacacttattatatataacccatgttgagacgaaatgacccctgaatgatcctctctaacactccaagccat

SEQ ID NO: 39760 - DNA, 1021 bp, Heterodera glycines
  unsure (1)..(1021): unsure at all n locations
ctactncgggaaatttctataaaattaagcctgggcctccgtctaggcggcccaggtccacaggacaaggcaattttttgcccgttctggatttcctggacttgggtttttcaacaaaatccaagcccaggctaaatataaaacatagacccagagacccaggcctttttcaaaaaaccaaagctctaattcagctggctttagggttcgtcgtctcgggtcccgagttattgtcatttcctcagttcttcgtggattatttctcggttaaatcattgcttatagactaggcttgactgtgccagcaacaaagctcaattttgaatttaaaaattcaaatttaattttaattgttttcagattttttgtctaagtattatttggtcgttcccataaatattgtgtcctcattaaaataaaattgcacatttttcaattcctattttgcttttattttcttgaatgttttgactgatgagagttatattcataagacgatgtataatattgccccgatagtttaatttttaatagttaatttttacaatctctccaaccctcgacacacatacaaaattcatatttaaatggtgccactttactttaaaatcaatcaccttgctgctgctgtcgagagaatttttgcccacaaagttttgcatttccaaatcacacttaatcacctaagcacctccccccccccactgtttctcccttagggcgaggggaactgggaacatgacagttcggctaatttaatgctcctttatgagtcattttcacttgcaactctcgccaaataaaacaactatctataccaaaagattttttttgaattggattaattcggcaaattgcataaatttcagctattttttgtcaccccccccccccccattttttgaacagcgaataaattgtgcaaaattgcatcagttcgccaaatcgatttggcgtaatgtgtgctgatgagtgctgctgactttgtatgtgtggaatgatgaactggtttatttatttt

SEQ ID NO: 39761 - DNA, 1074 bp, Heterodera glycines
  unsure (1)..(1074): unsure at all n locations
aaaaaaaaaattttcttcaaaaaaggggnggggggtaccattctataaggtataccggatgctttttaaaatggttgggggagaattttgcaaaccgacacggtcccttattcggtttttcataatcttcggaaacatctctcaaaacaacgaataatttttttttcatgttttagaaagctttttctcactcaaattttggccatttgattgagctgacaattgaccaaatgtcacgcaaagttttgtcggttactcattacccaaatcacaacaaaagtccgaatggggaattgcaaatcgatgtgagggtaaaacaaatcagagaaatcagtgggtaagacgtaaatcattttactaagctaacaaaaacactttataggcctgaaacgacttcatatttacaaagaattgaagaagagaaaagggcaagacagcacggggccacccaggacaacaggtcgaattacagaattacaattcaaacatttctaaaattggtcaaagaaattttgtgagggaaagtgccattctctgagatcaaatggcttcacattatcccctctaatccctttcaggtcttttctgcaaaaatattggatgtatttcgtaccggttattctttttatggtaagtaaaatatgcgtttaatcccacaaatttatttaattcttttcatttgcatgttttgtccaatgccctcaacaccgacaaccaagcccaagaatgacaatccggtttttcttttttccttcattctgtcatgttgaatcctggaaaaatttttgttttttatttcgggagggggcgggggcctggctacggacctgaagaaaagtgtgcgaatcgatgttatgctaatttttanagggtccaagtaattatgagacaacctagtaattctggaattanncaaacatgtcgtttaagtgattgattcgcattattgttgcctggagcttttgtctcatttttgtttaattgtaaaataaagtacctaattggtgtaaatttcagattcggttcgcgatttgcatccnggaaccccccatatataccaaattttagctaaaa

SEQ ID NO: 39762 - DNA, 1424 bp, Heterodera glycines
acgtaaatccgacgatgttattttctgtgtatccaatcgcatgaatgagttttagcagaatgtcaatcactacttaatttttttttaattaattttcatggaaatccaagggatttgtgggttcagtcacagtgagtgagtggttttgcccataaaattttgaaaaaaaaaaagtttttttttggaaaaatcaatgaagggcacattgaattgcagagaattagtcgttgccaaattgaaaatcgtggcgcagatccatttgaagaaatcttagctcaaattgagggcccatttaggtcttcgaaataattttggccctagtttttgcgatttttgtgcctcctttattgcttttttttttaattcaaacccgtacaccccaaaacaggaaagtaccaaaaaatttagccgcatggcctttcatccaatttatttgcacacatttttaacacgattttgtgcgtcgatccgccatttttgggtgccattttggaatccacgggaattccaaatttccaacaatttcggcgcttgttccacgaagtccccaattttttcgaattttatttattatgcctttgcttcgtttttcgattttcaacccgttttttccagaaatttatcgccatatttaaatatatatacttttttgcccggccggccgctgccgccagaccaagcgaagttgacaatgccaagaaggccatttggtggcaaaaattcgtcaccctccgcctcctcgtacacttcggtgccatccgcggacccgaacccgtaccagaaccatcatccgcttgtgcacagtgccagcttcaggacagggggcagttttcggtatactcagttttttcttggggataatttttttttttgaaaaatagctttttatggttgtccaccaagaaaaactggcattttagggcatccatggctatggcccttgagttttggtcaaaatttgttttttttgagcttcagacctataaaatggtctccaaaaatgctcatcttcagggtcaccgattcccaaaaatcctgaaaacgtttttgccaatttttttaaacaaaattcccattgtgaattcatttcgtttaaattcttggtaccgcttatattaaaaacggggtttgcaactttttgctgacaattttctctgtgaaaaatgtttttcttccacttttgtttttcatcttcttcagagcagggttgaaaaataggaattgtgtgtgtttttcacaaaaatggcacttaaatttgccattttgggagtcaaatttacaaaaaatgatatggtaaaatgggggacccgtcggtgatcggaccgggtcgaatgggcgacgccaaatgggcgctgccaactgggcgacgcccgaatgggcgccaatcaaacgggcgccagtccccttttctttccctacaattt

SEQ ID NO: 39763 - DNA, 1203 bp, Heterodera glycines
gccttggttccagcaaatgataattgggattggtcgcagtcggcaaaatgaaagggcaaattgacttagtgaattcttaagatacaacaaaagcattctctgctgtctggtgtttgactgtgttgaacagaagcacatttttaggaaatttcttgatacaaaatcacaaaagtaaaaaaaaagaatcagtcaatcttcatcttgtcagtcataatacctttcgcgcaagagacagttgccagcaaatgtgtgccctcgcatttttcaattgcatttgaatcacccaccgatactcaatgttcaccacgcacaaacaccaataaatatttgcgtcgctaatgccaaaatataaaaattttgaaatttttcttcgaaaaaagggcggtaccatcggtggtattactttgtcgtaattgcttctaatgatatatttcaccgacaaagagaacatatccaaaatttcagtttttttttgttacccaattgaagattattttaattcatcatcttaattcaccgtcaatttcttcgcacatacataaatgtgtatttctctccaaaattgcctcaagccgaaaattagtctttgtaatgggcggagaatgaatgaattgatgagcatgacaaacaccgaaaagaaacattaatccgcagcagcaaaaatttggtatttaagcagtgcaaatgcctctccaactgctcattctttctcccaaagtccattcatttgccattttcactgcccttttttaactacaaatttccaaggcatcgaaacatttcagaaaacaagtaaatgtctaacaacaaaaacactctgtcgcttcaaaactccgaaacttcctcgtccgcttcttcttcctccccccgtccaacgtcgccgaacggaattatgaacgaatacgtcaagtgagttgggcatgaataaaacaaacattgcccattccaacggatgaatgaatgcctttcagaagtgctactgagcggatgatccatctgagtgtgttggaggtcggccgcgtgggcaacgacggcgttggcattgtgcaactgcacaacactttcgacttcggcgcgtcggacgcgcggcggacctgcgcttgttgtgccgttctgtgtgcttccgggtgcgggtgcggccgtttgctggcggaaggcaagtgccatggcatcggaagatgggctaatgctttaatccatcaa

SEQ ID NO: 39764 - DNA, 646 bp, Heterodera glycines
ctttaaggtacattgatcattccgtcgtcacatttttccgtgccaaccagcaaatttttgacataggcaccaatttggatttgtatatgaatgacaacaacggcattgtccagccagtttggaatgtatttgcccgtgaaatttggcccatttttgcgccaaacattcgccatttgacccttccaaatgaacatttggccaatttgcgtcgtcacatttcaccaacaattctcaccgatctcaaccaattgaattcaatcaattccgattatttgttgcccgattcaattgctgatgatgtgccaaatgcaactgctggtcaagcgctgtccaaatggttgcacattccgacaacaaatgaacaaccgaagcgattgtattgtagaaattatgaacacgcagcacataattcaggaaccacaggatgggtcaacaatttcaaaaaggtgtggccatattttcgtaaaacatttggattaattgccatttgcttttcgttccaattttatttaggcatttctccgtgccgccactccttctgtcagctacgtaattcgacttgaactttcttataagtcaacgcgaattgagtcgtttgaattggtgaacgaacggaccaacgaaatgctaaaattggagaaggaag

SEQ ID NO: 39765 - DNA, 672 bp, Heterodera glycines
tgtgtgggaaaagggaagaggtgagaaaaataaagacgttaatagtgcactgtctgactgtctggctaagcttctgaaaaatttgacccaaaagggggatacaaacccaaagagtaccggaaaatccccaataaattttaagttttgcaaaaaattttaagtttgcaaagttttggcgttctgattactaaataaataataaacttatttgtacttggagcccaaaattgaatcgccgtgtgcagttttttaatcagatttgaaaatgtctaaagaatcgacgaaaaccggtaaacaacaactgagcggagggaccgattttaaaatggtaaaagtagaaattcagtaatgtgagcactctttttcaaaaataaaccaaatttacctatttaaagatattgttttagagattctcatgatttgataattcgattctgacatccaggtcggaatagatgtcagaatcgaaggtaattctgtagtttgtccccccccccttttgggaaaaaaaaatttcaaaattttttttgccctaaaaacaagtttccaggggtttttggggtcgctgagcacgaatccggcatccatttcggccaatttcgaatcccctacccgaattcgaacaaaaagtcgaaaattcaaattttcgaatttcgcattttttggtctaaa

SEQ ID NO: 39766 - DNA, 954 bp, Heterodera glycines
  unsure (1)..(954): unsure at all n locations
atttgttcatatttaattaattgacaagtaaccgacttagaaaagaaggaatggacacaaaaaaagcaatttggcataaataccgccaaaaaaatcatccattggaccaaatgatcgaataatttgggtgggcggaggaagacttacgatgcgttaacagattcttggtttgtttggttggtgatttgcttaacttggcgggatattctcgacacattgcggggggggggggtaattggggagcaaaatacgctaattaatggtaataaaatacgtcactaattgacaaaatgcatgaacatgaacaaaacagaaaccacagcaagcaggattaagattgtataaagtgacgatggaaaaaaagagaagaatgacgaagaacgaacaatggacggattaattgcgggggtggggattagagaaaacaggggaaaaatggggggggggggaatttgtaaaggaaagaccgacaaaggaattaattcccttcattaagaattaattgcacttcattaaagtgctgagaaaacgacgaatttcgattggaatgattgggatttgcaatcagcaaaagatgccttcttcagctgcacttgtgagaagtgttcttcgctttttggtgcctttgacatttccaacggccaaagattgaagtgaaaacaaaaaacaatgctttaactttctttaattgatttgtggattaccgtactcggcgatcactcaaatacttttgttggcttcctgtttctttaattgttcttttgcccttaaattttatctgtacgattgcatttccatgctttttcaccccccccctttttttctttttttatcatttccataaatcgctcatttgcattttgaataaaataatcggncattttcccgccattccaaaatcatccaacaatttgttttccngcnnacatacaatttggtcaaaaaggacccccc

SEQ ID NO: 39767 - DNA, 1663 bp, Heterodera glycines
tcactattttggcgttttgtcactattttttcactttcgacattttttggaaaattccttaacaaaaatgcaataaaaccaaaaaatacacccctaagaatcgacctaaaaaaatttcaaaaaaatacacccctaagaatcgacctaaaaaaatttcaaaaaaatacacccctaagaatcgacctaaaaaaatttcaaaaaaatacacccctaagaatcgagctaaaatttttcaaaactcctatgaactggaaaaaaaaatttctcaaaaatttacttggcaaaaatttttaattttaaaaaatttttaggtaactattttgggttttttggtcttaaaaatcccagtcctactcatttgcaactgcaatcagtgaataaaaattattttggcttattttttggctgaaaattatgtcactattcgtcactatttcggactttgtgtcactatttcttcactattttgagatttttactcactattttagttaactatttcggtatttttcgtcactaaaagttgcggccctactagtatatttattattattattattttgttctttcttccctttaattgtgaaatgatgtggcccaaatttttgcttcttccacataattgataccggttaaattgtttcataattatatacagtaattattgttttgttttttttgttcatttatgggtgacaggattcaaaaaaaaagatttttttggctaaatttccaatcagtatgatcggttcctttctgatcgaatcttctgtctcggtctctgtccgatcaaattgacggcacaaatggtcttgggctctatctctgatcaaatgaactgaatcccgatcaaatctcgatcacgccccagcaatggatcacacaaaactttcttttggaccgatttccccccgtctgtctgtcagtcaacctcatcatcatattagtcaacttaactttaatcatattgatgtgttaaatcactcgctactcactgttctccgcccattctccttgcacttgcatatttgtgacttacatttaaagtaattattttatttttataaacattataatttaatgggacaaaaaattagaattttgtgaaatattcatttttagttggtcttttacatttttatttggaaatttccgattttggatttcatttatttcaaattaacaattcttttgtccctcattttcttcacacttttcaaatttttgttgcaaaatttccttgaaagaacttataaatatttaagcatttgctttacatggaaaattgaatttttgtttaagcctttaaccaatggggattcatttacaaaactgaaaaaatctacctttgtaaaaatgccaccattttttaaatccatgtttaatgaatgggtgatgatggactgagaagagagataatccttaataaattgcccgttcttggcactaaatgcgtgccattttcatcccctcgggggtggcaattattttcatacatcaatttcaccacacattcatttgaccattttccattcctattcaaatatctttctcttttacacggttagataattaattgccggatattttttataaatttaaatgtaaattaaaattttctcaaaaatttttttaattattttcatttcgttaatcctcctcc

SEQ ID NO: 39768 - DNA, 1678 bp, Heterodera glycines
  unsure (1)..(1678): unsure at all n locations
agacagtcggatttccccgagttcgtgccagttctaaactggtcgttcagcgccaaccgaagtgcataccctgacgagcatacacgcagctgaagcgctccacaagcagctctcaccactagtccacgcaccatccccgaaagaacagcacgcagccacgggcaaaagccgcctgtttcacgcaacagcccggctgacccgacctttagagccaattcttttcccgaagttacgaatctaatttgccgacttcccttacctacattattctatcgactagaggctgttcaccttggagacctgctgcggatatcggtacgatcaggcaggagattcaaatagcttccctcgcattttcaagggccgtgtggagcgcacgagacaccacaggaaccgcggtgctttacgggcgcaacatccctatctcaggctgagccacttccaggcacgcacaccctaaaccagaaaagagaactctggctcggactccacacgacgtctgcgagttcatttgcgttaccgcgcaaaacagctcttgcgaaccgtcatttccctagcctggcgtgggaatgttaacccacttccctttcggcaaccggatggaccaactgcgcaagcacagaaaagtcgtcatccgtagtgtgttacggcgttagccggtgccttaggatcggctgacccacattcaactgctgttcacgtggaacccttctccacttcagtcttcaaggatctcacttgaatatttgctactaccaccaagatctgcactggtggaagctccggccgggcccacgcccaaagccttcaacgcaaccaccacgaccctcctacacgtcatggccagactacgcgacaagcacgtgtacaagccaatgacggtggagtataggtggcccgctccagcgccatccattttcagggctagttgattcggcaggtgagttgttacacactccttagcggattccgacttccatgnccaccgtcctgctgtctatatcaaccaacaccttttatggggtctaatgagcgggcactttggcaccttaactccacgtttggttcatcccacatcgccagttctgcttaccaaaaatggcccacttggagctcaaacattcaacgcctgggttcagagtcaagcaaccctggcttcatacccatttagagtttgagaataggttaaggacatttcgtccccaagtcctctaatcattcgctttaccgagtataactgcttaacgagctccagctatcctgggggaaacttcggagggaaccagctactagatggttcgattagtctttcgcccctatacccaagtcagacgatcgatttgcacgtcagaatcgcttcggacttccaccagagtttcctctggcttcatcctgctcaggaatagttcaccatctttcgggtctcagcgcatacgctctgtctccgccccatcgcatgcgatcgagacgggactatgttgcgccccaacaccgcagtgccagggatcacacatcagctccgtaagaagccttcactttcattgcgcctttgggttttgaacacccaatgacttgcgcatacgctaaactccttggtccgtgtttcaagacgggtcgaacagatgaccggcttttacaacgagaacgtacaactgagagcccgagctggaccgaactg

SEQ ID NO: 39769 - DNA, 1356 bp, Heterodera glycines
  unsure (1)..(1356): unsure at all n locations
tgtggtataccgctcagtgctgcacatgtgaaagcctgtgtatggctgctgcgtggcaatgtgtcggtggcgggccgcctcgcttggctggttcgctgcgccaatgtgggatgcacgctcgtggggcgacctaacggctgtgctggcgtctgtgcgtcgttgagcggttgttgtggcaggcacataacacactgactggggatggtggtttcgttcccggtcttacgtgccgtaactagcggtgtgtttgtgcttgctgctacgtccgtggccgtgatgagacgacgcggtagggcccgtgcttggcctagcacgtggcttaagactcaatgagtgtcagctcgggcaccgccagctttttctttttttttcattatttttttttacacttctgttgaagaatgaattctagtcttatcggtggatcactcggctcgtggatcgatgaagaacgcagccaactgcgataattagtgcgaactgcagaaaccttgaacacaaaacattcgaatgcacattgcgccattggagttacatccattggcacgcctggttcagggtcgttaccataaaatgcactgcttgtgcgttgcttcgtgggatcatgtacttgtacgtgttcttacgttacttgctcagctcggctgtggtgttttggtgtgctggcgcgaacttgtggttctaattcgcgttttacggaccgtaactcgggcgcaccaatgctttgcatgctgtggcggagtgcctggattactggcattcctgctttgatttttcgacctgaactcagacgtgaacacccgctgaacttaagcatatcagtaagcggaggaaaacaactaacgaggattcccgtagtaacggcgagtgaactgggaatagtccagcgctgaatcgcagctcctctgggttgcgaggtgtagcgtatagaccgtgagcttgggttggcccgcttgttcaagtttcccttgaccggggctccagagaaggtgcaagacctgtccaactggcggtgcctatccatctttacgtgtcttggagtcgggttgtttgggatcgcagcccaaatcaggtggtanacttcatctaagactanatacggccacgagtccgatagcgaacaagtaccgtgagggaaagttgcaaagcactttgaagagagagttaaagaggacgtgaaaccgatgaggtggaaacggacagagctggcgtatctggtctgcattcacccgtttgttgctgtacgttgtactgctagcctccagactggggtttgctgtccttctgttcagtggcgaatggggatttgcaggcggaggcgctgagatgtcggagtagctgcgtgagctcggcttg

SEQ ID NO: 39770 - DNA, 1189 bp, Heterodera glycines
cgcaagcgcttttgtgaggtataaaatttctcaaaaaaaagagatagccatttttctgggatagagtataaatttaaaaattccctcaaaaataaaaggtctattgcgcaccgccctccctatcatgctcgagagcatttgtatgtgtataaaatttatcaaaaaaagagatagccatttttctgggataacctctaaatataaaaatcctctgtgaaataaaatggcgattgtgcacagccctccgtctcatacgcaagcgcttttgtgaggtataaaatttctcaaaaaaagagatagccatttttctgggatagagtataaatttaaaaattccctcaaaaataaaaggtctattgcgcaccgccctccctatcatgctcgagagcatttgtatgtgtataaaatttatcaaaaaaagagatagccatttttctgggataacctctaaatataaaaatcctctgtgaaataaaatggcgattgtgcaccgccctccctatcatgctcgagagcatttgtatgtgtataaaatttatcaaaaaaagagatagccatttttctgggatagagtataaatttaaaaattccctcaaaaataaaaggtctattgcgcaccgccctccctatcatgctcgagagcatttgtatgtgtataaaatttatcaaaaaaaagagatagacatttttctgggatagatataaatttaaaaattccctcaaaaataaaaggtcaattgcgcaccgccctccctatcatgctcgagagcatttgtatgtgtataaaatttatcaaaaaaagagatagccatttttctgggataacctctaaatataaaaatcctctgtgaaataaaatggcgattgtgcacagccctccgtctcatacgcaagcgcttttgtgaggtataaaatttctcaaaaaaagagatagacatttttctgggatagagtataaatttaaaaattccctcaaaaataaaatgtctattgcgcaccgccctccctatcatgctcgagagcatttgtatgtgtataaaatttatcaaaaaaagagataaccattttttctgggataacctctaaatataaaaatccctctgtgaaataaaatggcggattgtgcactgcccttccgtctcatacccaaagcgcttttgtgaaggtaataaaatttctcaaaaaaaga

SEQ ID NO: 39771 - DNA, 1416 bp, Heterodera glycines
gcgcaaagcaagcgccaattttgaatgttggccaagagctctaattaaatgtttggaattatgaaaaaaacaattaaattttttaaatttcaattttggtcgatcagactgaaaaattaagaaaaatttaatattttaacataaatgaagcattattatacataggaatatgtcctctgctgggaaaattttaaaattccgccacattgggtttgggtattttttttaaatttggaatcattcgattgcccaaaatgttttctttattagcttgcaaaatttcaaaaatttcgtataacaaactagctaaggccttgttctcctctttttgtcaggaatttgtccaaaaatgacaaatttggtgggttttacccgccgaaaaaacaaaaaatcaattttccgattggcaatttttgaaaaataaattcgaatttgacttgagacatagcaatctctttttacataattttgcttcgttcaggccaaggaatgtttgtgaccgcatgtcttaccaacgtggtgcgttccgtgctccgtgtggtcggcttccatatgatttgttggggcccattttggtgggttcgcttaaacccgaaggaggggtggcattgtctttgattttgatttttgggaaacaataaattctggcgttctgtcagaaattattaacactttttggtgaaaattcttaaatttttttagaaaattttatgagttgtccatagaatccgaaagggagtggggggtgggggggggagaggggaggggtgaaaaacaatcaacaaggatttctattttgggaaatacattaaaccaatttttcagggtcttcgtcctcatcccaatcattgaatacttccaattgtctcaactgccgagggcattggactccgaattttcacgaaatattcgaatggtttcgaggcgagaattttttaaaatgaattttcaaaaaccatttaacacttttttaatttacagtttcttgccttatttgaacagtgctggcaattggatattttatgcagcaatgaacagagaaatgaggtgggaaaactgtgcacacccaaaaacacgaagaaatttaaaaaaatatataattaaaatcctttaaatttttgtttgagaaaaaatagcaacatgaaatgcaactaacaaaaagaccaacttattgatgaaattagtgatattccggaaaatcaagcaggggaataatttaaaaaaaattgcaccaattttacaataaacaaataattaattaaaatttaattatttttctattttgagaatttaagaagaagggggggggggttgtgctttaagaaataaaaaagtgcattttttgtataaaaacattagaattttgcttatgtagatttaaaacttcaatcttccctaatgcaaaaacaaaaaata

SEQ ID NO: 39772 - DNA, 1224 bp, Heterodera glycines
ttattcttatcaaataaaatataattttaatttctagaaaaagaaattcagcaatgaaactgtgcatattattcttttcaattgcattatttttaattgctctaattgaaattggagcggaaaagaaaaaatttgagcaaaaaacatttgacgaaatatttggagaaaaatgggaagaaaaagaaaatgaacagaaaaagaaagaaattattcacaaattctacaaaattaaagaaaaaatcaaacaaaaaggaagaaaatattcaacaaaagaatggaataaaattgaacagaaaatagcgaaaaaattgggaacaaatcgaaccaaaatttataaatggatcaaagaattaaatcttccagaaataaaatcatataaatcaaaaacggatgaacaaaaaattgaaattgtgcaaaaatttatggcaatgaaaaatgagtacaaacaaaatggaagaaaatattcgagaaaagaatggaagagaaattatgccgaaatttgtcataaacttggagttggctaaggagtaattaggaaatggaagaaacaatttggaatgggtgaaagaataaatgagaaagaaaaaatggaaaaaatgaaaatgtattggaaaatgaaaggagaaaatccaaaaatgagtgacgagaaaatttcaaaaatattgaaaattagtcaacgaaccgtttttatttggaagaaacaatttggagaagtaattaagaagaactgaaaattaaagagatattctttgatcgcctttttcttacgatatttgttgatttgctttttgtactttttgaaaataaaaaattattttaccatttttataattttaaatttatttaaaaactcaagtacaaaatattaaatcattattgaggataagcattattagagcccagacagggcatgatcttgtacaggattttcccagaccctagtctggctcctgtttttctttatttaaaaaaactgttaagcccttttaatctggaatcctgcccgggttcatcttgggtttccgggtcctgttttttttcaaaatttcgtgctatagtttttggccgctgaattcagttgaaaagcctgtgtggtttaccaagaagctttcaagaaattaaaacgccctcatttccgtaatccttaatctcagtgtccaaaaacgccatcatttcccaaatgcgtaattgcgccttgcgcccatcccgtgaaagggggatctg

SEQ ID NO: 39773 - DNA, 1186 bp, Heterodera glycines
taattcaggagcagacagtataatccagtccacacggcaaaaggaactgcacagaaactggccacttcatcaattttgttgaaagctaagactgtagatatagctgtgccgtatatgtagccatagaccataatctaaatttacatatgtatgtatatcagcagggctcccattcgtacttggatgctaagtacgcacttggcttttatgcttggaaattttaactgtatttatttccaagattgtacttggaaaccagaattttggcatatgaactgaaaaatgtcaattttacggaaaaaagtttaaaatttttggaattatttcatgaataatcattaactttttttgttttttaattttcaaactaagtcggtaagaaactgcttttttattgtgtttcttgtcaaaaacacatcattgtcgaatcgatgggagtttcggcaataggtctgtgttcaaaatttccaattttttcctccagggcgcctatctgcgccgctggacccccaaaacccttatttttctttaaaaattggcacaaagtcgcaaacaatttctgttttgcttcgactcattttttgctttaaaaggggaaattaatggaatccaaaaagttggccatcacataaagttcaacttttcgaagtaaaaaaatgaattgatactaaaacgaattatgctgaaaggaatcgacctcaaaattcccaatctttttcgagttgaagatggtagcgagacagctgaacatgttcagtccgtaacagctaagagccatggcagtgtttgtatttccgaagcctaaagtagtttttcattgaaaatagcaagaataatttatttttgtttttttttgctgtacagttgaagcggtacacttagtacgaatccgcctatacgaatgggtgcgaccttatcagggctggacgtaattacggattacggaaattacggggtttggagttatggattggacttttccgtaattttgatccgtaactggcttttttagattatttttcgaggcgacttctcgcaagatgttttttataaaatgaatttagctaatttttattaaaaggctacccacatttcgatttaatttgacttattcttggtaacttgtagtattattagcatacatataagggggggggggggctagcgaaggggaaaaaaggaaatg

SEQ ID NO: 39774 - DNA, 1282 bp, Heterodera glycines
tcgcggcattttccatctttccccaatcaacgaacgacacaacccccggggggggggggggggggggggggaaattggaaattgatgggatcgccgggtcttttcttttcatccgtcgccctgcaaattgccttttattgatcagcaaacaaatccattacatcagcagggaaattgggcaaattaagctcaaaataaaaccaaaaaatatttcaacaattggattgaattttaaattaatcatcaaatctgccaaatattttaggatttgtcattgattgtttctgctcatttttatgcataattggcattttcttaaaacaaaagggatttcttatttgtttgtcctactttaggggtttttggggtccgacgtgcctaaaaaaaatcaggattttaatgaatttgtaaagaaaattagctagtttttcataattttttcttttcctcttcgccgacaagccctgcacccttacgaccaataataagtgcttaaaatgcggtgttttttttttgaaaattttagggggatttttagggttggccaacgaaaaaaaattgggattttgaaaggattttgtgagaaaaaatccaagtatttccataaatcttttcatcgcagccgcgctccacccctactgctggtgagtaataatctaacaaatctttaaaaatattcaaatttatcccggcctacttctccacaaaagtattcaaaaaataaaatgtttttttgttaaaaattaacaaaaacaggatcagttgtcgcattctgttaactttctgacggtgtcgcattttccggcttccccccccccccgtagacttttttaattccaattttaacctctcaaagaggggcgttcaaaacttttagccctttcaggctaggtaaaaaaataatccaaataattaattaatattatgattcgaaattcacttttttaaatatttcatcggtctcatttaattgctttacttggaattttaaacccatgtgttacaaaaattagggttaacacaaagtggccttcgtgtaaaaagctgttcatgtgagggagggaatttatttccattcgactttattaattcaaattttgtcatatttaaattagttaagcaatttaaaatttgacttattttgaattttaactagagttgagcgggaccgggaattttgggcaaacccgggaccgggaccttttcgggttgaaaacccgggaatttttggctgagaaaacgggcaaaaaaccgtgactagtcccggtcccggtcaaaaccg

SEQ ID NO: 39775 - DNA, 1364 bp, Heterodera glycines
tgtgcaaatgccaatgttttaccagcaaaaaaggggtgaggcccaatgccgggcgaatagcagcagattcccaccccaaccttatgtgattaatagggctaggatttttatgttttaacatattttttttgcggcttagttatggcgagagaagcccaaaaatagcattttctccgaacaatttttggtttagagcgacttataaaaacataaaaacacatattttggcgttttggcacataaaatatgttagcacatattttggggtttggcacatattttgcacatattttggcatttttgagaaaaattgcaataaaaatacaagaaaattgaaaaatacacccctaaaaatcgacttttttcctaattattaacataattttcaaattaaaaaattttttcttcgattgtagaaactaatgaaatctcgaattcattaattcgtcattggatttcgaagttctctgctggaactttccatttatagaaatgatttatcaaaaaaagacaattttaccccaaacacttcgaaatgtatttgatttgcgttgtatgggctaaaaatgataaagaatgagatttttgggaatttttatgcaaaaacacacttattttttcaatttttaacacatattttagcacatattttggcatttttgggggtttttagcacatatttcagcattttttagcacatattttattacatatttcaggatttttagcacataaaaatcctagccctagtgattaatgctttttcatttgtggacagcatttgtgaattttccaaggcataatgccaacgcgttaaatgccaaaatgccaatgccaaaaacgcccctcccccctagcgcgaggggctaataataaaaggcataagccatgctaaatgaggaaaaattcatttcgaatacaataaaaaaaaaaagaattccttatttcccctcaacggctttatacagatggtgccaatggatatttctatgcttttggaaatgcagcggattttgggtgccggtgccaccgccgctacaattggtgatcagagcgcaaacaacggcgaggtaattaatgaatgggttgggttgttaatcagtttttatgatcatcgttcggtgaaaactgccgtgggcattaattagatgatattttcggcatttttcatcaatttcactagtcggcttaaggcataatcatttatcaaaaaacactctgggtcactctttaattaaaatgcccttaatcacggattaaaaataggcattgctaatagaagcacattttcatcagtttgacagctgatgatcacaaattgtttattactccaagccatattttagggcttaaaattctgatca

SEQ ID NO: 39776 - DNA, 929 bp, Heterodera glycines
gaaattaagttgaaataaataagttagctcttgtttaaaagtgtaaagttatttttcaatacattctttttgagatttattttaataaattttttcatttctatattttttttatctaaaagttcagaaatatgtttttactaattgatcatgttttaacgatttctgggtgcctttttgaatcaaacttcaaaaaatagaaaggtcccggtggtgccgatagtcgctgaaatgtccactattgtttctgcttgccgtgggttggtacagtggcgaaaaagtgttttttaatgcctttaagcctgaaaaaccttggaattcgaatatttgagttataattattcgattttaattaattagacttatattttaaaaattttcggcagcatttcagtcttttccctaacaaaatctgcgtaggccgcaaaggataattttgtaattagttaattaattttttatttctaatttttatattttccatttagttttattatttttaattatcattggctgttttttgagtttgactttaaaagttgcatttatttatattcttttaaaaggccttctaactaaaatgatttatcttcattagcttcgatttttttaagcgacgtcaaattttcggtccattaggtggccaatcagtaagtaagctttaccatttgcattggatgttcatgctggataaaatttgaaattaactgctccaatattttaatgtctgttctttttacttatttatccacgtatgttctgtgtttatttttaaagatatttttgagttattttttgttagattttgtaataatagatgtttttttgactattttttgaatgttatttatttgtctaattaatttaaattctttaatttttttcttaggaattcagttcataataatttaataataacaacatttagt

SEQ ID NO: 39777 - DNA, 1023 bp, Heterodera glycines
  unsure (1)..(1023): unsure at all n locations
cagggatcgaatttaggtgcaagcctaaaaatatttgctgaaaatggacgaaaaaggacaaagattgttcaaacagccnatttctctctaaatatgtntaaattgtgtcttaaatatttgttatacaattttttttcaaatttntaagcaaatatgaagaaattttgggaaattatacccttaatttggaaaaatttatgtccatatttatgcaattttatgtccatatttcgcgatttttggcccatattttgagattttatatccatattttttgcagccctactgataatcagaggagcatatttatttttactagaaaattaagcagaaataacaaaaataaacatgaattttttgttaaaatattaatttattaataaaaaaaagcaaaattataatgttgttgttcatgtgtcgcaaaatacgcacacataaaattgtcagtcaataggaaaagggggtatggatcagggatggagttccgaggcactaaaaattttcggaagtcggaagtcggaattccgatgccccaaaaattttcggaagtcggaagtcggaattccgaccccaaaaatgtcggaagtcggaactcggaagtcggaatttttcaaaaaaaaatataataaattttttaaaaaaatatttaataggctaaatttttaaatttttaaccatgtaaaaggtaatttcaaactgtttttagtttatttctatattttttaaaaagatcaaaatattttaagtattacattattttggatttttttttttgggaaagttacaccctttttttgcggcgcgctttatctaaagagaatttgagaaactgtggggaaggaagggtccggcggtgccgatatgcgccgccgggaaaaattttgtaatttttaatgtaaattgttaacaaattttgtccaaaaaatggaaaatttagcgattttgagcagattttcaagaaaattaagttttttttgagtcctgcagtgccgataggtgccgtcggaaaaaaaaatgaaaatt

SEQ ID NO: 39778 - DNA, 1077 bp, Heterodera glycines
  unsure (1)..(1077): unsure at all n locations
aaaaattacgccaaagccgccggcgccgcctgaaaaaatgcaaaactganaatntcattattatatttaaaaaaatntattattgacaacaacttgcctgtgaaagcaaagcttttcgccagactgatcgtcgaatgttgtcacttgaaaatgattaatttttaattaacgatagtgaattttttgtatttttcaaatgtctcattaggcatataaatgcaggattaatcatagtaatcccacaatttcagccccgacccatcagtgatctcgcattcctagattaatcctccacagtttaatgataatagatcatatgcggcgattatgtaaatgggatcccatcccggaaggattttgggtccaaatccatctagtccagcaatttgatcatttttctccgataaaattaaagatgattgatgatcccctgcgcattttgtttttgttgttgtaccctcggagatgatcactgcgttcgcccccttgtccaacaggtcggcaactcggatttcggagcgcagtcgcgcaccgtcggccggaaacggtgcgtacagttcaatgtattgttcgccgtgaagcacccggctcagatcaaattgaatgccaggccaatccgacttaaatcgatgtgtgatcagttttaaccttctagatgcgtagagatgatcaaaattttgggacagaatggatttggctgggggagcggagatttcggtgccaaaaatcccaaattttggcaaaatgccaattttcttaaattccttgtgattactttagctgtgggatcggctgattttggtgccaaaaaaccctgttttatgggtcaccaaatccggcagaatgccgaacgatgatttctgatcaattttctgatcactgatcagaccatgaaaggaaatgagtaatgaatcagatgacgcattccaaaaatgcttttggcactttcttcgattggccaacagatcaatttctattacattggcctttaaaaacagaccaatgaaacggccaccatcccaggcacaacagcaaaggtagaaacacttgaaagtcgggatggcctggacgggaaaa

SEQ ID NO: 39779 - DNA, 993 bp, Heterodera glycines
  unsure (1)..(993): unsure at all n locations
atattttggtccatatttggccatttttgagctttttagtccatattttatgtccacatttcgcgttttttagtccatataatttacatccttaaaaattacaaaaaaaaatttcccagcgcaccaaaaataaaaatctttttaaaaaagggccgtaaaaatatgttttaaaaataaaaaaggtcgatttacctggcttgaccaaattctaggctaaaataaagattaccatttttttcaaaaattttataatcaaaattccacaaatttgcggcgcctaaatgcaccgccggcggttcctaattttttcatattttttttttgcaaaatttgatcccaaattaggaccacaaagtttgggtgcctcatgttggatcacaatggtcaaaggtctcacaaacggaactttatctgagctagtaagggatggaaatcacggctagattttcccaaagtccaaatggacagtttgtaagtgaatatcgatcgaatccctggcccaattattatgatcactctttctttgatcagaattgatgaaaatcgtatattatgtattgtgtttcgtttagtctcttcaacgcatggcagcaaagaactgaaaaagttgcgcattattagcattaattagcggaaaatatgaaaaaaataataaataaatgcaatagattttaatttgaatttacaaattctcattgatcgcaattcgtcagcagtggtgttggcacaagtgccacaatgggacacaacttcaatggacgataggagcactttgttgacccagtggggccactgctaaaattcgaaaatgccaaaaaaacatgcaaaaataattatttttaacggtataaaactaagacaaaatttctgtttttgacctaagtattttaaaatcttaangaaattgatggtccggcactgctggtaagcgccgcccgaaaaaaattgacatttttaaaaaatttattaaaaaaagcatgaaatttgaatttt

SEQ ID NO: 39780 - DNA, 1102 bp, Heterodera glycines
tggttaaaaatgttgccgtttaagggtttcgacagattttgctaaatattttcatagtcgattttttggagatatcgtgaacttaaattcccatccctactcataattagctttaaaatgagttattaaatgtactgagaaataatattttagtttttacgtttaaatttcattattggccggagtgtgggttcaaacccgcttggctgcgggttatctgccgtaatttgttaaatttaaaaaatcattaaataaataaaaaccaactttccaatacatttaatagctcattttaaagctatttaacaacacattcataaaatttgggaaagaatgacacttgatagcccttgtttaaatttacatgaaaaattctttttaaattaattacagatggcccagtgaatcttgaaacggcattgtccatttgtgcatccattgcttgaacagtgccaatgcaacatagaataaatgtgtgattgatcaaatgcaaaaaatgaggcgccggcagagaaaaatctctaaaaaattaaataataaaaaaaatcaaaaatttaatttaaaattactttgtcagcaatatttatgtagcagccccacagctgtattagcatatacgaagccaaagcgaacaacacaaatttctgcaaaccacgtctcatttttgcttagatgaagcagttaagaataaaatgaagatgttcacatagtatttaattacgcataaaattaaatttaaaaaatttataacatataaaattaaatttaaaatttttaaaatagaatatgaactcaaaaattagcttaagcttaagttaaaccttccgcgacgttgggcgctaccgactatgcgccgggtgtctttttgggcgccaagtcaaaaattaaaaacctaaaaaagagcatatacttaaaaaaaaattaaactttaattagaaaacttgtacaaaaattatcaaatatttacatttttgttgaggataagttggacaaatcgccacaaaatacaaatgaaaaatttaaattaatgaatacaaaaagaaaaaaattttcactaacatttgcctatttcttattgtactatgacatgggaagttaattg

SEQ ID NO: 39781 - DNA, 1099 bp, Heterodera glycines
  unsure (1)..(1099): unsure at all n locations
gtgtattttttaccctagaaaaaatgtaaagaaaattcttaacgttatttttcgtcgggacaccaattaattctccagtattaccttattaggtatactgtaagatgtttttatatgttgaattctgaggacattgggagatgcagaggatactgcttcttttacttttgattaatttgtttatttctttctttgtggttcgcccacttcccatcatccgatcgcgctgaaatttttaccagcagtttgttgatggggaaaaacatcatacacaaaaaaattacaaaaatcggctaacgtaaaaaaatttccaaaaatttttcgaaaaatttgggtattaaacaattataacaacactactttgaagacatgtaactttttctatagggtaagaaaaaatctgaaaaaaataatgttagcataattttcatgctgatcaaaaaagtcctttgctccacagtgatcagaccattccttcggggtgatctgaaaacctcaaaatggcttaaacaagatgcaaaaaaccgcatgtcgctacacttctgtacgctcagattccgtacgattaatatcgaagtgatcaaagctactgtaaaatgcactgttttcttaagaattacagtacttttttgctgttcgaaattaaaatttgcttagccccttaggaattctgcaaaaattttcccgataatagccattttgaggtttttagaatactaatgaacagggcttccaagtgcgcttatttctaggatttgtgcttatttcagcattatgtgcttattttttgtttgaaaattaaaaaaaatacaaaatttgattgtttgggaccaggctgtttttattgaagcgaatatatgaatgaattcgattttgaaaaattagaaatttttcattttcttgagtgtaagataggtacccaaatttcagagaaaatctgttaaatgatcaaaatttcagtcatttactcacaaacaataaatctctatgaaagatcacttaaaacacaatgattanatgggtaattcattcattccancactgttccgctgactgatcattttcactgatngagtgccaattcgtctaatatctgatg

SEQ ID NO: 39782 - DNA, 651 bp, Heterodera glycines
atgaaagggaagcgaagaacaactgacgagagggagggaggaacagcagcggggatttccccgcccctccccccccccctccccgtctcccgccctgcttttccgccccttttccctctcccctccattcattcccaacaaacgtttcccttctggccactttcttccgcccgtcccacccctttcgtccgtctcttctccaccgattgatcgatttgccggcatttcattcacttcattcctcagcatcggatggatacacattccccccccccctccccccttttttgttttgtctcccaccaaatcactcactgactactcactctttcacctcatttagcatttgctctgcctttaaatttacagtaccgagtttttacaaattataatttgaaagacaacaaattgatgagacagtctttgggtggagattatcagagaaattatcagcactgagtcatcgccaataaacgacgttaaaacaaaacattacgaatcggtcacccgtctgctgataaagccaaaattggaaaggaggtgagttatgggaagaggggttgagttgggtgggaagaaggcttttggtttaaactcaaataaacaaacggagaaaattggagcgataagaaaagagagagaggggggggg

SEQ ID NO: 39783 - DNA, 962 bp, Heterodera glycines
agtgtagagactcactacaatacatttacactactctcctaaagtctatataagcgcagcgaaattgcacatccgcagtcacttttacaggtgctatagtgtagagtgttctatagtgtagagtgtaggtgtgttctatagtgtagagactcactacactacactctacactactctccaaaagtctatataagcgcagcgaaattgcacatccgcagtcacttttacaggtgctatagtgtagagtgttctatagtgtagagtgtaggtgtgttctatagtgtagagactcactacactacactctacactactctccaaaagtctatataagcgcagcgaaattgcacatccgctgtcacttttacaggtgctatagtgtagagtgttctatagtgtagagtgtagattctgcatttgtactgtttctacttgtgttgattatataaaaaaaataaaccttcaaagtctataaaagggagtgaaaaatcgcttcccggatcatttttcgaaaaacctagcgtaggaatcctacgctgactaatgacttagcgtaggattcctacactagcctttcctacactaggctaatgtagttatcatactcgagctcaaagtctataaaagggagtggaaaatcgcttcctcggatcatttttgaaaaacctagcgtaggattcctacgctgattaatgaactagcgtaggattcctacactagcctttcctacactaggctaatgtagttcaaatgcactagcgtagagtatccagtgtaggatatctacaagacattgtgttgatgctacatttttttatatgtttagcaaaatatttcgttgacagcgaaattatatttctattccatccgagggcagcacagtcagatggacaacacccacaacaacaacatgtcttctaaacaaattccatccgagggcaaccagccaaccgatgtccaat

SEQ ID NO: 39784 - DNA, 679 bp, Heterodera glycines
acattagcgccagcaagaactgaactgtcccgagattgcattcccttccccccccccccccccctctcgcgtcacttttggcgcctttttgcgcttttgtcgataagatcattcattcattaccccctcagggaaaggggagggggcggtgacgaaaaacgccggaaggggtctttttcaaagggatgggattcaattttagaaatttcacagaaagggtaagggaggggtggggaaataaaaagggggggggcaatgacgaagaaatgaaaaaaagggagagagatggacatgacaatgacaatgagaggacgcaattcaaattggcaaattgggtgatgggactttagccaagggcaaacaaaagatcgatcaaaaaaagtaaaaagcgatcgattgattgggatggatccgatgatcaatttgataaaggcgaattgacaaattgggggaatataaatgaaaaattgcatttggaatgactcatcggcagacggaaagggcagagaaagccaaaaagacaccatttgtgtatgaatgaattaaagttttttatgtgtttcctttgcaaaaagaaacagaaaagtcaaaaatagcaaaggaaaggggccaaaaaaggggaaaaggcacaaaaaatggccaacaaatggcgaaatgtcaaagagacagcgagaggagg

SEQ ID NO: 39785 - DNA, 1440 bp, Heterodera glycines
cgtcctttcgaccattccgaaccccggacaagagaactaactaactgtatgaaaaactgagtctattttttttatataaatgagtattttcaaaagaaaaattgtcataaatttactcagtcggtagcaacaaattttattaaaaaatgatttttgtatatttaaattaattatgtagatctatagagaaccccactgattgattggtaaaaaattatgacaatttttgatgattaatgcctatttggcgattataccctttttggcatagtatttcaaaaatcaaaaaccggaaatggacaattgggcgacagcatttggtttttcgatctttcataatatttcgaaaattaattgatataaccccatttgccgttctctatattaacctccaaaattgcaccaaaaaaaaaaaaaatcaaaagttatgttaaaaatatttgaaaacgaaggttttaaagttttctagtccataatttttttggaaatgaatgaatttttttgaaaattttgtaaattaatgaggacacttagagctacctaatactatcaaattcataagatttgaacaacaatgtaaggagttagagttatacccaaaaagccaggctgttgcccaatgtctgtctgtcccccactgatcaaaacattttgtgttttacgatgcttttcgaattttgattgacttgcattgcacacataacaagttgctattgtttaaattcttgtttcttttttaacaaatgcatgttttactgagtgatttcgctgtttttttcttattgttagtcgtaaaaacatttttttttgaattatatgggggcgcttgaaaagtaacgcatgaaaaatattgatggatgggattaaatattgcggattttagagccagtagttttggaaaaactcggacccggacctcagaatttacgagatggaaccggaatgattgggcacacaaattcatgttttacaatagtccggttcttgttcaactgtatgttgacccgggtcctgtacaggattggattttagaaattttttagtgtatttaaaccagggttcggatcgaaaaattttcaaaatcagaacatcgggtccaaaaaatcagattttggggtcgaaaatcagaacattttgcaaaattgcttcaaatcttttatttttacaatttattcgatcaaaaatgtattaaatattatatttttcacctcccatgatcatctttaaaaattttggtgaggaaattaacaaatcgtaaatttcagtgcactcgggatcaaaaaatcagatttttaagaattttttgcggcgcatttttccaaaaaacttttaggaaatgggcgagggggagggtccggcggtgccgataggcgccgccggaaaattttttgtaatttcgttctgatttgttaactagattttcacctaaaaaatgccaat

SEQ ID NO: 39786 - DNA, 1233 bp, Heterodera glycines
ggggggggtcagaaattcctttacaaaaaagaaatttcccccatcaggggaaaatgaaaaaaaaggctcaacatttttttaccctttttttgcgtgcgcgcttttccaaaaaatttgccgaaggggggcgggggggtccgcgggtgcgaatagacgccgccggaaaaatgctgcatttattaacagattattttcactaataaatccaaattccataaatgatgaagaggataatatgtgggcaaacagaattgcagattttcaggccgctccagcggatggcataagaggtccacacgaccgacggaaggcaaaatacatacggcaagacaacaacctgcaagctttagtcgctaattttgaccagcgtgatccgcttgaataccttcgcgcatgtgcctaccacttacacttttaaaaaattaagaaaatcattcaaaaatatatcacaatttaaactatgtaattattttaacaaaggtattccaaatatttgtgcgataaataaactcatgaaattaagtggaattcggttagaatacatatgctataatgttagaaaattaaagatagaaatccacttgaggcaataaattactcgggttttttaaggtctcgtttcaagtttcatgaaatccgagagacaaataccgtaaaactcgaacaccgatattcacgaacgcgagcatccgattggcaattttaaacatattttatgtgtttttttgacaatttttctttacttaacattcgtgttgatgtaaaaacattttaatttaatgagaaaatatgagtgaactgaatttttaattggagagataaatattttttttcaattaaatttttaatgaattttatgcagaaatcactagagatcgacattttgaaaaatgcctggacctggattccatgttggacctggacctggatttcctggacaaaaatccaggaaaatccaggtccaggaaaaatccaggctcctcgagacctggatccaggcctggacctggattttttgaaatttattttaaaaatcaaaaaaatgttgaaaaaattatttatttgagtagaagcatctaaaaatatctaataaataaataataataaataatgtgttttttaatattattgatttaatcctgttatttgaaaacattgaaaaatacattcggtcaccttgaataaaataaaattctaagattttgtcagcggaaaatcccaggttttttccct

SEQ ID NO: 39787 - DNA, 1056 bp, Heterodera glycines
agaaggcaccccgggactgccaggaccaccaggtgaattttgctgggaaattgtgaacagtggacgacaaactcctctttttagggcctccgggtgtgcccggctcgcctggttcgtgccaacattgccaagggggtgggtgaatgacggatgaattcctgctagaatttgtctttttgctcaaggcggaaatgccgccggcgttgcccttccggcccctccgccgcctgcgtccgttccgcgtccgccctcctcctttccatccacgcccggcccaacgccacttcccccgtcggaggcgtttaaaccattgcccgacagcaacaacaattaccagttgaactacgcgggagaacgggcggacgaacgcgagctaacttcgcacgaattagccgaagcggcggcaatgtcgggggaggaccaaaggcagcaaaccgaaacgaaaccgcaacaacagcaggtggaagggggggggggagaagggcaggggaaagtaaaaaattgggggacggaaaaagggagggggagggcatggagacggaacagaaccaacggaaacacaacaaagaaaatggaaaggtagggaaaatggtggagacgaatcagaacgagaagtagcacaacaagccaaggaaggggataaagagaataaaatatagggagggggatgaagacagaacagaaccaatgggaacacaacacaggcacatgccccgagcattttgccggagagtgaacgcgacgtgggcgcaccattcgcagctgcggcggcggtgggcacggcgtacggccaaagggccgagccgaagcagcgcaaggagtacttgtggatcaactgaacacactttgatgaaagcattcttatttaatagcatttaataattaatcacaatttaaaacaattaatgatccctttgtctgcccattttttaatttttgtttcgcttttggtccttccatgtgattaatgcccaattatttcctatttttgcgcgcgttaatctcaaaatgcgcataattcgtcatacaaattcacaattattcattatacttgag

SEQ ID NO: 39788 - DNA, 942 bp, Heterodera glycines
atttctctaattcgacttttcagtttatccttattaaattgtttttcacatattatgtgaatacctaattattttatctttatttattaaataatatttaaatgggctcatcaaataccaaaattaaggtaattaatcacttaattaatctgaatttttccctgtccattgttttcacgcataaatgtggtcaaattgaggacgcggaacagatccgaattgactcggcaccgcttcactgtccaatttgtttgggcattttccgaaaagcgcccgaagtgctcccgtgcggtaaattggtgagaggggaagtgatttgatcggtgtttaggccattcccactgcaatgactgtctccggagggtggagagttacgcgcgtagggacagcccatccagggacagccaagtcagtacgaacgatggccgacttggccattttgtaagagagtcaaatgtcaaatgttttcagatttccatcgaatgttcactttgtcgcgcgcgctgccctttgaaccgacaaaggaccaaaaactacgcaattgaggccataatcgagtcattaagcacaataaacgaagcggacgatcctaccaacgaaataattgctgggaaaaacattgctgtgagttttatggatgagttttcagggattaaaattggaaaccctttcaatattagcgagggaatgattcgctaatggggggcacccgagtcaatgcttttttagtccatttctgctgaatatttcagtccctaaactctttctccgactttcagatcaaacggttggagcaaaatgagcgcgaattggaaggacaaatcaaagaattggaggcaaaagtcgagcggacgacgcggacggcccttttggtgtttggcctggcaattgcctattttgggttgagagtgattttatgggtcactcagtcgggcgttacaa

SEQ ID NO: 39789 - DNA, 1267 bp, Heterodera glycines
ctgacctgtgtgctgctccaccgattgcctagccgctttttcctctttttttcacgttcaatttcgtctgctgctgccgcctttgatgatgatgtgggattcatatccaaatgaactgttgctgctggtggtggaggtggtgcgggtggtagccaaaaatccaatgaaaatgttgctggtggtgttgggggaagtggaatctgatccaaatcaactgttgcaggtggtggtggtgacggtgttaaaaatgagaagtgtttgtgaaatggagtaggaaatggtggtggtgtcggcggtgtaaaagttgtaaaagttgatgctgctgctactggtggtggaggtggtgttttggcaggacttcggacaatttctgaaaaaaaatctaaaattatcattttaaaaaaacttttttttttaactttaattttttaaaaattattttgaaactttaccttttttggtggcatgatcctgctggcaatttcgaagcgaacaatttggaagcgacaatttggcagcgacaatttggaagcgacaatttgtttagaagtgaattgtcttttaatcaaaaaggaaaataattttaaatttaaatttaaatgaaaattaaaataattcatcaaaatactttcataattatgaagagaataaatatttacttttacttcattttattaattgattttgtaatccttttccccttctgcactctccctcactccccccccccttcgttgacccttatctcattctgctcatcattgatcctccaacacattcaaaaaagagacgctgtgaatgtgaaacggggttgctgagggcaataaatttaaattattataatttattagttattttttattaataatttttacatttctgtagcataattatacctaaaaagagcgtgaaaaagtattccgaaactttgggttttcatttgaaaaaattatattactgtacccccaccgcaaaaaaaatgcgcgagaatttggtccctaacatattcgttttaattagaattgattacggtaaccctctgaaatttcggctccacaccttttggtttttttttttaatttttattacggtagccccctccccccaagtgcgcgaaaatttggtccccaacctttagtttttaatgggagaattacccgtccgcaaagtgcgcgaaaaccaggtccttaacccctacgacgtgccggtttcacccaaaggtgggaaacttcccaccggacgcggaccggtaccgtgggataactac

SEQ ID NO: 39790 - DNA, 1351 bp, Heterodera glycines
  unsure (1)..(1351): unsure at all n locations
ctatcatcagagtcataataataacaataataattataattatcatctgctaattgggaatcgatcatccaccgccaccatcaaaatgcacattggcatgnatcagatcgccaggtgtttggcgtgagaagattgctcgcaaaacgaaaatttaaaaagcttatgggtgtgctacgtgccccgcccctcccgcccttttttccatatcgttccactctcccaaaaatttttaaaatttcttatagaccaaaaagtttatttatttttttaaactcggattttttgaaaagacaaatttttttttgaaaaaagcctggtaataattttcttagggtctcgagaatttttatgattcgtctctcttctcttctgtattatgtagtattgcgaccgatatcggcaaattaataacaatcctcgagataatttagataagtctcgagtagagttgtgctcataatcagattcaagagaaattatgaattttgactcattaggaataaaaattttgtgtattttcaaaggaataaaaaaaattttcttttgaaataattaacattgtagattgacaaaaaaaaatttatttaatttcccaatttgtcttttaggctagcagcagaagaagcgcgaaaggaacagcaacgacaagcccaggaggggcttatcgggcggaaaaccacccttggtggggctgtcagggaaaaggtggaaaaaattgtaattttttttttaaatgaaaataagttaggtcaaaaaatcgagattccgatcgtaaataattcgggaattctcgtctactaaacttcacttttaaaattataaattgaccattttgggtaaaatttattattttgcacgattttttaaaaaaaacaatttttaaaaaattatttattaatttttaatttacctattatggttcttttgttattgacatataattcagggcccttcctcgttatacatattcagtgaagacaatgtgatacggaaaaatgcgtaatttaataataataaatatattattttaatttaaaaaataaatatttgcagtcgtgccatcattgaatggggaccttttgaatttttcattttgctcacaatcattttgaactgtgtggtgcttgccatggaacaacatttaccaaggctggaaacaaaaagaaaaaaattaaaaacttatatatttttttaaatttcagaaatgacaagaagcctttgtcagaaaaattggtaaaaataaataaataaaatgttttaaaaatataatttttattttttatttatttacaggagaaaactgaaccccatttttatggtcattttcttgcattgaaatgcatttttaaaa

SEQ ID NO: 39791 - DNA, 995 bp, Heterodera glycines
  unsure (1)..(995): unsure at all n locations
gtaaaataaataataaattttacgaattnttcgcgagaaantaaattagacgaaatntaatattggcacttaaattatntaataaaactgaccanaggcatttgttagagtcaatgccaaccattcgcacataatccnaaagtgttcccgaaacaagtccatctccagccgaacacacctcaaaaatgctaataagcaacgaaaaaaagacatattttcctaagaattaaccctgaaaattttaaattttttcttcatatgataaaagaaattatcggaaaatgttcccgaaaaattagatatttttttaactattttaagcggaaaacggcaaaatgaaaagtgaaaaaatcgaattgtttagtaaaataaaaagcaccaactcaactggacatacaaatattaccaatttaaaaaaaaagtaaaatatatttatttattttttggcattctcaaggcttacaagaaaaaatgcaacaacatacgaaatttagtaagcaagccaaagtttttttcataaataaatgacataaatgaatctatatttaaatgcaaacaattgattaaattttattgttaataatgcgcaaataaatgaaatatattaaaaagtaaaaaaaaaatttaaaatataaaaaaaaattagaaataaaaaaactctacaaaaaacaacaaacacctctctgaaacgcacgaaaaaacatgtttttttgggctgttgttaagctatttttcgagttattatgccaattttctaggtttttatttttagaacctaaaaacctaaaaaattttgaaagaacctattttggcgttttgccaaaaatttgttaacaaaaatgcaataaaaacgaaaaatacaccccctaagaatcgactcaaaaatttctgaaaaataaacctcctaagaaatgaaaaattttctcaaaaatcgtctttaaattttttttggaacaaatttttgaatttaaaaataatgtaactaaatactgagt

SEQ ID NO: 39792 - DNA, 1580 bp, Heterodera glycines
  unsure (1)..(1580): unsure at all n locations
agtaaaaacccgcaaaatttacagcaaaagtcatagagaaggcagcgctgaatcggatggcattgggcagaagaggaagaagagccaacagcagtcaaattattcgtcgaaaaaagctccataattcttaaaaaaatagttttttattcacttgtttaacaaaacaaaatcaattaaggaaaataatttaaaaattgaaatcaaattgactactcaactcaagaacgaggaaaagcgggaattacctaattacctcgtcagtcgcaattgcaattggtttagcgggaattccaaagtgacattttttggcgtttattttaatttcaaaatttgctgcttcaattaaatcaaaatcattaaatttcttgatcaaaatttaatttcctcttccttttttcttgacaattcaattttattattcagagagaaatgaccgataatacaaattgtaccaatggatgtattgctaaattggaactcagtgaacaattttcacagaaattgaatatccaaatttctgcagcagaaaatcagcaacacaataaagatttattggattctgagcatatccatcgctcatttgacgtcgaaatccgattgacaaaggccaagtaaacaattaaatatctaaaaatccatcaaagttcttcttagtgctcttcaaaattgcgaagattttttcgactctctgtcagaatgttttgtcaagaaattggccgacattcgcaattgtcgtccattctttcccatggatggtgaatctccgcaaatggttgacagagtttcggtttcgtgttcatctgttggcgagggattggtaatttcaaagtttcgttattttatatttaattgcccttttagcctctgaactgttctatagatgaattgaaggcggcacgttaccattcgtatgttgccaagaaatttggggcaatggctgaggaaatttcgctcgacgcagcgaacggcgacgaagggacggtggcatcacatcagtgggaaatgcccagtttggaattcgagaacttttgggagactttgatattcgacggtccgattaaaaacgaggtggattggacgggttggctaagaaaattaatttaatgaaatgctttgaaatttgcattattccgcctggttaggtccgtttagccattttaaaaggcataattttgtctgtccttctcctctttttagtcttgttttgtctttttttgttagacggacaattcccgtgtaatagacacacttttagcttcttgtctatgccaattctctgcttgaaatttcctatgccggtgccgatttatccattttgcctgtcaaccgactcgtcctcctccacggtaaacagttgctttttgttggcacaaaatgttccgcttgtaaaggtcctccgggcactggcaaaacgacactttgcaaggcattggcacaaaaattggccattcggacgcaaaaacggtataaaagggcgattntggtggaagtgaatagtcacagtctcttctccanatggttttcggaggtaaggggaaataaagaaactccgattgctaattttttattattnttttgag

SEQ ID NO: 39793 - DNA, 1028 bp, Heterodera glycines
ttttcagcttgaaaaccgttccacttcgctgatctctgccgccgtcatttcccatcaacttttaggccgggaggacgacccggactacaaagtgttggagcaatgtttgaaccaggccaacctgttgcggcagttcaaggcggagccggccgaattttggcacgcacttttccacaaatggttggccaacaaaaactgtgtgtatgtgatggcagagccaagcgaagaaatggccaacaactacgagaaaatggtcgcattttgtgtcaaaattattattttttacttaacaaaaaatggggtttttaggaagccgaacgaatacagaagcaaatcattgcaatcggtggcgaagaaggactgaagaaatacaagaagaggctggacgatgccattgcagagaacacggttggttggtcaattagaacttggcaaatggactgttaaaacgacaattaaacggcacaattagccaagagagggggggggggctttttgtcagactcatgaacactaataaatttaaatgtcggtcccatgagttttttaaacctaacccattcccccatcagcgcgcacatccatcggacgaggagttggccgacctaattgtgcgcgacttggagaagttcaacatgattggcgtgtccaccagcacaaatgtggcccaacaaccggacggttttctcagcaaattccctttcaccgccgcccttcacagcgtccccagcaatttcttcgacgtaattttttaaactgttttggacattttttatttttatgcaaatgtttaggcaaacattgtgttcgacactgacggcatcccggcggaagaccggcatttcatgcttctgtggtaaataaaagtttttaattctataaacatttccaaatgatgccaggttcgaactgatgtttcaatcaccggccatcgtcgagggcaaagagctgagctacgaagaggtcgcaaaactgtccaccaaagacttggtgtcgcactcggtttctgtcggcatttcgggcgtcta

SEQ ID NO: 39794 - DNA, 267 bp, Heterodera glycines
tttttaattcctttttaaacaggccaaaaagtttagagcttaacttcctttttcagaaacttatcagaagcgccccaaactttgcagggatactgaaaggaaaagaattaacctgttttatcacattagcttgtcatcagtttttataaaaaattttcaaaattctgagtctcctattattttatttttttttcaaaattttgaagggcgggggggggggggggaacatattttcgtactgcttataaatgattaatataaaaatgc

SEQ ID NO: 39795 - DNA, 1795 bp, Heterodera glycines
  unsure (1)..(1795): unsure at all n locations
ataaagtaaaatagataataaattagacaataaattgcttatgatctaagtngtcattatttttaaaacattgtataaccgtaatgtaaagcttaaaaaaatatataggtttaaagtgatgggcgctgcttatctcttcagctgactggctgggtgcaggtcatggcacagttgaacaagttcagcagcgtaatgttctgcaatttcggctgccgaacgcagtcttccaccagttaaatcaatgtaaaaaattcataaataaattgatgaattggcatttatttgcatttattttggataaatgtgaaagaattaattaaaaccatgatgctataagaaaagaagaatttaataaaaatttaataaaattatataataaatgcaataattttaaaaactccaacatttttataaagatttttcaaacaaaaattttaagctagttgttaggcatatctttaatttttgtactgctcgagtaattgataaaagtaagttttcggatattaaaaacttatactctcaaatagggttaaggcccgagccctcggggcggggaactcggaaggcgacatgtcgggggtcgggtcggggggaagctcaattgttgggggtcggggactccggtcgggtgatttcttaaaggatcaaaatctttaaaaaattaacttctcattgttaaaaaattttaattattttattttattaaaaacaataaattaaaaatactaactttatcgaaaatatctaaaaagtttaagataaatgaaacaatgagatagttaataatgaaaattattattctcaaattacttcgaactattttatggattgattgaattttgtaatcatttgtttaaactagagtagagcgggaccgggaattttgggcaaaaccgggaccgggacttgccgggacctgagaagccgggaccgggacctcggtttttgtccgggaccgggaaccgggacaaaccgtgaatttttaaaaattcaaaaaaatttaaaaaaattcaaaaaaattcaaattttaatttatttcatgtgaaaaaatacaaaattaaatttttcttttgttttttatttaataaaatccaaaagttaaagctaaattaaattaatgaaaatttttaaaccaaatttatttcagttatttcaaacaattaatcactttttgactcaaatgatcgaatattattagaaattcagatttacttttcacataattttttcggcgcgctttttctaaaaacttttgggaaagaaaggggtccggcggtgccgataggcgccgccgggggaaattttaaaaatttgggtgcaatttgttaacaaatttcaacaaaaaaggctggtttttgggattagtaggctcaatttgtatggattttcatttaaaaaatgataaaatatgtgttgattaaaactatgagtaatcatattttgtctataggaaacccacgagtatacaaaaagagcattcaaaataatttaatttctgtagagggattgaaccacgagaaacaagaagggaaagtcaaggatactagccagtaggccatttgcgcactcggcagtgttacttttaaagaatatattaattattattttttatttttttcctttgactctaattttcatcactaatttttcactcagacccccattcttaccagtgcttgtttttcccggttcccggtcgccctaccgggaccgggacctgagcttttcaaaatccgggaaccgngacctcggatgaccgggaattcccgggcccgtcacggcgcactctact

SEQ ID NO: 39796 - DNA, 994 bp, Heterodera glycines
  unsure (1)..(994): unsure at all n locations
gtgtctactaaaatggtcggacttcntggagtacaaccaactcaattctttcctcacttttgtcaacctcagtggcttttgtcatgtcatccagccaccgacgcgatcttgaggccttcaacaaggtgagattacaataatggagccgcccgttttggtgcggacattttaaaattcgtcactttttcataattaattccaattataagttttaactaaatcgacatcaaattcaacttttcatatttttcgagcccaaacttttttgtcaatgttcagtcacttagtgattgcttaatgtaccgcgctgtccgcgccaaaccgaccccgactctacagtatggcttctggactagtcagctgaggacaacttagctgacacaactcagctgataagactattcggctgatggacaactcagccatacaatataaaattacaaaagcctcgcctaaagcttaggcctaagcctaagcaattttgcctttgtacgagttgtctgtgtacaagatgccatggcacctgggaaattgttaaattaaaaaaaattaatctttatccttaactaaaatttaaaaaatatttatagtttttaatttatatttttttaatttaattatttttcaatttttataatttttgtcaattctcgtaaagctgagttgttattcatcggaattgtcccatcagctgagttgtcctcggctgaattgtctaggctgagttgtccccagccgacttatcctgacgcgtacagtatgtccctaggcgacccaactataaatatggtttattagggaagctccgctcttaagcggatggacccgcgcattttcactgccgttgacctaactgttgctgttccactcggttatgccgcctatcgagtctataaaaacggaggaggttaatatttaaggaatattaagtcaattattgtgtaattctgtgcccattgattggttatccttatttgcccgagaaatataaaaa

SEQ ID NO: 39797 - DNA, 1232 bp, Heterodera glycines
ggggacgggacgaaatctcgccgccggaatctcgccggccgaaatctcgccgagacaaaatctagccgccgaaatctcgccaccaaatttttttttaatttttttcaaatttcaaaattattcaagaaaaaataaaaataaattccaattttgattaacaatttttctaacattgcacaataattaacgggtcaacaaatttaattcatctcgcaataacatcaataaaattcccgttctattttgccctttccattcttttttcgacatttgagggtcgtccattgcctttccgcatccccaaaacaaatcgtgtggggagctctcaaccaaaacatttgaaccggtttttataagcatttctttgagcggctcgttctgttggaatttttttcgaaggcctcgaatcatcagattttcacagacacctcgccaaatgacaatattgaagcatttaatccggttatttttcccgagttttttaatttctgccggagtttttgccttcataattgaacaagctgcttcaaagtcgcggaaaaacaaagctttttgatgctgataaaattgttcagtcgacgaataaatgatcccatccaattcaaaagaaattgagtaaaaatttgagaaagcatatgaagcaccccaaaaacaaagtaattcattcccgacagcttgtggaaatggcggaccagacgtcgacaatggcattgtgtcatggtagcgggtgatcagcaacccatttccaaaaaaacaaaatttcacatacataatagcaaagtaaagggcagggacagaaagaatttttgcaaaaacaccttgactttccaccgaagaaatgcgaacggagttttttggtgctggagccaggagaaaaacgcactacaaaacggtcatcagataagcgtttaaagtcagccaagtcagcggattgaactccaaacgatgacaatctttccaacaaaaaaggacgtaaatgtgcatccaaaagattcttgaaattcttcgaagtgatgagcaacaaatctccagattccataaatgttagagtccggtaaaaaaaaatttccgggaacggggaacgggaaacgggaatcgataaagagcgggacgggaaacgggaacgggattcccggctttttcccgttcccgtaaaaatcccgtccgggcaaaaaagacgggaacgggattcccggcttttcccgcgggattcccgttcccgccggtctcta

SEQ ID NO: 39798 - DNA, 1626 bp, Heterodera glycines
  unsure (1)..(1626): unsure at all n locations
gacaagcacgctgattttgccagtgtagcgcgcgtgcagcnccggacatctaagggcatcacagacctgttattgctcaatttcgtgcggctgaacaccgaaaatccctctaagaagttgtgcccacagaagcaatgagccaactatttagtaggctagagtctcgctcgttatcggaataaaccagacaaatcgctccacgaactaagaacggccatgcaccaccatccaccgaatcatgaaaaagctatcaatctgtcaatccttacggtgtccgggccgggtgagtttccccgtgttgagtcaaattaagccgcaggctccactcctggtggtgcccttccgtcaattcctttaagtttcagctttgcaaccatacttcccccggaaccggaagactttcgtttccgggaagctccccaccagggcgaataaatccgccggcggatcgctagttggcatcgtttacggtcagaactagggcggtatctgatcgccttcgaacctctgactttcgttcttgattaatgaagacattcttgccaaatgctttcgctgtagtccgtcttgctacggtccaagaatttcacctctcacgtagcaatacgaatggccccgtttgtctctgttaaccattatctcggtcagcaaaaccaataaaatcggaccgaaatcctcttctattattccatgcacgaacattcaagcgaaacgcctgtttgaagcactctgatttgttcaaagtaaactcgccagcccaccgacgccgaccggtaaaggccaacgccggggaaagaccggcagaaaagccaaccaaaccagtaacacacaaagtgtgcaccggacggctagcacagatccaactacgagctttttaaccgcagcaataattctatgcattttgagagctggaattaccgcggctgctggcaccagacttgccctctcatagatactcgttaaagggtttaaattgtacccattccgatgaccggcctcataagagatcggtctcgttatttctcgtcactacctcctcgcgttgagagtgggtaatttgcgcgcctgctgccatccttagacgtagtggccatttctcaggccccttctccggagtcgaacccttatcctccgttacccgtcatcaccatggtagtcagatacactaccatcgaaagttgataaggcagacacttgaaagacacgtcgccggtacaagaccgtgcgatcagcttagttgttctgagtcaacactggacgcccggagggcgcttggttttgtggcgaaaaaatgcgctccgctctggggagattggagctttggtgcatgtattagctctagaattaccacagttatccaagtaagaagtcaaggtcaagtaaattatagctggtgtaatgagccgtacgcagtttccctgtctggcaggttaaacttacacatgcatggcttaatctttgaaatgaacacatcagttcaggcaggatcaaccagatagctgctagcgagcgttgccaagcgccgctattacagccgtcttgtaaagacggatagtttcagcagaaacaactccgttcagcgcaagagtgcgcatgggcggcgaaggcgaccgagcaagtggtaag

SEQ ID NO: 39799 - DNA, 913 bp, Heterodera glycines
taaacttaactcctgccgagttataggcccgggactcaaatgtcccgctcaggccaaaatttttttctatttccgggaaaaaatcgaaatttttccgaaaaaaataccagtcgatagagctcgaaaaactatgttttggaagtggtctccgtttctctgggaaaaatcgttaaaaaatcctaaaattcaaaaacccgaaaaccgttttttaggcctaactcgaaaaattttgaaaattttcgaaattttaaaatttaaaaaatcgagctttcaaagctctacaataagtccgctggagccccctcgctcagatcaaacgctgacgcggtattcacctgggactgaagtggacaaagttgatactgaatttctcctattttctgcagcccttcctactataggtagaggcctggaattttttttgacttttagacaacacttcaacttaggttcctaccagcggaaagtttttgattcgagttttacagaaaaagttaggggccgtcaaacgcacgaaaaaatgagaaatcagtccctggtactcagttggcccttggaccggaaaacctatatttttcccggatgctcctcaaaaagttgtaagacccttccaccactttcagggcgctcccggccttcggccgggagaaaatggttttagcaacgaaactccttgtcaatataacatatatagtaactagcgggtgcgtgaaccgtcggctatttagctgggaaaaagcgcttcgcgctttgggagcttcgctacctagactgtgaagcgattcaaattgaattagaagaggtacaacagtgattagaagaggtacaactgtgattaaaagaggtacaacagtgattagaagaggtacaaagtgattagaagaggtacaactgtgattagaagaggtacaac

SEQ ID NO: 39800 - DNA, 775 bp, Heterodera glycines
aagaggaagataaagtggaagataaagtggaagaggaacagaaagtggaagaggaacagaaagtggaagaggaacagaaagtggaagaggagcagaaagtggaagaggaacagaaagtggaagaggaacagaaagtggaagagaaagtggaagaggcacagaaagtggaagagaaacagaaagtggaagagaaacagaaagtggaagaggaacagaaagtggaagagaaagtggaaggggaacagaaagtggaagataaagtggaagaggaacagaaagtggaagaggaacagcaagtggaagagaaacagaaagtggaagaggaacagaaagtggaagaggaacagaaagtggaagaggaacagcaagtggaagataaagtggaacagaaagaggaacagaaagaggaagataaagtggaagataaagtggaagaggaacagaaagtggaagaggaacagaaagtggaagaggaacagaaagtggaagaggagcagaaagtggaagaggaacagaaagtggaagaggaacagaaagtggaagaggagcagaaagtggaagaggaacagaaagtggaagaggaacagaaagtggaagataaagtggaaggggaacagaaagtggaagataaagtggaacagaaagaggaacagaaagaggaagataaagtggaagaagaacagaaagtggaagaagaacagaaagtggaagagaaagtggaaaaggcacagaaagtggaagagaaaacagaagtggaagagaaacagaaagtgga

SEQ ID NO: 39801 - DNA, 692 bp, Heterodera glycines
cacccaggaatcggcttcgcccttcggtccccaacccaaacactcacgcaccaggctgcgcattacaataatgagcagctcgtccaccttcatctcagatggatggcctggagtgctggggaggatcaaccaggggtcattccgtccttgcaatgcaaatataataaatgaatagattaagagaattaatagaattagagaagataggtttggaatgagagcttacattctttacaaattgggtttgcgatagccaaattcgagaacttggaaggaattattaataatacctttagtaaatacaggttgatagtgtttggtaagggaatgagtaaacactttaccttggatgaggttgggacgaataaaatgggggtatgttacaatgatagggtcaggggggtcttcggagccatagcgtaagatttggtccttaacagtatcgtaatgaattttttgaacagtttgtgcatcaagggtgaaccctcttattttcaaatcgtgttctatttcaccggtgtccttgcgttgcagcttcatcccataattcttgcagccagcgctgatgaactccaagatattgtggtcggggttttcgtctgttagttctccaaaggtgtccctttcctgtcgggagtgggtcgttccctccagggtgcacgtagatgacgctgtcggtgtcgtaataaagg

SEQ ID NO: 39802 - DNA, 963 bp, Heterodera glycines
  unsure (1)..(963): unsure at all n locations
tttttctctttcagcacatgggcgtgaatcagatgctaccctccgtctcccgttcacttacaatgtcacgaccgttgccatttatggctatgccgccgctttgaagcggtaatttgtttgctgaacagcagcgacaatgcaattgtttgttgcttttagtttcgcgccgaacatcaaaataatccattttcttggcaagcaaaagccttgggctctgctctacggggacggcgctgcggggatggcattcgtttcggactatcacaaggtgaaggggatgccttatattgaacgcattcttttcaaaaagggtgcacttcacttacaccccgccggttccccaccttcccgaaatttgaaaaaaggttatacaaaaaggtttagattttttcttgaaaaatttctgtttgaatattttttcaaaattttcggccgggtaacgacgtgtaagactccgtttcaaaaatacgacatatttggtgtttgttcgcatgcttttcaatgttttaacccatttcagcaatggtaccaactctacgcaaacattgtccagcaacttctgcctccgtcctcttcggtaatttcttcttccaccccttcttctcttccgtcctcttccttctctattattcaacatccgttgacttcgttcgaaaaccgtcccattgtcgtaagctgtgcagtgttttatgtgttcttttttaactattattagggaattttttgctgcttaaaattgcggttttagtgcagcatatgtgtccctttttgcgtcccgttcaattttatttacggtattattcgtaagcggatcgccactagtaaacgcatacagatttatgggacaggtaaaaatcatgggacgggttaaaattctatgggacgcataaatgggcattttgactgtaatactaancatttcatgtcttattgctgtngtaacagtttccattntttctttta

SEQ ID NO: 39803 - DNA, 1128 bp, Heterodera glycines
cagacgacggacttttcgtcggagattcgtggcggacgaatgcggcgcgtgggaagagacgtcgtgcggaggagcgatgaccaactccaatttggactcaattatggcatcttcgacgccaattgaatttgcggtaaatggacgtggcgaaggagcggcgaaggtgccatttggaaaagggacaacggacggaatggcaaaaataattacagacggaaagggacacttttgtgggggcggacgaatggacgacggaggacgacgcggaaaagcgggggacgacgggcagaaggaacagaaacaaattggagttggacagaacgtcacgaccctcctcagtgcacacgttcgatgggaagggaatggcaaacgaaacaatttgcgaagctttttcagttacaattccatcgtaatcatcgaatattcggacagcccaagtggcgaccagcaaaaatgccaacgcccttcagtcagactttcgtcgtaagccccattttgggaggtaacggcaaaaacacccaaagcatttgttggcacagacacgaagaagtggcatcaataagtgccagaaattcggtggaaaggcgagcacaaccaaaggaaaaagaggagaaagcggaggaggaggagaaggaaaagcagggggcgatgagcagggaacagaagagcagactgatcaaaacgaagagttgcccagcggaggggggcagggcaaaggcgaggggaccgaccgcaacaggtgggggaggggagacagggagcaaggaggggaagggaggggggaagagactgcgatgaacccgaaacggacatgaaaaaaagcatagagatatagagagagacaggagggggagagggagggcgagagagagaggaagggcgagagagagaggaagggcgagagagagagggagagagagagaaagggagagagagagagggagggcgagagggagggcgagagggagagagagagagagagggcgagagagaaagggagagagagcgagagagagagagggggggtgggaagagagaggaagggcgagagagagagggagggcgagagagagagagagggagggcgacctaaaaggatagagagagagggagggcgagagagggaga

SEQ ID NO: 39804 - DNA, 1229 bp, Heterodera glycines
  unsure (1)..(1229): unsure at all n locations
atagaaattatttatagttaattatacgtttgaaatatttataacaatttctaaaaatntaaaaaanaatttgaaaattcttattaaattgtaattttataaataatttaaatacataaataattttacaattgaaaattgaagaattaattttcgttcaaaattaataaaattttgatatgaaaatagaaacaaacaaacatttaaaggtaattaaaacaacaaattatttaaaaaaaacaaattctcaaaaattttaaattagcttgaatcagttttaaataatttattatttaacaaaaagctttcgttgataacaaaattattcaaataaattataatcatttaaaataattgaaacactcaatgtatttatacgaaaactagaaatcaaattttataaattgttccaaatctaaactaacaatatataataaaaataattaactaaaaaataaaattataataaaaatatatattatccaacgacatgaaaaagaaagcattttttaatctctaataaaaaaacatcgcgtactcaatagattgctgcaaagtgacgttagataaattaagcaaaattataaaaatatgaaaataaatttatcgaaattaaactaatgattatgcataaaagtacataaaacaaagctaataaccatgtcccgccgcaacaacatggtcgacgtaagctcaacgcgagggataaaaggtattaagattttaaataaaaattatactgtaataataaacatttaaaaaattttaatatagtaataataacacagaaaaataattataagggcaattctcaaaaaatttaataaataaagtaatatcttcattatatggacttttattcgatcaataataaatttaaaatcttaatacaataatgcttatttaaaaaagaaatggatacataaaaatggattttataatattaaaaagtatagttgaataatttttatcagttatttttattagtaaaaagtattattcttttaatttattatttgcaaatgagcttatgaaaattagaaaataaactataattagtaaagaaaaatatattattaacaaaattgcttaattataaataaacgtttaaagaagatataaatgaaaaaattttcaaaagacgataaatcttatatataattgaatttattttaaagttaaggtgataatttcttttgttgttttttttcaaatggacttgaccagtg

SEQ ID NO: 39805 - DNA, 486 bp, Heterodera glycines
  unsure (1)..(486): unsure at all n locations
gacaaaacgaggttaaaactaagatttggccccaaaaataagattaaaaaacggctttttacattgtaaaaacagggctaactgaaaattttcaaaaccagcatttagccaacaagaatcatcatttggggtcaaaatcagcactttggaaattttagtcaaaatgaaaaaaacatgctttttttgtgacgcgctttttccgaaaaatttttttggacacaggggccggcggtgccgataggcgccgccgggagaattttttgaaaatttgagcatttttctcacagattttcaccaaaaatgattgcgcgattttgagtgaaaaaaggaagatttacgagcatttaaaaataaaaattgagtttttcgttaaaaaattttgttgatcactaccgnatcgggggtccccgacccccgacaattgagctccccccccgactcgacccccaacattttgccccccgagggctcggggcttaaccctag

SEQ ID NO: 39806 - DNA, 937 bp, Heterodera glycines
ttttttcttttaaaaatttcaataaaattaatcagaaatttattttttttaatttgattaaattattaatttaacaaataaattttttgcttttaggcattaagttgaatgcaataataagaaattgaatatatatttgcattttaaaaatccaaagaaaaaattgtaaattaaataattagtagaaaattataaatatattgagtatatttagtaatttaataattttgatacttgattattgtaaaaaataatatatattctgtatcaaaatgaaatggtgtccttataataaccaaaagttaatttgcatttattcgtaattaagtaaatataaaaataaagaaatttttatttttagtgaaatatggtatttatttttgtttaaagattgcaacaagagatttactttctaaaatgtatgattttttgtaaaattttttttaaatttttatgcttattttgtgcatcatcaatttaaaaattgcgattagtaattgtgcttattaattgtttcttttatttttttttcaataattgtaaattagttttaattttatattaatttaaaaattggaattttttaattgtccaatataaaaatcataaattagatctaatcaatattcacttcccctattattttttgaaatttaattaaatataaatatatttgacatttcgattaaaataatggtttcagaatgtgactttatataaaaaaagtaatggattataaagtctttttcgcatgaaaacaaaggtttttctctcataataggcttttgaatgtctatttttatagatttactaactttatgataataaattcatcggaattgaatgtattacgatttaataatatatttgtatacctaaaaatttaatgcaattccgtttgtttatataatgaattaatattttttacttattgtaa

SEQ ID NO: 39807 - DNA, 1277 bp, Heterodera glycines
  unsure (1)..(1277): unsure at all n locations
tttttntatttggttttccatttccaaatgatcattttttcgggtcccctaacgccggtgtccgatcataaattgttggagcgcggaaaatgatcagcacacagcccaacaagcagaccaccgtgaaagtgatctgtgccgcaatgagaaaaattattattttttaattttttcccccaaaaaaagcttttaatgagagtgaaattctgaccaaaaagatgcgatccaacaccaccgacacgtatttccaatcctcaattatctgtaaacaaaagtggcatttagaaagaaaaatctggcgattttcaaaatttgccctgcggtgcccacactgatggacaaaatcgctaacaattcaaattggcaaattgagtcccctccttaaaaaacgagactttttcaagactcgagactctcgaagaccctttttaatttctgtttgaaattttattatttttcgggttggggtggggtggaaacatagtgcaccccgtcgaacaccattaattgcctaattactgctcaaacgcgcgcccgcccgcccacctgttggtcctcctcctcgcgccggaagtgttccgcgatgaatgtgaccgattcgaccgcactgcgcaatgggctgtgctcgcgcatgtccgactcgtcatgcgttgtcgttgacgcccgttgatggcacatcagcctttggatgccgctggtggaagtgatcaggccgaagtcctggatgggaataatttggcaatattttgatatcggatattttgccaattactattttaaacctggacttgaatcccggggtcgggattcaaatccaagcaaatccgggatttaaatccattgtaatcctatccctttctggttccaatcccgaatcctatccctgcgaattgaggttgggaccctgatgccatgccgacatttttacacggaattttgtcatttcattggtttttgaaaaatttgcattttatttatatgagttctagggcaaaaatcttggtctgcttcatagatttcatcatagtttaaattttccagtcgccaacacagtctgtggatgacagatctcctaaaccatagcattagacggcgtagggatttttttatgaaaatggaaggaatttcgagttttcctcccccctcccttcggccgttattcccaccctttcccggagggatgaacggcctcggcttggccccgccacggtgctcgccaagctgctccgttcacggcgacgtcgaagcactgtcgatgttgttgagccgggcatcat

SEQ ID NO: 39808 - DNA, 1487 bp, Heterodera glycines
  unsure (1)..(1487): unsure at all n locations
aattctggaatacttttttccttttttagatagaattccaaataagtccataaaanttctcntgatttttctctattttaaggcttatttcctgtaaattgatcacccttttcgatttgttatgaattttcaaatattaggccaaatcnccgagggccaaaaaattgccaaaaaaataaagaatttttaaaatattccaaaaaatctgaaacttaaaataaacatcatatttgtgctcaggaccctaatttaccccagaaaaatatttttcaccctctttttcaacccaaaaaaaatttttgaaaatttctagggggcctagctcgaaaatttttgaaaatttcctttcatatagtacaccattcgatagcatttaaaatgctctacaaaaatgttctaaggcattttttggctaaaaccgacccctgacgagttatgggcccgggactcaaatgtcccgcttaggccaaaaattttttctatttccggaaaaaaatcgaaatttttccgaaaaaaataccattcgatagagctcgaaaaactatgttttggaagtggtctccgttttgccaggaaaattcgttaaaaaatcataaaattcaaaaacccgaaaaccattttttaggcctaactcgaaaaattttgaaaattttcgaaatttttaaatttcagaaaatcgagcttccaaaactctacaataagtccgctggcagcccttcggtcagatcaaaccctggcgtggcattcatctggtactgaagtgtactttttgagcacgcttcagttgccattttttacaggccaggggtttgctcaaaaaaatttttaaaaaataccaccttgtagaggacccttaggcggagtgccctttcagcgggcactttttgattcgagttttacaaaaaaagttaggggccttcaaatgcaaacaaaagtgagaattcagtccctggtactcagttggccctcggatcaaaaaacctatagttttccctagatgcgcctcaaaaagttgtaagacccttccaccactttcagggcgctcccggccttcggccgggagattttgtttttgcaaacgaaactccttgtcaatataacatatatagtaactagcgtgtggcgcagtaattgctcggtgtagacagtatgctttgcacagtaattgctcggtgtagacagtatacttttggtatatatgggcgggcgctgacatgagcgcttcgcgcaaaggacttcgttgctagtgcatgcgcgtttgataagtgatgagcaagtgcattcggccgctttgcggcctcagacgggccttgcgcccgttttttaattttgcgggggacattcggccgcttcgcggcctcaggacgggcgctttgcgcacgttttttaattttttgtggggcattcggccgcttcgcgacctcaggacggggcgtcgcgcccgttttttaattttttgggggacattcggccgcttcgcggcctca

SEQ ID NO: 39809 - DNA, 1140 bp, Heterodera glycines
ttaaattatgcttaattggcagatctggctttaaaataattcataattatcaaaaagaccaaataaaattattgttaattgtgagtttggctttaaattttattaaatgttatacagaaaaccaagggttagcccgaatggtaataatttcattctattttatattagcaattcttcagtgtttgaattttcctttgcacaatgatttaaatttggctttctataagaagtataaaaaagattttttaaaattttttgaaaaaattaaattttcaaaaatttatttaatcctattctagcacaatatttaaaatcattatttggctaattgttcgacaataatattccaattttcgtcaaaatggctgaagcatcttcaaacggcaccgaaatccacggcactatcattttcgctgcttatgccatggcatttttggaacttggcacatttattccgacaattccaattgtggcattctgcgcttcaattttgtacaaaacttccattcttcaccgaaaccttaagggcattctgttggcccaactgtttagcataatgatgaatttgtggccacgtgcctttatgttaattgcccaaattttcgtgacgaaaaatatttttttgttgccaccaaattttatttctggcgcagcgactgcggcattgacattcaacaacatggcaggccatgtgctgattgtggagcgaatatgtgcaactgtttatgtgggcacttatgagagctaccgtagttggacatttacggcactttggctgtcaattacggtaaaatttcattttcatttatttatttctgtagtattattttattcattaatattcttaataattttttaataaataaattcacctaaaattttttaaaaatatctcttgtttcatcatcattgagtaattaactttgatattaattaattagaaatatttcaaattaattaattattaattaaattaattaattattatccgtatttaaagatcatcctttgtttggcattaacaatttatcaattgcttgttttggattcatcgtttgcatttacaaatatttttgtgggtctgtacatcggagcaatgatcgccagtttaatcgaaatttttgtaagttaaaaatttaa

SEQ ID NO: 39810 - DNA, 1774 bp, Heterodera glycines
  unsure (1)..(1774): unsure at all n locations
attatctataataagtaaaatcaattatctactgtaatttatataagaaatttattaaaattatgcgcacactccaacacattccaattatccccccaataaaaacataatccaattttatatatgtgttgtgttattttggagatttcaaatatgaaaacacagaaagctactgtaatgatataaacaataatttaattttaagacaaataaaaattattgatgaaaaattattgatgaatataaattgaaatatttgaaatttttgactatcaacgattaagaaataattggagcaataccgggggaattgcatcattattttataaaaaatttatatatttaaatattaaatgtaaattaaattaaaataaatataaaatgaattaaatgaagaaaatacgcaatcaaataataaatatcatgtcgccggaatgtcagctacaccaacaaattgccgtcgcaagagtacccaaaaatatttataaaaacaatataaaaatattcaaaatgttatgagatccattaaaaaatttttacaacataaaataataaatgattaaatgtgttctcatacatcaaaaaccttcgcgaaatttcaaaaaaaaattctcaaatcataaaatgaaaatatatttcacttgtgctgtgattggaaaatttattttgataaaaactatttatttacgatgtttgagataattgaaaattttgttattatttgaaaaaatggaaataattaatatttaacaaagattaattaaaaggatatattcaacgaggcaataaaattattgccgagaaaagagcggagatcctacatttnaaaacatagtaatttaaatattttaggacaatatttcttcaattacataaatctaattttctaaattactaattccacaaaacatttcaccacttaaataacatgaatgtagaaaagaattaaaaatattaatatttataataaaaaataaagtattaaatcagtaatttaatttatatatctaatgggacggtaacgaattgctctcggtggaaaaatggcagaaaagatttttttcgtcaagagtttaaaaaatatatttatatttgcaataaaaaaaaaattataaattaagtcagtaaatttatttattgagaaaaataattaaaatacaaatgattaataaactaattacatattttaatttctttaaatagttctttgattgacacaaacaatcataaaaaaatcaaatgattaataaaaattaaatcatatatcaaaatcaataataaaaggatatcctacaagctagtcagaccaagagcaaatgcataattgcattaaatctctattatattagaaaaattaaacaaatttaataatttttttttaatttgcgattttttaaatttttccatttttttgaatatttgtaatcaaattaatgaactaagctatttcaaattcgaaatttacaaaataaaattgtaaagaaaattttttttttaatatttagttaaagtaattcgaatataaatctgaataaattaaatttgtttttatttgagtctattttcttctcatgttcaaatggtccatgagcttgcttgcggcgcgcagcgcttatcaataaatatgcaatatcattaggatagaacagatttttgaaaacaacctttattatttagatttaatcattcataaacaattatataattatattttatttataaaattattctttttgcatttttttgcgttgttgtgaaaagaaaaatcacataa

SEQ ID NO: 39811 - DNA, 837 bp, Heterodera glycines
aaaataaaaccccgggggaaagggaatgggaaacatgaattcaaaattttcaattttttatagtttaattttactcaaaacggttcagaattcaataaaaataaccatcccggtgcgaaaaatgggctttgaaaagtttattggggaaaaaaagcctttacaaaataatacccctgggagaagggagtgggaaacatgatttcaaaattttcaattttttttagtctaatctactcaaaacggttcagaattcaataaaaataacattcacggtgcgaaaaatggggtttgaaaagtttattggggaaaaaaagactttacaaaataatacccctgggagaagggagtgggaaacatgatttcaaaattttcaattttttctagtttaatctactcaaaccggttcagaattcaataaaaataccattcccggtgcgaaaaatggggtttgacaagtttattggggaaaaaagactttacaaaataatacccctgggagaagggagtgggaaacatgatttcaaaattttcaattttttctagtctaatctactcaaaacggttcagaattcaataaaaataacattcacggtgcgaaaaatggggtatgaaaagtttattggggaaaaaaagactttacaaaataatacccctgggagaagggagtgggaaacatgatttcaaaattttcaattttttctagtctaatctactcaaaacggctcagaattcaataaaaataacattcacggtgcgaaaaatggggtttgacaagtttattggggaaaaaaatctttacaaaaataatacccctgggagaagggaggggaaacatga

SEQ ID NO: 39812 - DNA, 903 bp, Heterodera glycines
  unsure (1)..(903): unsure at all n locations
ggtcacaataaaataaaaaatggctagtatgtaaaattggcgtccagaaatttttagactaatccgaagcaaagcacgaatgaattaaagaggcgaaagaattcacagtatcgtttctaatagggaaatattgacaggatattccgctaaaaacgggtttgatcatttttagcgcatttttaggtatacatttgagacaattgggcaggacaagaaaagaatgaagttgatgcctcatgaaactcggaattggttatgtttagtcgaaaatatccttacataatactcataaaaatacaaataattcaacccacctattctatgaccacattctgaaaaaaatcccagaaatacgaggaaagatatgcttggtcacaataaaataaaaaatggctagtatgtaaaattggcgtccagaaatttttagactaatccgaagcaaagcacgaatgaattaaagaggcgaaagaattcacagtatcgtttctaatagggaaatattgacaggatattcggctaaaaacgggtttgatcatttttagcgcatttttaggtatacatttgagacaattgggcaggacaagaaaagaatgaagttgatgcctcatgaaactcggaattggttatgttttgtcgaaaatatccttacataatactcataaaaaatacaaataattcaacccacctattctatgaccacattctgaaaaaaatcccagaaatacgaggaaagatatgcttggtcacaataaaataaaaaatggctagtatgtaaaaatttgcggtcactaataaaataaaaactggctaatatgtaaaaattggcgtccagaaatttttagactaatccgaagcanagcacgaatgaattnaagagggcgaagattcacagtatcgtttcta

SEQ ID NO: 39813 - DNA, 558 bp, Heterodera glycines
attaataatataattatgtttttttaaataatttttggttgcatgtttcaattctatccatccaaatgattattgtcaaattttatttcatgcgtttaagccgattttgaagattgactttcgactttttgttcgaatccaggttcggggttaaaattaggtcgaattctcttttcggcttctaatacgaatggtcggctccgcaggaaatacttgaaacatataaaattgaatagattttcacccgtggcacacattttatccaggtcctagtctaatcgaaaaaatccaagttcatgctggaatttaaaaaataacaaaatgacaattacggattaggagaaagaatctatgagagccatgtcgcttcccaatcaaaatgaacagttacggattaggagaatttttgagtgccacgtcaattcccaatcattctgtcaaattgaccaccactattcatttcctaacacttaaatttgctgctgtattttgaagtaagtactgcaaaagttgccccaacagttctatttcatctcatgcctaaatgtactactatat

SEQ ID NO: 39814 - DNA, 1720 bp, Heterodera glycines
atgaactggatgaggaacatattttgataagctatgagacaaagaaggagtgggttgaggagcacgactgctccacatcgggtaaaaattttctatagcttttaatagtattggttattttcttaagtcatctcattgtggacaacatcggcagctcgcctcctcttgctgaaggcgatgcagatggttgtgcggactccgggctgtgtgctgctctacacggacaccgacagcctgatctttgcccaccttatctgagcgtgcccactccagacgggccctcatctaggacaattcacggacgaatatcccaacccgagcattaaggatgggagggtcacttcatgccccctccaaaaaatttacaaaccatttgtcggtaaaggtattgtcggagccgactttaaaattttcgactttggtcacactttgtaactgttttgttcaccattcattgtatctgctctctttctctctctcatataacatacacccacatacacacactcacatgtactctttgttttattacttgatttctgcaattttatctcttttttgttattttattcatgtttttagtaaaaatgtatgcataattaacgaatggaagatgaaatttgaaaataattaagcgttggaagatgtaacttttaggtagaaaaagtgcataattaaggattggaagatacaatttaaaaaaattaaggattagaagatacaagtttttaagccaaaacataattaagcgttgggagtatttgtttttaggtgaaaaaatgcatagttaagaaaaggaagatataattaacaaaaaatatgaattttgtggcaaatttgggtgtatgtggtgtgtgtttgtgttcaccagtacgtgtgtgctgatgatgatgatggttggctgcactcaccacgcccagtgttggtaatttcgtcaatgctttcataccatttgcagcctttaccgttaaattgtaaataggaagagttggaagaatgtgaagcttcacttttggtgtcctcctcctcctgctcctcaatttcagtgaacaatcgaccaaataatcgccctccctttttgtcgtcgacaatttcaagcagttccatcggataataacggtcctcaccacgcgtaaagccttcaatgatgcatggcacataggggtagtgcaatttgacacggtgacgagtataaaaatgcgctgccacgttaatgttgaacggcttacgcagacgtccatatgcgggttcaaatgccgcgcctcgttcagtcattccaccaacgaggaaagatttgcgcattccattccgatccttgtatgttgtctggacctttttcccaatcaattgctgcaaaactcggactcggtcctctggatggttcagtcgatcgcgaagtgactttgtcgggcaggagagaaattgagcacaaaattcgctgacgagaaccatttcagattttttaatgtctgaatgaagaaattcgagcggcttttataccggtgttccaactcaaatggataagctccgcccctttttattttatcgtatgcataattaatgaatggaaaataaagtacgaaaataattaaacgttggaagatgtaacttttaagtagaataatgcataattagtaggtggaagacacaattttgaaaaattaagaaatttgaaaatataattttaactgttcaacattttatttagcattaataatga

SEQ ID NO: 39815 - DNA, 1041 bp, Heterodera glycines
aaatactcaagcattattgcttattctgacctattcaattcattcaaaaggagtgacccattaattaattaatccttctttttcagcacttacctttcggcttaatccaaactctgtgcctcaaactgtgaaaatctctcagtcctcagctgagtacaccgttttggagaatgtgagagtcgtcgaatggcaaagttcgtcgttggatcgaccaggtgacaaagcacaacaaaattagccgaatcaatcattttgcgttgtcagaattgttgactgtttgggtcagaaagtgcaatttcgcctgtttgaatctgctgaaagagaccaacggaaagtcgccccgttttatgctaatcggaaatccgcaaggactttttgacgagggcgaactcagcgcagatttggaagaacgaggcgaaggcacagtttcggaaaacagtggcagagcagcggacagaatggtccggacgcattatgtgatggtgagagacgagcagcagatggggacttacagtaccactcttacaataaaatgaaattacagtatgacaacgaccgactgctgagaagcaccgattgtcacgagcttttcgggagggtggcagacgaatcatgcgaaaatgagaaggaaacggacggaaaaggaagaacggaccaccggtggttaaagtgacatccgtcgattgaccttttgtacatctttataaacgccattagcatttaaatttgaagaattttcttaaaattataaatattttcaaaaatttccgtgccttcggcgccactcactgagagatggacgaactttgacaggctctaatgcactttatgagtccaatcaattgacaatcccgggtttttatacaataactttttccatgttcgaccctatctttttggtatcattcgaaagcgcaaagtctgaataatgtaataatacgagaaaacgagagaattctaacagtttctgaaagttacaaatgaaaataatcagcaattacttaattaagcaaatcttttttggaaattgcctgaacgctg

SEQ ID NO: 39816 - DNA, 937 bp, Heterodera glycines
acgtcgaatcaacgaattatgtcgcagaagcactacgcaattcttttgttaaatttattttaaaattgctgtgaaatttcttaagctgaagagccccctaaaaaatcctgtttaaaaaaaacaaaacggacaaaagagaagcgagtcatcaaatttagcggtgatattaattttgacaaaactgcttatggggtatatattaatcggactacgagaaggagaaccgggcaaaatcggacgaatttcattgtgagtttggccaattataaaaatttgaataaaccgaaagaatttctaatttatcgaaactattttcagtctcttgccttcgacagtctttcaattgattcttctgaaatcgacattgacaatggaattcgtttgccaaattgtgatacgctaattaaacccgcaattgtaagtttttttaaaattttatttattttaattagtgtaatttcagcgtcaaaatccaactttactcggaaaaaaacttccaaaaataaaagaagggattacaacggatttttatcgcattataaagcgcgccttatatttgaaaaaagtcagtgccgaaaaccaacaaattccctcgttgttggtctcgcgccttttgcttaccgattcgatgctgtcttcattggaaggcgacctttttcgaaacatggatctgatgaagcttgactatcctcggatgccaatgtgagttttgtttcgaacattcgccgaagaattaccgggcgaagacatatccattcaaattcaggtggtttttggagacattggaccattggtttgatgacaatgaattaacttttgtcaatggaggagtttttctctattcaaaggcaagatttactagcaatttctctggtaaatcaaacatttttagattttcatttccctcggattggaccttcttttttactacgccgac

SEQ ID NO: 39817 - DNA, 1694 bp, Heterodera glycines
gacgagttatgggcccgggactcaaatgttccgctcagcccaaaattttttctatttccgggaaaaaatcgaaatttttctgaaaaaaataccagtcgatagagctcgaaaaactatgttttggaagtggtctccgtttttctgggaaaattcgttaaaaaatcctagaattcaaaaacccgaaaaccgttttttaggcctagctcgaaaaattttgaaaattttcgaaattttaaaatttggaaaaatcgagctcaccgagctctacaataagtctgctggccaccctgagctcaggtcaaagcctaatgagttattcaacggggactgaactgggcaaagttggtactgaaaagttgccaatttctgcagcccttccaagtataggtagaggcctggaattttttttgaaaattagaaaacacttcaacttaaaatcctaccagcaagaattttccgctccctgtcctttaaaaaaagttacgggccttcaaacgcaagcaaaagtgagaaattagccgccgggactcagttggccaccggagcaaaaaacctatagttttcccagatgcgcctcaaaaagttgtaagacccttccactactttcagggcgctcccggccttcggccgggagattttgtttttgaagacgaaaccccctttttctgtagagtaatataaactagcgtgtggcgcagtaattgctcggtgtagacagtatgctttgcacagtaattgctcgtgtagacagtatacttgtgagagatgaaaagaatatgcattacatgagcgcttcgcgcaaaggacttcgttgctagtgcatgcgcggttttgaaatgaatttatggatgtgataagggattttggtctacaggcatcgtgaggacgcattcataattttctggaggactttcggccgcttcgcggcctcaaagggcgctccgcacttatctttttcaaaattttaaaggcgacatttgaagcttcgcggcctcagacgggcgcttttgcgtccgtttcttaattttgttgggcttggacgggcgcttcgcacccgatttaaattttgttggggccaaacgggcccttcgcgcccgttttttaattagaagctaactatgtcttcttttgacgaatctaagacgatagaaaagagctcaagcgtgagagggatggcgatgcgcaatcgccatttaatttctcacgagaattgttaaatttatcttatatccaagaaagatgactatctcttattttgagaaattttatacgttacaaatgctctcgagcatgataggaagtgcggcgcgcaatcgccatttaatttcacagagaatttttaaatttatcttatatccaagaaaaatgactatctcttcttttgagaaattttatacgttacaaaagcgctcgagcgtgagagggagggcggtgcgcaatcgccatttaatttctcagagaatttttaaatttatcttatatccaagaaaaatgactatctcttattttgagaaattttatacgttacaaaagcgctcgagcgtgagagggagggcggagcgcaatcgccatttaatttcacagagaatttttaaatttatcttatatccaagaaaaatgactatttcttattttgagaaattttatacgttacaaatgcttctcgagcatgataggaagtgcggtgcgcaatc

SEQ ID NO: 39818 - DNA, 695 bp, Heterodera glycines
gaattgacaggcttactgtaccaagggtaccctcattggctagatgcccatgaggatacaatccatacaaaatttttaattttatttttgttcgagttcgggtcaggggttcgaaataggcaacccttggtacagtatatgcggatgccggactcgggcagcctgagcatgtccagatctggagacccgaagacctgtcttttgtaggacatggccccgctcaaggaccctccgacaagtccagacccggatacctggtttttgcaatatcttgccccactaggtggaagcgggctcttagaatgtaaatacccggatcggaacccggaaggtacggacccaactttgcacaaaaacacactagaaagaatggccttccgggccaaattttgttgacaaaagtttaaggaattgaatatttgtgaaaaagtgaatatttactttaatacatgtatttataacatgtgtctgcggtctagtggttagcctctatggaaaatttacttcctctcactgggtcaatacactcgcatagcccccagattttgcccaaataaccggtggcgtggactacgttacatattcaatgaacgcgagaagattaatacactttttcagccagcaaatttttgttttaaggtctcaattacaaacgattcacagaaaagagcttaaaaaagtgattgaccaaaaaa

SEQ ID NO: 39819 - DNA, 1081 bp, Heterodera glycines
  unsure (1)..(1081): unsure at all n locations
ttttaggacaatttttctatctcgtaaccccgatgctaatccgttccggagagcctcttcaaaatntttccattaccctaagagctgcggaaattgtgaattaattctcagaaaaatggttatctctttntaggacaattttctatctcgtaaccccgatgctaatccgttccggagagcctcttcaaaattttttccttaccctaagagctgcagaaattgtgaattaattctcagaaaaatggctatctctttttaggacaattttctatctcgtaaccccgatgctaatccgttccggagagcctcttcaaaattttttccattaccctaagagctgcagaaattgtgaattaattctcagaaaaatggctatctctttttaggacaattttctatctcgtaaccccgatgctaatccgttccggagagcctcttcaaaattttttccttaccctaagagctgcggaaattgtgaattaattctcagaaaaatggttatctctttttaggacaattttctatctcgtaaccccgatgctaatccgttccggagagcctcttcaaaattttttccattaccctaagagctgcagaaattgtgaattaattctcagaaaaatggctatctctttttaggacaattttctatctcgtaaccccgatgctaatccgttccggagagcctcttcaaaattttttccattaccctaagagctgcagaaattgtgaattaattctcagaaaaatggctatctctttttaggacaattttctatctcgtaaccccgatgctaatccgttccggagagcctcttcaaaattttttccttaccctaagagctgcagaaattgtgaattaattctcagaaaaatggctatctctttttaggacaattttctatctcgtaaccccgatgctaatccgttccggagagcctcttcaaaattttttccattaccctaagagctgcggaaattgtgaattaattctcagaaaaatggctatctctttttaggacaattttctatctcgtaaccccgatgctaatccgttccggagaggctcctcaaaattttt

SEQ ID NO: 39820 - DNA, 1034 bp, Heterodera glycines
ttgacttttattctttaaatttaacaattttattatctaatttgcctcatttctgtccaccagtgaattaattattactaataaggcatttgatgggggggggggggacggggggcgcccgtgccccgccatttccttgacccaatcacacccatttaaattccgttgcaaatttaaccgacaaaatgcaaaaatcacaatgccatacccctttagacccttttgccccatttctcccccacctcaaattcgccacaaattcattctgcactccatagaaagatactaataaccaactccatccctccccatttattcacatttatcaatttcatttatcgatttttgtaaaatttcaaaaaattttctcagaaagatgttgacaattgaaaaggagcagcagcacagaagagagaaaagaagcccaaatcacgtccattagcagcagcaacgctttctctcttcgtccatctcacagttatttaacccaaagcatcccaaattttgtcaattgttgcaattcaaattcgaaacgaactcatcgctttcgacagtccatttttatcttatttatcacctcatttgtcagcagcatcatagtcgttcattagtgttcaaagcaatcaatacccatgcagaatctgaccacctcctccaactttcaaatgttttccaaaggttcgactaccggattttaatttattaaatttatcaaaaagcattgcatttcttccattaatttacgttgcattatgtaggcttttccaaattcagtgcaccatgatgccgtcccttcccacacgcaacagtcgcccagaacgaatgcctcagtctctgccggggacattggtgaacagcagggaaaaggccaacacggtcagctgtcagccgctgatctgcaccagatgatgctgaaccagctcgatcaggtcggacacccccccccccccgagaaatttagattcagtagaagcaattcaagccacaccttgaaaattcatgttgtcgagattttaattaagttttggcataaa

SEQ ID NO: 39821 - DNA, 1670 bp, Heterodera glycines
  unsure (1)..(1670): unsure at all n locations
cggggcagtccccccgaaccgatccccccagatttaggggagaccgaatccttccgaatagcttccctatagccgtacttttattctgcgttggattttgctccccatatttgtttgagtacctcaaacggacacttgaaaaatcgatttttttttttcggggcagtccccccgaaccgatgcgcccagatttatggggagaccgaatctttcgggaatagcttccctatagcctgtactttaattctgcgttggatttttgctccccataaatgtttgagtaccccaaacggacacttgaaaaaatcgatttttttgtttcataaatatttttttcagaaagtgctctaaagcgcaccaaattttatttacaacttaattttagcactctgatgctttagtatcaaaaaggaagatggagaaaaaattttttaaaaaatttttccttatattttggttatatcgttttgcttttggtggggtgcttggaacagtggaatcatgcgcacccgtccgatctggcaagttaagcaacgattgctgactagccaaaaggttcggtgccgtgatgaaacgaaccagcactgcttaccccgcggcacccggcacggtcccccgaaggaatggatttaattaaattctctccttcggggatttttttccattaggtcgtccgttagcgttcgattgctctagtcaatttttcaaaatttttgttgaaatatttgtcgtgctctgaagggcgtgggaggggggggggggggggggcgaaggcccccacgagccgcgaagaggccgagtgagtaccttcggtgcaggaaaattattaaattttaaaaattttttaattgctttttaaatatgccaaaaaatgtaggcttaacttttttagtgaaaattcgatcactcatattttttgctaattgagcagaagcgtaccaaactttgcagggatactccccggtaaaggactaacttacactgaaatgagcgccgagctagctggctcaaaaaaatttttcgaaaatctgagtctttcgtttttatttatttgcaaaattaattcataaatattttttcagaaagggttctgaaacgcaccaaattttatttacatgttagtttaggcactctgatgctttttctatcaataatggaggtgaataaaattttaattgctttttaactttgggaaaaagtttaggcttaactttttagtgaaagtttgatcactcatatttttttagtctaatctactcaaaacggttcagaattcaataaaaataacattcacggtgcgaaaaatggggtttgacaagtttattggggaaaaaaagactttacaaaataatacccctgggagaagggagtgggaaacatgatttcaaaattttcaattttttctagtctaatctactcaaaccggttcagaattcaataaaaataacattcacggtgcgaaaaatggggtttgaaaagtttattttgaaaaaaagactttacaaaataatacccctgggagaagggagtgggaaacatgatttcaaaattttcaattttttctagtctaatctactcaaaacggttcagaattcaataaaaataacattcacggtgcgaaaaatggggtttgaaaagtttattggggaaaanaaagactttacaaaata

SEQ ID NO: 39822 - DNA, 657 bp, Heterodera glycines
gcaaatttgaaatttgtcggtggctagaaatgatgaaatcgttgtaattttttgacgaagtctatcaaagagccggcggatttaattcttcatttactctttttcgctttggcttattttctcttacttttgtatttaggtgataatgaatagggttcacatttttaggtttttacatatttttttcctgagctccccgtggccctaaaacgcacgaaaaacatgatttttgagctgatgtttagctacttttcaagttattagcgcctattttctaggttttatttttagcacctaacaaacctaaaaaaaataataaaaacttatttacaccgattttgggagttttttagaacttaaaacctacttattttggcagatattagcacctatgattttcatcgtttttttttttgctaattcaagcatgaaattgcctttatatttattttatgcgtcgctaaatgcataaatcaggcgattatccctttttagtcactatttgattacaaggcaaaaatacgcatgccggtattcaaaaatatgtttgatctaattctttcgttcgaatactttttctttttcaagatttttagaatattattacaatttcttcctgcctttctttctttctttttaaattttttgcttgacgcc

SEQ ID NO: 39823 - DNA, 933 bp, Heterodera glycines
  unsure (1)..(933): unsure at all n locations
tcgacgggtcgcccatttacggctcgaggcattctttcgccggcatttcgttcctctccaatgcccctcccccctttttttagcgtcggcgatttgcgcaaatttcgcgagggaagcaccggcttactcaaactgaacactttcaacgggtcagtgttctttccattttatcctgtgtttgcttattttttgtctcctttcccattggcttttctctttttttcctcccatgctttccctcccctctgattttgtccctttcaatgcttttcctcctttccatgctttccccccccccccgctcagaatgcgtcttctcccctttgactcctcccagtgccgttcttcctccgattgttccgccgttttcgtcgccggggacagtcgtgtgaatttgtttctgggcctcacctctttccaccttttgttcaccagggagcacaatcggtgcgtttcccccccccctttttcccctttttcgattattttccctttcctaaagaatctcttctcggcttcagcaattgaatcctcattgggtgcgtttatttacgctattttggctcattttgtgctccattcagaatggtgatcggctgttccaagaatcgcgaaagattgtcggcgcgataattcaggtcactcagtggggggtggacggaccaaacggtactaagtgaattgaagtataattaattatggtattccctcattaatgtttgttttctgtatcgttccgctcattacagtatcccatcccatcccttaccgtatacactcactccctttgcaattcatttgtcccattatgtgttgcattcattcattcaggcaatttgctaccgcgaatatcttncccaagtgttgggctcgtccttcgccgccacaagtgcccccccccaaaaaagtgccaatttctgtctctccgtcctt

SEQ ID NO: 39824 - DNA, 919 bp, Heterodera glycines
tcatccaaaaaaggataaccaaatggtaaaaatgcaaagaatttgattatgcacgagatttgagataatttgtttttgtttatgcaattttggaggaaaacaaaatttggcgaaggaatggacggaattggaaatgaatgaacggaagaggaggaatttgttagaaattttttaataatgagatttgttgggaagaattcgatggaccaaatgaggcaccataattataattaaccatcggatggaccacaagcaattaggcaaagcaattaattacacagttaattatgtatgattccagcagtgacaaatatttggtttttgtcttctaaggcaattaaaagggaaaataataaaaaaaaacacacaaaaatgacgattggtcataaggacacaaaaggggggggggggggaaagaaagcaaaaagcactttcgattattgggaacgggaatcttttggaaatgtgcaaaatgagggagggggggacatcacgccaccggcgcgttgcagcgcattactgcgactgtttggcatggcaattcacttccaaattggtcctaattgctcctctccgtctctctctcgctttttttctctttgcacatcaatcagtcggtcgatcagtcggcaaatcgaatcgaatgaaaatgagaaattaataatgaatacctaatgagtgagtgagtggggggggggggggcgtgggaggcgtaaaacgaacgaacgaattgttttggtgcgtggcattgttcagtgattgtgattatcatttgattattagcactccattacacatgattaagtactatcattttatcagcaaaagtcatgtgagaaggcaatcctttcggtttaagaacaataaaatgggagtctaatccgaaattcagagagtggattaaaattaaaagtgaaaa

SEQ ID NO: 39825 - DNA, 1340 bp, Heterodera glycines
  unsure (1)..(1340): unsure at all n locations
gttgagtttcgatcagatnccattcgtcgnccatttccaatttctttgctgttaatgnccctttttcaaatccaanttgatgtccatgtgtgagaagcggactgctcgtcggttcggtgttttgtcttcttgaaagcatggtcaccgcgaagcggatgacgtgagcagctgttgctctgagacgattccaattgagaagcgctcaaattggattgcaggtgtgaattcttcgcgctgttggacggcattattccattcgacaatgggaggttctgtcacttctctaatttcttcgccaggggtgtaagtgacgtttgattctggctattggttaactttggttagccacgctgggccaaatcgccaaagcaatcacgattggagactctgtgggtctgttcnccgtgaagcgatgtcagccggattttcatccgtgcgaatgtgtctgactttgaaacaagcttctctgattttcttcagcctattgttgacgaatctgtcgtatttccgttcctctttgagccgttcgattgagcattggctgtccgtccaaagtatgacttgttcgtcggtgaaattgagttgagtttgtacgaactttgtcactttgacttccaaagttaacgcttgcagttccaatttaggaattgttgaatcgtggtcggccactttgagcggtttgatatggcttttgccaaaaatcaagttgctttccttttttccgtaggaagtgtccgcaagctgataaagcgcgacaccgagtcccgatttgctggcatcgcagaagcaatgaaattcttcgctggaacttgtcgcgatgtgacgagggaattccaccctgaagttgaagccgaatccgtcccacgcatgcattagtttgatccagtcaattgccatcttttccggcagaggatcgtcccatttgaaattcaaattttggacgatttgcaaaaaatgcttggcgggcaacagtgccggtgaaataagtccaagtgggtcatacacttttgcgatgtgtgacaggatcttccgttttgtggttggactgctgaagactggcattttgaagatcagctgatcgtgtcttggcttccattcgatgcctaacacctttgtgttttcgaggtctttggccaattcggatgagtcaagctcttttagctcgtcgatgtgacttccgaaaaattcgcggatccgtattccggcagattcaaaaatgatttttgcttccgtgaccatttgagtgatgctttcacttggtttgacttccaccatgatgttgtccacataaagattgtcactgatgcgttgtgcaacatccgtttcgtaaagagccaggt

SEQ ID NO: 39826 - DNA, 786 bp, Heterodera glycines
ctcctcctccccccccccccccccggccctcatgtcccaccgttcggtcggcacttccctcccctccaccgtcactcacccgttgcactgtcgtgccgttggcgtcctctcccgagacggtggtgccgtcctcctccgcctcttccgtcgccgcttccatccgcgcgcgtgtccgcctgcccatcgcggccttcgaatgcggccgatcgccggtcacccaatggtggtgcaacgcgtcgctggcggacggacgatggtcgggcgaagtgtccaaaagtgtgtccacaaagtgtttggcctgctccgagccggaccaaaactgcggataatacacctgagcaaggggcatattcagcaccattccccccatttcatgagcaaattggcacgagagaattaacaatttaaatttaatttaaaaccgtctaaaaatttgtgaaatccaatcgaaattcttttaaaaaatcaaaggtgaaaaaataaaaagtggtgcaaaatgtgacccattcacccaaattttcctatttttccagtttaaatttgttttgcggcccaatttgtggtttcaaatttcattaaaatctctctcccacataattggccgtgatgatgtgtgtgtacagccgagaacggcagtcgtcgtcgaagggcataatgccggacatcaaaatgtacgcttaagggggaaaaagatagggaacaaaatggcataatttttggggtaaatggatggcaaattcaaaaaatggcaattcgactgattgattaaatggtggtcaatgtgtc

SEQ ID NO: 39827 - DNA, 1406 bp, Heterodera glycines
aatttttaaatttacccccttcccccgttttctgcttttgctcactttgtattcgcgtgggccgtgcaccacatccttcacttcaatgatgtgatattggcactcggagggctgaagaagcaatgcaattcaaaacaatgaacaaattcgcagtttaatgacccaaccataatttacaccgtctctgcgttttgagctaccgtacccaaactgtattgacatctgtggctcagcgggtttcaagagatagtaaaaggaaaaggagggaggttcgagtccgctccatgaaaaaaaaaattattttctttctctcctgaattaaaaacaacaattttcaaaacccgttttaataaggcataggaaataaatgcatgtaacaatgttttgtcaaggttggacccaaataggtagcgtataggccggtacaccaagaatactaaaccccaccaccaacaaccttttctttgctgatacacggcatgaacacgaagcagccagtgacagtgtcacggaagcgctcaaactccagcttggccaacagacggagcattgacggactgagcgcaatttgaatcaaattatcctttttgatcggtggcgaaactggcaaaacaaaatgacaaatttcaaaaaaaaaatttcaaaattccttaccacgttcctcctttttgatggaatcgtccagttcaagcgtctttattgcctgtgccaaatcattttgtttctgatggacaaagccaagtgttggtgactcctcttcctgaaaaaaaaattgttggacactcaataaaaaaatggaaacgacatttttgtaatttttcaaacaaaaaaaaccgaatcaatttttttttgaaaaatgcacacttcacaaaaccttggcttcgatgtagctgaaccagctgacaatgtcctggtcgttcttcacattttgtgtcggcaaaattttgtcaatagaataatcgccgagccgacggaggcgcagccgccgcttcagccacaaatgttgaaaagactcggcctccatcacgtcaccaatttggtcgatctgtacaacaaaaaaattggactaaatttagggagttcgtgtgaaagttccagaattttacaaaaaaaaaaaatccaggaaaatcctagcaaaatactacccaaaaaaacgcacaaaaattgtcgtcgagaatttggacggcagcccagggtagttgacccggacataaaagccgatcaccgcctgccggtactgttcaatgtccagcagttgaaggcgtttcaactggccttgggtgaggataagacgcttcatctcctcgggtgtctgaaaacaaaattcttggttaaaggttgcgggttgatcggtttccattttcccgatgccctagtccgagtattgtatatttttcaaaaatgca

SEQ ID NO: 39828 - DNA, 1231 bp, Heterodera glycines
tttttgtattttacacgctttggagtcctcaattccccggaattagtgtcgggagtcggggggcaaaaagtgggagccggggacctcggggagagcgagcgaggaagtcggtggtctgggcggggaataggcccacaaaatgtcggggatcggggttcggggttttaaccctcttcattaaatcatcatttacaattaatcattggcaaataaaattaaaaattcagttaaaatgatactgtaatagcgaaaatgttgatccaatttctaataatattgacatatagataaatataaattaatcaaatcagaggttcttatttttcagaattcgaaatattataaaaaaaaacagattaaatttttgacttaaaaataattgtttatttaaaataataatgcgaagttctttagcagcagccacagttttcccacttgagaccctcgattaatataaaagccaggaaaaatatttaaatattaaaataaaattacatttatgctataatctatcattgtagaaaaaaaaatttaatttttatagaaaaaataataatagtttgtgaaataaagaaaaaataaccattaattaatgttagcgaaagcaaataaaattaaaatataccaagtaaaaacaaatgttttgataaaataacataattgaattatcgacaaaaaacagtgactatattaaaaaaattcaattttatgatttagattctaaagaaataaatgtttttagcaaaaaatatattgaaaactttccttgaatttcaataatatttgtaaaaattctggcaaaataattatggtgcaaatatgtcgaggggaaacggacggattttcgtagacgcacctggtggcaagtgataaaattttatattttaataaaacaatgaacgaaataaataattaaaactttaaaaactgattatatttggcttaagaacatggagcaacaaatcatataataaataataatttaaaataaacttcttaaaagctcttatttcttaattttgatataatcttcagacaaatgcttcataattcaaacataaacatattgtggtctaccgagtgaagattactcaaaaaattaaaaataccaaaataatttataaaaattgaaaataaaaaaacaataataatttgtatttaaaataatgatttcatttaaactaagagcaaagttaatacatttattattcaagttgaaaacgaataataa

SEQ ID NO: 39829 - DNA, 576 bp, Heterodera glycines
atttgacgggatcggccaatagcaacgggattttgatgggattggccaatagcaatgggatttgatgggattggccaatagcaatgggatttgatgggattggccaatagcaatgggatttgatgggattggccaatggcattggcaattgatgggatttgattggattagccaatggcattgtcaattgatgggattttatgggattggccaatggcattgtcaattgatgggatttgatgggattggccaatatcaatgggatttgatgggattggctggcatttgatgggatttgatgggattggccaatagcaatgggattttgatgggattggccaatagcaatgggatttgatgggattggccaatagcaatgggatttgatgggattggccaatagcaatgggatttgatgggattggccaatggcattggcaattgatgggatttgattggattagccaatggcattgtcaattgatgggattttatgggattggccaatggcattgtcaattgatgggatttgatgggattggccaatagcaatgggatttgatgggattggccaat

SEQ ID NO: 39830 - DNA, 1038 bp, Heterodera glycines
  unsure (1)..(1038): unsure at all n locations
aacttagttttaaccaaaaaaataaatgaatttatattttttaaatatgagaaatatggtaaaatacatatttatattgaataaattaccacgtccacaatgaattaatcttttttaattcctttttttgatgtaaattaggtatattaattttaaaataattatgtccgaataatttatgccatcaataaaacggagtaaatataattatacataaatattcataaacattaaaaaagaaaaagcaataaaactacttcatcaaaatatcctatttaaaaaatattgaaaaactgaaataaaactttatcaaaaagaacttatactcaaaatatatattattaaatttaaatgattcactaatttataaacaaaaccaaagtaaattaattgaaaaattaaattttgaatttaattattcaacatcacccgcagtcgggagtgtcgcgaagagtgcgaaaattaaaactctaaaaataataataaataatcatgaaagatttaataaattcatgaaaaaaagtttatgaaaattaataaattgtagaaaagtggctataaattttaaaatgataattggatgaattcaataataaaagaaaacgcatgaaatgttgaattaaaataaaatatttaaatcgtaaattacagaagaaattaatttaaaattttatttatcaaaattttgttcaattttatataaaatttttatatcatcttataaaggtaaattttaattaggaacgatcaaataaaaaaagtgatctcataaaaaattaagatttttgttcttgcctccaatttttcacaaatttacttacgttctaaagagttgcatttaatggttcctttataataaaatttttaaaaaatttaaaaacatttattttaatctattctttgtattaggtagtttgaataaataattctaaacaactttagattttacatgaaaagaaaaaattacattagaaataaaaaactcgtttanataaaattcacatatgattntctanaaaagaaaactttaagaattga

SEQ ID NO: 39831 - DNA, 536 bp, Heterodera glycines
taccgtatttactcgattatacgccccccccctcgaatataagcccactttggaggggggttgaacaatagaagccccggggcttataatcgaggaaatacggtactttaaaaacacccctgatgttcaaaaaataactacagtgaaagaaaagggggctggcgcccatttggcggcgcccattcgacccccaccggtatttcggcgagtgacaaccccctgctgacgccgagacaaataatatacaaaaaagcttcatttttaggcgcatcgaaagcgagaaatatacaaaaaaaaggggcagagagaaattgagagacgaatgaacacaaaaaattaatataactatataaaataacgatgaggggaaaaataataaaaaatcgactattcaagctgggcgcggcaatctttcgattcattggcccctaatttttttttattttttaataaaattctggaaacacatttctaaggctaatttgagtcgctgagtacgaatctgaccaccttttcgaccaatttcgaatcccgaa

SEQ ID NO: 39832 - DNA, 716 bp, Heterodera glycines
  unsure (1)..(716): unsure at all n locations
tttttcgatttctaaacaattaatttgattttttggtcttacatgaggtaatttttaaaaatanttttatatttattccaccttttaaaggttgttaaaaantnattttgaattaaaagagtattaggaattttgantagagtgantatgggtattggttaatttttagnaaaaaaaggggaaggggagttggnagggaaatgagaaganggaganagggannaggagaagnaagaaaagaggggaanaggganaaaaagggaaattttaaaaattaaaaaaaattttaaaaatttaaaaaaaaattcaaattttaatttatatcaagtgaaaataatacaaaattatttggttttttatttaataaattaaattaatgaaaattttaaaataaattttgttgaattattttaaataattaatgatttttggagtaaatgattgaatattaatagaaattgagatttgatttttagatgagttttttttggagagatttttaaaaaaatttttgggaaagaaggggtaaggaggtgaagataggtgatgacgggggaaattttaaaaatttgggtgaaatttgttaagagatttttaataaaaaaagggtggtttttgaaattattaagatgaattggtaggattttgatttaaaaaatgataaaatatgtataaatttaaaaaaaattatgaggaataatattttatttatagga

SEQ ID NO: 39833 - DNA, 855 bp, Heterodera glycines
acccgagaatcgcgacggagttggtcaagccgattggggtaccagccggtgtactggtcaccccgaatgtcctcattcagaattggcaccgggaaaagctgccaaagttggaaaccaaaaaatgggaatgcttattcctcctttacctttatctctccatttgtgtcctcaaaacggaggtacagctcgaagaagacggtctcactgtgaacactttcgatccaaaaacatttttgtcgaaagaaagtgccaaaacgcagtgccaccttggcggcccaacctttccattgggcggagggacaccgaagcagaaaaaccctttcgaaaggcatttggccaatgaaagtgccattcagcgaatatgccatcgcaacaatgtccaagcgactgttcctcatccgagagaccacctcgtaaatggcatcaatggcactggcacggaaaatttcaatggatgcgtcaatatgggcataaaacaattgggggacaacggaactgaaaattaatgccgaacaattttttcaaatatttataaattatgttttaaaaatgaaaaatcaaaattaaaaaatggcctattaattaatgagttgactgtttttgataataaaaagggtgtcgaattggtatttgatcaacatttctgttttggtattcattcggccctttctgtccggctaattcgttaattagccattaagttattatttttttattattgtatttaatttgctgctcaccccttctgcttctgctgctgttgttccgtcatttgcaagctattccgtgcactttcaagtgcattgcatgcgcccccgctgacacgtgcataattctgaagtgcgcacaaattag

SEQ ID NO: 39834 - DNA, 1153 bp, Heterodera glycines
tatttatgaaacaaaaaaatcgattttttcaagtgtccgtttggggtactcaaacaattatgggggagcaaaaatccaacgcagaattaaagtacaggctatagggaagctattccggaaggattcggtctccccataaatctgggcgcatcggttcggggggactgccccgaaaacaaaaaaatcgattttttcaagtgtccgtttggggtactcaaacaattatggggagcaaaaatccaacgcagaattaaagtacaggctatagggaagctactcccgaaggattcggtctccccataaatctaggcgcatcggttcggggggactgccccgaaaacaaaaaaatcgattttttcaagtgtccgtttggggtactcaaacaattatggggagcaaaaatccaacgcagaattaaagtacaggctatagggaagctactcccgaaggattcggtctccccataaatctaggcgcatcggttcggggggactgccccgaaaacaaaaaaatcgattttttcaagtgtccgtttggggtactcaaacaattatggggagcaaaaatccaacgcagaattaaagtacaggctatagggaagctactcccgaaggattcggtctccccataaatctaggcgcatcggttcggggggactgccccgaaaacaaaaaaatcgattttttcaagtgtccgtttggggtactcaaacaattatggggagcaaaaatccaacgcagaattaaagtacaggctatagggaagctattccggaaggattcgggtctccccataaatctgggcgcatcggttcgtggggactgccccgaaaacaaaacaatcgatccccgccccccccccgcccttcagagcacgacaaatatttcaacaaaaatttttaaaaattgactagagcaatcgaacgctaacggacgacctaatggaaaaaaatccccgaaggagagaatttaattaaatccattccttcgggggaccgtgccgggtgccgcggggtaagcagtgctggttcgtttcatcacggcaccgaaccttttggctagtcagcaatcgttacgtaacttgccagatcggacgggtgcgcatgattccacggggagaagcaccccaccaaaagcaaaacgatataaccaaa

SEQ ID NO: 39835 - DNA, 1273 bp, Heterodera glycines
aaagcatgttttttgcccaattccgcacctcaggcgtatttttctgggcattacatggcattagagaatgaatggcatcaattttatccattttttgcttgtgctagactaaagtaacttctttttttgccggaatcccggatttttttgataaaaatttattaatccaaaattagtaaaatttaaaaaattggccaaaaatgaacttttggtattttaccattgcattattaaccaaaatcagaaaaattttaatttgtgatcaaagtaaacaaaaagtttaataataataataatatttattttcaaatatgtaattttaaatattaggccttgtaggacaactttacagtgatgggatggcatataaatattttacttgacactgaaattttttatttaaattaccaggaatttgggttttacctatgagttttattttcgaatttaagcatttttataaatccacagttatttttattaaattttcgattctcgggaaatttacatttataaaataatatgtatatacgtatttttgctttatttcagcaaagaaatcggtgttctttccttcaattgaattgatcgagtttacgatcaatttgctcgggttcagtcccgagaatgttcaaagcgaatggaaccctttgatttatgaattcttagacaaatatatcaaaggtagatgtacaaaaatcaaatattgacccaactatttaaacaacattcaggtctaattgttcaaactatgcatctagaaaaaagacaggtgtgttgtgtgaaatctgaataacagcccagggcataattacggattacagaaattacagcgtttttcagctcccataataaaagatttcgagttttcgtaatatagaaaaccacaattcttttatcagtaatatttgtaaaggggtgaacttaaatatgtattaatggagagtcaatatttaaattatttttattatgattaatttttacggattggaaaaaaagttcgaaaaacagaaactcaagctttttgaccctaacgttttaaaattaacaaaacgagtgttttgcttattttaaatattatttgtcatggaaaagtcccaacattaaaataggcgtggttaaaaatatattttgtattctcagtggatccaaagcttttaaaaaattaacgattttttccaaaattccttcaattagtttaaaaaatgttttatatcgaaaattcaaaataaatttaatttaatgcaagtcgttggcctctggccattttttc

SEQ ID NO: 39836 - DNA, 1013 bp, Heterodera glycines
attagtgaccattgacccgtctccgtacggcggtgggggcggtggcggcggcatggacccggttcctttccaattcgggcggttacagtgcaatgagcagcttattccaaacggattattcacagcaccgatttttgggtgaaaaatgataataatattaatgctaatataatcaacatttattattacattaaactttaaaaaaattattttgcttaaattatttttgaataatttttgaaactgttacatttaaataaaaattaatttttttcagggcttatatactaactttaattaaattaattgacttttaatgctttaattttaatatttttcacagaattatttggaaaaattaaaaaaaaatcaaacaaaatttatgcaattaaaaaataaaattattttattcaaaaaaattttgttttttacaagaaaacacaattaactttattgttatttcatatttttattcttaattaagcttgtatagcttcttttccattttaattcattcgaacaaattttatggacttaattcaaaaaatttaaatttttcgcaatttttccaataattgtcctcccactaattaattagcttggcacgtgtccacactgatctgtcttatcattgcgatcactgccggagtgtttgccatttttgcgtgcctttgcgtgtttttcaccagttaaaattttacattaaaattaaaatgaatttatttgaaattttagccctttgttctgcggttgccgctttgttggaatttgtggcctgtaaattttattaattttaaagttttaattttctgattttctaaagaatattaattaataattatacaaagtaacatattttgtaattttaaaattattatttaattttattctttcgcatatttattttaaagtaagaattaaaattaatttttatcaacatttatacataaaataatgagttaaacacttgaattttttaattaatatcattttaattaattactttttactaa

SEQ ID NO: 39837 - DNA, 884 bp, Heterodera glycines
aaatggtggtccggttgttcccattccgttgccccgcttgccagcagcctcaattgttcgtccaatgccgacagcgattgctaagccaacgagcagcaagtgcaacgagtgtggtcggcgatggcgcaaacaaatcatctgtaaacggacgcgtggctcttcatttggcccatctgctgcaccggtgaaggaggaacagatggaggaagaataattttagtgctgatcagcaacgggtgatggttagggcctggatttttaggacccaaaagttgcaaatgataggatttatgactaaaaataaaaataaattacagaaaatttaaatttttggagcatgaattggattgaccaaaaaaatttttcaattttatattaactatttgttaatttttcatcaatttattgagaatttttttttgctttaattctaaagtatcttgatataacgtaaacaaaaaatccagcggaagctcatgaaaatcctaaaaatccaggccctagtgtttgtgaggtccgtagtggtgaatttttcacttaattaaagtgctaaatatatagtaaaaatgaccggttacacgagccttatttggcggaaaaagtttgtgatttgtaataaattgttatgacattagattgggtggatgatcaatcatatctcgccaaatcatttttttttacatgcccccttctagtgtcatagcttttgatcagttaattgtgataatctttcattttaatacatagtcttcattgtgctattttgctagtctctgtattgtattgtaaaattgcttgtcatataaatttgctagttcagttctacaaatttacagaattattttttaaagttggttgaactttttatcttaatttcacatttt

SEQ ID NO: 39838 - DNA, 1274 bp, Heterodera glycines
tggatacaaatataatttttaaataataatgttaaaatgagacttttagagattttcaaattttttcaacgagagctttttgaattagagaaaaatgccctgttttttcaatccctcggtaccagtgagctcttccggggcattatttaaatttggcctccctgttcgttagtagaatctgccaaaagttaaaaaatgattaaattagtaattgtaataaaaaaaaattagtttcgcgctagctttgcttacgtcagtcattggtattcaatatgatgccacatttttctttgttaatgtcttcatcccctatttgcgcgtatttcatttatgggcatggcatttttataaaaatatttttttatttatgccattatatatctatttttacatcagatcattattaacacataaaaatttttaaattttccatagtaagaaactgctttcagcaccaatgcatgggtttggcctttttctgtcgctactggcggcaataaatttgtcgagaggtcaaattggtccaaaggatgaaagcaaaaaaggtttgaacaatattttcaataaaattttaaatattattttgttttgttttaggtctttttttgatggccaacgaatttctcgagacagggaaaatgcttctcgacgaattcccaggaaacaaacaggcggagaataaatctgatgatggactcaattcacaaaaagcgaatggaaaggcattggaagagaaaagtgacaatttccagcaaaaagcctttgagtttttgtgtggaatcgaaatgaaagcaaaaaatgatgagaaaggaaatgacaaaacaaagaaagatgacaatttgttagcttttaaagaattagaagaaaagcgactcaatttttgtcaaaattggaaaaatggcaaaagcatttggaaagggttgaaagaggcagggatttcaatagtaacatcagtgaataatttgaaactgaatcagcaaatatacggagaaagtgaacaatggcgaaaatggaaattttgaacagcaaaaacaaaaaagaatttgaaaattttgcgaaattaagtattgatttggtaaagaaagtaactgaaattcttaaaggtaaccaattaagttattctaaataaagaattttatcccaaatggggtaattaaacatttaattgaagatgcgagaatagttcactggctctggctgatcagtctgatcatgaccaacggaaaggcaacaacacatcacgacgaaagaaaagggcttttcatgggattttt

SEQ ID NO: 39839 - DNA, 1371 bp, Heterodera glycines
aaattatgtcattatggacttttcgccactatctttgccactattttggcatttgtagtacttttactgtcgattttgtttgtttttttgaaaaaaattgacggcatataattttctgaaaattctatttatccccctgggggatcattggagattgggggattaatggagattgggggataattagagcaaatacggtatacggtggcatctgaaaatgtatgttaaaagtatcatgtaaaggaaacaagggcaatctttcggaattgtggtcccgaaaattttttaatttgtatggcactttttctaggcttaaaaatatgctaatcacgaatatgaactcggatttgcccaattccgaaccccggacccgaattctaataaaaacttgaatttttttttttcaaaaatatacgttaaaatcgatcaaattttggcgtaaaccgcggatttttatccaattaacaatttgaatggaagttttatccgacgaagaagaaggaatggcattgtccgatttgaaagagacagcaaagaaaaacaacgaagaagccaaacgccgagaatttgaccggcgactgccaatcattcactcatatttgggcgatgtcaaccaaggggaattgtctggtcaagaaattaaacaaaggcaatttgaggaacctgggaatacaatcaaaatttcgggtaagaaaaaattaattattgggcaattggtaaaaaagataattttgtttttttagtttttgttataaacgaagtttgtctgtttccgggccagaaaatgccaatccaattccaccaaaggtcgggcatccaatttgtgcacaatgcacaccgtcagcaaaatatccttgcccttttcactgcggaagaccctaatttcgaatttcacaatgctgaggaattttcgtccgtgccatgccaccaaattggcacattgtttcaggtagttaatttgtatttttctgtcaatttccgctttcgatggctctagatgcaaaatatcttggaaaatggtgagaatgatgtccgacgaatgaccatccaagtgatcggtcgtcagcggtgtcggttcgttcgttggccgcttcaacggcaccaaattcacagtgaggaccattcagtggtcatttgcgaccaaatcgacgtggtcgtcctcgatgaaaaggttcttccacagtcgcttttcccattgaacgaatgctgctcatttggcagactgaaagctgatcaggtaaatctcgagcagcacaataaatccttaagttttagcagtcctttgtacaatcccatttaaatttcctgaaattttagagggtcaaattaaacgctgcgctcagtgcccacagtgaattttcgctgaacaat

SEQ ID NO: 39840 - DNA, 1039 bp, Heterodera glycines
accccgatgctaatccgttccgcagagcctcttcaaaatttttccattaccgcaagagttgcggaaattgtgaattaattctcagaaaaatggctatctctttttaggacaattttctatctcgtaaccccgatgctaatccgttccgcagagcctcttcaaaattttttccattaccgcaagagctgcggaaattgtgaattaattctcagaaaaatggctatctctttttaggacaatattctatctcgtaaccccgatgctaatctgttccgcagagcctcttcaaaattttttcaaagaccgcaagagctgcggaaattgtgaattaattctcagaaaaatggctatctctttttaggacaatattctatctcgtaaccccgatgctaatctgttccgcagagcctcttcaaaattttttccattaccgcaagagctgcggaaattgtgaattaattctcagaaaaatggctatctcgttttaggacaatattctatctcgtaaccccgatgctaatctgttccgcagagcctcttcaaaattttttccattaccgcaagagctgcggaaattgtgaattaattctcagaaaaatggctatctctttttaggacaatattctatctcgtaaccccgatgctaatccgttccgcagagcctcttcaaaattttttccattaccgcaagagctgcggaaattgtgaattaattctcagaaaaatggctatctctttttaggacaattttctatctcgtaaccccgatgctaatccgttccacagagactcttcaaaatttttccattaccgcaagagctgcggaaattgtgaattaattctcagaaaaatggctatctctttttaggacaattttctatctcgtaaccccgatgctaatctgttccgcagagcctcttcaaaattttttccattaccgcaagagctgcggaaattgtgaactaattctcagaaacatggctaaattgtgaattaattctcagaaatatggctatctctttttaggacaatattctat

SEQ ID NO: 39841 - DNA, 1423 bp, Heterodera glycines
tcccaacctcaatttgatcacttttgctgatcaacaatttcccaactgatcagttttcgtgccgctgatcaaaaaatggcgtcctcaaacggtccctccttcgccacctctgcttcacaaaatgccgttcaaaatgcatcgaaaagcggcacatcctctggaagcggctggcatcaccaaaatcaaaatcgtccagtttctgttgtcactaatgtgtcgcgcttcaccacttttgtttatgctcctccaacaccggcaacaacagcggcggtgccgagaagcaattctcagatgacatcatcatcacaatcggtagcactaagcccttgaatgagcctaaaaatttgatcaagtcttccgctgatcaggctctctgatcttcttaattttcattttctccctttttcccactttatctaactacacgtatctttgtctcctcattgtctcacactctctctatctctctctccctctctctcgctatcttacactctctctcattttctctctctctctctctcactctctcacactctctctatctcactctctcacactctctctatctctctctcattttctccctctctccctctctctctttctcgctccctctctctctctctcgcactctctatctctctctcattttctccctctctctctctctcattttttccctctctctcgcttttctccctctccctctctctctctctctcgctctctctcgctctctctcaattcttccactttcaagagatcgcattatcaatggtctgaaagaaatccaattcgatacgaaacacagtgccaaaaaaaattgaagctaagaccgagaatgaaatgttttattcaagttataaagaaatatgaaaatgtaaaagtgcctaaaaagagaagaaatgtaacgaagcgaacttttgattagtcgtaagcatcattgaattttcgcgaattaggtttatccttggcacaaattctcgaaggcgaaaaaaaaacaccgtattttttgtcaactaaaatgaagataattgtaatcttatatatacacacatatgtgatctcttctttctgttcctatcggcaaaactgattatcacttgtatatctatcatggaccagcagcaaatctcagcagatcagatttatatcagttaatcaaacgctttttgctgctgatatcatctcgtctctcctcattcctccccctcctttccctctttctctctcgcattttctttttgtctaactttctgcaaacaagattttggtcgaaattctgactgatctggcactctttgatcacaccttattctgtttatcaccctgatcactcttttgtcagagtactaatggttgtatctcaccgcccactgtctcatcgtcgtctttctcttcctcctcattgcgcaaaaat

SEQ ID NO: 39842 - DNA, 1019 bp, Heterodera glycines
tgaagttattggtaagccaaaaaaaatccaaacatttcaatatctataaaaaatttaaaaatgagaattcatgcgagattttctggaaataagcttaatagggcctagttaagctgtaaacaaaatttggggcgatttgaaagagaatagaaagaaccaggttcgatgaagttttggtaagccaaaaaaaaaaatccaaacatttaaaaatctattaaaaaaataaaaatgagaattcatgcgagattttctggaaataagcttaatatcgcctagttaagctgtaaaaaaaatttggggcgatttgaaagagaatagaaagaaccaggttcgatgaagttttggtaagccaaaaaaaatccaaacatttaaaaatctataaaaaatttaaaaatgagaattcatgcgagattttctggaaataagcttaatatcgcctagttaagctgtaaaaaaaatttggggcgatttgaaagagaatagaaagaaccaggttcgatgaagttttggtaagccaaaaaaaatccaaacatttaaaaatctataaaaaatttaaaaatgagaattcatgcgagattttctggaaataagcttaatagggcctagttaagctgtaaaaaaaatttggggcgatttgaaagagaatagaaagaaccaggttcgatgaagttttggtaagccaaaaaaaatgcaaacatttaaaaatctataaaaaatttaaaaatgagaattcatgcgagattttctggaaataagcttaatagggcctagttaagctgtaaaaaaaatttggggcgatttgaaagagaatagaaagaaccaggttcgatgaagttttggtaagccaaaaaaaaatccaaacatttaaaaatctattaaaaaaataaaatagtgaagttttaaaaattaataaaaatttttaaattaagagttactggcgttagcatcatagcggtgcttcagagcagtttctgtaaaaatacttatgaattaattttgtaaaaaataaataaataatg

SEQ ID NO: 39843 - DNA, 79 bp, Heterodera glycines
aatgagctgcgccagcatctgttccacctttggcacaattttactgatattttatgcctgcttcttctgctgtagttag

SEQ ID NO: 39844 - DNA, 1153 bp, Heterodera glycines
attaaatatgatttctgaaaaagtccctgaaatctcttttttttctttccatagcttcttgtagagctcgagctgctctttccaatggtcttatcccggtctcgatccgtgcagaactcaaaaagttatgaagtgaaatgtgaaatatgttttcaccacacgggattttttctgaaacccatcggaaccaaaaatctagggtttggtataagcgttttagaaattgcggagaaaaaagcttcgatattgagaaaccaagtcaagtccagaaaagaatattttaaaacgaattcgttttggtttggcattatgataccgaataacattcggaaattatggaaacaaaattggagaaattcgaataatttttgacttcaaatttttcccagttttgattgggttttcaaatagtagtttggttcagaattttcccctctacaaaaaaaatttataatagaattttttattattaattcgaaatcgttaatttatttgacaaatccaagacttaaaattgggagaagcatggggctgtggctgaggaaccaaaatggggccccattggggaattaaacatgatttctgaaaaagtcccagaaatgtcgattttttctttccatatcttcttgtaaagctcgagctgttctttccaatggtcttatcccggtctcgatccctgccgaactcaaaaagttatgaagtgaaatgtgaaatattgttttcgccacaattgggagaagcatggggctgtggctggggacccaaaatggggccccattggggaattaaatatgatttctgaaaaagtccctgaaatgtcgattttttctttccatagcttcttgtagagctcgagctgctctttccaatggtcttatcccggtctcgatccgtgcagaactcaaaaagttatgaagtgaaatgtgaaatatgttttcaccacacgggattttttctgaaacccatcggaaccaaaaatctagggtttggtataagcgttttagaaattgcggagaaaaaagcttcgatattgagaaaccaagtcaagtccagaaaagaatattttaaaacgaattcgttttggtttggcattatgataccgaataacattcggaaattatggaaacaaaattggagaaattcgaataatttt

SEQ ID NO: 39845 - DNA, 1817 bp, Heterodera glycines
  unsure (1)..(1817): unsure at all n locations
gatgctttagtatcaaaaaggaagatggagaaaaattttttaaaanaatttttccttatattttgttatatcgtttgctttnnggtggggtgctnggaccagtggaatcatgcgcacccgtccgatctggcaagtaagcaacgattgctgactagccaaaaggttcggtgccgtgatgaaacgaaccagccactgcttaccccgcggcacccggcacggtcccccgaaggaatggatttaattaaattctctccttcggggatttttttccattaggtcgtccgttagcgttcgattgctctagtcaatttttcaaaatttttgttgaaatatttgtcgtgctctgaagggcgtgggagggggggggggcggaggggccccccacgagggccggaagaggccgagtgagtaccttcggtgcaggaaaattattaaattttaaaaattttttaattgctttttaaatatgccaaaaaatgtaggcttaacttttttagtgaaaattcgatcactcatattttttgctaattgagcagaagcgtaccaaactttgcagggatactccccggtaaaggactaacttacactgaaatgagcgccgagctagctggctcaaaaaaattttcgaaaatctgagtctttcgtttttatttgttttttgcataattaattcataaatatttttttcacaaaatgctctgaaacgcaccaaattttatttacatgctagtttaggcactctgatgctttttctatcaaaaagggagatgaataaatttttaaaaatttttaattcctttttaaacaggccaaaaagtttaggcttatcttttttttcagaaacttatcagaagcgccccaaactttgcagggatactgaaaggaagagaaataacctattttaaatattatctagtcagttcatttaaataatttttatccaaaaaatttttttttgggttttcggggcagtccccctgaaccgatgttaggcttaacgttttttcagaaactgatcagaagcgcagcaaactttgcagggatactgaaaggaagagaaataacctattttaaatattatctagtctgtttttttaaataatttttatccaaaaaaatttttttttggcttctcgggccgtcccccctacncgatgcgctcagatttatggggagaccgaatccttcgggaatagcttccctatagcctgtactttaattctgcgttggaatttgctccccataattgtttgagtaccccaaacggacacttgaaaaatcgatttttttgttttcggggcagtccccccgaaccgatgcgcccagatttatggggagaccgaatccttcgggattagcttccctatagtctgtactttaattctgcgttggatttttgctctccataattgtttgagtaccccaaacggacacttgaataaatcgatttttttgttttcggggctgtccccccgaaccgatgcgcccagatttatggggagaccgaatccttcgggattagcttccctatagtctgtactttaattctgcgttggatttttgctccccataattgtttgagtaccccaaacggacacttgaaaaatcgatttttttgttttcggggcagtccccccgaaccgatgcgatgatttctcatttttaaattttttatagatttttaaatgtttggattttttttggcttaccaaaacttcatcgaacctggttctttctattctctttcaaatcgccccaaattttttttacgagatgaactaggcgnnatattaagcttattcccagaaaatctcgca

SEQ ID NO: 39846 - DNA, 1322 bp, Heterodera glycines
gatatggaaagcaagcccagacttgctttcgcctagagatgcatgtgaatggcccgctcaatggtggcgccatgaattctttacagttactgaacatcatccggtgcgaagccggtcccgctcttcgtctagtccattcgactggtgagaaggtagcgtcggaaatctgagttcatcaaaattaatgtggcctgccttatgaggattgtggttcaatggccagtcccttaaaggattgtagctctcagtatcctgatctttcccatacttgggaacgattcgtcaaaaaatgcataatttttatctacatttttaatgggatgtgtgagctatcaatttatgcattcaatgcccttcgtgcggaattggacatgttttattcacagcgtcagcagagtggaaaacaaggatgttgcatcttaatccttcacattttagtgttttatcgtaatattcggtatatatctgtttatttccttgtttaagacaccccttatcccgttggctcccaaaaattgtggtgagtaggaattttgaagtgaattggacatcgcccgatgatgttccctacgacggactgttgaaagtaaaggtcattctataaggcaaagtatgacatcgtcattgattatgacaaaattgccttcttgtgaaaattgtggtgttgatcagccaaatgtgaaatatttggtcaaaaatgcccgataaaatgtattatttcatgaaattaacaaaagcagcagatcgccaaaaatgtccctcggagaatgtttaagctgtctacaagaaatcctttcacctgggtttcgtaaaattgatggcatcactgagcctttttggtacatttgacgtcgtcttcgtcacacttcatttggaagatttaaaccttagaagcgtaaatatcaattaaagtggaactgctaaaatttggtacttagaattaaattttgctttaaatatgttaaatgtttaaatttaaatttctatgcaaatatttttaaaattacattataatcattttaaacccatgctttttggacaaaaatgcagcagccactccaaacccgtcgcggattcaatttgccgcggtcgcggatcgcgcaaaaaattgccgcgaatcttggtcgcgcattttaatttttataatcatttaaaaaatttttttttaatttttttatataaaaattaattaaaatcacgatgcatataaaattttggggggggtggactgataagaggggcggggggaaggggggtggaaattttgcaaaggttcccagtgatgcaagccagggatggcattccgaagtgccgatagacgc

SEQ ID NO: 39847 - DNA, 958 bp, Heterodera glycines
aatgaattttcaaatcagttgtaaatttttatatattccttgacaaaaattgaaaatttatatcccccccccccccggtctctccgccgtaacaccgcccaaaataaaatctcagttccgcgaatttgttgccaaagagtcgaagactaatccttcctgattaatgcaatgaattaattattaatttcagcccctaattaattaattaaactcttagcaataatttgtttagtttcgaactgcaaaacgacgagctgtgaaacaattcgaactctgagcatccattcggtcgcacccaaagttgttgtcggactgatcaacgtcgtttgttgcttcggttttctgcttatgctccgctcttttgggatgccagttaatttggtagttttttaataataattatataaacaggaaattaaaaatttttttctagaaaaatcgtgttgtcaaaatggcgatttttactgaaattttctttaacactttaccagcattgggcgcacttttattcaactgggtcagttttataaataattaattatattttttattatatgacaagtgttttttttcaatttttatattattgtatttaaatttgtttttatttttttaactagttttgttgttactttcagagcactgggctggtgatggcaaattacgttggtgaactgagcatttcggcatgccccgtggacgcgttcatttgtgccgtaatttattggagaaatttggtgaaaagaggtggcgttgcccaacagcagcagaacaacattaatttgatgacggtggccaaaccgatgacgacgatggccaacagaaatgtggacagaagactgaccatccgatgaaaaaatgaagggaattttgaaaaaaatatgtaaagagaattttaatttttgaaatgaattcaaaaaatatcattaatttctgcaaaaaaattacaaataattgt

SEQ ID NO: 39848 - DNA, 1437 bp, Heterodera glycines
cccccccccctaaattaggacttctctgaaatgaagccctcaccccctctttgaggggattcaaaaataaagcccctgcggggatttattttaggaaatacggtaaattttagattttcctgaaaacatttttcggaattttctaccatttcagcagtttacggaaaatatccctttttggctctgatttggtcgcaaatccgtttttttccggaaatttactaaactttttcatttctggaattgaattttttttttttcaatttagtccaggccaattttctgaatttattggacaccctttttggtttccggaatatgtgcttaaatttctagaatttactgacaatgaatgagcccttttttcctaaacaaatttattaatttttcgggagttttcctgcaatttaatcgcatttatttcattcatttttaatcacttttttttaactttcagcaaaaagtccagcattgttctgttcggtggaaaaatgttaaaaattcctttttattcgctgatgccatcccgggcaaagagcgccgaaaattggagtcacagacggacgaatgccgacttcgcagttcactgcttaccgacaaaattacggtagggccatataccgtagtataccgtatatgctctaattatagcccatgggggattatttctcgacctcctcagaaaaggggggataattagagactgggggggaggattatgatagagggattatttttcaaaacacctcgtagactgggggataattgaagactgcgggattaatagagactgggctataattagagcatatacggtaattaatgaattaggtgccaaaaacacgctcaatttgctgcattaaggctactgaacagaacaaagagttggcctgttttatttggcgatgattaattttaatgaataagtaaaatttaatcatattaaatattattaaacaacacataaaaattcatgattatttaaaaactgaaatcactacttcttcgaataattcatctccaattttttttttacatttctataattctctgtttgatttttcaataattatccaatttccatagtattcaaaagaaaaattcattcaaatttttttttttgctttttcatttttcgtaactcttaaaattttcaaaatttaactcaaggttttttttccacggtctcgttaaccctgcacaactgttgcgacgacagttgctgataaaatgcgcgacccgccgatcgctgtttttgtgcctccatggcgaggcgctggctgtagttcgctaacaaaataagtgtgccaaaacagtgtttattgtttattcgtaaaaataaaaaaaaagtcatcagtagggcaccgatttctagtgaaaaaactctttttttgccttattgttttgaagaaaggagctcaaaaaaacgcatttctg

SEQ ID NO: 39849 - DNA, 1577 bp, Heterodera glycines
tcatcatcatcaggcgaagaaggaagcggaacagaagaggagcaccagcagaaggaggaggagggaaaggagaagaaaggggacaaattgggaggaaaagcatcggcagaaagaaaagaggcaaaaggggggggggaaatgggaaaattaggcaaaaggagaaaaatatgggaaagaggggaaaagtaaaggaaaggaaaattgggagggaaagtgtaagggtagccgggacaaaggtgacccatgcgaacacttgcaaatttcaaccgaccaattcgaaatggtcattttgactgcgattgccaaataaaaaatgctaagaaataaaaaacaaattcaggtggagctgaaaatcgacttggactccaaaacggtgatgttggtcggtccgccgcacggcggacggcgctattcgaccaccgccgtcctttcgtaccattcgcccgcaaaaccaaaattggcaaaaagtgtggggaaagaagtgtgaaacggcggaaaatataacaaattattggctaataatttacacatttcatttgaaaaaagcaaatttaaagaaaattggaaaagtgaattaattttttaattcggaaaaatattcgaattcataatgaataaaagaaggaaacaaaccatcaaatgtaaagttttgtttctttattgaaaatggaaaaatgaataataaatgtatatatataataagcacaaaagagtgattaaaatgcaaaaagtaattaaaataataattaaacccgtcagggggatttttataagaaaatataatatagatataataacatttaaaacttatttaacataaaattttgttccttttatggctttcattttgcatatgcattatatgcgtgttggctgtatatccatccgtaaatgtcctcctgggacggcgttattcggctcatcggcaaagccgcgccattcgcactgttcgaacggctgcgcggcactgcaccgcccctaaaaatgattatttcggttttaattttgatttttttaaagcatgtaaaatgcaattagaatggcttttggtttagaataatggcacagcccacccatcacccattcgttcgttgctttgcccattaattattcattcgttcgttggcttcgcttttctccgcttgccttggcattgtgccgccactgtctcccagcggagttgcgctgtaaatcattccgttcagttgcgctgctcttgccgccactgctgcgctcatgtacgcgttggagctgggcgagtgttgcaacgaatgaatgtccgacgcgcgaccggcggaaaacgaacgaatttggcgcctttaaattgaaaatgaatttttatttttaattatatttggtttactttttagcaacacacattcccacaaagacggcgaacatcacaactccgacagtgcccaagcaaattgcgataacagctgttggcaatggtttgcctggacaacaattaattaattaattgcctattagtcgaaaatgcgatttgtctaatttatttattattttcattttccttttacccatgcttttttgtctgctgttccccatgttcattg

SEQ ID NO: 39850 - DNA, 1038 bp, Heterodera glycines
  unsure (1)..(1038): unsure at all n locations
tagaaaagaaatgggctaaaaatatttcatcaattagtcgtganccattacaagatttctatagcagggccatattggcaaagaagcacacgtagagcaggctcgaaataagggcaaatgccgaaaattttaaaaattcttgttttattagacccactctgctttgactggccatatctcgccagggagtggcggtagaccctttgttgatacatttgaaagggtagagcgcgcctagctcattcgaatagcatcaaattggtttgcatttgtcccgaaacaacccgcttatgacacgtcgaaagaaaatccattaaaatttgcattcacaaaactccattttttcattggcaaacgtctaaagcaaacctgaaattgataggaaatatatattgctcataataaaagtacaatttttatttgtcccacgccattttctgggaaaactttttcgcgaaaagccgaaaaattttccatcggcctcttccaactgcaacagatgcgtttcaaacaattgacaatataattatgattgaagtcaaaaagcctctttagaaaatgcttaaaaaatttttgttataaatgttcacaaaatattttttttgttactgacaattcatttccattcaatttaaaagcgataaataatgaattgagatatgaacaaacatctagaaaaattatctcaacaatctgtcagaaacagtccaggaaaaactttgcgcgagaagccgaaaaattttacaactgcatcactgttcatttgatagggtcaatcaattcaaaaacataacttaatataaaatattgataaaaaaattattttccttcatctttagaaattgctcaaaaattgttgttgtaaatatactcaaatattcctaaaacaagctttatttttactgactatctttttccagaaggctataaaatgcaataaacaattcgcatgcttggatagaaaagaaatgggctaaaaatatttcatcaattagtcgtgaacattanncagattctatagcaggggcatattggcaa

SEQ ID NO: 39851 - DNA, 1248 bp, Heterodera glycines
agaagatgtaaacagtgaaagtgaattgttttttatgcttttttgttattttcgatgatttttttgtttaaattcaaattaaataaataattaattctttaatttaaaaattaattaattaattaattttaaaataaaacttttattcataaaaaataattacaaaagtttttcatttaattaaaacattgaaatctcttatgttaaaatcattctctaatctattttttatatagaaattgcaagcttagcacatcaatgttcaaaaaaaatccctttagtttattcgtttgcagtatttgccaaaatttggatatataaatatattatatattttttggttttatttatgctttcattaaaattattattttaattaacttttcttttataatatattcattaatcaaaaattatatattttatttattactttttaatttattttctttaatacaaattcataatttatctcttgtcttgattgtggcggttttcaatttttcttccaatgttgatatttaacgaataatataaaaatttggtttatatttttctaattacaacgacgaacgttttgatatttagtaagaaagaactaaaattataattttattacaaagaatgagtatttttgagcatacatatgagtaagtaatttaatataacaattttattgaaattttttagattaatttaaaattcaaattccatagaaaatttgttgaaaattagcttctttatttttcatttttgcttattaaatatcatctattgatcactagtttcatggggaaaatatttttaaaaaattatttgcactttttcatttttttccattttaggtcttcttttaaatgtgtttaagaattttggcattttaaaatttttatttacctttattaattctactttaatattataataatatttattagttgttaaggttcagctagaataaaataataagaatttgctcaaaaaacgaattcttttagccgatttcaatatccaaaagatttatttaaccgtctataaaaataaattaatttaatgtttacattagataattaatttaattttaataaatttctcttatgttaaaatcattgttatttttatgtttttttttattaattttgttctttcatcataagtttgtatggaatttgtttcaatagattcaaaatgacaaaaaaaaatttaaatttttattcaagagctaaaacctaaatatttattgccaaa

SEQ ID NO: 39852 - DNA, 756 bp, Heterodera glycines
tttgaaaattcataatccacttctaaatgaatcaattaaattgcaaaaagcattaaaaatagagaaaaaaactggagcattttatacttttttagaattttctatcttcaaaatgaagaagttattacataaattttggaaaaattggttttttgagaaaaaaaattaatagcactgttctgaaaaggttttttgaaaaacacgaaattcttcctctataagcttctgtttattctatatttttataagacttttgaaaaaaagtacaaaaataaactgattttggaattcgggatcatagatggaagcaaatggttttttgggccttgggcccgcatcctcttgcctgaaaaaatgtattttagggaattgtgggatcactatccgagagctatgtttttacataatgacggcatcgatggaaaattctataccacagatgacacctttgttgagcacggatgagcattcggatgtgcactttttggtggggacgaacatgaaaaagaggcgagttaaatctgcgatccgtggcataatgcactaaatttaatataaattttttttttcgaaaattgggctattttttcaaaaattctttcaaaattctaatttttcccgccgggactgatcaataaactaagatttttctctacggcgcctatcggcaccgccggacagggacggatcccggagggggggtgcgcggggtacgccaaccaccaagccctccctcactttaattttctttaaaaa

SEQ ID NO: 39853 - DNA, 785 bp, Heterodera glycines
aaaatttcgatttttattcgagttcgggttagggatcagtaattagtcaaaatacatgtcagattcgtgattagcgacctttaaaaccccggataaaaaattatcatggttttttatcttaaaaaaattttgcaaaacaaaagggtccccccttttgtttcaaaaagggccacttttacagtagcgccaaaatttctttaaaaagttgtaactaaaatgaccatcctcagtttctttggccataggtatatatcttttttcttatttatcaaagcctacattcttggtatcaatttcaaagtaatggcatagttaaatgaccgaacaataagaaacgaaagattgccatttatggggacacgcgtaaacaaacaaacatcgtttggacgcgtaaataaactgaatgcagtagagctgggagaatcagagcatttcgttttaatggattttagggcccttacgggtgaattcaacaatcctacatacagcctgaagaccaccgacaaagaaaaagttatggcaattgaatttaccgcttacttaccgtataaatttaaaaattcaaaattttaaatatgtatgaagcattggcataatgtttatcttacgatatttcatttcgaaacggcctcgaggcttttacaatgccaatttaatgacgaatgaaaaaacaagaagcataaagctaacaaagggaaaggtgttaatcttggcaatgtagtaaaaacataaaaatttgtatgacatattcgatggtctctaaaggtttggtaaatttaccactc

SEQ ID NO: 39854 - DNA, 212 bp, Heterodera glycines
ggcctgcaggtcccgtaatccgtaattacggcgatttgttcggaaacccgtaatccgtaaatacgtccagcactgtagcgaacccgaattttcaaattttcccgcctatacccctacccctgaacccccggatttcctcccaattccccgtgtcacgccccccccccccgccctaatctttttccaataatttacaaaattcctccaccaca

SEQ ID NO: 39855 - DNA, 1122 bp, Heterodera glycines
  unsure (1)..(1122): unsure at all n locations
ttttaaatttatctctatgcagaaaaatgctctctttttgcgagaattttgttccatacaantgttccagcgtggcagagggcgcggagagcaatggccatctattctacagggaattttaaatttattctctatgccagaaaaatggctatctcttttttgcgagaaattttgtaccatacaaatgttcccagcatgggcagagggggcggagagcaatggccattctattctacagggaatttttaaatttattctctatgccagaaaaatggctatctcttttttgcgagaaattttgtaccatacaaatgttcccagcgtgggcagaggggcgcggagagcaatggccattctattctacagggaatttttaaatttattctctatgccagaaaaaggctatctcttttttgcgagaaattttgtaccatacaaatgttcccagcatgggcagaggggcgcggagagcaatggctattctattctacagggaatttttaaatttattctctatgccagaaaaatggctatcacttttttgcgagaaattttgccatacaaatgtcccagcatgggcagaggggcgcggagagcaatggccattctattctacagggaatttttaaatttattctctatgccagaaaaatggctctcttttttgcgagaaattttgtaccatacaaatgttcccagcatgggcagaggggcgcggagagcaatggccattctattctacagggaatttttaaatttattctctatgccagaaaaatggctatctcttttttgcgagaaatttttcccagccatgggcagaggggcgcggagagcaatgtccattctattctacagggaatttttaaatttattctctatgccagaaaaatggctatctcttttttgcgagaaattttgtaccatacaaatgttcccagcatgggcagaggggcgcggagagcaatggctattctattctacagggaatttttaaatttattctctatgccagaaaaatggctatctcttttttgcgagaaattttgtaccatacaaatgttcccagcatgggcagaggggggcggagagcaatggccattctattctacagggaatttt

SEQ ID NO: 39856 - DNA, 806 bp, Heterodera glycines
ctttgtggccaataactctgaccccctactaccctcgttcgctgcgcatgcagtggcctcattaatgaatgattgttgaggtagggtaaagctaggtactcattaactaaaataagtttaactaaatcaattttgggctaattaatcattaaagcccttttgctatacaatctgagaaaacgaaaaatattaatggcgtgtatttttttgtttttatttctatttcaattctaactaaatttgcttttaaacccaattttccatagtggcccctactgttttgactcccgtaaaatattttacaaatttattttaaaaacgccaaaaggcacatcatttttttcgatcttactaaaagcatcaccatccatcagcaaaaggcgcagcggcgagcgtagcgcacacgttgcgagcggcgcggccgcgtcactacaaccagatagtcgacgcggacggcctggcatccaaggcatttggggcgcacatcgtgcccctcgacctgaaaacataattaaatttaatttattcaaaaaaaaaaaagagttttgcgtacccaaagcctttggctgtcctcatctccccgcactattcctgtccacgggtcgatgctgtcctcgacctgccgcgcagcctggtcccgcgctgcgtccacatagcgctgccaccagccgttctcgcagcatgtgtcacagattgtgacacagccgcagctgttgccgcggactgtcactgcacagtccactccatgacttcccatgcacaaaaggcactgatcggagaaatttatttctccgatcagtgccccc

SEQ ID NO: 39857 - DNA, 1162 bp, Heterodera glycines
ctgaatgattgagagaaagctcacataaaggaattccataacacttaagtggtcgccgttagctcaatattagcagttgcacagcgcttgaaataggcgccgaattacgattttttcatttgctaaaatgtaaatcattatgctttttttaaaattgtgttaagcaagttttgaatttaattttattaaattcaattcataaggttgagtcgctgttttccaccaccacaaccactacaacctccacaaccacaaccacgacgaccacaaccacctcgaccacaactcccacaaccacaactaccacgactgcaacgccagctcctgtttatcccaccgctgtaccttatcaaattgatcataatataaataataatgaaatcaattaatgtaattaattttatgctaatttttaatttgtagcttctttgtaccttaagatgaatgacactaaattaattagcactgatatatttaagtttcaacctggctggcgagagtcttccacgcccggaaaaatgcaatcatctaaggtatccatgtattttgaattaattaaaaagaattatgctataatttatattaatggagtattgcacctttccgagatgagaaaaaatttggggtttcagcagaaattaaaaatctctctaaacccacccccccttcctcgggataataagatcgataacagtgagtaataaagtctcagattctgtttctggtaattggttttttcatattttacgtgagttactccaaaaagggctcagaaagtaaagttcggtattcctcataccatcgtatataaaaaatatcgaattttcataaagaattgttgagaggacgacgggggaaaatgatttattattcattgtgagattagcagtcattttcgttcaggaatttcaactagtcaaggtcaatcttttgcacgagtcaaaatagaagaacatttgggaaacaatcggtcatttttcataagcaaaaattttatcaacatttagaattttaataatgttaagaaagcattgtgactcattcattcacaaggtgacgttcctctcctgcaagaagggctcatttcccttcacaaaacatttgcacggaaaacacccgggcgcatccgccgattccatcactctcatcgtcttccaaaagc

SEQ ID NO: 39858 - DNA, 1104 bp, Heterodera glycines
gcattttgggataattaattaatcaatttatgagacaattaggaaagaaatggggggataaaatgacaagccatccacagaagctgggcaaacttcacatcagcacttgcattgagcgagaggcacgaacgactgatcattatcctgcacaaggcggaggatctgcctaaatggggcataatcggggcatcaggtgataataaaagccttgctaatgagagagagtaattatcaaattaatttccttcgtcagatgttcaaattggcattcgaatgcagcagggcaatggcacggaggcactgaaatgttcgcgagtgctgaagaacacaacgtcggcggtgtacaaagaagcggtgatgtttgtgatcagcaccaaagagacggacattgcccagaccaaaatcaccatctcagtccacgacctttccaggtgaaaggggggagggcaagtgccaaagtcggaaatgcttcaggtcggtgacgggcaatgacacaatcggcgcagtgtttcttggccaattagccatcgacaagtcagaggtcggcttattcactatttaactatttaaatgatttcgatgtttttttttgttattttagcaagaccaatggaggaacacaatggaccattggggcaaggaggtcaaaggggtgcacctgctgaagaacgcacagggacaagcgacacccgaagtgcacgtggtggacgtacgggaggaggacgaacagggcatggactgaactggcacgggaggaggacgaacagggcatggactgaactggcacgggaggagaacgaacagggcatggactgaactggcacgggaggaggacgaacagggcatggactgaactggcacgggaggaggacgaacagggcatggactgaactggcacgggaggaggacgaacagggcatggactgaactggcacgggaggaggacgaacagggcatggactgaactggcaccgggaggaggacgaacagggcatggactgaactggcacgggaggagaacgaacagggcatggactgaactggcacgggaggaggacgaaccagggcatggactgaacttggcacgggaggaggaacaaacag

SEQ ID NO: 39859 - DNA, 1268 bp, Heterodera glycines
aaagccctttttaatgggtttattccactttgtccctttttttctgttttttgcttctctgcttgaacaaaatcttcacgctgtttgtaaagttgtgggtggtgatttttgagatgacaagcaagcactgttgtactgagagaagcatttaatgtctttgagtaggaacatccatcggctttacatttagcagttgatttgccttgacgctcaaaataataccaccaattaccaggatttaagtttgacatttttaaattgctaaagaaataagaatttaaagaaatgaacatattttctttaaataaaaaatagaaaaatttgttttttataaaaataatcttacaagaaatcgtctcgaaaaaataatccaaaagtcaaattacggatcaaaattacggaaaaatcccaaaaatccgtaacccgtaatccgtaatccgtaactcccaaaaccccgtaatttccgtaatccgcaatccgtaattgcgtgcagccctggtcggaaatcataacaatgatggttcgttactaagaaaaaattatttacaatagaagcaaattcagcgtatccaattgagaaaaataaacggattttatgccagttattttgacaatggttcgataaaatataagaattaatcagtttttatgtcgtaaataattttcttgtttgaaaatttatccaatttttcttataatcatccatttaaatcctccaaaatctctcctccaaactgtttcttccattttgaaatggtccttctatcaatttgcaatattttagcagtttctttgtcactcatttttgggttttcactttttattttccaatattttttcattttttccattttttctttctccgttattttacagctaatgccaaattgtttcttccatctcttaattgttccataaccaactccaattttcttacaaatttcttcataattttggtgccattcttttaatgaatattttcttttttgcttatattcatttgtcatttcaataaatttctgaacaatttcaagtttttgttcatcagtttttgatttatagcatttaattttttgaagaccaaattctttattccattgttggatatatgtgcgatttgtccccaatttcttcgctattttcgtgtttattttactccattcttttcttggatattttcttcctttttcctttattttctcttttattttataatatttttcaattaaagacttttattctcttcatttcgttgttttccttctttt

SEQ ID NO: 39860 - DNA, 854 bp, Heterodera glycines
gtgctgctttacctttttcgaagggtttcttctttaattcaaaatttattcatttttttgaccattttactctttccttttttattacatcaccctttcaattcaattttaattattgtagttcaattgcaccttttcttcagccttttctctgattttcacacattcatttcttttttagcttctctcaaggcttattttctgcagttccattaaaatttgattcactcgaatttgcatttttcatttacgtagtaaaaccaattttggcattaaaaacggttcaacatttaacctgttagcatcacataagacaaacaacaacaaaaacacacatacggctttatgccttcaaattcagataatgcattttttggcactaagcctttggcacatagtcattttaagcacacagcgttacctgccattttcgcttgacactaggagcacacagcttcgactagtccatggcttacgctcatttcacccattaattgatctcttctgggagcacacagcttcgaccagtctcgtggcacacagccacaacggcactcagcccagctaggagcacacagctgcgactagcttttatcttttcatgctcaaaacctttgcacttatcctttcgaaaacagccaaaatcacaaaattaacatattatcacattaaaacacaccgcattgatcaatcaatgatcacaaaatatgccatatggtttttgtattaccgtactcagccaaattagccacagaaaatttgccaaatttctttcgcaagacaatgcatttttgtttggctcatttgcgtttgactgaaaaatagcaatttcccattgctttagtctctttttt

SEQ ID NO: 39861 - DNA, 823 bp, Heterodera glycines
  unsure (1)..(823): unsure at all n locations
tcctctccttcttctcctcctcttcctccactgcttctctatgtgccttttttccttttctcctcttccccatggtctctaatcgtctctttcccatcctgttctctccactggtcccgttgtctctcgtccctccacttttccaccccaacactttcgtgcaaatttccctcttgttgaaatgtttttgttgtcgttctcgaggaaaattgtgctgcagttgaaagctgattgtgagcatgccaatcggcgtcgtagttaagctcatctgaagaaaagaaaataattttgataaattttgatcaaattatcatttttaatgattcgatcgattttgagatttctttgtattgattgatcaattattcgtttttgatcagtttttcaaaagtgccaacacacaaatgcatttgttgtaatttgtctgcagacgaatccaatggcaatcagaattgttccctgcgcaggtgcaggagccgagtccggtccaactgatgccctcaaatgactgccagcagtcgttcctgacaatttttaaatttatttttattttaatgccttaaatttaaaataatcgacatgattttgatacattattttatgttgtccccccctacgcccacttattggccattttgcattgattctgcgcatcgaccgcacaattgcgtcggaacaatgtccacagctcgcggcacgacacgtgccgaaggcacaactcattcaacgcccattggcacgacaccgccgtggacaatcgccgagaaaaacccgcgngttccaaatctgtatttatggtcgaatgtatgttgaaagtcatatg

SEQ ID NO: 39862 - DNA, 1236 bp, Heterodera glycines
tttatttaatatatttttactttgcttaattttgtcaatgcatcggacgtaaacgcattggtgtccagcaacagggcattcataaaggtccaattggtcttcagagtcaaatttgcctttgggattgaactggacgaaacatttcaatgctaaagagtttcagaaaattcttaatgttatatttttattttttaccaaaggatgtgtacaaaaatccaactgacaaaaaaaagatcgataatcccagcatttaattattaatttatatttattttttttattttccttaattttacttttacacataaatatttttcaacaaaaatactaaaaaataaatgagaagaaaataaaaataaatgttaatggtttttgaattttacgaatgatttatccgataaaacgggctgagaatggacataaataataaataaatggttgttgttgattcatcactttgctaaaaaacaaaccattagcacaaaaaataacaaattctcctttctatcgattaaattaaaaaataaaatactttatttaacgccgaattttccaaaatgaaaaaataaattataaatgataagaaaattaaacgagtggttcctcgagagtcttgggcagagatttgactcgagatttcacgcctgttacgacataacaattggacaaaacaaacatttctatcggaccagaagtttaggctataaaatatgcctctgcgttgttagtgctgctcgagaccgaatgcgtctatgtgcaaaatcggatttaaaactgtgcaagtccaaggcagggacggtccagggggagagtacgcgggataattaccgcccccccccaacacactccacagcgccggatttttttaagggtaaaatactatttttttgctaaaatatctgattctcaagcaaaaaaaaaaatgggtcgatatcggcggtgccacctcaatgccaaaatcctgggaccgtccgtgagtctacggtctcgagatctctcggctttaagtcagaccaggttaacaaaaaccaacacttttactacatccttaaaaattgtgttttaaactaaaaagtaattttggattcaaaaatttattataatttccgagaacataattgatttgtttgttgtaagagaatgcttgctgtgtctgcgaactttcaacttttttgttgttgttataaaaaggtcgggaaattcccgttctaaaggtctaaccgcactggtttttgc

SEQ ID NO: 39863 - DNA, 1096 bp, Heterodera glycines
aaagcccaggaaacttctttttatgacattaaaatttttgaaaattttttttcgaaaaaggtggggggacaaagcacagtataccaaaaaaaacatttccgctatctagtgatacacagacaaaggttctacttcagttctggtcggttttatgcgtcccatgaatgaccatcctttaggccacaatgcaaaagagcaaatattggcataaaaaaaagaaattacaatgagaaaacacgaaattcaacttttttcgtgtataatttttcttttctctttagctaaaaataaagttatacaaaagttttcatttgataccaagcatataggtattgcccaaaaagaaaaatgtgatggcctaagaaactgatgacattcatgggacgcataaaaaatagagccctcttcttactcggtaaatgtcaacattcctataactagtatcaaacgaaagcttagtctcgggaacttcaaacggaagaaaagagcaaatagtgttctctgtccagcattcagttgtaaaacttaaattaagcttatgatttgaggcaatggtagaggacatttgtcccgaaattttttaccaagtaaaaacaatgaaaaattcgtatatccgagacaatcacagataatgaccatcactttgttttcgaagaaatctttttgtaaacccgacttttcaacaaatccatcaaattgcggtagtatgaataaacaaaattttctattttcatgtttcatccattactattgtatttgccttgccctgtcaaacaaaaaggccaaacctccaggggccgctccccccggacgttgcggacgatcgacggcagaccgttggccaaaacgtggcggtgggtttcggtccttacgcgcttcacgcgaacgattgcgcacgactttgctgtgaatggcacacgagacacaatagtgcaatttgtgatagagtttcggcagtgcgtattctaaagacaattgtaaggtcaacccaacggggaagctttttatgtgctctcaataacatttttttggtaatctcaaatttaaatcccattccaaaaatctacgaatgcgtcggaaataaacaaaaaccata

SEQ ID NO: 39864 - DNA, 1294 bp, Heterodera glycines
atttcaccgattaatgcatgcgttttgcgttttccacgtttatgtagacgttcatttgaagcgcgaggaggaggagcattaactgcaacaggaaaagaccagcaaaaaggagacgaaaaaggccaagaaaaaggagttggaggaggacgtcattgaggacgagtgagtggggggaggggcattggaatttttcaaaattcacttttatgttcgagtctgcaataatattatttttttgttgttgtaatggtttgtgatcataaaagtgaattatgaaaaattccaattttcgattttttgttcgacatcgagtccgggttcgaaatcagcttaaatgaatgccatattcgtgatcagttcagtgaccccaaaaaccctaagaaacatgtttcacggcttttaaaacaaaaaaattttctgcccaaaaaggggggaggggaaccatctaaactattaccgacattgcaactggcaaatgccatgcccagcagagggtcaccgtttcttatattctattcaattcgttgacaatttaccaaatgctcattgtcactggtggaccttttttgtaaaatatacaaaatctattgggttccaattcccttcttctttttttacagatacgacgactacgatgagcaacttcacagatattgaggacgtttccttttgttcgactgactgactgatttgagattccgactgattcattgatcgattgatgtttggtctgatcattttatttgctgttgcctttggtttctcaattcgtttcatacaaaaaagaaaagtaaattaattcgaaattgaatgatcaaaatcaaaaaatgttgtcggattcatcccttctgtcctaaccacttaccttctcaccaatcactcattttgttcgtttcaaatttcctcgctttttgagaattgtttttccgatcagattatatttcgataaattatctgttggagatttaattaataattttggtttatctcacagaaatcttttccgacaattggtgagatttttcttccaaaatccgtcaaattaatgccaatgtttgtaaaaaataaaaatttatttaaacaatgttttatgtaatatcgtagtcataataatactaaatttgaaatggacccgtgaagaattgagcttgggaaataaacaatatcatcaaaagggaaacaaatgcaaaacgatgggcaaaaaaagggaaaatggacaccaaaaaagggaggaaattgaaaggcaatggtcggagcaccccgaaaaaaatcactttttggtgcccgattttca

SEQ ID NO: 39865 - DNA, 1022 bp, Heterodera glycines
  unsure (1)..(1022): unsure at all n locations
aaaaaaagaacatatacttaattgttaaggaaatctctttgatttaggcaaaaatnattggncggnncctcagaaggagccttttcaaaaaaggttcaaggaatgtatttgttgaacggtcacaacttttggatattaacccaaaaaattcggggtcgctcatcacgaattctgacactaattttgacccattcctaacccaaatccgagaaaaagtccaaaaattaaacttgagaatttacttttttttcaaattgagaaagtgattcggaaaaaattgctagttgacaaacaaaaaattgtaagaaagggaagggtcacctctttaaattttaataaaattaaatatttttcgggtgccctgacttttacgggccattttccaactcgagtcacaaatgtcggggacacgtttttagttgatcctaaacagcaaaaatgccaacaaagatccttttcactattttactataaaacaaatttaggcacaggcacacaatttttttttttgtatttgatttttatgcctctattctcgcagattcgtccagcacaacgtccgcaacgccgagcattgcgtccagcggtgtgcacagcagcggggcgtgctgctccgacgagggcgtgcaggtggacatgccgacgacgccagcggtggtagcgaccagtgcggcaacaaacgcgtcacactcgcacacgcaacagcggcgacaacgccacggcggcgaggcggagggcgacgcggtggtggccgtcaccaccgccgccgcggcatgtgcgcccgcgagcgttgtcgcggcggcagcagcagccgcgccggccgcggacgcgtcggtgttggccgagctgcgcctgggcatgctcaagcatcggatgctggagcagcggtgctcgcccgccaaagcgtacgtaaactgagagatagggagagaaagcaattgttatgggttagcgaaaaaaaaaatggggacattttttggtcgtttaggctagggcaggccagggatttgagacgtcctttt

SEQ ID NO: 39866 - DNA, 309 bp, Heterodera glycines
tcatcatcaaccaaaatggcatctcgcatcatcaaaacatagacaatttgcccgaactggtccaaaaccaaaacaaaataatttactataaatgagaaatgtcgcatttgtacaatttgaagttttgttacgaaaacaatcatcaacattttggaccatgtcaagaaaaaaggaagggaaaagtgtggaaatgacagagaaaagaaagaaagagaaaagcagtgctccatcagacactggaatcaaaacaacaaaataaacaactcggcatctcgtcgtcgtttgctctcgcccaattttatctcatca

SEQ ID NO: 39867 - DNA, 415 bp, Heterodera glycines
gcacgaaaaattgccaaatatgcacaaaaacttgaaaattaggggtgcaaaataatttaaaaaattttattcctcataaattttatcggttgtttttgtaattgataatcaaaaaatttctcaaggttttcggaagtgaagctcactgttgacccactcgcgcatcatccattcagagttggatttaattttaggcataatcaaaatttttcctaagggattttcaaatcggaaaatatatacaaaaaatggcaaaatatgcaaaaaatcagaaaatatgtacaaaaaatggcaaaatatgcaaacaaaagtcccgatttttatacgcaaacacaaaaaagaaagtgtttttcctactatttagagcatggagaagccaggaaaaaatgcatttgcatgttttttgcagccctga

SEQ ID NO: 39868 - DNA, 1245 bp, Heterodera glycines
  unsure (1)..(1245): unsure at all n locations
cagatcagttctgatcaaaaagaatttttaccaaaaactttcaggggattgccatggngggtgtacccaaaattagtgcaataaaaccgtaaaaaaatggaaaaataaaagtttggtttagaattttaagctctattttatctgggttttgaattctgtaattgaactgagaaaaaaaattttgaaaattttttcagaattttcgactttttccaaaaaaggttgggtaaaacataaacagaatatttcggggtatttttgttaaaattcttcataattttatcattattttatattttaatagggctttctacgtttattttgaacggatttacaaaatttttaatgaaattttttaatttggccaacaaaagaattaggacccgaactcggtttttcaagttccgttcccgggcacctaacggacccggaagaagctattttagtatcagttttttatgctcttttcaattaaaaaaagagtttttttaaatatgcaaataaaaaaatttattaacaaataatattaattaattttagtaaaaacactgacccaaaattgtaaatctacagggaatttgatttttattgtagactgttgtttttaattttcaatcatctaatatgtaacctcatgtaaatataaacttttggtaaaaataataatatttaaattagcattttatttatattgcctctacaaaatgcttaaatgaacacttcatttatgcatatttaagcataggttggacaattcaatataattatttttaaaatttttaatgacttaataaattattttataataaaattaactataaaaacgaaaaaattgaaataaggcctaatattttgaattttacctttttagcaatgtagactaatttgtaagttataaaataaaataaaaattttttagaaatgaagttatgttctaaatttaaaaatgattaatttagagaaactaatttataacatgaagtaaggaagaaggaaaaaatatagcattatgaaaatatacaaacacaaaagcattccatgacaaaatgggataattttttcatatataaatatgaagaggatttaattgttttcgcccacgtccatatattaagcaaatcaattgtgattgtgtacatatgggagaatacataacaaggaataaagggtgcaatttataataattcaaatcaatttcttttgaggagagcaatattggctaaagaaaatatttttttcttttaa

SEQ ID NO: 39869 - DNA, 1164 bp, Heterodera glycines
tttttttgcttattttttttcttccccccccccccccccctcgtcaaagaagaaccacgtggttttctcagttttattatgcattattctttttaaagcataaaatggcagacgatgacaatgctttacacataaattttactcttaaatacttttttaatttatttttctttatttgggtcacttaattaccgcttttctccccccccccccgaaaattattcgttgattgacgattaaaaatatcaaatttattgatttcaatgacgatggtgtttcaattttctgttcatcaatgttcaatgatgaatgcatttttgatcaaaatttaaattcattttatgccctttactcagcgattaaatttaacattttctaaaactctgattttaaatattgaaaaatgataaatttttcgacgaattgttcaccaaaatttgttctttttttgccaatttgtttaatttgcatctctcaaattggtataaaaaggaaatattttgaacaattttcatcatttgttcacggatgaccttttgcttttttcattcctcctcatcttccccattttcttatcgcatcccttttaattttgtccttttcttcaagaaaacattttccttgctttaatgaaaatgcactaatcgaaatttaaaaaaaaagattttgagtgaattttcgaagtgaatcttatcgcttcgcccccaaaatttggtttataaaattcttgaatttattttcctaatttgtaagcaaacaacaaaaacaaaaattcttctaaaaaattttgggggctttaaaaaatttctaaaaaataaaaaatttatttgcaagttaagcgacaacgaagcaaggcatgttggtcaaagacgcacaagtgaagccggacatttcgaagccgcgctgggaccagtcgacgttcagtggtcgcgcacggcacttcttcaccgtggtcaacccactgaaccttttggcatcgaacaaccaattggaaaacagtcgcaaaatcgtcaccgattacgagtgggtgcccaaaataaatggcattaaaaacagtcgaaaatcgtcaccgattacgagtgggtgcccaaaataaatggcattaaaaacagtcgaaaatcgtcaccgattacgagtgggtggccaaaaaggcattaaaaacag

SEQ ID NO: 39870 - DNA, 898 bp, Heterodera glycines
gtccattgtataaaaatactttccaagtttatcaaaatttcgaaagaaattctcatttaaaaaaagaaaagttcgcaaaaaaatggcgaaaatatttattaaaaatgccaaaataaccgacgaaaacttaaatttttcgtatttttggggttgtaattttttaaaatttccaaaaagtcgatctttaagggggttcgctttttttgcaaatgaaaatttgaattaataaataaaatacaaaaaaattaaattgaattaattttatgaataaaaattgaaattacaaaatttggcttcaaaattgaaagcacatctcaaaatttgaaattttatttaagatttagagaatatagacaaaattatcaaaattttaataaattaatttcggcggaccttaagcagaatttttaaaatttaattacacacaaaattttttttaaatatatttcaatccaaatggaagaggaaacttcagtacaatttgtcgtaattttattcgttaaaattaaaattttgcctttgatttgcaggataattgcaccaaattggtcaattttcgtgttcattatctcttattgagttggatttcaatgataaattccataataattagaatttatacacagttcaaaataataaaaaaaataaaataatttcttcattaaaatgagtataatttatatttacaaaataaagtcataaaaataaattgatttctttggattttcttgatatttaatttcttggcccatctttcaattgcccaataattcacctcaaatatttgtttaatttttgctctaaattctttccattcttttcgtgaatgtttttacaattttgtataaattcattttttattttaaaatatttttcaacaatttctcttttttgctca

SEQ ID NO: 39871 - DNA, 327 bp, Heterodera glycines
caacaacaaaaaataaggctcgacagatgttaccataacacttaaggctgtttgttgccccaatgtcaacgaaccccacctcacccaaaaaaaaaattttttttttttttttgccattttgtggtcaaatctttcaaacaataataaaataatctgggtgtagtgatgccattatgcactgccgggaaaattttttggtttaatgaggaagatgttttaaattttcgaaaagatttgcccattttttcttgaaaaaaaaaattttttttttggagggggggtggggggcgttgacattggggcagaaaacagggttaggtgatctgg

SEQ ID NO: 39872 - DNA, 1349 bp, Heterodera glycines
  unsure (1)..(1349): unsure at all n locations
aaatttgaaaaacattttcccaacaaatgtggatacaaactagggtcggacnccgcccccgtcacccccgcccccgccgggggcgggacaggttttttggcctcacccccgtccccgcccccgtgactctgacccccgccatcccccgcccccgtgaaaagccacccccgcccacggggtccgaaccctaatacaaaccacattagtaccgaataagttttatcatttaatgcatttttgaatccaatcaaactgaaaaacagacaaaattgaaaccggcaattatgaagaatggggttatattttattgaccaggtatacatataaagcacatagtgaataatacatacacacacaagaatggtagatacattgtataatacatacacatacagtaatgggggatacggggccaatcatcaacaatatacaggtgccttcatccgccggtcgtccaaaagttgagtgtgctcacagcgctgccatctgcatcatcgcaaattcgccacgacgcatctccgtccttctcatccgatcccgcacttttgcagcatagaacttggtcaccgttttctgagccttctggttcgcatctttggccatgacgtcaggcaggcacagtcggacagaaaactccatgtcgcgaagcgtgatggttttgcgccggtcgttgtgggccattcgcgtcgcctccgttgcaatgcggtccaaggcgtcgatgacgaagctagaaaatggttaaacgaatgaatattattgttgagctttcagcagagcaacccacgagttcatgatgttcaacgcacgcattgagatttccttgcccggatgaacttccttcagcacacgtcgaacgtacagctgaaataaggggacaattacaaaattatcatggcattttgctttcgttgtaaactgcaccttgtacgactgctttcgcggctccttctttcttcgtcggcgtgccatttttgtgcgatgttgctgagaatggcgctgttgttgaacgtgagcaaaactgtcggtttctgtaaaatgaaaaaaagtcaaacattgcaacaaaaaaaaaacacatgcctcagaaattacgagtgaacagttggtggtgttggcaaaagtgaatgtgaatgaagcaggttgcttttatatacactttaggcgcgcagttaaaatccaaaaatcgcatccctactaataaatgaaaaattttctcaaaaatttgtctccaaaatttattaattttcttggcaaattttgattttaaaaaataatataactacgatttggcataagtttgttcacttaggaagtttgtcattttacacccctnaaatttgatgtttatttgt

SEQ ID NO: 39873 - DNA, 421 bp, Heterodera glycines
tgtccgaaagcgggggggggggcatttggcgcattgttgttgttgctgaacatcggacggaccaaccaataaaatggggcttaaacatgacgacagcccggggaattccgggacattcattcatattttgaatgatccaagcagaatagttgtttaactttatatgcacatattgtgtaaagtccaaacttttttttccatggaaaaggtaaaggttaaaaggaaaaagtcgttggaagtgcaaaaaagcaaagggacggacggacggagaatgaatcggcgggggggggaggacatagtcataagaaaaggtcaagtaagtgccttttagagggacggacggaatgggcggaggagagggcaaattggctgagttgagagggaggggggggggagggagtgtgaatgatgaaaggagggg

SEQ ID NO: 39874 - DNA, 795 bp, Heterodera glycines
ttgtacctcttctaatctctgttgtacctcttccaatcacagttgtacctcttctgatctctggtgtacctcttctaatcactgttgtacctcttctaatcactgttgtatctcttctaatcactgttttacctttcttaatctctgttgtacctcttctaatcactgttgtacctcttctaatcactgttttacctttcttaatctctgttgtacctctttttatcactattgtacctcttctgatctctggtgtacctcttctaatcactgttgtacctcttctaatcactgttgtatctcttctaatcactgttttacctcttttaattacttttgtacctctactaatcactgttgtaactcttctgatcaattttgtacctcttctaatcatttttgtaactcttctaatcaccattgtacctcttctcatcactgttgtaccttttctaatcattgttgtacctcttctaatcactgttgtagctcttctaatcactgttgtagctcttctagggcgcgaaacgcccgtctgagcccaacaaaatttaaaaagggaaacgaagcgccctttacctctatttgatcaatcccaaattgcttcggatccaacaattactccacaacccataaatatcgggcgcgaagcgcccgtccgactcaacacaatttaaaaaacggccgcgaagcagccgaaaagaacaacaaaaattagaaacgggcgcgaagcgcccgttcgaggacgcgaagggcgcgaagtcgatgttgactaaaaactcataataatttttt

SEQ ID NO: 39875 - DNA, 1212 bp, Heterodera glycines
aatgagttaactccaggagccccaaacaacatccacatctataacacccattccgatcaaaactattatacacccgacccttttaaacggtctttttaggtacgtaaaggaaaacaaagatttatttaaaattacggcggctggaaaggtccaatcgaacatgaatttgccgattgaaaacagtaattatagagatgttttgttgtatctcgcagggaagaaagatgaaacgccgcgcggtgcaaaatttctcaaagatcggttactgtaggatccaacagtaaaagacatggttgataaatcaaaggtcatgtggggacgtggaaggaaaagggcaataaaatctataaaaacacccggcatagtgcgagagaagaaacccttcaaaccactaatatgggccagactgtagagaaaattttatcaaaaatttattttaatttaaaatctccggcaagttttgctggaattcaaaaaattttaaatgaggccaaaaagattgacccgaaaattacgaccgatgacgttaataaattcctagaaaagcagaaaacatacacgattcacaagcccatcaggaaaagattcccgagactaaagacgataccaagtggcttccataccgattggcagtgcgatttgtgcatatttgaccagttgaaaaagcataacgacggttataaatatttattggtctgcatcgacgtgctgagtcgaatgatcttcagtgcaccggccaagtcaaagaagagtgaggacatgatcgaggcttttgatcgggtgttcgaaaagtctaaaattatcccgatgaaaatatatagtgacagtgggcttgaattccaagcaggaaaaatgaaaaaatattttgaggaaaaattcatcatcaaaaatgtaatgtatagtcctgatctgcacgccggagtcgttgaaagggcaaatcggacaataaaggagcgcttgtacagatattttacaaagaaagacactcttcgatgggtcgacgtaatagacaaaataataacaaacattaacaacagtgtgaatagaacattgggagccaaaccgtcttcaattaattttgaaaatgcccgtgcgctctgggaaaaattatataaggagaaggaatttaaaatttcgaaaaagaaaaaatttaaaatcggtgatatcgttcgtattaccaaggaaaagggaaaattttcaaagggatacctc

SEQ ID NO: 39876 - DNA, 1144 bp, Heterodera glycines
aaaaaaaaattctggcggcgagattgccaaaaaacaaggcgcggcgagttgggcccgcggcgagatggccaaaaaacaaggcgcggcgagttgggcccgcggcgagatggccaaaaaacaaggcgcggcgagttgggcccgcggtgagatggccgcggcgaagtgaccccgaccagggttgttccgggtcgagaaaaatatcgggtcgggtttcgggtcgggtcggccgaaaaatcatcgatcgggtcgggtttcgggtcgagaaaccgggtttcgggtatcgggtttcgggtcaattgacaaatttttaatttgtttaaaaatcaaatggcactacaatatttgcagcgaattacgccatttataggacgatggaaataaaaccaaatggaatcaggtttttcagccatctgctttgcttaaattcaagaaattcatacaaaatatctttagaaaaaggataataattagagttgagcggtaatcggtaattgtaaaaaaaccggtaccaactttttccaccggtaccggtaaaaaccggtaattttccaacgtaaaaatttttggacaaaatttttcaaatacaaaatttttattcagttttcgcgcgagtacctgttttagcattagaattgttcagaagtatatgtatattgagggtgaccaagtttttttttcaaattcaggataaataacactaaaattcagatgtagacctcaaaattcagattattgcaaaacaagggatcagcggccaatttttcaattttgcgaaggggtctccggccatgtaaattaatgtaaatcaatgaccttttttgctttcaacaccgctttttacgcggcacgttttttccaagacttttgggggacaaggagggccggcggtgccgataggcgccggcgggaaaaattttgtattttttaatgcgatttgttaacagaatttgtaaaaaaagaccaattgattaatttttggatttttaggatgcttaaaatgaaagaaaaaaagttggaatatttttttttaattaaaatttcaatttaaataatggtaaagaaaatatgaagaatattctatcctagtggggaattgaacccaagcgagaaataataaaatcagaagggttagtcagcatttggg

SEQ ID NO: 39877 - DNA, 946 bp, Heterodera glycines
  unsure (1)..(946): unsure at all n locations
atgcagtgtaaaattttttcggcttctcgcgcaaagttttttctggactgtttctgacagattgtgnagatatttttctagatgnttgttcatatctcaattcattatttatcgcttttaaattgaatggaaatgaattgtcagtaacaaaaaaaatattttgtgaacatttataacaaaaattttttaagcattttctaaagaggctttttgacttcaatcataattatattgtcaattgtttgaaacgcatctgttgcagttggaagaggccgatggaaaatttttcggcttttcgcgaaaaagttttcccagaaaatggcgtgggacaaataaaaattgtacttttattatgagcaatatatatttcctatcaatttcaggtttgctttagacgtttgccaatgaaaaaatggagttttgtgaatgcaaattttaatggattttctttcgacgtgtcataagcgggttgtttcgggacaaatgcaaaccaatttgatgctattcgaatgagctaggcgcgctctaccctttcaaatgtatcaacaaagggtctaccgccactccctggcgagatatggccagtcaaagcagagtgggtctaataaaacaagaatttttaaaattttcggcatttgcccttatttcgagcctgctctacgtgtgcttcttttgccaatatggccctgctatagaaatcttgtaatggttcacgactaagtgatgaaatatttttagcccatttcttttctatccaagcatgcgaattgtttattgcattttatgcattttatagccttctggaaaaagatagtcagtaaaaataaagcttgttttaggaatatttgagtatatttacaacaacaatttttgggcaatttctaaagatgaaggaaaataatttttttatcaantattttatattaagttatgtttttggacctgc

SEQ ID NO: 39878 - DNA, 588 bp, Heterodera glycines
aatataacagttcgacgctgattaaaaccaatgttttaaatatatttaaaaaataataaaacatatttaaaaatatataatcaaatatctttggcaattcactgactaactcataagaaatataaaagaaaaattcacctgaactgatgctaccgtgcaggcggaaagaaaatgatagcataaaaatattgctacttaatttttttaatgaatttactgaaaattttacaaaaaattcttaataaatgggtaaatatattaatcgtggttaaacatttaatttttcaaattaaaaaatttataaattttattacgagtcatataacataataaaaaagtatacctaaaatcaatgtgaaagtcaatagctttattaagacaattcttttaaattgtctatatttaagtacaccattaatatgcctatattattgtcaataaaatatttgtgttaaaacatagtcacaagaataaaattaaaccatgctctttttacgtgagattaaaaacttaataacaaaaaccaaaagatgaaaaaataattaacaccgatttaattaaaatgaaagccaatctaatctttggtaa

SEQ ID NO: 39879 - DNA, 876 bp, Heterodera glycines
aattccttttggcataaattacacagattttgtctaaagaattaccaaatttagagatttttggctaaaattttttaagaaaaaataggtttttggagggccggcggtgcctataggccgcctggcagattttgaaatttaagctcgatttctaacagatgtttacaaaaaaaaaaaattacgataaatttttgtttttttaatatattaaattatcatgatttactcaagcaaaattggaactcagatttgtaacatattttcttgtggcacatttttccaaaaaaaaaaaaaaacttggtgaatgtgcgagcgtagaggtccggcggtgccgataggcgccgccgggaaaattttttgaaaactgatggatctgttaatagattttgtccaaaaaatgataggtttttgcaatttttagagaaatttcgcgattttatatccatatttttggatgccctaatgataacctagatggtgatgcatagaaatatgtgagtgatcgggtcccgcgcaggattttttgggattcaaactgtaatcccgatttttcggaaatcgtggaattttgtttggagctgttgtattattaccgctcaccgggtacagtctcaggatatacgacataggggatagtacccagccccccggcgacgaacgttttttttttaaactaatttttacgacgaaaaattccttgagaaagaaaaggtccgacaaaaaaatattgccaataaaaaccataaatcgcccaatcaaaacaattcaaatgaccttaaatggaccaagcggatagcgatttatcataaggaaacgttcaatcagcggaatttcaacgcaattggtcagatgcttagcgcatttggacaacaacat

SEQ ID NO: 39880 - DNA, 926 bp, Heterodera glycines
gaatagcttccctatagcctgtactttaattcgtgccttcccacctttgctccccataattgtttgagtaccccaaacgctctcttgaaaaaatcgatttttttgttttcggggcagtccccccgaaccgatgcgcccagatttatggggagaccgaatccttcgggaatagcttccctatagcctgtactttaattctgcgttggatttttgctccccataattgtttgagtaccccaaacggacacttgaaaaaatcgatttttttgttttcggggcagtccccccgaaccgatgcgcccagatttatggggagaccgaatccttccggaatagcttccctatagcctgtactttaattctgcgttggatttttgctccccataattgtttgagtaccccaaacggacacttgaaaaaatcgatttttttgttttcggggcagtccccccgaaccgatgcgcccagatttatggggagaccgaatccttcgggaatagcttccctatagcctgtactttaattctgcgttggatttttgctccccataattgtttgagtaccccaaacggacacttgaaaaaatcgatttttttgttttcggggcagtccccccgaaccgatgcgcccagatttatggggagaccgaatccttcgggaatagcttccctatagcctgtactttaattctgcgttggatttttgctccccataattgtttgagtaccccaaacggacacttgaaaaaatcgatttttttgttttcggggcagtccccccgaaccgatgcgcccagatttatggggagaccgaatccgtcggggagtagcttccctatagcctgtactttaattctgcgttggatttttgctccccataattgtttgagtaccccatacggacactcgaaaaaatcgatttttttt

SEQ ID NO: 39881 - DNA, 170 bp, Heterodera glycines
ataaagcatgcgatggctgcaggggcgatggcatattcaattaaaattgccgtgcctgtgagatagccgccaaatggaccaaatgcggtacgcgcaaagctatagccacctcccgcagtgggcagcatggtggccatttcagacatagacaggcacatacataagtacat

SEQ ID NO: 39882 - DNA, 766 bp, Heterodera glycines
gagagggagatgcaagagagaggggagagagagagagagagagagagaggagagagagagaggagagagagagagagaggagagaaaatgggggggggagggagggaggcagtcacaccaaaaggtatgataaaacaaattttccaagaaaaaattcgatatatttagtcttttattagagtctccgtctttatagacttttacctaaagagacaagattactaaattctaatgagctcgccaaacttcttgattgtttctgtacactctttttttacaaaaggaacaaataaaagatttttcttgaaaaaatcaaattgtcaaaaagaaacaacaacaaaaacatgagatgaggaacggaagaagtgggcaccggcggtcagttgacttccatttgcaattcgccctcctccgtcttttgctctccgtcttcgaccacctccaatttctcgtcgtcctcgcccatggcaactggcgccctaaaatgccattgtttaccatggcattcattcccatcattcccaggatgttttcacccccccccccccccacttgccttatcaaatgcactttcttgcgcgccttctccaccattgccctcttcaccgcttgttttcccggcttcagagtgctttttatgtgctctccgtaccgacggtgtcgaatgctgtgaatttcctttattgcctcaactgaaatttttgggaaaaaattattacaaagaaacgtgaactttttaagtgacaaatttctattttgcaaaaat

SEQ ID NO: 39883 - DNA, 1219 bp, Heterodera glycines
  unsure (1)..(1219): unsure at all n locations
gaaagtgttcagtggatggtgtatttccaaatgaaatttgtggaggggaccanaccccctggtttttaggttgagttctaatccgtgccattccaattaattttagttttttatttatgtctttagacaaattaaagtcaaaaaatacaaaaaaattgtntagtttctacacttgaaaataactaattttgaaattatgatttaaatttattccgcagttaggaaaatttgttttgtaatataacccagggatggtctgtctacccacctacaaaatttcattgaaaatccaccatcaccttaacactctcatttgttaatgaaaattaaaatttagtttgccaatatggtaaaagaaacttgttaatttacatcactaatcaaagaagtttataattaaaaaaattatttttctttttactttttttgcttttatttcatttctgcacattggacatattcggtgtttctcaaacctatcaatgcataattatgagctcattactttattatcaacacaaaccatttaaagatgcagctttcatgaaacacatgcttaatcaatgcttatttaattattcaattttaatttcaattctttactggctttgtctgttgccgctcattcttatgtatcatgacgaacttttcttcttcatcaaattcatttaaacaaacggcgcattcgtccgcattttccaattcatttttgctcacatattcaaactcaaacagttccattaccattttgtatgttaaggcgtactttgttatttgcctttggaagtcaaccgccattttcacatcgacaattcgttgctaaaatattttagagttttatagaattttcgtgatttaagttaattattttaatacaaaatgttcacatacgcctgggattatcggggaatatccgatgaaatcggcgcccctttcctcgtcgctttgttcgtttcctcgctgtccggatccctctgcaaataaaatggcaaaatttgttcggtttgacattttccaaagataaaattccctcttttctgaatgtggccaaaatggtccaatttttgcagattgattgtgtaaaacttttcaaagattgggtagcgcaaaatgaggtctctgaaacggacgaaggaaagattatcatttgcaccatctgatgaggaaaaaaccaaaaatttatatattgtaaatttcatttaaattcttttcttttacc

SEQ ID NO: 39884 - DNA, 851 bp, Heterodera glycines
aaaaattaatttaatattctttgcgtttttttgtaccctttatgaaaattgtgcattttacaaaagcttttttacgataaaatgaggtaaatgaacacgaggagctaaaataataaatgcatcgattttttcgtattttcaaataaaacttacgaaaaaattttttgattaaatgtaattagaaaaaaaaacctctcaccataaatttccgaaaatttggccactcctttcccaggtccgttgtcagaaaaaagattaggaggaaaaccaagacagaccttttttgctctccgcgctaaaaattttttctatttttttttttgaaattttccgtcaaagaaaaaacttaaattttccattttcgagcaaattttggggtgcgcgtggtaattctctcccccaccccttggctacgagcctgtcccccccccccctcccacaaaaataaaatatttcgtttcaaataaatttaaatcaatcacattttctttcgtttctttgagcagccacttgatttcaattcattttcatcacaaggaattgatgaaaagcatctattaaatattaattacttatttaataataattaattatttattatttaataaaattgcttactttgtttgtgggtcatcttcactttgtgggttattatcttaataaataaattaatattttaatatacgagaaaggcatcttctttttttgattttgaaagccaaacggttaatggtttataatgccttaaatttaaacagtaaactaaaaatcccgcagaaaaccttttatatttttccgttttttatttccaaattattgatatttgctgctttttttcttttttactttgc

SEQ ID NO: 39885 - DNA, 1243 bp, Heterodera glycines
  unsure (1)..(1243): unsure at all n locations
atatattttttaaatgaattaaaatgtgctacantttgcaaaattaaattaattttattaagatttaatttaaagttagtctaatttctattaaatttaatccaagtattacattttttaattttaataaaattaatagaatttatattgcgctagaataataacttttctatagtcttctttaaacattgtttttgattatccttttctgtgtcttctcataataaatatttatttaattttttttttgaataaaatactttaaattaatttcacttttttagatttattttacaatactttcttatcttttatataaatcaatttcttttttattttccaaacatttttcgtaatgtaatgattctaattctttatcaatcagaaaaataaaatttttaattactgttttattaaaatgtattttaaataatattttttacgtttaattttttttaatttacgtgttaactaagttttttatttattttctcttgtcgtcgtatagctcttcctttctcgcggtttccgctttcttgaattgttttaattactgtttatatagaattaaaattaattattttttaaatttattgcaaaatttatatttatatttatatttaataaaatttgtaattagaataaattaatttattaattggataataattactattattgatattttataaattgttctctttctcttcattttccttgtgctgtttacataataaattagattaattaattacagaaaatagtttattaaatgtcccaatgttctcctttttgtttaagttttagttattttatttaatgaaatatataattatttttgatttttaagtaattattttatccgtttacttgcaattactacgtgatattttttagttcaaaataatgtttaattaattcttgtttttgttcgtatgtatctgttttattttttttaaataaaattgaattcataataattatttgatataataatgataattttaatatattaccaaataattttcggtttattcaataaattgtgcaattttttaaataattaattaaattttaatttttgtcaatgttaattcaatgttgtaaaatttttaatatattttatcatgagatgatacagttgcagttaaacacgagagcatcagctgagttaaagcgattttgttatttattctttttgttttttataatttcgttgtcatttacatatttttgttatgtt

SEQ ID NO: 39886 - DNA, 1277 bp, Heterodera glycines
aaaaatgaaaatttgaaatcatgttcccactcccttctcccaggggtatattttgtaagtctttttccccaataaacttttaaaccccattttcgcaccgtgaatgttatttttattgaattctgaaccgttttgagtagattagactagaaaaaattgaaaattttgaaatcatgtttcccactcccttctcgcaggggtattattttgtaaagtcttttttccccaataaacttgtcaaaccccatttttcgcaccgtgaatgttatttttatcgaattctgaaccgttttgagtagattagactagaaaaaattgaaaattttgaaatcatgtttcccactcccttctcccaggggtattattttgtaaagtctttttttccccaataaacttttcaaaccccatttttcgcaccgtgaatgttatttttattgaattctgaaccgttttgagtagattagactataaaaaattgaaaattttgaaatcatgtttcccactcccttctcccaggggtattattttgtaaagtcttttttccccaataaacttgtcaaaccccatttttcgcaccgtgaatgttatttttattgaattctgagccgttttgagtagattagactagaaaaaattgaaaattttgaaatcatgtttcccactcccttctcccaggggtattattttgtaaagtcttttttttccccaataaacttttcaaaccccatttttcgcaccgtgaatgttatttttattgaattctgaaccgttttgagtagattagactataaaaaattgaaaattttgaaatcatgtttcccactcccttctcccaggggtattattttgtaaagtcttttttccccaataaactttttaaaccccatttttcgcaccgtgaatgttatttttattgaattctgaaccgtttttgagtagattagactagaaaaaattgaaaattttgaaatcatgtttcccactcccttctcccagggggattattttgtaaagtcttttttcccccaataaacttgtcaaaccccatttttcgcaccgtgaatgttatttttattgaattctgaaccgttttgagtagattagactagaaaaaattaaaaattttgaaatcatgtttcccactcccttctcccaggggtattattttgtaaagtctttttttccaaaaaaaattttcaaacccctttttccgcaccgggaatggtattttttattgaaattttgaaacccttttgaataaaaaaaactaaaaaaaa

SEQ ID NO: 39887 - DNA, 910 bp, Heterodera glycines
  unsure (1)..(910): unsure at all n locations
cgacagatcttatcgatcgccagctgtttttgtttttcccacgctttttgctagtgatagtccaattaagttttttcctctgtgccccgccctcacattttcggcctataaaaagggcacccttttcattaaatgctcacttccacatttccattcattcatttctgctgctgcttaataaatatatatttgtgaaaggagtccgggggatttggtcgggacggttttcccctcccccttctgctgctcagcgtctgcgtcgtcgtccgcccagcgtcggtcttccccgcaggagtctctcactcctgcgggccttcgcttccaccggctcgtccgtcccttcccccacatttgggaaggcacggccgagaaagggaaagggggaagcaaccagctgactttgcctttggcaaagtcggctctcgcctccctcgctccccacaaaagtttttgtcgcctccttggctgcgacaaaaagcaatgaattaaaaaatattagataaaagcaattaattataataattagaaaaggcaattaattatgataataattagataaaggcaatgaattaaaaaataattagataaaagcaattaattataataattagacattataataatatgataaaggtaattaattataataattagataaaggcattaattataataattagtcttgattaagaaaataagaaaaaaattaaatcaaaattaatttagctacaccaagtagagcgaacttgaaaagatctcagtcaacggctgttcgaccagaaccgtgtaatttttaaaacatttaaaatttaattatctccacggagacctctgatttttcaataatttttcacaaatttatttaaatttaagcaattttcttaacaaattgcaataagaatctcanaaa

SEQ ID NO: 39888 - DNA, 1237 bp, Heterodera glycines
  unsure (1)..(1237): unsure at all n locations
ttattntgttgcaaaaatgtacttttaaacaaattaaatcatatagtttttaattggctgatctatttatattatagaatacattttttattataaaaaacttattttttcatcgttttatatagcacatttctaaatttttatgctaatgaatatattttagatgttaatcaaatttgcattttttaaaatcaaatgagaatcaactaaattttagtagtgttaaattttaaatatattattttacctaaaacaaaaattttttgatgaataatcattgttttgttaacttatttattaattgtcattccaatatcaagtgacaaataattattattaggttttttcttctatttttaaataaactaattatttgtttatttgggtcttttacaattaccaattgtcaaattcttcatgttcgtggaaaagtatcattttcaggaaatgatctcgcgacatgcgaaatttcatttcaaatataatgatttaaaaatattttattgttaatatacaaatatactgctctttgggtttgcctaaattgagtttaaattatttaggtttagttagcttattaattttgttgtttctgttgataatattattatttttgttatgaatttgtttaaattttcagtcccaattttatttttcccatagtttaattgattttagtattatcagtattctgtttaattaactttttggaattttgtcacatttaaatatttgttttttgatttaattcattaatttatttatcatttctcttctgttatttgcctcactgtttagcttattatatttggattatttaagtattatttatttatttaataattttatatcatttttcacctcctataccctaattctcgtagttcgttttcatttcgcttacagagtgatgaaagttataacaccaattttaaaatattttttgaaaatatgaaaagctaaaattttataaaaatccggttattagaagcggacccggtttaaagatcaggaggacccacctagaaataaccgctccatgttttgtctaaatgcctgaacccgtgcgatcctcgttttcagtgccttcgacttcaaattaaaattttggaaagttaaaaattattaattccgactttgatttattggcgtgtgctttaaattgttttatcaattataatgtaatttattataggtgtttttgatttttattattttttaaaatcttgatatgact

SEQ ID NO: 39889 - DNA, 894 bp, Heterodera glycines
tcgcaattgtttcacctcctccaatggatgcacaacctgttgagttaccaccagccctaacaaattgggttaaatgaacaataaaatgttttataattgaataaaatacttttcaatgccatgggacaatacaaaataatgctattataagggagtctaattaaacatcaaataacaaaaaatatactttagcttaaaatgaagcttttatgattttgttttctatccatatttttccgtttaattggtccatattcaagtgtaggagcctcaaaatgtaaatgccaaaaatctcagtgtcgggcgttcaaatgtcaaatcttcaaataccaacccatatcctctatccatactgtacccgttgcttgcgagacgtgcatccggcttgttgttctccggacatccaccctctccatccttacggcaatttttgcacccttgcggacagtccctggcatacagtttatcgcaacagtagtagcagctgcacgacacatctatgtcacaatagtccacggagtgatccttgtgtttgagatcaaacgcgcagaccacacagttattgccgaaaatgttgcaatttcctggatgcactggcagcatacaactaaaaaaaattaaccagttttcgttgaaaatttttcttttcctgggggtcgcggcttattggggaccgcccactttggcgcctgccattttgggccaaacattaaagcataaataaatggcctctgctggtgtaattttagaacgcttaatagtctttattacgggcccttttgtagaaccgggctctcgcaaagtgtcagtggaaatgcgtcagtgataaagtatttttagaactatagtattttgtgtatgttgtactgtaatataaaaatttaaaattgtcta

SEQ ID NO: 39890 - DNA, 717 bp, Heterodera glycines
cccgggcccggtccaaaattttagccggacgcccgccgggcgcgggctttttttaaaatttgtgggattttgattaataaaattaaaaaattgttttagcgaaaatacaaatttaaaaaaattcgaaattgcatatataaatttgaaaatcagttttcctacaagtgtctaaaaaagttccttacaaagggtatttccgaatgaaacttggtgcgtgtttttaatgccaattctaaatttttacacaaaaacaatttaacgctccaatggtgccaatcccaatttctttctcagtgcgttattctcctcaatttctctttcggtgtctttcgcggcacttcgtcctccccgacggtctaaatccaattggcaatttgtccttagggttgatttgataccatccgtggaaagtgatcggcgtctccgttctctcgatttgctccgacttcggccacggctgcgcgagcgacttcggcgccgagaaacgatctgtcatttagttacaattagtcgtcccaaaaaaaggctctcgattctcacatttggccgtgctttccgcgtctcctgctcatcttcggagtcggtggaaagacgctctaagtcttcgtccaaggcggaagcgtacaactcgagttggtccttttcttcgagtgcttgccgtttcttaaaattgtgattatgcaaaattgctttattttattttatttcgtgaaaatt

SEQ ID NO: 39891 - DNA, 1662 bp, Heterodera glycines
aaacattaagaataaataaaactgtaatgagcttcgttcattaggtttgaatttctgcaaattccaaagttttaaatctaaaatattcattttattaaaataaaatatgctttaattacaatttgctgaggttttttgtcgctgaaaaaaatgatcgcataaaaaattttttggaagaattttggccataaattgggaccaaatcagcgacacgatgaaagttttgagcatttaagcgaagaccaacaagccaataacagcaaaaagcagatttgctaaaaacatttgtgttaatagtattaaaaaattaaaaggggaatgaatttttgatcacttctacaactaaaagataaattggcatttttttaataaattcatcggcgcctaatagctaggcatctgcgaaccataattttaaaaggtttttctcatttctttcttaaaatttgagattttttgagattaaccacgacaaaaagcacaaaactaatataaatttacaaaatttaaaattaagaaattttacactaattatgtatttcccaaagattaaaattacctaaatattttgcagcgtactttttcctccaattcggcatttaattggtaatggtccaatttgtcggcaacattttccctttttgcccattcaaataatttatttcgaattttactccgttgaaatgcacaattttcagtgaaattgtcgaactgagaagtcagacccacaatgaccgcgaagtttttaaacttttcttcaattttaacctcattaaaaagtgtttgccagtttttctgatgttcggacagaattttattacctaaaatcttttaatttttaaaattagtaaaaaaaaatttctaaaccaagtgccaattcttcgacaattgtcttaagcgtgaatttgttcacgttgaatgttgtgttttgttcgggaaagtttggcgtaattattgtcattggattttgcccaatcaatgggggccaacggaaaacaattttattctttgtgattggagttaattcattaagcataatcggaacacgggcccaatccctaaattaggcaattttaatttaatattccaaattttaattttaatttattaccattttgagtaaatcgagaaaaattggtgcaataaatatgacaaaggcgcatttggaaagagcagacaaattttggatgccataattgaaaaagaaatgccattaaaataaccaaaaatgcccgaataaatgaggcgagctgaaaaaatatatatatcaaatttcgcataaaaattattattttttataaaattattatttaaattgaactaataattttagtagtatttaaccgactttttgcccaaactttgacgattttcaataaattcacaaatgcatttttgtccggcaaaattgagagttgaaaatgtgccgattgataacctaaattttgaattttcatttaaaattattattttttgttcacccgccaacgaataaatgccagattcgtatttaatttcctcaatgattttttcccgtgataaatcaccgccgtcattttgttccaaatatttttctggcactggcacaaaagacagatcaatttcgaaactttcaagctcaattctaagcagctgaatccttcccgaaatgccaattgactt

SEQ ID NO: 39892 - DNA, 620 bp, Heterodera glycines
cgaaacttttttgaactcatttcattcataattaagaaacataaaactttaaaattgtatactcaaactgatagattggagatcctagtacataggtggaaaagcatataatggctctagtacatgtgtgtgtgattgaaaatttttcaaaaaaagaacatcaaacccaaatattcgcgttaaataaatcagatttttaacaatttatgaaaaaatcggtaaaataattgttagcggttctctcaggtcctttatcccactttctcccacaatccgttccttctggcatcacaaacgactttgaccaaaaatgctaaattcgaaaattcgaaaatttggacttttttgattttttattcaaattttggtccgtggttcagaaattagaacaatgttcttatagaattatacttttacaaaaagctacagaactttattttaaaatatttgtatcaatgacgcattttccggtcacgatcacatttgcaccttgcaaatgtgctttttttcttttaaatataaaaatttattttttctattcccaaaattttttaaattttgtttttaattatgtcaaaatggcagtcaaaagttttcaaaatcataaaaaattatattat

SEQ ID NO: 39893 - DNA, 172 bp, Heterodera glycines
gctatttccgaaacttcagcccgagcatacttattttgtcttgatcaaattgagtttgtgggccgcctcttaggataaggcaatttaggccctgattgggggtgctgttgcccaagccttggagaccagacagacatctggggcacagaagtagtggcagttgttttaggga

SEQ ID NO: 39894 - DNA, 776 bp, Heterodera glycines
aaacaatctttcgatatagggtacgcaaacaaaaaaaaatctaatccaaaaaatgtctatctcttttttctcatcttttcaccgcaaacttggtaccatcagttgccttctctagtaagaccctatcaaacattcttgcgatattggaaacccaaacaaaaaaaattctcgcccaaaaaatagctatctcttaagtgtcatgttttttcggcaaacgtggtaacaacagttgagttctcttgtgtggccctatcaacacaatcttacgatagggggggggggggaaggatgccaaaacggcacttcgtttgctgtgccgtcgtagtcggctgcttttgcagtgatttggtggtggtggttcggctcctcttgtgtcgttttgcccctccacaagtgtttacaaagggaagggaccaaaaagaggaagcaaaagcagcagcagaggaagagggggacgagagggaggttaagcgggacgaagggatgaacccctccctcccgcaccgacggcacggcgcccttctcgcgggacccgtctctctccccccccccccctctcattggcacccgcttgaagggggaaaaagcatgaggaagttggaggagaagcaaagtgccaacaaggaaaggaagtaagaggaaattggaaggagcagaaaaagaggatgaaaaaggaggaaaagcaacagtgacacaatgaaaggggaggagaagaaggtgatgccaaaggggaaatatgtaaaaagtgaatttggaggtgccacagggttttatgt

SEQ ID NO: 39895 - DNA, 1047 bp, Heterodera glycines
  unsure (1)..(1047): unsure at all n locations
ttgtataccatctcaaaattcaatgatggaagtgtctcttctcggcactttaactttttcacttctttttaatagcaagttgaggagatgtttggccaacattttggcgccctgttcggcgcctccgatctgagcccatccgctgctgaggacaaacaacaggcggtgccgtcctccggcgctgagctagcgccggctggcgcagagaacggcacggcgccggaggcgccaaaaacgccgagcttctgcactctgttggtttgagatggcgagagagaaaaagaaagaaaagcgaaagggcagacagagaaaccaaaggacaaagaaatcaataaaatcgatcaaacaatcgatgaattaatcgataatcaaccctattttaccgtaatcatgcacatttttcaacacgacaaatccatcaccatcatttgacataattcatttattcattcaaatttgcatcttgttctttttgaataataaaaaaaagctttcaaattttttaattgaaatttgcaaaataggtcttgaaaaccataaaaaactccttttcgtcaattaattataattagaattctaaatttttgtattcctttctcattcacttagcaactgacaattggggttgggggctcccattccaatttgattgcttacacggaagtagtggtcgcattgagaaagcctaaaaatagctggtaacttttcggggttcgctgatcagtgatcacgaatccggcatccacacatttcgacccattatgaaccaacactgcacccgaattcgaacaaaacgtggatgaagcgatttgccaattcgtactgcctcggttcgtacgttcatcatgtgttataaaatatatgaaccccattggcatagtgggcggcggatgatccggcaattgaaattataaaacaattcgtacaaatgtttcaaaaaatgtcgttaaggttgaacaaagttatggccaaaagtacacaaggaaccaaattttcaaatatttttggccaanaattttttcgaaactaacgaacttttttgaaatt

SEQ ID NO: 39896 - DNA, 1273 bp, Heterodera glycines
agtgaaataatggaatgaatagtgattaggatgtacaaaattgaatgaatgaatcacatttttgttcctcatctgccgctgactgacatttgtacacatacatacgcgaaattcaatagatttgctcgatttaaagcgatcaaaagatcgaaattgaaaaaatatccaaatctttttagaattttcattttttcatacaattttttctaagtctaatcctattcaattgagtgagcttaatactacttttttataagtttttctcacttttttagtttttttctttcgtaaatccgttaatcataaaattaattatcatttgactttttcatactcctttttgtcatattcttgaaccgcatgtcactcactataaacaaaaaagtcattaaatttgtttcgtaattgcctttttgccaattaggcaaacagttttctcttcatttgtacgcacgcaattctctccctctctttcctaatccaaatgagtgagcatgaaattttgtcaaaatgggatttccaagtcccaaattgggcacagagtaaaggttagtcaacacgaaaactcttcatccattaaagaattttatttttcattctctcatttttaaacggactcattaattggatttattttaatttatttccatcaatgacttttcatatttttgcctttctccttaatttccatttttttaacttatttattttcaccgtcgcccatgctttttacaatatataattgtcatgtatttgcgctaattgcttcaaattgtcctccacgttacagcgtaaaagtgtctataccacaccctaattgccttaatcaccactaatattaccttttgtatacatatcatattaactaatacacaccgatcgtcacacgcattacctaccgtacatcgccgcctttacagtttgacacacacattcattgttttgcgtcatattattgtgtactgtagtcgccgctcacacgctttgcgcgaaatgtgctgtggtgtgccgttgtgatgtatcgaaaccctttacaaaacagcagcagcttcagcgggggcaacacagaaaacagaacagcagcagcactgaacacggcgattggtccaggaaattgtatgtggtcgtgtccaatcattgcccaatcatccaaccctaattaatggttcactcatgccggggggaaaatgaaattatttattttttcaattaacattttttctttttttccgaatttgtccataccaccaaaacaaacgggggaaattttttt

SEQ ID NO: 39897 - DNA, 779 bp, Heterodera glycines
ggggcgaaggcccaccacgaggccgcgaagaggccgagtgagtaccttcggtgcaggaaaattattaaggaagagagttcattatttatttgttttttgcaaaattaattcttaaatatttttcagaaagggttctgaaacgcaccaaattttatttacatgttagtttaggcactctgatgctttttctatcaaattgggagatgaataaaatttttaaaaatttttaattcctttttaaacaggccaaaaagtttaggcttaactttttagtgaaaattcaatcactcatttttcgagtagtgatcagaagcgcaccagattttgcaggggcctaaaaaggtcaaggaaaggcgtctctgcgttgatttagcagtagtacctatgaatttaaattttctatgaatttttaaagttttttgaaatttttttaagtgcaaaatggtggtgtctgcaaaaaattttcaccgggtttaaaaaatctaggaaaattagtaagcatttgtagtgttccgatacgtatccctgcaaaatttggtgagcccctgatcaattacaaattatttatggacgatcaaatttttagaaatttttatttatttttgcataattaattcataaatatttttttcagaaaatgctctgaaacgcaccaaattttatttacatgctagtttaggcactctgatgctttttctatcaaaaagggagatgaataaaatttttaaaaatttttaattcctttttaaacaggccaaaaagtttaggcttaacttttt

SEQ ID NO: 39898 - DNA, 1078 bp, Heterodera glycines
  unsure (1)..(1078): unsure at all n locations
ggagaagagccggacgagtccaagctgtacatccancagnccggcaggtgtgaccatntggtgttggttcaaatggtggtccatcgacggacgatggtggtgggagaccatcgaagagcacgatttggtggatgacgactgcgaggatgaggaggaggacaccgtggccagaaacgggggcaactccatgctgcacgagggtaccggtggtggtaattgcaaagcgtgatggcactttcacaatgaatgcgttggatcgatgtgctttcgctgttaatgtccccgggggataaatggcgcccacggcgatgacacgcacaacgtcggctgttcgtagagcgaaatgcgccgccgacagcagctgtcttcgctcggccttatcgtaatccgcgccgcgcagtcagagggccttcccccccccccccgctttgattgcccgagggccaaatgcttaaagaccttttggtggctcaggcaccatacgctcgcgcacaacgcaaccgccgttttggaattagcgacaacaaacggaagggttggcatgggaaccaaagtcttaacggaaatggcagaccgcagcaagcaaatttaattggtgaaaaagtttaattggaaggtcgatttagggtgaggaaattgttgaagcaaatggcaaattgagtgtcaaataaaaagcatttgttttttcattaattaaacctaattggtgcaattgcccttttaaccctttcccttgaattgccccccccttctcccactctttcccacctgctgctgttgttgttgttgttgttgttgttgttgatagtaaacgttctgttgtcccccatattccgcgctgttccgctggtgtccccctgcattgttgtgctgctcgaattcgccatttgtcactgccgccgctgcgtaagcgttctgctgctgtctgaacaacgacggattattctgctgcagctgatggtgaggctcaaagttcgacgggtgcggcgccggtggcaattccaaccagcaccaatcgggcgaaaggtccgccgctgtggaagcggacgaaaacgggcacggcggactgtcgccgcca

SEQ ID NO: 39899 - DNA, 1561 bp, Heterodera glycines
tttttagtccatttattttctgtaatcattcatatattttgtcacttaatttctgtatacctatataaattgtgagctaaatgaaacggtgccatgacgttcttcaaaaaaccatcaaatgaaaatttttttgatataactttgctcaaaagtttttattaatttcattcgatagccttaattgttttctattatcctgcaaaatttctaaaaagttttgttaagtttcaagaatgttatgaccaaaaatgttcaaaaaaaacatcgtttttttagttactcagttcataacttttttggaacttaatcaacttttttgaaatattgaaggataatagaaagcacttgggctatctatcgaatgatatcaagattataaaaatttgattcatttgaggtgaagttatgattaattttctgtccaaaattttccatttgattgttttttgactaacgtcccagcaccaatgaaacagacaaaaaattattcatctacatatatactcgaaaaaagttaaatctcgtttttttctcattgtaattttattgttgatgtcagtaattgctcttttttgtatttatgaattcccggactttaagcattcgtttgataccaaaaatataggtgttgaccaagaatggataaatcataaacaaaataaatacatttttcaaattgttttttgcctattagaaatgactgaatgattaattggatggcaaaaattgcagacatccggtcgtcctaaaattgccaaaaatgacaatttttgcctagaaaaaaaggtaaaagtgaaaagtacaaattctaattttctagcctttttttaaattacgtacaataaataaaccaatgttcatagtataaaaaaaatgctcattaaaatcgttcagccaagcatttacagcaaccaaatttttcgaaatctgtcctttaacgctaactttcaattagttggcatgcttgtgagagagagagtacgcggcgctacttaaaaagtgccatataaaaatatttttttttattacattttttctttttccgattttttattgctgcacaaaatgcttggccttctaaaatagtttaaatatcttttttaattcttaattttttgctttttgttaaccttttttccgttcaattgtcccaaaatgccaatttttgtagtctttttttggttttccacgattgggtctttgcttgactcaacacgtctcgtccaactccatcacatcattgagaccgaaaagcattaaactatttcaaaggtgccaaaataagattaaagaatgtgtaaataaaaaaataatactttttttgacgcgacacttgcttttcaacaaaattacggagtgactaagcacctgaataaattttaatttccataaaagctttggtttcaaaattaatggctgattccaacaacatttcggtaaattatagggaaaataattttcttaatttgggttttcagttttatttgtcattcaaagatgtaaatcccaactggccgctgatcagctggtcgtttgtcatggaagcatcgccgtatttgga

SEQ ID NO: 39900 - DNA, 559 bp, Heterodera glycines
  unsure (1)..(559): unsure at all n locations
tcccncataattggtttgagtaccccaaacggacactttcttcctggatttatttttgttttcggggcagtccccccgaccctatgcgcccagatttatggggagaccgaatctttcgggaatagcttccctatagcctgtactttaattctgcgttggatttttgctccccataattgtttgagtaccccaaacggacacttgaaaaaatcgatttatttttgttttcggggcagtccccccgaaccgatgcgcccagatttatggggagaccgaatccttcgggagtagcttccctatagcctgtactttaattctgcgttggatttttgctccccataattgtttgagtaccccaaacggacacttgaaaaaatcgatttttttgttttcggggcagtcccccccgaaccgatgcgcccagatttatggggagaccgaatccttcgggagtagcttccctatagccctgtacttaatttctgcgtggaatttttgctcccccataattgtttgagtaaccccaaacggacacttgaaaaaatccatttttttggtt

SEQ ID NO: 39901 - DNA, 428 bp, Heterodera glycines
cacttaagtgtcacacgcgagcggccccgattactttcgagtcacacgcgagcggtccactcactcgtcggtcgcgcgcgtgcggcccgatcacgtttgggtcgcccgcgtgcgacccaatcactttagtgtcacacgcgggcgctccaatcactaatcggtcgcccgcgtgcgggcgatcacttgtgggggtcacacgccacgcgtgcgacccaatcactgaactctcacgcgagcggtccgatcacatttgggtcgtacgcgtgcggtcccgtcaattttgtgtcgcccgcgtgcgacccaaacattttagtgtcacgcgcgtgcggcccgatcactttcgagtcacacgcaagcggcccgatcacttttgtgtcgcccgcgtgcgacccaatcactttagagtcacacgcgagcggtccgatcac

SEQ ID NO: 39902 - DNA, 1160 bp, Heterodera glycines
tggcactatctgatgacagccgcgggttgatgctcgagtgtcacaacaattaccgctctcagctggccaaaggcactgcggcaaatttgaccggcacaatgccggctggcagtaatttgatccaacaaaaatatgtgacggagggcattgagacggtggcacagaattgggcaaacggatgctcaatggcacattcggactcatcacagcgcaatgggatgggcgagaatttgtacatgacgagttcgtcgtcaatttcggaaggtaaaagcaatggaaaacgtgtttgataattagggatgatatttttaggcaaaagcctattttttcctgagctccccgtggcctgaaacgcacgaaaaacatgtttttttgggctgttgttaagctacttttcgacttattaatgccttttttctaggcttttatttttatagccttaaaagcctaaaaatttttgaaaatacctatttttgcctattttggcgttttgtccaaaatttgttaacaaacatgcaataaaaatgaaaaatgcaccactaagaaacgacctgaaaattttataaatacaccattaagtaattaaaattttttcaaaaattcatcttcaaaataatttatttattttttgagaatttttgattttaagaattatttagctaaatactgttttccctaatttttttacttttttgtaattttgtcattttaaacccctaaatttgagactatttagagcctattttccattttttggagactatttttagggtttttagagcctaaaggctacctattttagtgttttccggaaaaatttggacttcagaaaatctggttcgggtgtgtttgcaaatcgtttatcaaatggggtttgctggatcaacaagattaagcttagagtctcagttatttttgtttgtctttgagtacagcctttactcgggaatgaatttgatcaaatggatttctggataccgaattgataaaaaaaaacaatttctcatgatcaacactgttttgtagctgatgcgctgaaacaagcttgcgacatgtggtgggcggagctaaagcaatacggcatccaggaaagccttgtgctggacagggaacagttcaacaagggcatcggacattggagccaggcaaaatgaatgaat

SEQ ID NO: 39903 - DNA, 1208 bp, Heterodera glycines
cattttctaatctctttacatccataagataaatttaaaaatgcacattacaatgactaatttattcgtgctaatcttcctgatatagaataagatccttttttacgctcttttttagagaagagacccatataggagaagatggatatgctttatatatacgtcttaacaatggtgattttgaatttgtaataggacatctcttaacaaatcaaaatgtcgcaccttataatccatatttattaatgtgattccaatcactcatcaatgtagaattttgttcagaaatgaacgctgttaaatatattttcaaatatatctataatggatatgatgcagtcaacagttgaatgtgtaaaagaggagccgaatggtgaaaaaattatgttaaaatacgatgaagttacccaatatcttgaggcgcgttatttgagacctgtcgaacatgttatcatttgtttaaatttgagatatagggtaaatctcattcatatcagatacgattataggtacatttagattattgaacagtccatttatattgatcaatattccgaacagtgataatcacaacgcaattacgctaaaaatgatcagactatgatttatactttgatgagatagggttggggtcaaaattggacacctcaaaaatgattgatttctaccgtatttcaagggaaaatgattaaaaacagatattttttaagatgatcaagttcgaagagtacttgcaagtataagtgtgctaggtcagctgcgtttaatcgttcatgccgaagcactcgcataggtaaaagttcgttttggcgtggattcggtggaatgatcgacaatttattggtgaaaaccatcagattgataggccgcaacttcgtcgttgaaaggattagagaaagaaagaagaaaaaggcaggcacaaaaaacttttacacttgtccgtatgcacgtggctgattttctgtctcagtcgaaagctttcctaacctttgtgggacgattgttaaattttaccccctaattagagtcattccattcatctcaccattctggatatattttttatcacttttgttattgtcatttatgatagtcactttgaatataattgttttcatagataggttcaaaggtaagattacctgactattttcataattattttgaagattattgtcaatcaaaaagagtaaaaaaatgtttctttc

SEQ ID NO: 39904 - DNA, 1221 bp, Heterodera glycines
tagaattctgtttcctgtaagccatattcaaaaaagcattaactcataaacaactagaatgtgctaactgttggagaaatttattttttgttttcttatcttttgaatttaataatttagtttgacttctccatatattaatggcttattcaaaaactatttatgagttctatattttagaaatggagttaccggcaacaacgttctatcaaaatttttgaaaaatcatattcttgataaaaaaaacatagacaatatcttgattttcaacataagagctcgtagtcgtgatcaacgccctttttacctaaaaagcagaaaaaaaatttttttttctgcggtaaaccaattccgaagaattaccattaaattcaattaactcacacgaaaagtgcccacttctggcattgggtcaaacgttagcccacattgccctagacagtttttcagttgttttttcgtatacgccgagtcaccaatataaaaaattaatgaaaataaaagaaaataaaacattttctgaaacatggttaaatgaagctgtaattctaaatttaacaacattattttccctaatcattagggctgggatttttatgttttaacatattttttttgcggcttagttatggcgagagaagcccaaaaatagcattttctccgaacaatttttgatttagagcgacttataaaaacacatattttggcgttttcgcacataaaaacatatcgcacatatttcggggtttggcacatattttgcacatattttgtcattttgaaaaaaatatctaagaaaaacacaaaaaattcaaaaatgcacccctaaaaatcaactttcttgccatttttataggctctttcaaaattttctttatttatttcgtgtaccgaaaatcgaattcttcattaattcgttactggatatcgaagtttcttgctggaacttactcaactgatggaaaaattatctttaaaaacaatttatcaaaaaaggactaattttacccccaaatgttttttatttgcaattgtgcgggcgaaaatgataaagaatgagttttttggaatttttatgcaaaaataccattgatttttccaattttgagcacatattttggcatttttttggcttatagcacatatttcagcattttttagcacatattttattacatatttcaggatttttagcacataaaaatcccagccctaataatt

SEQ ID NO: 39905 - DNA, 729 bp, Heterodera glycines
aaataattaattaaataaaactaaaaataaaatggttgaaatgataattatttaaattaaaatagtcgaaatgaaaaattaattaaaataaagtggtcaaaatattaattaatttaacaattaaatggcggaatcattaatttatttaaaatggtcggaatgattaactaatttaaatataacagaaggaaattaattaatttaaaaataaaaataaaatcgttgaaagaattaaaaagtcagtcccaaatccttaaaaatattcagtaaaaatatttgtttcgtttcatggaacggaaatgggtattgaatagagtgccacgggaccgggaatttttgccaaaaccgggaccgggacttgccgggacctgagaagccgggaccgggacctcgatttttttcgggaccgggaccgcaagaaaaaccgggaaccgggaccaaccgggaaattttaaaaattcaaaaaaattttaaaaatttaaaaaaaaattcaaattttaatttatatcaagtgaaaataatacaaaattatttggttttttatttaataaattaaattaatgaaaattttcaaacaaattttcttcaattatttaaacaattaatcatttttggactaaatcatcgaatattaatagaaattcagatttgattttcacatcacttttttcggagcctaccgggaccgggacctcggatgaccgggaattcccggcccggtcccggtcc

SEQ ID NO: 39906 - DNA, 1331 bp, Heterodera glycines
  unsure (1)..(1331): unsure at all n locations
aatttttagcatttaccattaaaataaaaataatcgcaattgaaacttttttctttatttatatgaaaaagccattggccacattctgtaaggaccaattggggttgatgccactgaaactatgtcggcaattttaaaggcttattgaagcattcaacaatttctataggaaagagtttttctattctattagaaaaatgccctcctaaagtcgaaaaaagttgaatatttggcttttggaccaattatatgtaaaatggacgaatatttttaaaaacattttgatcaaaattgaggccaaattttctgtttttgttaacccataacactgctagattcaaagtctcaatcgcaaaaacaatgaacaatgaaggcctaagcttctccctgttaaaaaatggggacaaatttttagcatttaccattaaaataataatcggaaatgaaacttttttctttatttatatgaaaaagccattggccacattctgtaaggaccaattggggttgatgccactgaaactatgtcggcaattttaaaggcttattgaagcattcaacaatttctataggaaagagtttttctattctattagaaaaatgccctcctaaagtcgaaaaaagttgaatatttggcttttggaccaattatatgtaaaatggacgaatatttttaaaaacatttagatcaaaattgaggccaaattttctgtttttgttaacccataacactgctagattcaaagtctcaatcgcaaaaacaatgaacaatgaaggcctaagcttctccctgttaaaaaatggggacaaatttttagcatttaccattaaaataaaaataatcggaaatgaaacttttttctttatttatatgaaaaagccattgaccacattctgtaaggaccaaattgcggttgatgccactgaaactatgtcggcacttttacaccttaattgaaacattcaacaatttatatagcaaaaagttattctattctattataaaaataccctcctaaaatccaaaaaactaaatactcccctttagacccaattatacctaaaatccctgcatattttgaccacactcagatcaaaaaagaaaccaaattttctctctttcttaacccatacctctctcaccttcaaattctcaatcccacaaacaataaacatataggggaacacctattcctggttaacgatagtattcaagtcgatagtattttcctctaaccttctcgactcctttaaaggaannnnctntcnnnancaaaaacanantctctccatttgcaagaaaaatccagaaaaataaaaaagaataataa

SEQ ID NO: 39907 - DNA, 1092 bp, Heterodera glycines
atttttaaattttttatagatttttaaatgtttgcattttttttggcttaccaaaacttcatcgaacctggttctttctattctctttcaaatcgccccaaatttttttttacagcttaactaggccctattaagcttatttccagaaaatctcgcatgaattctcatttaaaaaattttttaattgctttttaaatatgccaaaaaatgtaggcttaacttttttagtgaaaattcgatcactcatattttttgctaattgagcagaagcgtaccaaactttgcagggatactccccggtaaaggactaacttacactgaaatgagcgccgagctagctggctcaaaaaaattttcgaaaatctgagtctttcgtttttatttattttttgcaaaattaattcttaaatattttttcagaaagggttctgaaacgcaccaaattttatttacatgttagtttaggcactctgatgctttttctatcaaaaagggagatgaataaaatttttaaaaatttttaattcctttttaaacaggccaaaaagtttaggcttaactttttagtgaaaattcaatcactcatttttcgagtagtgatcagaagcgcaccagattttgcaggggcctaaaaaggtcaaggaaaggcgtctctgcgttgatttagcagtagtacctatgaatttaaattttctatgaatttttaaagttttttgaaatttttttaagtgcaaaagtggtggtgtctgcaaaaaattttcaccgggtttaaaaaatctaggaaaattagtaagcatttgtagtgttccgatacgtatccctgcaaaatttggtgagcccctgatcaattacaaattatttatggacgatcaaatttttagaaatttttatttatttttgcataattaattcataaatatttttttcagaaaatgctctgaaacgcaccaaattttatttacatgctagtttaggcactctgatgctttttctatcaaaaagggagatgaataaatttttaaaaatttttaattcctttttaaacagtcaaaagagtttaggcttaacttttttttcagaaacttatcagaa

SEQ ID NO: 39908 - DNA, 1035 bp, Heterodera glycines
  unsure (1)..(1035): unsure at all n locations
cttgaaacgaaaagcgactntaagccgttgttccgcggccagcattgacgcgtaggcacagtacatctccggggtgaccatgctggacacctcctctctgttggggaggcgatagtcttcccgtaacacctgaccggtggaaattcaaatgtttgcagttagccctcttttcgtttatgtatatttttgcattttgattttcagggatccaaattagtcctgtcattcattcacaatactttttaaatgtgccggtcgataaatcatccccccctaaacccacccaatattcgtgcccttccatgcgtctcagttcggcacattgcttcaagttcttgcggatcagcccctcttgcccggggtacatctgcttcatctcatccattcgaatgcgttttggcaaatcgtcactttgccaaaaaagacggaaaatgtaactcttaaaatgccgtttttgttttttgaaacagtgctaatgtaattttgcataccatcataaagtctttgttaaaatctttcgcccgcttcgaatttggcgtcggaacttcgtaaagcggcatttgctgtccgaccacaaaaagtaccgggaattgtctgatgaacagcctaaaaaccctttttccgattgctctttctccttcctcccacccgtatttgttccgtatcaacagaaagtccgtgcccatcgggtggtgttggaagattgttgctctgtacatgttgttctcgatggcctgcagcgattcgtttggcgacaaattgccaagaaaaggcgaagtgtgggagaaagcggtctcgccaaattcgaactcacgcttttcctcctctttggtcaatttctgaggggaaaagcaaagttaagaagatgaaaacagtttttttttgataaaaatatcccacttttttgtagtaattcctaatttttgatgccatcccagtttggttgagcagcggtggaaattcctcgatgtattccatggcgaccaaagtgccgtctcgaccggntcaattgtgcagttcccgcattacaaacag

SEQ ID NO: 39909 - DNA, 902 bp, Heterodera glycines
atgaagtccaacatttaaaaaaattgacaattattccctttaatttaaactctttcttcatgattaacttattctcacattgcattcattagtaacagaaaaattcatattattcggttgtggttttaatttgttgaaatatatatttttattctaatttgagacaatgaatatcgggactgaacaaataatttgataaaaattgtgaatttttcaaatttggtcgaagagacattttggcgatttgtgctgtttttaggtggccattctgaaaatgaaaatccaaaagcgatgcttttttagattgcttgtaaaccgaaacttaaaaaatcaaaatttataataaattaatttttttaaatgtaatataaaattaaccttctttgttttttgtttgaagaaagcaaaggttataacaaaaaatttaattcaaaaattaattcaatcaaaagatttttaaacaaatttcaaattcaagctttaaaaagatcagaaactgactgcttacaattagactttaatatttcagttcggaattgaataattggcttcgggacttggtgatggacttggatcgagatttcctgactgaaagtcccattatgaagggattcccggtcgccggtgctctccaaaacatgagcgggggggggggggggggggtcccaggaaaatctcaccgaggcccgatttcgaactcctatattcaaaaaaatatttacctaaaaattagaattgtaattaaaattgtataaaaattcatgtttgcctacataatttattgttttcttgttttaaaacaaattaaaaaataacatttttcaaatgaaagcatatcatttcattggttattaagctgctgtggtgtttagaactgtgaggccacgtctattgggtgccca

SEQ ID NO: 39910 - DNA, 992 bp, Heterodera glycines
cctcctcttaaaaaatgcgtgaaattttttagcattcaccattaaaataaaaatgaccggaaatgaaatttttttctttagttaaatgaaaaaacgtgggccaaatcggaatttgtcggaacgaaagaaggatcaatgtcagaagtgatcagaaattttgatgaagtcgtgctgtcatcaaaagtgaagtggctaatcgtaatggccggcaaagattcgattttggcaggagaatcgattgacagcataatggagaaagtcaaaaggctccgacaattatgctcaaaatttggccacctgaagattttttggctcttgccgccgttcatttttgccaaaaagaatgagtcggaagagttttgcgcgagaatgagagctttcttcagaaagaagagtgaaattgagctgatttcggtcaatgaagaaggacgaagtctgttggaggtgttcagatttggcaaaagttataataacgagcacgtgaatcagaacggatggatgacggaaaaaggaatgaaagtgatgaaagcatggctgacgtcgctggttccgggattcccaggcgatcgggagcttggaattcgaacggtgaagtcaaaagtggttgtgccggacgttgagcagggcagtggtccagtagaccctccccaaattcgctacaagggcccggtgaaaaatgtgggaggaggcccaggtgacccttccccatctccgttcgactccttttctgacgatggtccaacccattcagttcggtcggtgaacgtgcggaattttggcggagaatttagccaatttgggcgggctggtacagcataccgctcggctcatcgtggtggaccgtcgtcgtcgcattatcacccgtaccagcgcgcgcgcggcgggcccgtctaccactcgactccatctcgtcgccgttccgattttgtgccgagacgttgaagcttagaacccccagacgagccccccacttttttgacagccgaatctca

SEQ ID NO: 39911 - DNA, 1418 bp, Heterodera glycines
aggaaaatataggagagattcattattttgtttgcaaaatatcataaattttttgaacgtgtctgaacacacaaacttatttcaggttagtttaggcatcagatgctttccttcaaaaagggagtgaataaaaatctaaaaattttattgcttttaacgagcgaaactttaggcttacttttttttataaactgatcagaagcgaccagatttgcgagggcatcaaaaagcaggaaaagcctgtagatgctactccagtaattctgattaaaattttattaatttttaaagttcctttttatttttagcaaaattattcataaattttttccaactgttgaacgcaccaatttatttcaagttattttaggcactcagagctttccttcaaaaagggagtgaataaaaatctaaaaattttattgcttttaaatatgcgaaaatttaggcttactttttttttataaactgatcagaagcgaccagatttgcgagagcatcaaaaagcaaggaaaagcctgctagatgctaactccagtaattctgaattaaaattttattaatttttaagcttcactattttatttttagcaaaatcaattcataaatattttttcagaaactgctctgaaacgcccaaatgttaatttaaagttaaataaggctctctgatgctttttctatcaaaagggagatgaataaatattttaaaaatttttaattcctttttaaacaggccaaaaagtttaggcttatattttaaaaagtttcatcgaacctagcgcactaaaatcgatataatctctccaaattttgcaggccttctccattgtaaaggactaacttaacctgaaaaaatgccaacgcttgttgtttttaaaatttttcgaaattctgactttttcattaattatttattattttgcaaaattaattcataaatattttttagaacgtgctctgaaacgcaccaaatgttaattaaaagttaaataaggctctctgatgctttcactatcaaaaagggagatgaataaatattttaaaaatttttaattcctttttaaacaggccaaaaagtttaggcttatattttaaaaagtttcatcgaacctagcgcactaaaatcgatataatctctccaaattttgcaggccttctccattgtaaaggactaacttaacctgaaaaaatgccaacgcttgttgtttttaaaatttttcgaaattctgactttttcattaattatttattattttgcaaaattaattcataaatattttttagaacgtgctctgaaacgcaccaaatgttaattaaaagttaaataaggctctctgatgctttcactatcaaaaagggagatgaataaaaaatctaaaaatttttaattgctttttaaatgacctgccaggcca

SEQ ID NO: 39912 - DNA, 945 bp, Heterodera glycines
catactggtctgtccactgaatgacctcttcccccaaaattggcactttattggctaattaagcaatgagaaacaaccgatgggaaagcgaagcgaaaaaggcgggggggggggggggggggaaatggacactcactcatcccattcatttatatccatccgacggacaaagtgaagaatggggagaggaggtgaaagtgaattaattaatgtgctgggaaggcaaacaacgaaaagggacgaaagaatgagcggaaggatagggacaaattgggggaaaaggggtggcattggggagagagatatgggggggggggaaaggggtggcattggggggagagatatggggaggaaaggtgggaattggactggaagagatatggggaagacgggctgccggtgatcgaatggaatcggcgtgttgcgctcgaaaaggaaatgaaccgagacccgaacgcaatgcgattcatcagcatcacttacgacgcctccagcaactttctcatcttcccaactccgctcggcatcaccgtaaaccgtcgcggaattgccaattattttggcacattctaattttggcaggtgtacaatttggtcagcgaccaagtggcaaggcgtataggggcgggagagaatctgcgctttgttggcgttgcgttgtgtcgcgctgttcccggcgtaacggtgccattcatttccttttgaccatttaaaatagatttttctaatggaattgcacaggaaaaactgcaaggtgcagctgcaagtgtgaaggttgaggcggcggacaatccgaaccttcgcatcaacgaagccgacccaatgctggtgcttatttatttgcgcaacccaccaacgaatacattctctaaattaaacatttttcaggtgacttgtgcgcatccgaagtttttactgtcacaaattcaataaaatgcaaaaatg

SEQ ID NO: 39913 - DNA, 953 bp, Heterodera glycines
atgagccaacacggattaattcctggctagatttcattttatctgccaatgaaaaaattattactgattgtactgttaaaggaggcatattttcatcggatcatttaacacaatttttcacattaattactcctaaaacaaaaccgaaaacaaagatcgtaaactttcgttggttttgtccatcgaatgtgttacattttaatatagtcatagcatcaaggctaaatgccttgtcatatgaatgctttagcataaatcaaaaatattccgcctttaacagtatgttgttagaaattttaaatgagtgtattccaataaagcgtttaacaaagaaagatttgactcctaattcccacaacatttattagcatctatcaaagaaaaggctaaattattcaggcaagctaaaactgacccatccaaaaaagcactatacgatagcatttctttacatataaaaatacaaacaaataaataccatagccaaattgagaaaaaggctatttcaaagggaagaaattcaatttataaatatatacaaaaattcaatgtcaatccctttgaaatacctaatctaatttatgaaaataaatgctatcataatagtgctgagaaatctgaattatttgccacattatttgccaattcatttaataatagtgaaaccgacccaagctatccatgcttgggtaatattatagaaattgatcaatgctttatatcggatataaattttaacatcatcgagacccaaaatcttctgaaaaaacttccgaataaaaatggcacttctcccgataatattagctataaaattttaaaaatttgccattcttctctgtcaactgttattactgacttgtttatgatctcattagacattggttcacttccagacatctggaaagaatcaattatttttccgctttttaaaagagtgacaaaaatagtcc

SEQ ID NO: 39914 - DNA, 932 bp, Heterodera glycines
cgttgacaactgagatggaaccaaaagttccataatatctttccataaggctggaaaggcagaatttgaatggccagtcgatatttacactgagcacccgttgaagcgggtgatgcgaagccatagcaaactgtatttttaaattctggccgcaattctaccaaaaacgtgtttagaccgcagtaactcggctcagagtgaagattaagggacgcaaaagagacgatttaaaagcgattcgaaaattctatcgactgatataataacgatgcagtcgcggcgttgacaactgagatggaaccaaaagttccataatatctttccataaggctggaaaggcagaatttgaatggccagtcgatatttacactgagcacccgttgaagcgggtgatgcgaagccatagcaaactgtatttttaaattctggccgcaactctaccaaaaacgtgtttagaccgcagtaactcggctcagagtgaagattaagggacgcaaaagagacgatttaaaagcgattcgaaaattctatcgactaatataataacgatgcagtcgcggcgttgacaactgagatggaaccaaaagttccataatatctttccataaggctggaaaggcagaatttgaatggccagtctatatttacactgagcacccgttgaagcgggtgatgcgaagccatagcaaactgtatttttaaattctggccgcaattctaccaaaaacgtgtttagaccgcagtaactcggctcagagtgaagattaagggacgcaaaagagacgatttaaaagcgattcgaaaattctatcgactgatataataacgatgcagtcgcggcgttgacaactgagatggaaccaaaagttccataatatctttccataaggctggaaaggcagaatttgaatggccagtcgatatttacactg

SEQ ID NO: 39915 - DNA, 1028 bp, Heterodera glycines
  unsure (1)..(1028): unsure at all n locations
aggtcccaannacggacacttgaaaaaatcgatttttttgttttaggggcagtccccccgaaccgatgcgcccagatttatggggagaccgaatccttcgggaatagcttccctatagcctgtactttaattctgcgttggatttttgctccccataattgcttgagtaccccaaacggacacttgaaaaaatcgatttttttgttttcggggcagtccccccgaaccgatgcgcccagatttatggggagaccgaatccttcgggaatagcttccctatagcctgtactttaattctgcgttggatttttgctccccataattgtttgagtaccccaaacggacacttgaaaaaatcgatttttttgttttcggggcagtccccccgaaccgatgcgcccagatttatggggagaccgaatccttccggaatagcttccctatagcctgtactttaattctgcgttggatttttgctccccataattgtttgagtaccccaaacggacacttgaaaaaatcgatttttttgttttcggggcagtccccccgaaccgatgcgcccagatttatggggagaccgaatccttccggaatagcttccctatagcctgtactttaattctgcgttggatttttgctccccataattgcttgagtaccccaaacggacacttgaaaaaatcgatttttttgttttcggggcagtccccccgaaccgatgcgcccagatttatggggagaccgaatccttccggaatagcttccctatagcctgtactttaattctgcgttggatttttgctccccataattgtttgagtaccccaaacggacacttgaaaaaatcgatttttttgttttcggggcagtccccccgaaccgatgcgcccagatttatggggagaccgatccttcgggagtagcttcctatagcctgtactttaatctgcgttggattttgctcccactaattgtttcgagaacccccaaaagacacttgaaaaaaatcgattttttttgttttc

SEQ ID NO: 39916 - DNA, 1257 bp, Heterodera glycines
agatcggctacggttcggaccctatacgggtttttgcgggtccgtagtccgtatttttttgggccgatacggacttatactgagtaagggttttacgggtttttagtccgtaagtccgtatggtgcctagtccgtagtcctggtcgggtccgtacaattcctaatacggacgactacggactattttttaaacgcacttactattgaatattaatttgatttttgcgcattatatttcgccaaatttttgaaaataaatttgaaataaaatttttcacattcttaatttctaatgttaatggaacagatttttatgtaaaaaaacagctaacttaataaaaaaatacccacaatagctacccataaaaatatgaatttagcaaagatgtgttcaaatatttggaaaattgggctgtttaacaaattatctgacgggaaagcggaatgtattgagtgcaaaactaaacaactacaaaaaatcgcaattgaagccagaaacagcggaaatgttaatctttttgaataaagcactcccaaatataaattacaaatattaatttttcattagctcgcaattttatttttttctggtcaaaactgttgttaaatgttcgtaataaaatttataacaaatcttaatttgattacagtaaaaaagcatgtttttcttgataaaaaatatttaaaaaaaaccctgatccgtatgcgggtccgtatttttcctgggtacggacttatactgagtaagggttttacgggtttttagtccgtaagtccgtagtccgtatgggtgcctagtccgcagtcctggtccgggtccgcattttcgtaaaatgccgatctctaattgaaatacagatatttttacgaagatatttttgaaataataataaacaattatgccatatatttatttcgaattttttcaagaccaccaacgaacaaaacttttaaaatgatattggaaattccgaaatttatttgggtaaatcggccactctgaaaccgaatatggccttagatttgggctctgggttctcattgaacctcaacttcatgcatggagttgaacgagtacaatctcaactagcaaaattaggtcatatttaagaccacatgcgcattttactggtctaattatacagaaaagacttcgtttttgttgttgcattacttcatttttgaacataaaaaattccagaaaaaatagtggaaaaatttccattacaccctaaataaaggatacgaaattaatta

SEQ ID NO: 39917 - DNA, 891 bp, Heterodera glycines
ttcttagcgggtgtgtttttcatttttattgcatttttgttaagattttttcgaaaattctaaaaatagaacattaagcacaaaaagtccaaaataggcaaaattaggcattataaaagtcatcatagacaccccaaaccaagcagaaaatgcgtttttcgtgcttatctatgcgtattaagtgcgcagaaattttaggcatttgcctaaaaatcgcagccctagtaattagtagggcccggattatcaacttcgatttttcatgctcagaatcccacaaaatgcttatttcaaaccaaaaattacacaaattgatcatgtacaatcaaaaatataacctttgaacatttttagcatgtttgaataaattttgtaaaaatgaggctttttgacccaaaatgaggcttttttgcatgccaaatgaggcttttgaaaattttaatctggctaccctgatttagagcgacttaatagcacctaaggggggggggcgttagcacctattttgtcctttttccagaaatttcatagcaaaaatgcaataagtacgaaaaatacacccctacgaatcgatcagaaaaaattaaaaaatatatacccctaaaaattggccaaaatttcagaaaatattcccttaagaaatgaaaacccaaaaattcgtctccagaattttttatttattttcttgacaagttggatttgtgcgggcgaaattgataaaaaaaatagtcatttttagaatttttgtgcataaagaaagacactggatttttccaattttaaacacctattttggcattttaagcgtttttagcacctattttgcacttttttgacacatattttagtacctatttcagtatttttagcccctaataatccggtctttac

SEQ ID NO: 39918 - DNA, 981 bp, Heterodera glycines
tactgcgttctaaacacgttttggtagaattgcggccagaatttaaaaatacagtttgctatggattcgcatcacccgcttcaacgggtgctcagtgtaaatatcgactggccattcaaattctgcctttccagccttatggaaagatattatggaacttttggttccatctcagttgtcaacgccgcgactgcatcgttattatatcagtcgatagaattttcgaatcgcttttaaatcgtctcttttgcgtcccttaatcttcactctgagccgagttactgcggtctaaacacgtttttggtagaattgcggccagaatttaaaaatacagtttgctatggattcgcatcacccgcttcaacgggtgctcagtgtaaatatagactggccattcaaattctgcctttccagccttatggaaagatattatggaacttttggttccatctcagttgtcaacgccgcgactgcatcgttattatatcagtcgatagaattttcgaatcgcttttaaatcgtctcttttgcgtcccttaatcttcactctgagccgagttactgcggtctaaacacgtttttggtagaattgcggccagaatttaaaaatacagtttgctatggcttcgcatcacccgcttcaacgggtgctcagtgtaaatatcgactggccattcaaattctgctttccagccttatggaaagatattatggaacttttggttccatctcagttgtcaacgccgcgactgcatcgttattatatcagtcgatagaattttcgaatcgcttttaaatcgtctcttttgcgtcccttaatcttcactctgagccgagttactgcggtctaaacacgtttttggtagaattgcggccagaatttaaaaatacagtttgctattgcttcgcatcacccgcttcaacgggtgctcagtctagggaggacaggtcattcaaattctgcctttccagccttatgga

SEQ ID NO: 39919 - DNA, 958 bp, Heterodera glycines
attagggtcgtcgctattattccgaaaatgtggttccttttagtgtgagtgttgagcagaaaaagagatagacgttttttcaaattttcagagccaaactcgcccagaaagaaaatccagaaaaattagggtcgtcgctactattccgaaaatgtggttggaattcatttgagtgttgagcagaaaaagagatagacgttttttcaaaattttcagagccaaactcgcccagaaagaaaatccagaaaaattagggtcgtcgctattattccgaaaatgtggttggagttcatttgagtgttgagcagaaaaagagatagacgttttttcaaaattttcagagccaaactcgcccagaaagaaaatccagaaaaattagggtcgtcgctactattccgaaaatgtggttggaattcatgtgagtgttgagcagaaaaagagatagacgttttttcaaaattttcagagccaaactcgcccagaaagaaaatccagaaaaattagggtcgtcgctattattccgaaaatgtggttggagttcatttgagtgttgagcagaaaaagagatagacgttttttcaaaattttcagagccaaactcgcccagaaagaaaatccagaaaaattagggtcgtcgctactattccgaaaatgtggttggaattcatttgagtggtgagcagaaaaagagatagacgttttttcaaaattttcagagccaaactcgcccagaaagaaaatccagaaaaattagggtcgtcgctactattccgaaaatgtgggtggaagtcatgtgagtggtgagcagaaaagagatagacgttttttcaaattttcagagccaaactcgcccaaaaagaaatccagaaaaatagggccgtcgctactattcccaaaaatgtggtgggaggtcatttggaggtggagcagaaaaaaaaataaagttttttcaaaattt

SEQ ID NO: 39920 - DNA, 876 bp, Heterodera glycines
cgccgataggcgccgccgggaaaaatttttaatttttaatccgatttgttaacagattttgtccaaaaatgaccaaattttgccacaatcttatattttcttcgtaaaatagtgatattctgacatagaatttcaaaattatcttgctttttatataaaaatacttatttttaaataatattaaaaataaaaaacaatcgcttattaaataaatttttttaaattggtccaaaattgccgcggagtcccaaattccggggactaggtcgttttggcgccgacgttttggcgccagcctcagtttttttattataacttttttctttgtcgaccaaatctaataatcttggtatcattcgaaagatcctcacatgctctattagccttacaaaaaaaaacaaaaaaaaatttagcctgtaaaagttattaagaaaaaacttcaaaaatttcgacttttttgcaatttcatgttataaattttttggtaattgtctaatcgcgaagtaatagcttagaaatagcttctaaacatgttaagctttcgaatgataccaagattattggatttgtttaacaactaaaaaagttatagtccgaaaacttgagctggcgccaaaacgatacggacccgaagcatccaccgtggacgaagccctgggagaacagagcgcagcggagacgagccaagcagagcaatacccaggccgtgatgcgtctaaatgacacgacgacgtcctgtgacacccacccgtcccttgcttcgatcattcccgtcccttccgattgctgtgttttgtctgttccaatgcttcctaaatgttccccttgtgaacagtgatccttccttatgtgatctgaacatataccgtattatct

SEQ ID NO: 39921 - DNA, 1163 bp, Heterodera glycines
cccccccccccaacttagcttcacccaaaatttccaaaaaaattttcactaaaatttcgaaaaaatacacaatttgttgatgaaaatctgctaaagatggctgaaaatcgcaaaatttgtcattttttggacaaaattcgttaacaaatcggattataaattgcaaaaaggggaggtaccccttattatggggttttcgggctcgctgatcacacgaatatgacatccatttcgaccgatttcggacccgaactcgaacaaaaagtcgagaattcaaatttttcaaaattctcattgaccttaaattgattaaaacagggtaaatttagaacgaatgattgtgtatatattagtcgggtgaactatgttatactttaagaaaaggctggccattttgggtgcgcgcccaaaatctcgccgccaaaatttttaaaagtttcaattttaccaatttttcaagaaaaaatcaaaaaaattttatgagtaaatttcaatgaaaatgcattttatttttttcaaaatagctagaaaattttttataaaagaatttttaagtttgaaaatttttctcgaaaatttggcggctaaatttcagccggcgaatttttgtcctgttccggcaatccctccccccccccccggagaaattagtactgtcaaaataattctattaaaagtgcattgtaattaaattaattatttattttcagccaaatctgctgacaagcttgctcttcaactggatgaaaagatggaattttgaaggaaaaaaaatgttttttaaatttttgttgtttattgttaaataaaaaatttacttggcactaagggtgggaaagagtggactaaaaagacgagaattttgacgagaggggtcaatggcaactatacaaaggcttacagtgcaactcgtacaaaagacggctctaatgcactttatgagtccaatcgacttttatgagtccaatcaattgacaatcccgggtttttatacaataactttgttcatgttcgaacaaaccctatctttttggtatcattcgaatgcacaaagtctaacgaagctaaaatatataaaatcgcagcgttcaggcaattaccaaaaaagatttgattaattaagtaattgctgattattttcgtttgtaacttcttggaatgtt

SEQ ID NO: 39922 - DNA, 1373 bp, Heterodera glycines
acttacgccgatgactttgtctgtcctcacttttctttttttacattttttcacttttcagtgcagcggagtgttgaaaacggaatggcgaaacgaagaccttctcgtcgatttctgcgaggaatttatgaatgcgaaatttctgaacaaaaaggcgcacatttcggaactgttcacgctggccatcgctctgttgccgctgattaatccgtggaacaacgaactgagccatcgtttggtcggaaacctctacgagcagaccggtgagcatgtacagcaccgtacaaaaatcttacgtctttctatggtttaatttcggaagttaactttcactaacaatttgactcatttatccaaaggatgtcgcgtcttctacccgaacaaagagaaatacgtggtggagccgcccacttattttgtgaaaggcgcttctgtggccggtctgctccaatcgggcaaatatttgatggttgttgtgctgttccttctataaaaacccgtgttgtcctctttagggtctcactatgcttcaagtcactttccatttgccgcccaattccgcgccctccgttcagcagcaaatgctcgatgattggcaacagaatctgctcgtccacaccaccattttcaacccgtcgcccaatgacccgctatctcagtaccgagtcactttgcgttccttcgagttttgtgtcaacggcgtttacgccgttcggtcggcgttgctcggctttaagaagtccgtgagcacgccctgctacgacttcatgaagctggccaagcacatcatcccggtcttcagattccgctcatttgctaattattgttagtttatagtacactgtcttctgcgatgccaaactgttctacccgctgtactcagtcgacgacaaaaacctgaactggagcagcgacgaattcttcgagcgcttctacggctgtccgtacacactgatcaatcagccggtgccgttggcaaaagccgttgcatacgatgaaaacggtttttgcgtcatttccttacaaaaaattaaaaaattttgttcagcaaattcagtgagcgttttgacgaaccaaatgcagcgaaagttcgatttgagcgaagggaatgacagcgagttggagcagcagtcgtccgatttggaactgaccgccaacacgaccacctcgttggagtcgtcctccgcttcctctgctgccgctgcgccgctccctccgccgttcagtcagtccgacttccaccaccatttcgtccaccaattccctccgcctgtccattccatcacgacggacatcaacctcaacgcgactccgcagcaacagcaaccccaatttacttcttccatacggggacacgaacaacaacaacaact

SEQ ID NO: 39923 - DNA, 1580 bp, Heterodera glycines
acttgtacgtgttcttacgttacttgctcagctcggctgtggggttttggtgtgctggcgcgaacttgtggttctaattcgcgttttacggaccgtaactcaagcgcaccaatgctttgcatgctgtggcggagtgcctggattactggcattcctgctttgatttttcgacctgaactcagacgtgaacacccgctgaacttaagcatatcagtaagcggaggaaaagaaactaacgaggattcccgtagtaacggcgagtgaactgggaagagtccagcgctgaatcgcagctcctctggggttgcgaggtgtagcgtatagaccgtgagcttgggttggcccgcttgttcaagtttcccttgaccggggctccagagaaggtgcaagacctgtccaactggcggtgcctacccatctttacgtgtcttggagtcgggttgtttgggatcgcagcccaaatcaggtggtaaacttcatctaagactaaatacggccacgagtccgatagcgaacaagtaccgtgagggaaagttgcaaagcactttgaagagagagttaaagaggacgtgaaaccgatgaggtggaaacggacagagctggcgtatctggtctgcattcacccgtttgttgctgtacgttggcctgctagcctccagactggggtttgctgtccttctgttcagtggcgaatggggcatttgcaggcggagtgcgctgagatgctcggagtagctgcgtgagctcggtcttgaggccagcctttcggggtctggtacccggatcgggggagtgctgtttactctgggtgaattgtgcaatggtttcgggtccgtgttgactcgagctgggggtcggtggcggtcgcgtgcgacacgtaccagcaaccagttcggtccagctcgggctctcagtagtcgtcgtcggtgtagaagccggtcatctgttgggctcgtcttgacgcacggaccaagggagtttagcgtatggccaagtcatggggtgttcaaacacctcaggccctacatacatcagggttggatggcatcagatctcgctcccaaacatcgcccggcatataatcccataccataaccgataccctgcggctgttcgatcagactgccggaaaccggatcgatcatcggcatcataagatcggcgggcgcttcgtccggaccatccatgccccggcgcttcagatcgcgcagcgagagcgagcggacgccgcaggagcaataccagtcgttcggcggaaagtgcttttcccaccatggatcatcatgacgataaatcctgccatgcaaagcctcatgggatggccgggggattttcggcttgcgggtttcgccgtgccggtactcccagaacggccgcagcttgagcacgtccgggtcgcgcatctgtttgaggcggcccgccatataggccgtgcgcatgttggtttcgaaaatgacgcgggtgcgccatccgtaatcgcccttgtacgtccagccgtatttcgagacgatccggtcgaagtcgttgcggaagtcttgaagcgtgccgcccttttccatgatatcggctatcgccgtctg

SEQ ID NO: 39924 - DNA, 1053 bp, Heterodera glycines
  unsure (1)..(1053): unsure at all n locations
tgttctgccgcttggttgtaggactgcttcgcctctttgttggcggctgaaatgaaaaaatggcgaattatttgttagctacatcaaaacaaattccctactcgttctgtcctcgcccagcgcaatttcggaaatgtagcggctgtagtcgcccttcatcttgaggtagaacaccttggcctccaggttggtcgtcgcatttggaatcagagttgagtcgaggaactcctgaaaagcgatggtatttggattgatatcaaaaatgaaggcatgaaacggaccaaaactccacggcaattgacaagcagctcagattccaactcctcgcgataggacttgaacccctgaaaatgaaaagataaaacactaaaaaaaatgtgttgcgcaccagccgttgcccctcagtatccgaatagaagcgttgttcgatggcgcagagggcacgccacggctgacgaaatcgcacctttgaaagccacccacagcaactgtcttttgttataagacaattcggagcaaatgctgaccaactgaaaaggaaggaaaagcattagaagctgctgaatgtatccaaaatcaaattgtcacctttttcactgcgtcgaccatgtcgttgaagcgttccaatttttcataagcatagatttaatttaatttatcgagcaaaccaaaggcacatgagtgctcttatatggtgccaaaaaagaaaacaacaaataaatttgatcaaaataaaaatacaaaatgaataccgtactaaaaatgaataaaaataattcaatcaaatgttaaaaattcacaggtgataaaaatatagtgtaaatatggcaacatggaaaatcctactcagaactcattgcttttagtaaacccctgaatcctttgctttattatttgcaccgctaccactggaagattattccagctttttactattctatttgaaannatattttgagttttgcccgtgtggcgggcgcttacccgtaaaagtaaaggcctcctgggcctttctgagaaaagaaactttcccagcatcgaggctggtgaacc

SEQ ID NO: 39925 - DNA, 1511 bp, Heterodera glycines
  unsure (1)..(1511): unsure at all n locations
gaaaggtccanccatatacaattcatggaggaggtgccaaaaagaaaaatgtttaataatacaattntaaaagcattaattcatttataatagaaatttatttaattaaaatttttcattataattaaattggaaatgaattaaaaacaaaacagagtcagtcaattaaatttattggagggttgggtcaaaatttataaaaatgtaaacataatcatcatatttaactcgtttttcaataaattctgattcactgaatcattttccggtcacgcccggaaacgggcacatgacaaaacagggggacggttgtttttcaaaaccgcttttttgcagtgtgctttttccaaaaaacttttggagtattggggggggggggcaggtggtgccaataggcgctgccggtaaaattttttataatttttattgcgatttgccaacatatttttccaaaaaatgaccaattttagcgattttgatttgtcaaaaattgctatttttgaaaaaaaaaattcatagaaattccctatataaaatgccaatcacggatcaaaatcacgaaaaattgaaaaaaaaaaactaataaaacgggggaaaacaatcgggggatcgcccccgcacccctgactggaactgaactcaaaaattggaaaagcttttccaattgccagttgattttttgaattttatttttaataattatttttttttcatttttaaaattaatttatttttcaaaattgtcaatattttgtacttttttaaatgcttctttcacagaatttggcatggtcctccattcactcgctgttcggcttcatcgcttttctgttgaccattttccaaccaatttcggcactcttccggtgccatcccgattcgtcctcccgtgtgctgttcaatgttttacacgcattcaccggatacattggatggctttgtgcatgtaataaaattttatatatttaatttaatttttaaattaaattagttttattaaataatctaatctttgaaattgtagtgacaatttaatattggtaaataaaatttaattttttatttgtccgtattaacagaataattacataaaaattccaaaatataattggattttagagaatccataaaaataagaaggaaaaaactaatattcgcttaattatcagcaagtgaaaaacggtttttttcatactttttagagtttcctaggagttcaggaaaaaatcctttactttatttttaattatattttttgggcaattaaattattatgaatttttcttcgtatttatgccatattttccaataattattttccagtaattgccatttgcattgcctgcgtacattttggtctgttcgccaatacaagcgcatcaacagtgctgatcattgtgttccttgtactgcttgggattgttgcactgataatgcaaattgttgcctttcggaagggccttcaacagcagcaagaaccagacggaaccggggggagggggggggggggg

SEQ ID NO: 39926 - DNA, 988 bp, Heterodera glycines
taattcctttttaaacaggccaaaaagtttactccccgctttttttcagaaactgatcagaagcgcaccaaactttgcagggatactgaaaggaagagaaataacctattttaaatattatctagtcagttcatttaaataatttttatccaaaaaatttttttttgggttttcggggcagtccccctgaaccgatgcgcccagatttatggggagaccgaatccttcgggaatagcttccctatagcctgtactttaattctgcgttggatttttgctccccataattgtttgagtaccccaaacggacacttgaaaaaatcgatttttttgttttcggggcagtccccccgaaccgatgcgcccagatttatggggagaccgaatccttcgggaatagcttccctatagcctgtactttaattctgcgttggatttttgctccccataattgtttgagtaccccaaacggacacttgaaaaaatcgatttttttgttttcggggcagtccccccgaaccgatgcgcccagatttatggggagaccgaatccttcgggaatagcttccctatagcctgtactttaattctgcgttggatttttgctccccataaatgtttgagtaccccaaacggacacttgaaaaaatcgatttttttgttttcggggcagtccccccgaaccgatgcgcccagatttatggggagaccgaatccttccggaatagcttccctatagcctgtactttaattctgcgttggatttttgctccccataattgtttgagtaccccacacggacacttgaaaaaatcgatttatttttgttttcggggcagtccccccgaaccgatgcgcccacatatatggggagaccgaatccttccggaatagcttccctatagcctgtactttaattctgcgttggatttttgctccccataatgtgtgtgagtaccccaaacggacacttgaaaaaatcgatttt

SEQ ID NO: 39927 - DNA, 946 bp, Heterodera glycines
aaataataaagagtttttacgagcacaaaaagaaagaattcattgagagatttgaataatttaaaagtttatatggccaaggcaaacagaaagaatttgctaaggaattgggtatttctgaatttacatttataaaatggaaaagcgaattggtgccaaattattataaaagtaagggaattttgatacataaaaatggtttttttattttagaattgaataaatattccaatgaggacaaattaaaaaactgaaacaatatttcgaaatcaaagaaaaaagcccaaaaattagcgacaaaaaaattgccaaaaatttgggaattgcgaatcaaactctgatcacctggaaaaaaacaaatttgcttagatgttgaatttgtgatttttgaagtgtaatttattatttggatttttcattttaatattttgtctgtcttttttattttttattttcccattaattttcatttcgaatcttctgatatttttttatgaaatgcgaaataagtgaacttattttgtccgatttataatcagcgctacatcaattttcgactttattgcattagtttcactctgtgcaatgataaagtacccattttgatggtcgaaaccgaaaatttcacgagactcgagaccgagacagaaaacttcgagaccgagtccccaaaaatcggagactttttcaataaattttcttattttcttaaatcgattaaaactttctatacattaaaaacttttttcttgagactttcctaacatattcttagacgtgagcatcatattccaatgagaacaaattgagaaatatttcaaaatcaaagaaaataatccaaaaattagtgacaaaataattgctgagaaattgggaatttaattttcaactctgcaaaaatggaaaaaggcttcattttcgaattgaatgatttgtaaagtgttta

SEQ ID NO: 39928 - DNA, 158 bp, Heterodera glycines
tctgagatgatccatcgaaaaccgaaaaatgggagggagaggaaaaggggagaaatgggataaaagaatgaatgaggatcaaatgcggaagtgtcagagaactaattatcggcagcggtaaagcgcacattattctgtcgggaagaggggagcgagaa

SEQ ID NO: 39929 - DNA, 1289 bp, Heterodera glycines
  unsure (1)..(1289): unsure at all n locations
atttttatttctctatttagaattgttgttattgttgttgacgaattccttaatatttatttaataaaattaatattaacaaatttggatttgatagaactaaataattatttcttttttagtttggacgattaacaaatctttattttctataaatattggcactaaaaaaatttttcgattggatattgccttaatcacaggtttattgaaatattttattatttttgtttttattaaattttaaatagttgagattattgccgaccaattccttttcctatagcaaatttcctcgataattttaaaaattttatatttacaaatctgcatttattacacatatgccgttctatatttcacttttatgtttttttttctctttcaaataacacataaattgattaataattttttttctcgctgggatcaaaaataaaatttcattaaaattattattttttatttttgtgaaatttctttccttgagttgatttgaaaaataccatattctttattttgaatataataattcttttttatttattctttatttgttttctttaatttcttttctatctttacacttttttttattattctcaatcaattttttcagccttaattctaaaattagcgcactaattttctcgaattttttatggtcaaaaaggaagacatttaataaaaatgatgttttttctgaatcgtttagatttgttaaatccgaaatggccttaagctgacataatatctgagcttgtactactgcttaaactgcatgcaagaagttagagctgtacaattcactgagaatcagactccgccctcaaataattcattttaggtattaaaattttttcattatgtttttatatctcaatgttttcttaatttactcttttttttattttggtttccatttaataattttaaattttatttatattttttaataataatcatttatttttatcaattattaatcaaatttcattctcccaaaattacatactttcagttataaatttaaaatttgttaattcattgtttaaatagtttaatttacatcttattaatcggatagtttaaaatagcatgttcattaattaattgtgtctttttgaattcattatttatttacataaattagtgcacaaaaataatttcatatttttaagcatcattcatgtccaaaatttattttgttcccatgatagtgttttctcanattattgttcgttaaaataaatttaattataattgcgttctttatgactattttaaag

SEQ ID NO: 39930 - DNA, 329 bp, Heterodera glycines
aaaatttgcgtcctcttcccattcccttccctcgcctcaattcccgtgattgtttgcgcatccccaattctcttccgcagccgcaattctgctgaaatcactctccccctgcctccctcccctcaataagctctgtcggtcccttcccttccccctgtctctcgctcgccgcaatccgtcgaatgattggtgcgaatggtggccccggggggcggcgtacgttcatccgccattattggagggctttcatctgacaaagtaataatatttggaatgaatgggggtggctatcaattgaaattcggaaatgttggtgattaattagtgcg

SEQ ID NO: 39931 - DNA, 1130 bp, Heterodera glycines
attaattgaatctctgactataattaacctatgaaattttgtaaagcgtaaaaatggaaaaaagggctaatatgtaatactttttaagtaattaaatgattgaaaaataatacctgcctgagtgtatacaatttcataaacaaatcagttttaaaattataaatatgggtgaaattcgttcttatattaaaataaattatggaagattatttgcattatttatgtaaaattttaaaactatgaaataaatgaaaatatttttaattttgtcgtttggaaaaaatggaaaattcagtgttaaaacatcaaaacttctttgcaatttgtgttgatcgtaagtaaaatttaaaaaaaggaaagatagaaggataatcaaaaaatattttaatatttcaaattttccattttactctcgaaaggattttctgctagatattaaaaatttgttaatattcaaagtttttcattataattttctgacgataatttgtcatcgtcagacagaaagaagatattttgcaattttttataattatttcgtatgctttccctactgttttgcgtattttcgatggaaaccaaattatatgaatcaataatgtaatttaacatttataaaagataaagtttttatgcatcacttttcccacttttaattcaacatcgcctttcaaaatgatcatcttcacttgtgttcctcctcgagcagttcagacaaagtgcgttttcctcccaacattcctttttgttcctcagcaattcgttgatcagacgatgccatcacgtgggccatcgttgactttccacaagtatcataggcttttggcatgtccgctgaatatgtctgaacttggttcgggtctatcccgagcaattccagcaaagtgtgttttcctcccgacgttcctttttgttcatcagcgattaggtgatcagaagatgtcatttcggggacggtcgctgactttacatgagaatcatcggcttttggcatgtccactgaatatggaacttcgttttgctcttgctcctcgagcagttgcgacaaagtgcgtttttcctccccacattcctttctgttccccaccgatcagctcaatagattccatttcggcagtgatcactgattt

SEQ ID NO: 39932 - DNA, 952 bp, Heterodera glycines
ctataaaataatattaaaataattatttaacagtaaaaaaataaacaaaaaaaaataaaataaaatttttaattagaatcgttgtaaaaaattgtaaaaattgaaagttatatttgaaaaaattatttattataaatttttactaaaaaataaatgataacaaaaaataaagacaataataaaaaagacatattttaacacgaataaaacaattaaaaataaacaaacgctttcaaatttcaatattttttgtttaatattataattgtattatatatataactaatttttaaagaaatttttagaagaataaataattgaaaaaattgcatctcaattgttcaaagtaatctttttaaaattttaaacatttaaaaataattagcagtgcaaaaaaaagtcaaatgaaaaaatcaatcctgggtataatagcaatttaatttaaaatttggatcttgtgactcctttcctctgtttaataaaaatacaattaaataatatttaaaagaaataattggaaaattactgcattacaaaaacgtttttttttgtgaattgtttatttttgttttctaatcaattttattgtttatttctgttaattctttatttaatttatttttttaaataataaaatttcactaaataaaattcctcgttcttcttctgacttttttttctggttgtcctcgtaaatttttgggtttaaatataacataaatgcatttcaatacaaactaacaaattttcatgaaaattaacttatattataaattttgaaaaaggtaatttaaaattttgaatttattgatctgtttattaaataattttctgtatttaaaattacattaaaaatcaaataaattataaatttatcatagtaaattccccttaaatatattaatctaacaacaaaatcgtaataataaatttttaacttaaataataaata

SEQ ID NO: 39933 - DNA, 338 bp, Heterodera glycines
cgaagcgcccgtcttgaggccgcgaagcggccgaatgttctcaacaaaattaaaaaacgggcgcgaagcgcccgtcctgaggccgcgaagcggccgaatgttctcaacaaaattaaaaaacgggcgcaaagcgcccgtcctgaggccgcgaagcggccgaatgtccccaacaaaattaaaaaacgggcgcgaagcgcccgtcctgaggccgcgaagcggccgaatgttccccacaaaaacgggcgcgaagcgcacgtcctgaggccgcgaagcggccgaatgtcccccaaaaaattaaaaaaggggcgacgaatcgcccgacctgatgtcgcgaagcg

SEQ ID NO: 39934 - DNA, 746 bp, Heterodera glycines
ccgccgatgtcgatgccgaaccaaggcatggcttaatttggtcaagttatttcgaattgaatggacagcgaaattggcacccaatcttacgacagtcgaggaaagtggaaatggaaaaagcccttcggcggccctgttgaaagcggtcaaaaagtgactcaatgtcctccagagaaatcattacagaaaggaggaaaggtaagtgaatggaaaaagattattttgatatgcaatctgaaggtggaggatggaactgagtgacagacagattgaattgattctttggaatgtttcgctcacatttttagttatgcgagaattttaaactttggattttaaatttggaaagttttgggtaatttttatgcattcgtccattttatgacggcaattaactaacaacattgttgttaattaagacataaaaacacttttttgggagtgggctgatcatttgcgatttgatgagaagacggctgagaaacgaatgaaatgaaaggaaaggaaatgtttgactgtggagccatcgcattgagaagaaatggacggaccatttgggaaacgaacagccaaacggggaaaagacagaagcgaaacggatgaaattcacattttgaacttgtgaagaaatggaaagtgggaaaagggagagaagaacattacaaaaagaaaagtcggacggaaaagcgaaaggaatgcaattcacatgaacggactgataagagcaatctgaggaaggaaatccg

SEQ ID NO: 39935 - DNA, 1463 bp, Heterodera glycines
  unsure (1)..(1463): unsure at all n locations
tgtgtcgtttcgtccgttgnagtcaccgattaatttgaccacattttggccgattgcgagttgagcacttcgctcctcncaatcagtcgaatattgtcgactcggccttcatctgtaaatgcaacaagtgccacaactgttatcactgtccatttcccacgtcaattagcctcattaattgattgattgattaattaattaattaattgcccacctgggatgcgtgcggtgcaactccactcgccttggtccgagaacacttccactgatccgacatcgatgaaaatttgcagtgaagttggcctggctttcctctcaatgtatctgtgttgtgttccgtttttccttaattttccattttaattaattgccaaattcattcgattctcttggccacttaccatcccaaaatcatttccaatccgtccttcgatgccaccaatgaaattttgccctcctcgcctttgtccgtctgttgcatttctagcactatcgaaccgtaaatttgcagtcgccaatagtaaatttcgaagaaaatttctacggcaccgtttttcggcaattgcgtaattttaaatgttcggaagtcgtccatgttcaattctttttccttaaaaattgttttaattgccaattaaatcgtttttaaggaccctcagttggacgacggatgggtggggaggggtcaaaagaaagtttctgctcggggccaatttgagcactcgcggcaaagtgagcgccgtagggaaattttggacgccgttataatcggcccaattcccaagccatccgacgagcaaagactcgccactgattgagtcgcgaaatcccttaaatggtgtacaatataagatagaagattccgttgggtttgcctggtaagcgtaagaacccgtggcgaagtccaacatttgttcaaataacggcgtgaactttctcccgttaaaattcccgacaattactgggtttaagaattgtctaaattcgaaatcacattccaatggtctgtttccaattcttgttcatccactcaccttccgtcctcgtccacgctgttcgacattgagtagacaaatgcccacaatgtctgcaatgagagcgggtcgcccaaagggattagcccactgcactcgcacacggcattatgccatcggttgtccttgtggagaatgccctaaacggtcgagcaattaatccgttgacaaatgaccgtccatcattttgtccattgccttaaattcccatccttcgggccccccattggccgctgtttcattctgtcggaaaagcagcacgacgccccccgtcccattggtgaaacggctcgaagttgtcatgaacagagccccgtcaggaccgacgaacacattcggatcacgaaagtcctcagtgataacggctgctaattcagaggggcgacgagcgaattgcgtcgcggggagggcccatcggacggtaaaaat

SEQ ID NO: 39936 - DNA, 956 bp, Heterodera glycines
aaaaaaattcatgtccggctcataagcagaaagcaaacgttgccgatgaacacataaacaatgaacatgatcagcagcggaattgtttgtgatcgttcatacggttgctgactctcatcatcattggcattttcttcgtcattttctgggggttggccctttaattaaaatttttgacatattttttttaattattaatttcaccgtttttgaatttccgtccgcagatgcttcacccttctccgctttgtccaacaatgcttcttcaaatggattattgtcagtgcctggggttgtggcatttgatttcttaattggactattagagtaatgaggatgaaataattgtgctttaataagcgcaattatttgcttaagctgttcaatgctaatccggaataattagagttacaggattgattatgctaattattgtcaattagtatttttttaattgacaaaaaatatatattaaataacataaacatttaattaagcacaataatttgcttatgctattcaaagctaatccttcctgtaatttaattattaataaaattttatttatacaaaattctacaaatatttttacattcccacgaaaggcttgtaaacgttccataaagctcggattgttgttgtttgggtccaaaatgcaattgttttgtgcattgatgagtgaaatgaagctgtatttttttggctgggcacgaaaatcgcgccaaaaaagttgaatttctctgaataaaatgaaatagaaaattaatttaaatataaaaattactaaaatattttttgattatttttcaaattacttttttgcactccgacaagttctttcccaaccatccaaaatttctgacaaaaatttgccaaggtcagcattgcgagcagtgtaaatggaattcctaggaaacataaataattgtcatttgatttataatatgtagcaaaat

SEQ ID NO: 39937 - DNA, 752 bp, Heterodera glycines
tgatcgaaagcaaatcaaagggaaaagtttgtctaaataattccgtattgaacccctaaaatcacttttccctgtgcattccttcgtcccttttcagtgtaacaaatgcctgaagcgcttctcccactccggctcttactcgcagcacatgaaccatcgctacggtaccgtttccccgttttagacctccacagtaataattgactacgatacctcccccccccccccccgttaagcgtactgtaagccattcatgcagcagagacaaagggccgaggagagaacgccgtcaaaggatgaaaacacagagtgaagcaaagaaagaacagcaagcacagtgcaaaaagagcgggagaaattaaaaacgtcgcaaatccctcaaaagccaatcgaataaataacctctccgtcccttcaatgatctttagtatttaatttggtcgctttccctttttgcaaaaccttattaaccactttgacccactaaatgtgacttttggtgctatgcattcataaattaacataaccaccgaattcgaaatgccattttgtgtaaataaaatgtcgcaatttgattgggttttcttttttgggtagtactggagaatctgggctccaccccaaaatttttttttctgttatgaaaagttcaaccctggggttttcggggcttctgatcacgaatctgatatcagatttgcaaaaatcatagattttatcattgattttgaaaatcatagattttcgaaatt

SEQ ID NO: 39938 - DNA, 911 bp, Heterodera glycines
  unsure (1)..(911): unsure at all n locations
cgattaaaaacanttttttagatgactnnttttttgagaaacatatgaaatgaaatttataaaaattatacactgcctgattatttaagtaaccattatccgtcgctattaaattaatcaattggcatattaaaattggataattaatattgataggcttttgcttacgtctatgggaggaaatgtacataaattataataatattcacaaattttgatgacgtaaatgctgcagtttatgcgcaatacaaaattatgatgcaaataaaaaatctatgacaatgtttggcattaatgttgcatattataacaaaaacattgagaaaatagctgacgaaatttttcaaaaaaaatgaaagaatctttaaattcgttttgagagtctcgactttgagaaaagtttcgagtttttcaaaactcagtctattgagtcttggattttgaaaaaaaaaattgcttgaaaaaaaatatttttttaaaattcagggaggaaattccccaataaaatttgtcgggaatggctggagaaatttaaaaatgtcggccgaaaaaaaagatatagaattttttctaattaataaaaaaaaatctcagaaactctattttttccccaaaattgtccgtaaatatcccaatgtgtcacaaagataatactttagaattgattaataaagagaactctttgccaaattcaagaaaagtcttttttggcgaaaatttctttaaaaataaaaactctatcgacgtgccgacccgtctttcttcaagcaaatcttgaaaaaatcatcccaacaaaaactgttaataccagggttaccctttgtccttatttgtaagattgtctttatattttgagggtccaaatcttacaaattttgaatgtcctttatttgtaagaattgtccttattt

SEQ ID NO: 39939 - DNA, 857 bp, Heterodera glycines
tgccaattcaatggattttccattgcccgaccgtccgctgcccaacaaaattcgctttgaatgccttcagattcagtagttcaaatttaagcattgattaactcataaaagcattcccgtttcagctatatcgatcacttcgtgatcacatttctccgtgccaataaacaaatttgggacaaaattaagaccaatttgcgcttgaatgtgagtcacaacaacgagcgctttgtccagcatgcaatttggaatgctttggtccgtgaaattctgcccatttttgcgccaaacattcggcacttgtgccttcactattctgatcatcttcgcgatttgctccgtgtttcgccgacaattctctctgatctcaaaattaatgaaattaattatggttggcttaagtccgatgattttgaagagccaaatgcaattgctatggaagtgttgaacgaatggttgcacactctgaacaccgatggccaaccgaagcgattgttttgctgtgtcgatgtgtcaagaaccatggaatgggtcaacaatttcaaggaggtgtgtggcagagatggcattccgaggccccaaaaatttttgggaatcgaaattccgggggcccaaaactttttcggaaatcggaattgagacccaaaaaagtcggaaatcataaattttttttaaatataaaaattttaacaaatattttaataggctaaattttaatattcttaatcaagtaaaaggtgtttttttgatttgtttgaaaaaattattcaatgattttcatcaaaatattttttatgtccggtggtgccaataggcgcagtagttaaaaattttgtaattttatatgcggtttcttt

SEQ ID NO: 39940 - DNA, 1573 bp, Heterodera glycines
  unsure (1)..(1573): unsure at all n locations
aagcctaagcctaggcctagcctaagccatgtacgagttgcgtttgaaaattctcgtaaagctgagttgtctatgagccgaattgtcccatcagctgaaaattctcctaggtttaaatgcttacaaaaaatttttagcttaaaacttttgtgatttaggcattatttcaccaattggtgcaacacttttgattatacgatgtcactgaaaattggattcatcggagcggggaaaatggcgcaagcattgggtaagcgaaacgaaacaaatttaaagcgaaaattaaaaaaacaaaaaatttttttttgtttgtttagcgcgagggctcatcaattcgggtatgaattcggcaaattggacaagaaaaaaaatctcgaacttttgtcaatttaggacgctatccggcagagcaattgatggcgagttgtccaaaggtacggcaaaaaccgaacaataaaacaacaaaatgttttgttttgttcagacggaagttgcaacgattgagcaattcaaagtgagcaaaaaaaagcgagggctttgaattttcaaaaaaaaaatttatttttatttttttcagaaaatgggcgtcaaaatgacggatgacaacacacaaagtttgtggatcatcgcttttttcaccaatttatcaccaaaaaacacacacagttgcgcgtgagaatgaagtcatcattttgtcggtcaaaccgatgcaaatcggcaaagtgacgcccgaaattgcgccccatgtcaaacagagtcatttgctcatttcacttgccttaggcaagcgattaccgtaaaagggattcgctccaacaaatttaattttttcagggattaggctcctctccatcgaacaagttcacacattttgtacatttttttgatggtcgaactaataacaaattcacagtttttgccatcaaattcgcgagttgtccgcgcgatgccgagtaattaatttacttaattgtcacactaattgcacccctaattgccacagatactcccgccgttgtcggcgccggtgtcaccgcttataccatgggtatcaattgcacaataaattattcaccccccccccccattttcgtcgctttaattttgcataatttaggctcggcgtgccaagatggtcaattattaattacaataattgggaattgccaatgaaattttaggcgactcaaatttggtccacaatttgttctccaccgttgggcattcttttgaggcatgcatccctttttgaaaattgacgatcgatcaaaaaattggcattttgacagacgcccgaaattcaaatggacgcaatcggcgcattaagcggctgtgggccctcttatgtgagcatcaaaaaattttgaatctttattcgtatatttttccccataggtcttttcgatcatcgagggattggcggacggaggtgtcaaaatggtgcaaatttgaaaaaaaaatttaatttanaattggcgttaaatgcgtcgccaaaaatgaaatgtcaaatttgccagggcctttcgcgtgaattgtccatanaatgggcgccatgactcttttacgagctgca

SEQ ID NO: 39941 - DNA, 1114 bp, Heterodera glycines
  unsure (1)..(1114): unsure at all n locations
acaagaagtgagactgtctttgtcgtttgtttttatttaattnncattctcaattaggcggaacgactgagggaggaaaagaaatcactcgaattatacgtgtcaaaactgaaagagcagatgaccttcggcaacaccgccccaaggaaatattcaatatcgcccgagtttgaacaaataaagttcgagaagagagtggcggagacgcgcgtgggacagctgaacgaactgctcgacaacgcgcgcgaattggccgaggcgttcaaaagggagctgcagcaaaggaaggaggaaatggcacacaaagaccaacgtctgcagaatcttccaaaactcgagtactttccacggcagtgatgccacgagagcgctacccgttttaaaatacattcgaaaatacgccgactttaacaaaattgtcgggaattcgggccctcccttccgaatcttgaacccaataggcaattaattattcaggcgtcaactcgacgaacttcgacagactttggaacgcgaacggaagtcgcattcattgttggaagaatctttcttaaatttgcagcgagagaagagtcatttgcaagacgaattggtggagacgcttcacagacacgggcagaagcacgaagcgatgctcgccgcaatggccgaagtgccaaatttatttatttttctcatttttattttcgtttttgtttagtcatcgcagcgtgaatcggaattgaacgcgaccgtacgacagttgcaaaacgaagtgctgcagttccgaaaacattcccatggcgccatgggactcgcgccggtgggctccgcgacgaactccttgtcaagtgcgttgtccacgtcttcgctgctctccagctcaaccattgcacttcacaacatttccatcggggaatcgagcatcgaattggaggaactttcccgggaagagctcatcagacgatgcaacgaactcaccgaacggtgcaaaagggaaatacgttctaagaacaaggagaagcagctcaaggaagaggtggttgcaattggacagtccgcaaaaatcagatttataaaattcattggggaagaagggaatgacttaattcggctttcacaacgagttcgacca

SEQ ID NO: 39942 - DNA, 779 bp, Heterodera glycines
gtcgttttcttcgcctaaattccgtttatgtgtctatgattttctagaaattccttggtggaaaatttttggattttttggggcatagaatcccaattttgcataattatttcggattaatgcaatgcttatcatcattatccccccgtcaaggtgcctgtaccgctggctcaaatacaacaccaactgtcccgtgtgccgcttcaatttcatgcgcgcaattccccctgaagaaccggcggaggaacagcaacaatgagaagaaatgacgatctgatcagatccatcattgaaatctgtactatcataatgttgtgtattatgtatatgtctgtgtgttgtgtgtgtactcagtataaagatgatgatactcggaaaacccgaatttttttttgtcggtttttgctgtagatattatttagaggtcattagtggagtccggcttttcagattgttgtcaaaattaggttagctttgatcagttcctctctcagtctctctctctctctctctagctaatctggacaggaaaagcggatctatgcaattttttttttgaaaataatgagatttaggtgtatatgtatatctttttaaaattgctgatcatgaagtgcccatttcaaaattttcgaatctggccaatttattcctctttttctctctctatatcttgcaaaattttcacgcctttattcatttttggtcacttttacaaaagtttgattagtttaaacgcatattaccaatacatacaattcccagtgatcggacattga

SEQ ID NO: 39943 - DNA, 443 bp, Heterodera glycines
  unsure (1)..(443): unsure at all n locations
tgtatttagtattaatcaataaaaaaaattatatcaatttccactggataaaatcaatcaatttatataattaatctaatttttttataatnattgagtttttttnggatngtgtnatgaatttttggtaataataanatagnaagtatatatttatttattaataatgaattnaaaatattattaaaaaattataattttcatttttataaataaattatgaatgacagagaaacttacaaatataatgataatttaaaaagtaaaataaattgttaaaaaattataacaataataataaaataaaatttttacttaaaaaataaattataaaagtatttttactattattcaaaataaaaacagaacttaaactttattaaatagaatcaaatatagaaaaataattttatacataaattaatcacgaatataaatataaa

SEQ ID NO: 39944 - DNA, 952 bp, Heterodera glycines
cgccagccaatgggttccactcgcagtccaccgttcttccacggcgcccttcgaaacctctctttgccgcctttgccctcctcaaaggacgaccgcggggaccaagactcgggaatagcatcggcacggtcaatcgcatcagcggacgcggcacttctcattgaattgcgaaaaaacagctgagaaagaaacggacgaaaaaaattggaggaaaaacgggtcaaaaagaatttgaaagattcactcaaattttattattgttttgccatttgttataataaaagggatgtttagtcatgttaagaagatgagatggcattttgtcattttttgctttttttcaacgcaaaaaatgacgaacggtggggaggaaatgaaatggcattgacacttttgctgaatgccattgccgcaattagcacaaatgacgacacagtctccctcccccccccccatcactttgctcactttgggctaattgccgtcttctttgggcccgtgggaattgcgcagatgccccgattctttctttccattttatttatttattttttgtagagtagagtgggaagtaccggtactggtactgaaaaaaacggtatcgctgagtacctagtaccggttttgaccggtaccgggacgagtaccggtccggctttcccagccaaaaagtaccgggttatcaactgcaaaaattaccggcaccggatttttttacaattaccgatggccgctctacggaacgggccaactccgtctgagccaactttgagtcagtataactcttgaagttattgaccgaatcaaacaatcttgatatcattcgaaagctcttcacaggctctattaacctactaaaaattacagaagatttccaactataaaaaaaagatagaaaaaaaaaactttgaaaatctgccttttttgcgggttttaagtgacaaggtttttt

SEQ ID NO: 39945 - DNA, 910 bp, Heterodera glycines
  unsure (1)..(910): unsure at all n locations
ttacatattatttaaaagcacttagtgaataaaaatcgtatttcttgaatcattattggccgcttgatataaagcactttgttttattttttttcgccaaagttcaaaacatttttgttcgtgaatcctataatcctccaaagcaaaattagatcgttctatttgtgatttgcgccaaagttcgaagcgagctttttccctttttctaaattcttgtaaatcattttcagattgttcgttttttcttttgcgctactgctctgctcttttcctttctctttctctaaaaaccttttcatctatgttttgtgttttagtaaaaacagattgagttgaagattgcaaatcaaatattgattgagcattatccatttcattgtcagaatcatccaattttataacaacattttctgtctcttgaaattccgaccgctttttaaaagagcttgaacctttttatcagcttttaaagggagcgtataaccctttttatcatcaaaatcatttcgtttttcttcctcatggaagttttgttttttgcgccccattttaataagacaataagaaaatataattaattaatatctaaaattaaaaataattaaatatctgatttataaaaataaattgaattagttaatagctgcaattataatagctaaatatgatttaatgatgtattaaatttaacattatattagaaccactctttaggcaaaaactaaataaccaaataaattaggcatactctttcataatttttttttgtttttcttttattttgctcacatctgtttaattgcaaaatcaactggaaacaaagaaaaagaattcgtttcaataaaaagtcgatatgaaaaaggggcggggcgtacgtatgtatacatccaccanaattagtataatggat

SEQ ID NO: 39946 - DNA, 1150 bp, Heterodera glycines
gcaatttgctgcaaatgcagctcccctcgtccaaattcgagctgttgacccaccagttttgccgtactttgttgtgcataaaattttaagtggttcagttttgttcagggataaaaacattgccaatagtctaagcaataacaaatttacactccttgaacttatttgttagctttatttcaaatgccgataatttttttgtttgaaatgtttaatcctaaacccgtagcgaaatccccaaatatggttttttgtgcgggatcccgcaggagccgcccattgtatttttttattcaaagaacattaagccaagtacctattttttgaatacctatgtatttgccataaataaaatttagtcattaatcggcaacccagcagttcttccctcactagcgtgggaagagtatataagtaagaaattgttagggtttcttccatttgccttattctccaatatcagaatttgcctccctatttggctcttccatttgccttattctccaatatcagaatttgcctccctatttggctcttccattgccttattctccaatatcagcacttgcctccctctgccgatattcgtccaaatgcgcgacacggataagaagaagaagaaggaagtaataatgcattatttaccacagtttaacaaaaaaattttcaaatttcaggaaattattgctgctgggacgaacaatgtagtgagcgaacagcagcaggacggagtccccggcgacgaacactcggactcggacaattccactgaagaacgtgcgcagaatggagtgcccggcgacgaacactcggacaatgccactgaagaacgtgcgcagaatggagtgcccggcgacgaacactcggacaatgccactgaagaacgtgcgcagaatggagtccccggcgacgaacactcggactcggacaattccactgaagaacgtgcgcagaatggagtccccggcgacgaacactcggactcggacaattccactgaagaacgtgcgcagaatggagtgcccggcgacgaacacgcggactcggacaattccactgaagaacgtgcgcagaatggagtgcccggcgacgaacactcggacaatgccactgaagaacgtgcgcagaatggagtgcccggcgacgaaca

SEQ ID NO: 39947 - DNA, 1107 bp, Heterodera glycines
agtcagcaatcgttgcttactttgccagatcggacgggtgcgcatgattccactgttccaagcaccccaccaaaagcaaaacgatataacccaaatataaggaaaaatttttaaaaaaatttttctccatcttcctttttgatactaaagcatcagagtgctaaaattgacttgtaaataaaatttggtgcgctttagagcactttctgaaaaaatatttatgaaataaaaaaatcgatttattcaagtgtccgtttggggtactcaaacaattatggggagcaaaaatccaacgcagaattaaagtacagactatagggaagctattcccgaaggattcggtctccccataaatctgggcgcatcggttcggggggactgcaccgaaaacaaaaaaatcgattttttcaagtgtccgtttggggtactcaaacaattatggggagcaaaaatccaacgcagaattaaagtacagactatagggaagctattcccgaaggattcggtctccccataaatctgggcgcatcggttcagggggactgccccgaaaacccaaaaaaaaattttttggataaaaattatttaaataaactgactagataatatttaaaataggttatttctcttcctttcagtatccctgcaaagtttggtgcgcttctaatcagtttctgaaaaaaagttaagcctaacatcggttcagggggactgccccgaaaacccaaaaaaaaatttttttgaataaaaattatttaaatgaactgactagataatatttaaaataggttatttctcttcctttcagtatccatgcaaagtttggtgcgcttctgatcagtttctgaaaaaaaagttaagcctaaactttttggcctgtttaaaaaggaattaaaaatttttaaaaattttattcatctccctttttgataatataagagtcaaagtacgttattcatattggaaataaattttggtgcgtttcagagcagtttgtgtaaaaatacttaagaagtaatttagtaaaaaaacatttaaaaatatataaaaaacataaacatgagaagtcatgggagattatgaggaaataagaataataggccctag

SEQ ID NO: 39948 - DNA, 1292 bp, Heterodera glycines
  unsure (1)..(1292): unsure at all n locations
aaagtgccgtcgctcaacgctcttgtattttcaacgattgcaatttcaattggtgaaaatggataaagggaataaggaggggagtaggattagggagtaattaagtctggtataaggaacaattagcggggagttaagggggggcggcacaaggcaattgatttgttgcagtatctccaaatgaccataattgatattaattgccttagttattccttttgcgctgcgagttctgtgattctttttagagggtaaattagtctgaggattggaattggcagaattgtactttcatttgtgtcttcaatgaattaaggaattaattgttttttgttttaaggtatacgttgatctggtttccgcggaatagtcccaataaatctcggggccggagggggggggggggtcggggagcaactctacgtaaaattccaaaacagagatagcagttggggaccgtactttctatattcttacagtacatatctaataaaaaatataaaaaaattacatttttcgaaactcaaatttttgcatgaatagaatttgttaccatgttttggagttttaagttgcttttttcaaaaataataaaggatgttgtggtccagctagtccgaatgcgcctcggggaacttttttttaatttggctcaatttacaaaacattttctccaagaaacacgaaattttcttaagtaattattttttcgtgaatgactgctgttgtcccatgttatgtccctgctggacattgattggccatgcatgacgacattctgcacaacgttggcctagacagtcgtgccgcaattccgacaagttcatgccgtcgcacagctgtcatcatttcacttcatttcggattgtgtgtgcctagtttagtcagaaattaaaccgaaaatgacgaaaaaatattgttaagaaattattttaatttttaaaacatgttattgtttaagcgaacattaatatcattaatcaatttaattaaattaaatcattaattatgtaaataattttgacattttaggcacaaaaactcgcaaaaaagcgcctaaaaaggcagaaaaaatcgtaaagcattaaatcggcacaaaattcactgaataagcattaaaaggcaaataattttttttattaaagcctttttaggtagcaaaaacacaaaaaacccaaaattcattcctttgctgggagggtaacaaagttgtgggtcgataaagaacttataaaaacanaatgctttaaatcaatttaaaacaaaacttaaaacttcactgggtaatcaga

SEQ ID NO: 39949 - DNA, 1145 bp, Heterodera glycines
  unsure (1)..(1145): unsure at all n locations
ttatgcggtctcggtcgtggcattttttggtgtacggttttagtcgtagtatttttgatggtacggtcttagtcgtagtatttttgattgtacggtcttagtcgtagcattttnttggtgtacggtcttagtcgtggcattaaatgccacggcgacgactcgtatcgtgctatggatgagttgggtttggatgagttgggtttacccccttaaaagtgacggtttttgaaatttattgatattataaagggggagtctttttcgagatcttttctgattataattcgtgaaaacttattccccggatattttggggcttcctgttcacgaatttgacatcaattttgagcaattcagaaaccaaacacgaaaaagtcgagcattcagttttcgagttcatacttttttgttcaaattctgattaagggattaggaatttgtcaaaattggtgtcacattcgtatcagaaagcccaaaatctctcgggaacaaattttcattactcgatcaaaccaaaagggtcaccattttggtttttaagaaatttcaaaaatcgcaaccacttttaaagtatagccggcattttttcccggagattccaatttcgaatttgcagtgatcaaactctttttatggcaaaactaggaacccggtaagttccaaattcattttgatggaaaaatgcgcaaaaattcaccgcaatgcgtgacacaaaattgccggtcactcgtttttcctcctcggtgcggccaaacaaaatgttcatcgcttttttgatgcgtgtcggccgattgggcggcataatgaacagtttgttgaacttgccggccgcttcgaccagcgcatttgcttttggcggtgttgccattattatggtcaaatgcaaaaatgtttaggtatatgtgttgcagaatttaaaagggaaatgttaaagcggtaaaataagtcaatcgatatgtgtttgcctctcttacgaataaataggtaaacaaaattgagagaggaggagggaaaaatatgaatgatgaaagggaagagagggaaaggggcaatttgtaaggaatgactctgataattagggcgaggatttcggcaatggtatagattattggtcctcgacaaatttaaaaaaaaaaaaatttgag

SEQ ID NO: 39950 - DNA, 1171 bp, Heterodera glycines
gttggaatttgtcatttcctgcaataaatgttttcacattaatgtttaaaaaatttgatcgggtttaggaacattcaacaaatgcatagataaattttttgaatattatacaatcgtgctttttgctctctatcaatttattataaaaaaattcacttcccttcgaaattgaaggcagaatgctcatttgaagctacgcaaatataaattaatatttgctataagaactgactatttagtcaacagaaaataattaaataataaaattagaacaaaaaatgattttattttataatgcacactgaagatgcataataagctaatatattcgaatttattttgaaataactgttcaacagattattagttgtttctaagaaataatgataggaagcttatctgaaatgtgtgctcacccaggttggaatttgtcatttcctgcaataaatgttttcatataaaggtttaaaaaatttgatcgggtttaggaacattcaacaaatgcatagataaattttttgaatattatacaattgtgctttttgctctctatcaatttattataaaaaaattcacttcccttcgaaattgaaggcagaatgctcatttgaagctacgcaaatataaattaatatttgctataagaagcgactatttagtcaacagaaaacaaataaatcataaaattagaacaaaaaatgattttattttagaatgcacactgaagatgcataataagctaatatattcgaatttattttgaaataactgttcaacagattattagttgtttctaagaaataatgataggaagcttatctgaaatgtgtgctcaccagggatgggccgaggtttcgcttttcgcatttcgcctttcgcattattcgcattttttggcgtttcgcatttcgcttttcgcatttcgctttttggcgcgaaatgcgacttttacacccctaagaattggattaaattcccataaaatttttcaaaattttacctataaattggctaattttcagtgaaaaactgtttataaatgatcaaaatttccaattttttccccggcggcgcctatcggcaccgccgagcccccaaaactcctattttttcttagaaaatggcccaaggaggcaaaatttggtaatttgatgaaaaactgttctcagcg

SEQ ID NO: 39951 - DNA, 879 bp, Heterodera glycines
  unsure (1)..(879): unsure at all n locations
cgaagggataacagaaatgaaaaaattagagggatttttttaaaaaattctgaaatccgtcccctctgcatctgttggccttatttttctttagtttggctgctgaaatcagttcatccagctatgagcactacaaatatctgaaggtgcgtttctctttctctattttggcgtttcgtttcaattttatctttcaagtcccttaaaaaggttctctgcgatttgctttgcgcacttggccttcatttggccgaagtttggtcctatgtgatgaaacccccgcccaatttttcgctttatcttgcggcactttccgccttctttcggcacccctcaattgtgaattacctcttcaaatttgctttaaaatccttaattttttagtatattcgggccgaaactgcccaagtgctcgccactttttttggccatgaaaggatatcaaaaaacgccgatttccttgtttctatccctccgctcattcacttcttaccaaaggcgatgaataaggtggtctttcatttggtgtgtacattctctacttttgtttggccatcattttcagtcctgctgcacttccgcttctgtggaccaacccgacctgacggagcagtactcgcaaatggactacgaaaacgaaactgagtgccaacgcgaatacattagtaagaccgatgaatttgcatttgttgtcgaaccataaatacacaagggatgcaggggcgtatctagaaaatttttattttttcgggggggggggccctacctgagacattttttttgtttgctcttcaactgaaggcctttttttttgctatttacccaanntaaaatactttttttcccgctgcntggtaaaaatccactttttcactaaaa

SEQ ID NO: 39952 - DNA, 1011 bp, Heterodera glycines
aattattttctatccatttcaaagatttcatcctaccgatgctttctgaaaaatcctcggttgagatgagagggaatcgaattttgagcagtgccgggccaagcactgatcgacgattctcagcggaacattcggtggcattttgacggcacttttcgtcggcccaacggagtgcctaatgatggaaaacaaacaaatcaattaaaatatcaaaaaattaagttaaaattacagctttccaaatttcaaattcattgctgaccaccaattgatcacggtcgaataattcacatagcaaattctgatcaatttgcaagaattcctctgatccgaacaattggcccgcattttgacaaatgtaacgcaaacattgatgcgaaaaattctaagaatgtgtaatattgttaatagtacttattaaagtgcaataattgcttatattcttgctgattttctgaattaagggctgtaaatttttttaaggaatcaaattttaacatcaaatttcataaaattttaaatttttcccctgtagcgcctacaggctcagccgtatcgacaaaccctaattttctaaattttccaccaccctccccttattttaaaatgaattccatttcaaaaacttgggaactctacttaaattagaagataaagaaatcatcgtctttcccacctccaagtcgaaaagacgcgcctgagcaatggccaagaaaacattggacaaatttgaaattggaattttcagacaccgactgatcagccccgaaatgttgtactttctggctaaaaaatattcgatgattaatgctagtagggattcgaaattcgtcgaaaacagtcaaaaattcttgtttggtgcccttgaaaagccaaagaaatatatttttactgactttttttcaagaaagggggggccctaccatcggcagtattagttttgaacgagaaacaccaaatttgaaaatttaattccgacattttactaattcgggtccataatctaatttt

SEQ ID NO: 39953 - DNA, 1498 bp, Heterodera glycines
  unsure (1)..(1498): unsure at all n locations
cgctccaatgtccgcgggggggccgaagtcggcgcccataagcacttccaaagcgcggtattggcgcgtttgaatattttcagtgtaatgatggaactgaaaatggtggcggagactgatcagccagcaaataaatgccttttgctcaccgtccaacacgcgtttcccaaatcggcaattttcacgttaatttcgctgtttattggacagaaaacactctcttcgcatgccgaagacggcgacgtttgtccgttacgcattggcacccgcgcactctccgccgccatccgtgccacttctcgcgggtcgagcgcaacgagaacattcggaaatggatggaaagtgagagaaagcaaagggaggaggggagggcacctcaggcttaatgtccgtgtgaataatgcggcatttgcagtgcaaataggcgagaccctgaaaaacagaggagaaaggcatttaaaatgtggaagagaaattgacattttgagcttttggcctttgtttttgtttaaataatttgtttattttttattagttaaataataaattgttatcaacgatttaataaggcagatcatcaatttcatataaatattgtggaataaaggaaataaacgaattttcgccacgcattgactcctttttcaagagttaataagaattactttagtttattagtttaattggatttcccaatacttcggttaaacgaaaaggactaatgcaaaaatgaataaacgtacgaattaatgggagaaaaagtgaatttaaagaatgatcaaattgattatcatactaaaaatttgtttcgtcgcgatcgatcaaaagtcgcgtcaccacggttttgtgaacagtgttttgaattggcggatttttgctaaattttaaacttgataaaattatcgtaaattagattttattttattaaaaatgttctgttgcttgttgaccagtcgagagaatataagtcaatttttatattttttgaattgggacatttccaagcaatcattgtcctaaggaattaaaacaaaactagcttattataaaagtaaaagcatttgcacaaatatttttaaaaatgaataataacaaaatttgccctttatataatcaagtataaatgtattaaaataattaattgatttgcttttattcattgattaatcacattcaaatataattagttaaaaattttctgataactataaacacattattaaataaaatgacaatgaaatagctagcctgtgaatttaaaataaaaatttttattcaattttccttcatttcaattttaatttaataaaaattgaacaacaacaagataacattttaggattattgatagaaaaatatctaacataagtccacaaatttgatgttgaaaattatttttattgggatgatagatgaaaaataatannataagtgcgagaaattttattaattcttttnntttgtatgatcaaaatgaaagctgataaacaaaagcgat

SEQ ID NO: 39954 - DNA, 1313 bp, Heterodera glycines
  unsure (1)..(1313): unsure at all n locations
caaagattttcaataaaaaatttcaaatgtttattaaatcatntattttctatagggatcggatttatttaatgattttaactgatattagtactgtgctattactctatttatggagacgcacattttcgctaaaacaatataaaaagtagattaagtttcttttataatttatgtttaaaaattcgtatttgaatttttatgttttttggtctttatcgaaaatgagaaaagaaatttttattcgatatttttgtatatgtatccttgtaaatctatcaaagaataagtaaataatattaattaaatattaatattttgggataaagagataaaattataaagataaaaaaaattacaattaattctcttttaaattgaaaaaacttttatattcatattttaaacaaaagaatgttggaaataaatttacaacaataaatcttcacatgtattttaaaataagtgaatcaaaaaatctctaaacgcaacatcgcaatgttggaaaattttattatcaataatgttcgtctttgtagcatggataagttataaatatgtcagataaatgttatcttattatggacaaaatgaatcagaaaaaaataagtttaaaatctaaaaacattactttataaggcaaactttaaaattatttgtaaaattgaaacaatccaaaacgtaaatagaaatattatttatatttaaaaatatacatttttgtgatcttatatcaaattaaacaaaaaataatttattttatttcgaaaaaaaattttaattcacatttctcaattttgcacatcaaaagtcgattttttgtaaagtcacacctttgccacagatggattgaactgctgacgaatcgcaagcctcgacaagaaaaattggagggatttaaaaaagttaatgagtgaaaataagtttaattagataataaatttacatgcaaaattttagatgaattagaaaaacaattttgtaaattgtttaaaacaataataatagtctattctagattaaatataccaaaatcttattttaaaatgttatcacaatataaatattctgtcgtcaaattcgttatttatcagtttaatttacttatagaaaatattttagaatggaaatgataaaatatttgaaatttcataaataatagaaaaataatttaaagaggtgtaatatttatcatgtcagaataatttaaattcgtaattaaaaaatatgcttttaattaactgtgatatatttanatanatanaataattccgttataataatttcccnnaattttaaatcataaatttttg

SEQ ID NO: 39955 - DNA, 860 bp, Heterodera glycines
ttctgagatgcggttggaattcctattactgttgagcagaaaatgagatatccaattttccaaatttttcccaaacaaacgcgcagagaaacaaattccagaacaattagtatcggcgtaattattctgagaatgcggttggaattcctattactgttgagcagaaaaagagatagccaattttccaaatttttcccaaacaaacgcgccgagaaacaaattccagaacaattagtatcggcgtaattattctgagaatgcggttggaattcctattactgttgagcagaaaaagagatagccaattttccaaatttttcccaaacaaacgcgccgagaaacaaattctaaatattctgagaatgcggttggaattcctattactgttgagcagaaaaagagatagccaattttccaaatttttcccaaacaaacgcgccgagaaacaaattccagaacaattagtatcggcgtaattattctgagaatgcagttggaattcctattactgttgagcagaaaaagagatagccaattttccaaatttttcccaaacaaacgcgccgagaaacaaattccagaacaattagtatcggcgtaattattctgagaatgcagttggaattcctattactgttgagcagaaaaagagatagccaattttccaaatttttcccaaacaaacgcgcagagaaacaaattcgagaacaattagtatcggcgtaattattctgagaatgcggttggaattcctattactgctgagcagagaaagagatagccaattttccaaatttttcccacacaaacgcgcagagacacaaattccagaacaattagtatcggcgtaattattctga

SEQ ID NO: 39956 - DNA, 1125 bp, Heterodera glycines
  unsure (1)..(1125): unsure at all n locations
tttggtcaaggattttttttgtttgcgtttcaaatatcgtaagattgtttgatagggccagacaagagaaggcaactgttggtaccaagtttgcggtaaaaaaatgagaaaaaagagataaccatttttggtcaagaattttttttgtttgcgtttcagatatattgtttgatagggccagacaagagaaggcaactgttggtaccaagtttgcggtaaaaaaatgagaaaaaagagatagccattttttggtcaagaattttttttgtttgcgtttcaaatatcgtaagattgtttgatagggccagacaagagaaggcaactgttggtaccaattttgcggtaaaaaaatgagaaaaaagagataaccatttttggtcaagaattttttttgtttgcgtttcaaatatcgtaagattgtttgatagggccagacaagagaaggcaactgttggtaccaagtttgcggtaaaaaaatgagaaaaaagagatagctattttttggtcaagaattttttttgtttgcgtttcaaatatcgtaagattgtttgatagggccagacaagagaaggcaactgttggtaccaagtttgcggtaaaaaaatgagaaaaaagagatagccattttttggtcaagaattttttttgtttgcgtttcaaatatcgtaagattgtttgatagggccagacaagagaaggcaactgttggtaccaagtttgcggtaaaaaaatgagaaaaaagagatagccattttttggtcaagaattttttttgtttgcgtttcaaatatcgtaagattgtttgatagggccagacaagagaaggcaactgttggtaccaagtttgcggtaaaaaaatgagaaaaaagagatagccattttttggtcaagaattttttttgtttgcgtttcaaatatcgtaagattgtttgatagggccagacaagagaaggcaactgttggtaccnattttgcgggtaaaaatgagaaaaagagatagccattttttgggtcagaattttttttgttnngcgtttcaatatcgtaagaatgttttgatagggccagaacagagaagggcaactgttgggtacccaagtttgcgggtaaaaaaatgagaaaaaa

SEQ ID NO: 39957 - DNA, 114 bp, Heterodera glycines
ccggccttcggccgggagaaaatggttttagcaacgaaactccttgtcaatataacatatatagtaactagcgggtgtgcttacatgattctttagtgcttaaagcgcttcgcg

SEQ ID NO: 39958 - DNA, 1551 bp, Heterodera glycines
  unsure (1)..(1551): unsure at all n locations
ctcacaatttccctcgtcgtcgtccatcgatgcatttggcattatgtcgccctccgtctgtttacgctgtctctctctcttgcgccattttgctctccgattttggaaccaaacctttgaaattaattggccccattaatttgttgcttttcgtatgtctgtcaccttttttgtttctctgtgctccacctgaacccgcgcttccgtcagatcgatgcgcatcgcaatgtcttcacgcatgtaaatgtccgggtagtgcgtctccgtgaaagtgttctccaactcgcgcatttgtgctgaagtgaacgtcgtgcgaatgcgccgctgttttcgtcgctcgttgggatttatacctcgaagcgtttttcggattattggcaaaaaattatttaattaattatttaccggcggagagtgacgccgagcaaagcaacgaatggtcggccgaagggacagaagccgagccgaaactgagcttaatggaggaggacgacggattgtgctgttgtggcggcaatttgtagggcgaaagtgccgaaccgccgataaaaagcgaactcatcgcagcggaagaggaggaagaagaagggacggaagagttggaggaggacgagggattggagttgttgttgtacgggtggaagggaccattcctggagaaaccgaaacagggaaatacaactaatcagaaagaggaaatgattagggagagattgaggagggatcaaagaaagaggagagagagagagaaggaccaactaatcaaggaaagaggggggaggggctgatctgatcatagagagtatccgatcgaaggggaatataaaacgttttaaagcggaggcacaaaggcaccggcggagttcgacggttcgattctccctccccggtttaccattatggccaacctttattttgatcggcaggtcaaatggcttaaagtagagtgcagcgggaccgggacctaaacacggaaactgagtaccgaggtcccggttttgaccgggactagtcccggttttttcccggttttcccaaccaaaaattcccggtttttcaacccgaaaaggtcccagtcccggttaaactcaaaattcccggtccctctgcactctagcttaaaggcttactgatagaaaagtgtagcaaaatggccaataaaattcgatgccaaaaaagagaaactttggcaatcacatttccatgaatcggcacagttttgttgaccttgagttcgttttggttccgccgctcgttgtcccgccaaagtgtccgtattggtgggcgccgtactgtccgtacatcagtcccggtgccgctgcagacattccgtacagtccgttggacgcaaaacccatgaaaggcgtcagcgaagcggcggcagccgctgccaaagaatgtgaaactgaaaattgagaattcggggtgagatcggagaattgctccgtatgcctctgacttgggcggnggaagtgcaaaatggcacagggatcgctgngataaaccccattctttgagtcttcagattttagcatttttttcattatcgga

SEQ ID NO: 39959 - DNA, 1092 bp, Heterodera glycines
tgaccggaaatggagcagtagaaaattcatgtgaatctgtattttttatggaccattagaaactttattaaaaaattgacaaacataggtttttactatttctgtccttttgttatacaatactattctacagcaccttattgcactaatattgctgaccgtctttccaatgacgcattttctacttactgcatctttccactgacgcattttccggcagcaataaaaatgtaattttcattcgcctaaaatagcataaaaaaaaaaaaaatctaattgactatgaaaaattcaaatattttccaccaatccttgtgggtcataaaaactaaattggctctcctaaaagagccaatttatgtgacaaatgccttttttttctgtgacctggttagattgtgttttgctgccattaatcgctttcaaatccttacacattcaaacacatttttcttcaagcaaaaactgattcccagctgcctaatgtatcaccccattagagaaaaaccccgtcattttctttctccctaaaaatttgaaattttggaatgggacaaaaatgggaattgaaaaatttcattgggccaatcactcggcaataattcctcgagaccatttgcttgttagaggtaatcgaaaaatgagttggatactcgagattgtactcccgagacggacggagtgactcagttcaaatgaatcgagcattcgcgagaaaagcattgccaattttacgcattcagttgggccactaagttcgcgttggagactcgaggtcgtactctttgctctaccgacgaattaggagatttcaggaatgacttgaccgcaaaattcgtggatttaattagtatagtgaaaagaaaggaaattggcaaaaaataaatttgatgtaaaaaaaataaatttttagggatgtaaaagtctccagagactcggtacgagacgaccccaaaagacgcgagaattttctcgagccaaaaccggaattcttgaaatgcccaaaggaaataaaaattcactatcattgggtgggaagaggtggaaacgagcatctgtgtgttgggcttacaattaattctccaatttgct

SEQ ID NO: 39960 - DNA, 960 bp, Heterodera glycines
tttttgtagaatttctcattgtacgaattgccattttttacgagttgccattgactcaatttcttgtccattgtaggtgccaaattcattagtaggacttatggtttaggtgtttgcctattttttttctgagctccaggtggcccgaaacgcacaaaatttgattttaaaaataatgtaagtcaatactgattttggcttaattttgtttcatttttctaaaaattttgtcattttacacccctaaactaatgtttttagtgcctaattttgggtttttttagatcctaaagccgacctattttggcagttcttagagcctaaaattgcatcactaatgacaaattcattagactgtccggtcatatcacttttcgtctcacaactccatttaagaagaccaacattctcattccctgtcatttggaaatgatatttggggtttgtttctgaattcatgcacaaatccgtgtaaacactccaacgaaaaaatatatatttaattagcaggtcaaaacagaaattcatttcccaatttaattagatcgatcacttctcaggaattcattcacttctgctgatcacttgggccaagcattgcgtcgagaagcctaaaaaaacaaacagaaaatcaaatattcaaattttcgaatgaactgacccgtccccgacatcctcatcattcatttcaatttcaataaggttccactgatcattaatatgccagccaattgcctccgtttcccattttccccatttgtccgtgtcgcgcacaattggacaacggatcagcagaaaacgacggctattgtttgccctttgcaatgccaattgttcatgagtcaattcgttggtcaaattaaacggcataaaagagtcaacggggtcagcaaaagacggcgaaaaccaaatgacaacaatgaaattggcgggggaagaagcattgacaaacgcctaaaa

SEQ ID NO: 39961 - DNA, 1247 bp, Heterodera glycines
attagtttgtatccgtatcccgtatagcccagcgctttctttatccttaaaacatcaatcctaagtgaacactatattcacctaatatgttatggcggttttgtaaaagctttcaccggttactgtatttgtgactgtaaatacttcggcacctacagaagccaccgcaattaccataattagccgataactaacgctttaaccatttcatcttttaaatggtgttgttttcgtttaacctgttaaacgaattaagaagtgcgtgaacggacactgcaccaggacccgtatttgcgcttggtttaccaactccaaacagcccatctgatcgcattgggcattgaggtgtggtggtgataagaaaacaaacaatgttttttgatcaaagacagaattttttggaaagaaattatgacaatttttggtatttgtgagagtcgaaaatgcttcgaggcaatgatttaattatgggctaatgtcccaatcgtaaggtgctcactctgtacttgggatggcgcgacgtgaactttgtttggctgctgttgccgcttttgttttgcgctggcgcaatttggtaaatttgtcgggcacgcttatttgttaggaaaattttgatgggggccaactcatgaatttggcaaaattggaccgaggagaaaagttaagttcaaataatttttcggtttaatttaaagggaccgaatttcggaatatttgtgcgctagcaggagatatcaaaaatgtttatatatttgtttgctaatttcaatttggaatcattcgaaaattacacgtactttaatagacatcccgaactcaaatagcaattaattatcaatggaagccaagattgatcactatttggtgaagaacaaatagaacaaatgatggggctaaatcggtattagttcagttggtaaagtccgtttaagccagaggctccgcttcaaatccgctcgctcaactgtcttttcccaacagttttatcaacccagtaaaatcaggcacagccttcctaatgcagtttcaaccaaatgatttatttttattttatcgaatccctgaaactccaatgatgatggtccgattttcttctcatttgtcaggattgtctctcagcgatggtaccatcagatggacggacgttcggactttaacaaagtgctgagcgctgacaaaatgccagttcgtgcaaaggccgcttcatgttcgttttagagaggcttctcatcaagctgattatgctt

SEQ ID NO: 39962 - DNA, 960 bp, Heterodera glycines
agaagtattatttaaaatcaaaaataattttagtaaattttttacatttcagttcaaaaaaaacaaacaaaaaaatgttccaattttgaaaatgaaatagtgcacaaaaagggagggatggttagacgaaaagagaaattttaggaagggacgcaccccatctgataattccccttttctgttccataagaggccagaggcgactgtgttcgttgacaagtaattgtccaattaaggtacttggactttccacagtaaaatgtggtacaaattttggaactgttcctcctcacggtgggacttaaaaacatggtaaagccaagttcaaaacttcagagaattatttgttctaaattctacaatttaattacttaaagccaaaagattcgaaacagaagcattatttaaaatcaaaaataattttattaaattttttacatttttgtttcaaaaaaacaacaaaaaaatgttatttgcaagttttggtttgaaaatttgcatggaattccagaattgtttcagaaaaactgccaagggtccaatttccgtttttccctcggggtgcctacgctgaggcaaaatgaatataaataagtttagagaatttacgtcgtcgccgaatcgtccagttggacagttcagtccccgaaggcatttggacatttcagtcccgtgtctgtaactcttcagggattggttgccgcaaaaaattctttcggattcttccattacagaccgagagctatcgattggtatatattttgaccatttaggtctccgggccatatcaccgatatttacctaagagattgaaaggggttgtatccgatcatatgatcttcaaaaaattttgaaaaataataaattttcaaacaacaaattattgatcataatgaaccaaaagacagtgttttcttaattttaatactggttaggacaggtatcagggcttgaaaaaaa

SEQ ID NO: 39963 - DNA, 1405 bp, Heterodera glycines
attcgacgaccccaaacaaaaggaaaacttcacttcgctttttccgccaaatttcaccggacattgtgcggacggactttttaaaatgtttccaaagagtgcgcataatatttgagaagcccgaacatgcgaccggtgagaaaaaagcaaatgggaaaagggacgaaaaggtcggacaaatgagtgatttttggccattcctttcaattggcacacatttcttatcaaaaaacccaaagtccaaatgtattcaaatttagcagccaaattgttggtggaacatcattctttcaacgggacaaaaatgaaggcattcttcgccaagaacatcaaattgacaaggaaggcgcaccaagacgaggccggccatttgacgttgccgcctttggagaaacaatttctcatctcaccgcccagctcaccgcccgtcggatgggtaagaaaaattgctatttccaaaatgttagggtcaaatgcgttttctcaaccagaatttagtatcatggcgcctgatgtaaaagaacccagaattattctgttatatggtgaaatgtttgcttttgcgtttttttttgggtcgtccaatttgatgagaacccacattaattcaaaagctgcctaataattttcacaattttttctgggaaaatggtacacaaaagcaagagcatttccaatgccttttctgttgtttcagattcaacacgctgaaatggcacccgtcgtttgcgatttcgatttaatggcgcgcctcgcgtcgctaactgtggacgaaaaattcgaattgttcgaaggcgacgaacaccaacgacgcccgtccattgttatcactccgtgtgaaaaggggggaggcggaggactactcgcaaaggacggaggccaaatggcaaactcagcggacgaatcggaagcagaaaaacagcgacaggccgaattaaggtcgaaagtgccccttccgcacacgccaagaccaccgactttgaaggaagagtgagtgagtcgaagggcagaaccgaatgaattttggagatcgtattgctatttctcacttcgacacaatttttggttcttttaataagcttcttattttgattagagttaagccccgatactcgggggaaattcctcgacagaatttgtcgaggatggcggagaaatttaaacaaaaatgtcggggagtaatactcttcggggtaaattttcaacgaaacattgagtcaggcttaactctattttgaaccgcaaaatatttattcatttttgtttgtgcatcatctaagtcagttctgaaaccgggctgtccaaactttgttagctagtcattgtcggcatgtaatgtgctcaacgacatttataatttttgtatcctttcaatttttaatgattaattgttctaatatgtgca

SEQ ID NO: 39964 - DNA, 654 bp, Heterodera glycines
ttttttttagagaaaatcggcaagtccactggaaagagcacaaaattctctactgatttaacttttgaataacggggctacgacttctacataaaaagctatacttagttgaatatttgaccaccataaaaatgaacaatttttgatctgcgccgtaactttttcaaaaagcatccaaattaaacaattttggtatcttttgatagccctaagtgtcctctatttacctgtaaaattcaaaaaattcggttgtgtttcaaaaaggttgtggctagtattttcataaatttatttggtaaacctttttgaccacaacttctttgaaactcaaaggaattttttgaattttaaaggcaaatagaggaaactttaggctatcaaatggtaccaagattgtttaatttggatgcttctagagaaagttatggtgcatgaaatttatcaaaatataacattgtcgtgtcttttttcgtggtcgtgtaaactgaaatagagccaaaaatatttattgttcttattagcttattattaaattataaatttaaaataattaattaatcattagaataactcttccgtactgaaatgacccgccccctctgatcactactcatttgcctttttgtcacttcgacacagcacctctaagttcaa

SEQ ID NO: 39965 - DNA, 753 bp, Heterodera glycines
gattaaattaattgttgattggataatttaagaaggattttgttttagttttttaaaatatttaattttttagtcactgaaaatattttcccgttttgtgcctggccaattttaaataaaatttctgcccgaccattttccgtaaaaataacaaagaaaaaattttgattaatttttgtataaaaaaaaattcgtctcgtctcgtgtctcgtattttatttccgtctcgtttttctcgtgtctcgtgtctcgtattttattttcctacttgcaacatccctgctgtacatgctggacgagtacggtagacggcttggtgccccgcccttcagagtggatcagatcaaaggaagcgaagccggcggttggtgggacaccaacttttggccattgttcccggaagtctgtgactttataattaacttttggccattgttcccggaagtctgtgactttataattaacttttggacattgttcccggaagtctgtgactttataattaacttttggacattgttcccggaagtgggtgcctttggaattcgaatattttccaactttggcacttttaggcattacgccaatccgaaattcgttggttttggttgcttttccttctccttttgctgttggctctgattctgctcgtccttttctgtgccattcgaatgcaaaacaaaaaacggcgccattctttgggctatcagttgggacaacggacgaaagaaaatggcaaaaaatgagtgaaaa

SEQ ID NO: 39966 - DNA, 999 bp, Heterodera glycines
  unsure (1)..(999): unsure at all n locations
attgtgcatgtantgtatggggaagtaatcggaaattagctacttttcatcaatttgtcgaattgtttggggagataatgggtgaatttcatcttggattaaaaaattgctagttttttggttctgattctgtgaattggtgcaattttgtaatttcaaaagccaataggacgggagaacctctaaaaggatggccattagctcggtcaggtgattaaagattcatggtttggaatttttgtttgtcaacaaaatccaacattattggtatcattcgatagcctaaggtcaatttggaacaaacttatggccaaaagtacataagaaaaaaggttttcagtcatttttggctataactttttttgagccttaacgaattttagaaattttcaagctaataaaagacacttagggttaccgaatgatatcaacaatattggattttgttgaaaagaaaaaaagttatatctgggactggggccaaaatgagcgagtccgaaaacgtaccttttaaaaaaattcggaactcgaaactgaaaaaaccgacaattccatactgtgttttacggtcccgagctatctgaactttttctcttctttttataatttttgttctttttctctcgctctcttttttctttctctctctttttctttcattctctctttttctttcgctctcattctccctttttctctctctcgctgcgctgcatcttaaccaatcgacacaaaacgacgcggtcccatcgcatcattgtcattttccccagcacatcattggcatttatttctccatcaaatgcccctccctccccctaattccattttcgttttcctcttttgcatataacctcaatttttcttcattgttttaaataattaatttaattttccaataaaagttagaaaagcacataaatattataaaaatgcattcaaaattttcaaaaataatttttgcaattgtaatcaacgaaaaaatttttgctagtgata

SEQ ID NO: 39967 - DNA, 976 bp, Heterodera glycines
  unsure (1)..(976): unsure at all n locations
atgcaaaancggaaaaacaagtttacatacatattttgccaaatgtacaaaaatatttacaaaaatagcgccaaatttttgcagtttattgcttaagtgattcaagaattaccagaaaggaataagacacaccatcaaaaacatttttagatttatattaagacccggaatttttttttacaaaaaatttaaatgcaaaaaatattttaatgaatgaaaaaaaaattcaaaaaattttctgagagtaaatgctgaatttattctgtgaatatgaccaattcttaattagaaatagattatttacaaaagattgaaatttacttttcttcttttttgtttgcctcaattttccaaaaattttccattttggtattaaatttaaatacaaatatgcaaattttgttgagtcttgcccccccccctgcgcccccttaagtttctttaaaagttttccgcctctcaacgaggggtcgccacatttgtggacaaagaaagcgttatggccctgtccttggccatcaccaaaatgttcgccaacaaatttattcatccaaactaaatattccactatttcaattgtaattgtttttaaattttgaagagcattttatttatggcaaacccattgaattctataattttggcattcaaatgtttacacccttttaagaccaattttcttaattattttgttcaatttttaaaaatttttttatttatgtttattttgccttctgaatgtacttcaatgtttaggatgcaaattttatttattttattaaatttaattaaaaaaaaacattctttaaatttttaattattattttttaattaattttaaaaatataaaaaacattttttaaatttattttttgaaatatttaaaacctcatataagcaagctattttaatctgaaatataaaaataaaaccattttaggatctggcttttttaataataattttaaatgaattt

SEQ ID NO: 39968 - DNA, 978 bp, Heterodera glycines
cgatgaaactttttaaatataagcctaaatagggaagctattcccgaaggattcggtctccccataaatctgggcgcatcggttcggggggactgccccgaaaacaaaaaaatcgattttttcaagtgtccgtttggggtactcaaacaattatggggagcaaaaatccaacgcagaattaaagtattaaaaatttttagattttttattcatctccctttttgatattgaaagcatctgagtgcctaaaataacttgtaaataaaatttgatgcgtttcagagcagtttctgaaaaaatatttatgaattaattttgctaaaaaaataaaatagtgaagctttaaaaattaataaaaaattttaaattcagaattactggagttagcatcatagcagttaaaaattttttgatttttattcatctccctttttgatagtgaaagcatctgagtgcctaaaataacttgcaaataaaatttggtgcgtttcagagcagtttgtgaaaaaatatttatgaattaattttgctaaaaaaataaaatagtgaagctttaaaaattaataaaaaattttaaattcagaattactggagttagcatcatagcagtgcttttccttgtctttttgatgctctcgcaaaatctggttcgcttctgataagtttataaaaaaaagttaagcctaaaatttttcgcatatttaaaaagcaattaaaaatttttagattttttattcatctccctttttgatattgaaagcatctgagtgcctaaaataacttgtaattaaaatttgatgcgtttcagagcagtttctgaaaaaatatttatgaattaattttgctaaaaaaataaaatagtgaagctttaaaaattaataaaaaattttaaattcagaattactggtgttagcatcatagcagtgcttttccttgtctttttgatgctctcgcaaaatctgggtcgcttctgatcag

SEQ ID NO: 39969 - DNA, 878 bp, Heterodera glycines
  unsure (1)..(878): unsure at all n locations
ctttgaataattttttccgaaaaaacaccaaaaattcttctgggttggacttcgagtaattttttatttcgggtttcttatagggaggagagcgaggnaactgcttttaaaaaggnatttaagccaatttttcaaaatattttttgccccttccccgaaatttcttttttaattttttacacataaaaaatttcatattgttagaaaaatttttttagcgttttcaaagtttaatgatgaattagttttttgaaaaaaattttccaaaaattgctaaaaaaaatcaaaaatttttctattttttacccatttataaattttttaaaaaattttcaatttccttcctttatctactgtttgtttgttttagtgttgtccccctcccgtgttgttgcttctgttgttgctcctcttccgtcctcctccaacttctcttcctcctctattccatgttcgtcatcgtcaccttcatcttcatcatccgttttccatgcacttcgttcactgtcctcctccacctccacctttgacaataataatgtgccgtcactggacgaattgaagtgcaaaaatgcggcacaaattgagcagctcagtgtggcgatcaccaatcactgtgccaacagttttgagcggaacaaagaggttggctggctgggggatagacttaaatacggattcggattacggcattttagacaccacccctattctagcggattatgacggcgaatttttaaaagttctggagtcacaaattagtcactgatcaagaatataacaccaattccgaatctcggactcgaacccaaaaaagttgagaaaataaaaatttgcgaaaattcgttaccacccccttttttaaaaaaatcgatttg

SEQ ID NO: 39970 - DNA, 1015 bp, Heterodera glycines
ctttatgatagcattagtttacacataaaaatacaacttctaaaatttcattctcaacttgaacaaaaggctatttcaatttggaaaaaattcaatttttaaatatatacaaaaatatgatgttaatccctttgaaataccgaatttagtctttgaaaacaaatgctatcataatgaccaagaaaaatgtgaattatttgccaatttatttgtaaattcatttaacaattctgaagttgatccaggctttctaagcttggacaacacttttgttaatcaaagctttatatcagatatagaatttaacatcattgagacccaaaaacttttaagaaaacttccgaataaaaatggaacttctccggataatattagctataaaacattgaaaaattgccatccttcattagcaactgttattactgaccttttcaggatttcattagactctggttctcttccagatatctggaaggaatcaattgtttttccccttttcaaaaaaggggataaatttaattctgaaaattataggcctatttctctaacctgctcactttgcagggttatggagagaattcttagcaaaaatatttacaattatctactaaaaaagaataaaatttcggaatatcaatttggttttgttagaaataggtctacaacaagtcaattaataacagttgtggaagattggtatgatgcaattattaatggaaaaaatgtggactgtatttatattgatttccagaaagcttttgactcagtgccccataacttacttttatacaaattggaaaaaattggtatacggggcaaacttttaatgtggataaaaagctttttgagtaataggacttttcatgttaaaattggggatgctttatcctcaaataaaaaagttgactctggtgtcccccagggctctgtcctgggccctttattatttttggtctatattaacgatcttcctggatgcttgccatcaggagtgaaaataaattatatgctgatg

SEQ ID NO: 39971 - DNA, 1197 bp, Heterodera glycines
ttagtaaaaatgaaattttaaagttttcattttcaatttttttcattttccattacggtggtttagttatcgacagttggttccgttcaaaagattctccgagtgccgatattaaaggcgatttaccaattttcgctttttttaagccctttcgcttttgttgcttttttgggttgcttttgcttctttttttgcaaaaatttaccatttttttatttttcattattttttagcacgccgtggccccgtttcgctggtgctcgacgaaagttgcaccactgcgatggaaacgccaaacaaactcaacgcttccgacatgttcgcctctttcagcgctccttttaatggttgccattgggtttttcaaattacactcatttatcttttttagacacaataaattctacggcacgtaaaatcgaatgcagcgattcgacgcgaagtgttcggccatgcgactcggcaaactttgaggtggaatatttcgtggcgtcggatgcgaggtgaacattttgttgattccaattgcaacactcttttctccccctctctctttctctctcctctctctctttccttttctctctctctctctctctctcacacactccacttttctttcatctcttccccactctctgtcccatttattttctgtaaattcagcgccgtcattgagcacacgcgtcaggtgatctttctggaggacgacgacgtcgcatttgtcgaggacggcgctttgtccatccatcgcatcaaacgcagcgacgacaccgctgctttgacagaacagacgcgagaagtgcaacggttgaccatggaactgcagcagatcatgcgcggcgatttcaagacgttcatgcagaaggagattttcgagcagcccgactcagtggtgaacacaatgcgtggccgtgtgcacgaggacggacgcattgtgctgggagggatcaaagtgagtggcgacggtgagagacgcgtaaacaatgcccaccaccgatgtcaaggagtacacgaacgaccttcgccgttgccgtcgtctgatcatgatcgcctgcggcacttcgtaccattcggcattggcttgtcgtcagctgatggaggaactgaccgagctgccggtggtggtcgagttggccagcgacttcatcgatcgtgaaaggcccatctttcgtgacgatgtctgcttttttatca

SEQ ID NO: 39972 - DNA, 876 bp, Heterodera glycines
  unsure (1)..(876): unsure at all n locations
ttattttaanttcattttttcgtcaaaaaaactaaaaattgttccttgtattaaaaatttcacattgcccatataaattaatgaataaactagagaccgagatttccaaaaatgcggatcggaccgggctgatattttcagaagcaacgggtttccgggcccggcctctcaaaaaccggtcaaaccggatttttccaaaaatcaccgggccggtttgccgggcccggctcaaaaccggtctctagaataaaccttgaaaaagatcattttcctatgtaccaacgcgaaactttacaccgaatgtaaatttgaactgaactttttttgtcaacaatttatacataaagaatttacaaaaaaaaacaggaaatatgaaataaactattgaaaaacggatagaatcactcatctaatacccaaatagaaaatagaaaaagcatatggaaaaactaaaagaaaatctctctttgatcagtgcggcacattgtatgatgtcacaaccgcgatcagcagcagcggacacaccgcaatcattcttaaagaaataaaatttacattttttaaaattttattttagcgaaatttcggcattttttaaaccctcagggcacaaaccaccccagatatatttgagtcaccctaaaattcgtatataggccttactcgtactaaaatgcctgtttttttatcttcccctaaatctcatctatttggactgcgtgctgaatgggatagaaaatttgaaacagataaatgattttttcccctatttttatgaaaaaaatgattaatttttgaacaaaccaagttctttgaatgcattcaaaattgtttaattcagggactcgtttgaaggaaatgaaacgacatgactaa

SEQ ID NO: 39973 - DNA, 874 bp, Heterodera glycines
ggccaaaccaaataaaatttacaatattctccagaattttcccttcaaaatgagcataaaatggttttatttgctctagtattcaccaagttataagctaaaaaaatttcataaaattgtcgatgttgtacgtaactaacgcttttcgaatatgattttttattgccacgaaaacttttattaatgaaaaaataattctgccttcttctttaaaagaagaaattgaaattaacacacaacatagggaggacttgaacctgggaccccccttttggtgactaactcacagaccactaagacgaaaaagccagcataattgtacttggagcccaaaattgggccgctgtgtatagaaccctttgctaaaatcgatttactaaattttgttttaatttttgtgcgtcttcggtgaacctcctgccggtaatcgccattcagtgcagcaatgatcactgttttgccagtgtttgccaattcttgcgcgtatttgacgatgtctttgaactaacacaaatggaaatgccaaatgtgataaattaacggagggaaaaagcccacaaattggccctcgtcgatgccaatgacatcgaatttgttcagttcctcgaatgcgtcttccattttcgtcgcactaatcgcctccattttgcgtttgtcgtgtgtgcatgcgtgcgactcgtcgtaacgcgtgtcgagcgcatatttaaccactgcgactttccgtccggcaagaatgtaccgctgagccaatcggaacaattcagtcctgggaatatcattgttaggagggagagaaaccaaaataattttgtatccaattacaattactcacgtttttccgctgaacatgggtccttaaattaaaatattgaag

SEQ ID NO: 39974 - DNA, 1273 bp, Heterodera glycines
  unsure (1)..(1273): unsure at all n locations
cgtaaatttatcttaaacttaacaatatcgttaatctttgcgtttgtttagcgaaacaaaaaatgcgttgaatttgctgaaaagtgccagtggcccgtcgagagaaaaagtgaaacaaattgctgccaaatttccttacgaatttgtaaaacatttgaatgggtttggcgttgactccaagggttcgttggtaaacgacgcgtcatcgccttcttttccgcatttggacatcggatcagtgaacaacgacacatatttggtgcagggaaccaataaatcaagacaaattgaatttgtttgtgccgttcagataaaactccaccgaaaagtaattatggccgcacaaaactattgccattgtcaagcgcaatggcattcgctggtcgaattggccttttatttggaggacgtcgaagttgccgcgcaaagcggcactttgcccgcgcgatgggtccaactgggtgtgaacggagtgaatcgcaatacggcgaaacccgcattttctcttttccgcgaccatttcgaagtgttcaccaaacttcgattcctttggtttgttacgctgcgtcggccttttgttcaggtgttttctgttgttaatttgtttgcaacatccacatgagacacagtccaaaaaatcttttttaatatgccataatattaaactgttccttttagtgtttggccgtgtgtttcgccgtaatgaccgccctcattttgtggagcgagtgcacttttttcattgtcagtccccaattgtcgttggccgcgcgaattttgcacggtgccgcccgtggatatcactacaaattcatccaagtcggaatttttcatttgccctttttcaatatattatcagtcctatcaaaaatcgttatttttttttatcgtagattacaacattttacgaggggaaaaataatcatttttgcttttcacccaaagaaaaaaattttccattaaaaccaccatgaatttcactacaatttcccattatatttcagttgtatgctgttgcgatgattctgtacctttgtatttgtgcttattacaccattttccaactccgaatttttcgatattatcgactcgattccaatcaaatgacaggcgaaaattcgctcattttttctgcaatgtttttccaaatggatttcgcgttttacccgagtttcttttcccatttcaggcttatttgccgtctcactgctccgctgtgtctgaatttcttgnaatgattcatttggattcgcatggtaccgccaacagaggc

SEQ ID NO: 39975 - DNA, 531 bp, Heterodera glycines
ctaaaaatatttcaaaattttgcatcatttaagctgattgtaaattttcttgcttcccatcacaatgctcgcggcattttgttcgacaggatcagctgctggcaatcgaattttaataaatgcaccaatttttcgtcgattgaatgtgagggagaagtggtgttttgaaaattttttctctttttatggtctaatttttttctcttttttttacacataatgatgaataccctgaggtttttgaagccgctgatcatgaatatatgacaattatttgcgcctattctggaccccgaacccaaattcgaacaaaaattcgaatttttgaaaattttcttttatgttagaatctgaacaaaatgatcattttttgatgtttcaatgatttgtgactacttttattttttaaatcaatttttggcaatagtgagaattttaaaaaatttgaatttcgactttttgttcgaattggggtttgggatcccgaattggtcgaaaaggatgccatattcatgatcatcgacctagaaa

SEQ ID NO: 39976 - DNA, 1125 bp, Heterodera glycines
  unsure (1)..(1125): unsure at all n locations
ttttaaatttatactctatcccagaaaaatgtctatctctttttttgagaaattttatacctcacaaaagcgcttgcgtatgagacggagggctgtgcacaatcgccattttatttcacagaggatttttatatttagaggttatcccagaaaaatggctatctctttttttgataaattttatacacatacaaatgctctcgagcatgatagggagggcggtgcgcaatagaccttttatttttgagggaatttttaaatttatactctatcccagaaaaatggctatctctttttttgagaaattttatacctcacaaaagcgcttgcgtatgagacggagggctgtgcacaatcgccattttatttcacagaggatttttatatttagaggttatcccagaaaaatggatatctctttttttgataaattttatacacatacaaatgctctcgagcatgatagggagggcggtgcgcaatagaccttttatttttgagggaatttttaaatttatactctatcccagaaaatgtctatctctttttttgagaaattttatacctcacaaaagcgcttgcgtatgagacggagggctgtgcacaatcgccattttatttcacagaggatttttatatttagaggttatcccagaaaaatggatatctctttttttgataaattttatacacatacaaatgctctcgagcatgatagggagggcggtgcgcaatagaccttttatttttgagggaatttttaaatttatactctatcccagaaaaatgtctatctctttttttgagaaattttatacctcacaaaagcgcttgcgtatgagacggagggctgtgcacaatcgccattttatttcacagaggatttttatatttagaggttatcccagaaaaatggatatctctttttttgataaattttatacacatacaaatgctctcgagcatgatnagggagggcggtgcgcaatagaccttttatttttgagggaattttaaaatttatactctatcccagaaaatggctatctctttttttgagaaattttatacctcacaaaagcgcttgcgtatgagacggnagggctgtgcacaatcgccatttta

SEQ ID NO: 39977 - DNA, 974 bp, Heterodera glycines
catatttttaatataaaagcaataattaaatagcttatagtgtaatttattacatatttggttttataatcattagcgttgtgcgtttgtatgcttaaaaaatgccaaaattataaaaaatatgccccaaaaatttaaaaaatggatttaaacaaaaaaactgcagctgtataaattcaaaattgacctgaataaaaaaatcacaaaaatttttttattttataaattaacgtatgaaaagtttgaatgtttttaaatttgtatttaattatctggcaaatgcaattatattgccaaattgagaaagactttcttccgttaaataattttacgagttttttggagcagatttttgaaaattccataacccgaacgaatggaggggcaccgtatccaaaccgaatcgagaaatttcaagttttccattttaaagtttcggtttaccgaccccttgaccggtctatattattaatgacactaattaattataggaaatgtgttattatgctatatctttttattttatcaacgttatagttcatttttttattgcaatttcaagtgcaacgtcaccggtgagttgtttttttactttgccataattccccatttaaatttaataggttgaggacaatgcactgcttgcatttatgaaaagctatggtttgcacaagcagaatgaaattcagaccggtgaatattcggcgcaaaaatacgaagcacaccttggcattgtttattttatgagagagaattggcaatgtgccaaaatttgggacaaatttgacgaatttgaacagggagaatgccaaaaatatcgcaaatatttggagattttgtatgaatatttgttcaccgagtacattggaatgcccgcagtgaagcgaaaatttgtgtttgaaaaattcaaatttgaaattgaaggcccgataatttatgcggtgaattgcctggccaaaatttcatggtttttt

SEQ ID NO: 39978 - DNA, 1006 bp, Heterodera glycines
aaaaaatccccgaaggagagaatttaattaaatccctttcttcgggggaccgtgccgggtgccgcggggtaagcagtgctggttcgtttcatcacggcaccgaaccttttggctagtcagcaatcgttgcttaacttgccagatcggacgggtgcgcatgattccactgttccaagcaccccaccaaaagcaaaacgatataaccaaaatataaggaaaaattttttaaaaaattttttctccatcttcctttttgatactaaagcatcagagtgctaaaattaagttgtaaataaaatttggtgcgctttagagcactttctgaaaaaaatatttatgaaacaaaaaaatcgattttttcaagtgtccgtttggggtactcaaacaattatggggagcaaaaatccaacgcagaattaaagtacaggctatagggaagctattcccgaaggattcggtctccccataaatctgggcgcatcggttcggggggactgccccgaaaacaaaaaaatcgattttttcaagtgtccgtttggggtactcaaacaattatggggagcaaaaatccaacgcagaattaaagtacaggctatagggaagctattccggaaggattcggtctccccataaatctgggcgcatcggttcggggggactgccccgaaaacaaaaaaatcgattttttcaagtgtccgtttggggtactcaaacaattatggggagcaaaaatccaacgcagaattaaagtacaggctatagggaagctattccggaaggattcggtctccccataaatctgggcgcatcggctcggggggactgccccgaaaacaaaaaaatcgattttttcaagtgtccgtttggggtactcaaacaattatggggagcaaaaatccaacgcagaatttaagtacaggctatagggaagctattcccgaaggattcggtctccccctaaatctgggcgcatcgggttcggggggactgcccccgaaaacaaaaa

SEQ ID NO: 39979 - DNA, 662 bp, Heterodera glycines
tttgacgcctccctaccatccgatgagtaatggagaagccgaaaggtttgtacaaaccttcaagcacaagatgcagcgtcaaaaggatggaggagtgccatgtgaggaggctttacaccaggttttgggactttacagagtgacaccccacccagcaacaaattcatcaccagctgaaaagctattcggtcgcaaattgcgtaccatgttggatttggttcgggtttgggatcacaagataattcgtgggttatgtttagggatattaaaagggcatgttctcaaaaacattgaaatttaaccaattccaaaaatcgcccgaaatgtctgtccggaaaattattcgaataatataattattttaattggtaaattacttttcacctgcctataaattaaatattttaaattttcataattatcaaaaacaatttttagaatataatgaaaccaaaaacccatgtttcacccattcagtctattccaaatttatttttataatttttattttacattttattttaaaagacacaaaacatattacttacaaattatttattatatgatggatattctagctaattgcagataatttgcttatacgcaatataaaaaaaatttgagaatatttttccattttagtgcctgttttgagggttttt

SEQ ID NO: 39980 - DNA, 1628 bp, Heterodera glycines
gtcaaaagaggaaaggaaattgctcctttttcattcgatgttgcgattagacgagaacaaacagacgacgaatcgttttctattcgcgagcaaagaaacattttggaaacaatggaagagaatttacagcaacagttgggaggagccatgattctgaaagttgacaacattttttacgatggcatcggaggaattttaatactccgtgtgaaaattgcccgttttataagtacaacgattaagcataaaacacaaatccaaaactttttttagattttggcaggatggaaaaaataatgattgaatcgaaaatggtatcgattctccaaaacaatgaaacttttctggaacggtttaacgttgtttccatatctccaacaagttggttgatcgatttttttttgtttaaaactgcttattttttaagctgtctgttatgtatgtgaaaacgacacactttcgacatccgattttttcggcacaattttttcatttattgacggaaaaaactgtaaagaatcgtttacacttttaacttaaaagcacaatttagcgtggggcgtattttgcgcttgtgtttcaattgttgccgttttcgtgttatttttcaaaggcctccctttcttttggcaattccaagaaggagaaaggaaaatgacagaaaaattggaacaaactttttgtgcgattggttggacatttgcgacgtgcaatgggcgattcagcccaattccatcgctacggaaacccaaagacaatttggtgaacaaaaccctaatggacggtgagtgtttctttcggggggtttaatatgacctgaataatacaagattcggaaacattgttggacaacgaattgtctgacagtgcgagtaattacgaagaggaggagggggaagagattcacccgacaaaacgcatcaaattgtacttcgattctcctgacacccaaacggggcgacattcaacagaatgaacaacagattttcttaccattttcccggtcattttgctggtctcgatgatttactgaagataatgatctcatttccttccaattattgaatgtgaaccttttttgttgttgctgtaatttacagattaatttcctatctgattaatgatgatttaatcagttcgaaccgtaaaatattttttacatttaattaatccctttaatttttgttagtttttttaatatattttttcatggattcatttctaccaaaacccgaggatcattgtcgcattcaaatccttgtaggtatttcccctatatttattttttatgcgtactttttaggtgaaaccgttgggaaatttcagtgtgttgtcttttggtcgccttgtcaaagcattggagcggcggtttacttctgttcatggtgaaatcccatggaaccccaacaagaaaatcctttataatttgttttgagattttgctcttctaaaaagttaaattttcttccaataatttccgtcgttttcagtgtcttccaatgtcaattcgcaacgccaaattctgcctaaattggtcacggagttggatttggaattgaccaggtttggcgagtttcaggttagaaaagtgctcttttattatggtaaatatccccagtatttgaagg

SEQ ID NO: 39981 - DNA, 1378 bp, Heterodera glycines
  unsure (1)..(1378): unsure at all n locations
acaaattttctataatttacggccgctccccctaggctttttttttgaatttttcaattaattatatcctttaatgatatccnntanaaagggtttgnnnatnagnagnagnagaagagttaaggttngntgtnggatttctcacgaaatggngatttgaaatatgngnagaatggagaantgnganagaanggnannanngntggaggnggtgnnaatgtgaaggtaattganaagaaatnngatttttgannatgatnatagggttgttaaagnttaaatgannntttttannnaannaaattttttttttgaaaaattttatattttngtagaatttttttgaaaaaatntnaatttttaaantttagttagggangatgnnggggattggtgtntttggtggnatttttaaatngttttntntaagggananngngtgganaaagngnantnnangngtgangtgttntannggganagtganggaggngnggnngngatgaanggnggnggaggtggnanntattaatnaanattnaanngangngnggaannatttgtggagtttnngnntangnttganngnngntnggantgggggnnggaancgtcgncgcaccgtcgggccgccggcgccgccgccgcggacgaattcagcagcggagtaggagccgctgccggtggtgtccatgcactgcaaaaggcacgctcgtacaccgactgggaggagggcacgccgcgccgcggcggcgggcccattgtcgggcacgcgaatgtgtaggctttctctctcctctctctctctcctttcactctcctctttctctcccctcccttctttctctctctctatctcactctctcactccctctctctctctcatctctctctccctttccggcactctctctcttcaggagtgatcactgatcactacattacagtatgccacaatcagatacgatgacgacatggcgcgcttggagagcgagttccgcgacgcgcgactgatgcggataccgggcaacatggacgagaaggagcagtaccaccgcgagattccgggcggctatgagacgtactcgcgcgagacgaaggcgcacgcggaccatcgcaaattggacgggggcgaccacgcggcacacccgggcgacttcaggtcgacaaaatcaaatcagatgccccaggggaaatccgacacaaaaaattattaaaattattatttttgggatatgaaaaaaaaagattttgctaaaaaattaattgaaaaaatccttaaaattgttgaaatgtctatccttgttttaaaaatagagattaaaattttttaattatcagaattttaagaaaagatttataaaaaataaataataa

SEQ ID NO: 39982 - DNA, 672 bp, Heterodera glycines
tgatgggcccaaattgtgcgagtgggaaacggcccttccatggccaacggcataatcattagcatccttctcaaacgttacggcattcaaaatgagcaatgaaacggcttcacagcagatgttgtgcagcaataaaagaatgaggaaaatgcgtgccatttttgttgtcaaaaaattccttacaaaaatttaatggacaccaataaaattttgcaaaaaaggataaattaattaaattaaaatcctgcgaaagatttttgtgtcccattgatttattacgttttctatcaattataaattggttgattaatttgctgtgcaataaaaatataagccatcattagcatatttatttttgccctttctgtgttgtacataaaacatcatcatcatcatcatctgagcataagcaaatagtaatgaaattatttaaatttatttattttaaacatcaaaattaatattatttaatttgcccatttctctgcccacagaatggagcagcaatagaaatgaatcacgaaaaaaaatctaaaaccaagaagattgcttagagatcttttgattctaaatgattatctggtttaaacttttattatattttggccgcaattcttttttccatttccaaaacgtaatttcagaaataaccaattccttcgctaattcttt

SEQ ID NO: 39983 - DNA, 846 bp, Heterodera glycines
ggggactctaagcatttattgttatcggtccaattataggcgaagtcagcttcggcgggagaattgcgaacgatgcgcggccagccgacagaacaaatgaaaatgaccgttttctaccgatattgggtgagttatattcggacaaacagcaaggagtatgagaaacaaacaaaggccgtattaatgacttttacccacattgtggaattttgacttttggttgtgtgcccgcatattaatattttttaaaaaggtacaaaaagggcgttggctgtgtaaaaaagggaatgttttggaccctttttgagttaaactaaaaataaaaatgttttattgtgagttgcaattcgcccgttttggatatgccaaaatggaagccatattcatgaaaacccataggaacacgttgtccaaaccattaaaaccaaaacctgagttcgctaaagattcgatggcaaaaattcattcattatttgatactttagtgtctgaaagaagccattatgaaggcgacagggcatggactcgtgaacgacttgagccgttttgatttcatcatcgatccaaatgaacgttataagcaaggtaagaaaagggaatgggcgactgaccaacgaaaagcgctttgcttaaaggcagtttcatcacatctacgaccttcacggaggacgcaattaagcagccccaatgggttttcgaagaatcatttgttgatgcgaatcacgtagccgcggtttgcagagaggtgatttaaaataaaatcattggaaccaaaataaacgaaaaaaatattttcagaaagctcatcccgcggtctgtacgtttaggaaagagcagtgcgcgaaa

SEQ ID NO: 39984 - DNA, 993 bp, Heterodera glycines
  unsure (1)..(993): unsure at all n locations
ttgcggttttgtaaaatgaaaaatttttactctgatgcatctaacggatctcccgcggattttcgagctcatggattacgaatttgacatacaaatctaccaattttgaattcctttacgaaatttgaatcaaaagtctaaaattccaaatatttatttttgaccatttgttcgaattcgggttcaaattgggatttttcaacacccttattcaattaacgatccctgaaaacccctttttcatgatataatatcactaccagggatggggaattccgaggcaccaaaaattttaggaagtcggaattccgaccccaaaaaatcggaacttggaagtcgaaattccgtaccatccctgatctctactatacatatggcaaataattaatttaatcaattaattatctttcaggatcgcggttcggttggcacggcaggcaccggacaatccggcggttccggctcgctatcgttggcaccggtcattgctggcgccggtgccgtacgtggcggcgcacacgcgcagcacaaccaccaatgcaacagcaacaacaataacaataatagcaacagcgtgtccgcgtacaacacggtgaacaccgcgtacgacccgtcgtacaccagcgcaaccgtttactcggactcaatcacgtgcctgcacgcgcctggcgtcctgcagtcgggtggcggcgtcattggggctggcggtggggcgagcagttgcgcggacggcatcacggaccagcggcgcgggtgagtggtgacggatgagtggattaagcaatcaattagattgataggcttaatggctttattggtttaattagatgcttgtgcgtttcttgaaatttgccattccccctcacttccgacatttttttaaaatcaattttattanaaaagattaaccanaaattttatttttttttgaattttttaaaaaataagttttttttttgaaatttttaaatcttttcttgaaattcttgttct

SEQ ID NO: 39985 - DNA, 1193 bp, Heterodera glycines
  unsure (1)..(1193): unsure at all n locations
aaagcgcaaaaaaatcattcatttaaaattcctcacatttccttaaacgtcgcctcanttngcggcaatagcagcagcaccttttgtcgtaagtttgtgattgcgaaaaatgacgttaactaaaaattttatttagattagtttatttatattaaatttttgagtaacaaattggaaaaagcaaataaacggcgaccaaaaatttatgccaggagcaaaattggcactttttgatgccgaagggttcaaaatttgatgcaaaaaaaacaatgcgattcctcatcaaagtcaatgaaatggaagaaaaaaggccgaatattcgacgccatccgaaatatttgttcatcatttttgtttaggtcgtacgtgatttattcagacccatgggaaattctattttcattcaatcccggctttcttgtgggtctccgattttcggaaaaaatcctacgcgaaagaattttttgaaaattgtaaaatattggcattatgttcttatttgactcataaaaatgaaatgcttcaaaaaaatttatataaaaggaagggaacagtgcataatccaaccattcttcattcatcactatattttttattttggtaaatttccccttttgtactattttttcggccacaaaaacctttcaacaaaactggccaaataccaaagcgaacattttggtatcatttcatggtctttcaaaatgttgtaaaggcaaaaaaacctaacaatttttctctaaaaacagtaaaagtcggctatttgtcatcattcctctgacatcccaaccccatttttcaaaggcctcagtacacccaccacatattgtacatattatctggaaaagcctgatcatctccatccatccatcatcatcatcaccatgacggacgagcccgaaacaaaggaccaactaatctacctgatcatcgtgtgcgagaaggcgcgacgcttcgacgacatggtggaggcgatgaaaaaggtgtggccatccatcccatccgatcggttgtggtcgcaggatttcacaaattttgatgatcaattanatgctttatcccctctcccccatttcagttgatncaatttggaccccaatcttggcctggaggaccgtatgtcgctgggagtgggctacaaaggtgcgatgtcttcacgccgttcgtcatggcgcacgttggtgttcatcgag

SEQ ID NO: 39986 - DNA, 659 bp, Heterodera glycines
atcatggccaagcttgaccagagactcggtcaaatcgtaaattattcgttccatttcgcccgcctttttgtacggaagtatgcccaaaaatgtgctatgacccatcaaaattttcagttttaatccgtttattttggtttttggcacaaaatttttgataggaaaatttttaaaaaccgtttgtttttttaccaaattttgtttgttcgtttttttaaaaattttttttgcacattcttttatcgctcagttttgcattatttctcattaattcattcatttgccgttaaatctttacttccttcttccttcattgtgccaaccacattttttcttcaagctcatctcagaccggataaactgtagtgaacgccccgtgaaaaaatgggtcaaatgatataccaatcgattcgtctcgaggagctaagcacggaaaaatatgcctcgagttgcggaaatgccaaaaacccggtttttgaaccggtttaaaactcgaaaaattgtgtgaaaagggtgtccttgaccctttaaaacggtcaaattcgaacaaatttggtatcattcgaaagcccttgatcagctaagtctaaaaaacaaggtataaattcgaaccgatgccatctaggcactgggacaactgagtcccagtgaaaatagac

SEQ ID NO: 39987 - DNA, 1034 bp, Heterodera glycines
ccacgaaacgaaattggcgaccagcgccatcaaagcataagcgtaacattcacgggcaccaccatcggtggcaccaatgaagcacaacgcggacaccaacagtgaaatgacaaagaaaaacagcgaattcggcacaactttgccggcagcaccgacggagaacagaaacagtgccaacgcgatgagaaaattgacgaacggagagaaggtgtccatgagaaaggaggaatccgctgcggagtcattgctggcactgtcgtttccaacggcatggcttggcacttcttcagcgatggcactttcactgccatggcttggcatttgtcccgctgtggcacttccactgtcactgccatggcttagcatttctcctcccgtaattagcaacaattgatcattttgcggagcattttcagtgcctgacgatgacgaggacgccgaaggcgcgatttgttggttgtcgttttgagacgatggctcatgatgaaccaaattgatcactctctccaagaccgctccttgctgaagcagggaattgttgtgccggaacattttcagtgtgaagaacagcatcatggcgaaggacacataggcgagaacaattgggacgatgttgaaaatggtggaaattctgaaaaaattgggagggaaaatgtcggataaaatgacagaattttaaaaattggccagccaagaatttgtaaaaatttgtcaagttttgcacttttttcttggaacttttggggaaaacaaggcctcggttagaccatacccaatgaattggacaaagcaaatgagcagcaaagtctgcagttgttggagaggaaaaacggcgtaaatgagcgtttgccattgctgttgcagctttgtgagcaaatagtcgaccagagaattcatttacacaaaacaatagggaagaaaaaatcagaaaaaagaaaaatttcgattaacatggcgagtcaattttgggctccaagcgcaaataagtttattatatatttattaatcagaacgccaaaacttgcaaaacttaa

SEQ ID NO: 39988 - DNA, 694 bp, Heterodera glycines
aacacacaaagaataaaaatatttattgatcggtcggtggacaaatgcaaataataataaaaacgaatgaatgagggaagagacaaaaaggaggggaatggtctccttataaacacaatgaggagggtcggggcatggagaacaaagtacaaatatgaaaataattaaaaaggtcaaaacgccaatttaacatctccaacacaatttgttgtgttcctccaattgaacacacaaagaataaaaacatttattgatcggtcggtggacaaatgcaaataataataaaaacgaatgaatgagggaagagacaaaaaggaggggaatggtctccttataaacacaatgaggagggtcggggcatggagaacaaagtacaaatatgaaaataattaaaaaggtcaaaacgccaatttaacatctccaacacctcccttctcaagcttctaactccttcagcggccggaaggcgagaagcgaatcaccggcttcggcttacgctgcgatcgtcgaagagcaaatgtcggcgggtcgtttgcggcttgttgatcagtccgttgatcgaccggatcagcaatttgatgcgccaaatttttgagtttgtccgtttggctggtggaaattggctgctgaccggcaccaggattatgtttcgaattctcttcgaaaacatatttttcgacgaagttggttcgaa

SEQ ID NO: 39989 - DNA, 1310 bp, Heterodera glycines
  unsure (1)..(1310): unsure at all n locations
ttatatagttaaaaatcaatttaagactagtnggcgaaactagttggcgaaacgtcattttttggctgagttggcgaaatgaatgtttttggctgagttggcgaaatgaatgttggttagatgtcggttggcgagatgtaaagttggcaagatgtcagttggcgaaatgtccagattttggctgagttggcgaaatgaatgtttttggctgagttggcgaaatgacaagttggcgaaatgtcatggagcccacctgaatgatgagctttactactattttcatttttatttgttttataaataattttttctaacaactaaaaatgtcacttcataacaaatattgattttttaaataatctttgctaataaattattacagtcgaatttgggagtttgacttttacttttgagtattcatgtccgtgaatggaagtgttgtcgagtgcttgagcgtttaaattaaaaatgcatttttattgataagttgaatttatttattgttttacaccggcaattgcgcacaatcagtcctgtcttccacgttgaatttgacagaaaattatgtcaccgtttcaattcgcaccaatggctgatttggcacgataaattaattgaattcaatttaaatttctttattttttaatatttttgtcatatttttaaagtgaattgatctagccagtaaaatttataaactaaagtagttattaattttactttttgtattagtttaatatgaagaatgagctgaggaaaagagaaataaatatataattatcaagatatattttgattttttatgttaaaatatataatttaatttttctgataaataaaaaattactccatgtaattcgttcgtagtttttttaaattttacttttgattattacttaatttaatgccttctttttatagtatttatttatccatatctattctagctgcacaatggacataatattttctacaataatatgttttttctaaataaataaattttatttattaattattacaattaattagaagttgtaaatattttgcaaaatttacggtaatttaatttttaataatgattttttatataatttcaaaaataaccttttttggtaaattacttaaaaaattatttaatttgataaaaataatactcaaaataaagtggaaaaattaagaattaaatatttgccgtaaagattggcgaaaataaaatttacattttattagacagtatttcaaatcagataaaaaatatatattaattgatttataatttaatatataaaaaaaatcataatcaatta

SEQ ID NO: 39990 - DNA, 1103 bp, Heterodera glycines
aaaataaaaagttaaaagagaatttttttttaaaaaaattttgtcgtaagtactaggattcctgcgcgtgacgggatcccgcgcgggattttgcgggatcacagtcttgcagggattaatccaagcgggatcccgtcccgcaaagaaatttgagttccaatcccgcagcgggatccgcaaatttgattttttgtgcgggattatgcgggattttattatttttttgaaaatttttctaagacagaatgccaaatatttttaaataaattaaataataaatttaattaaagttagctcatttttcatcgtaaactagcggggtcagcgccttcggcgcatcccccgctaggtagtacgcttgtattataggattatgaatgataaaatcgactggctcggccgcttcgcggcctcgcatcctattcttggctttttctccaatcgccgggactcaatccaccagcattcaatcactgggactcaatccaccagcatttcaatcactgggactcaatccaccaacattccaatcaacgggactcaatccaccagcattcaatcactgggactcaattctcctgcgtttcaatcactgggactcaacccaccaacattccaatcaacgggactcaatccaccagcatttcaatcactgggactcaatccaccaacattccaatcactgggactcaatccaccagcatttcaatcagtgggactcaacccaccaacattccaatcaacgggactcaatccaccagcatttcaatcactgggactcaatccaccaacatttcaatcactgggactcaacccaccagcatttcaatcaacgtgactcaatccaccagcattcaatcactgggactcaattcttctgcatttcaattactgggactcaattctcctgcgtttcaatcactgggactcaaccctcaagcatttcaatcgcagggactcaatccaccaacattccgatcaacgggactcaatccaccagcatttcaatcactgggactcaaccctcaagcatttcaatcaacgggactcaatccaccagcgagcaatcactgggactcaattcttctgcatttcaattactg

SEQ ID NO: 39991 - DNA, 908 bp, Heterodera glycines
  unsure (1)..(908): unsure at all n locations
aattttaaaaaagtgctaattaataaatttttttgtcgctaaaaactcgaaggaaataaaaaattaagttttttaaatcgggagaatcggcggaagggttctgatcaatgccaaaatgtcctccgctccttcaacctgttgctgctgttgtccctcgtgcggggggctcggaaacagcggcgacgaggccaaaaagcgacggaatgcgtccggggtcaggtccgacgccctctcgcgatggacttgcatttggtagcgcttgaacagctcgaactcctcgtcaaagtcctcgtccaactccagcgacggctgcccgatcagacggagctgaacccatgggaagcatttggccatggtcagacgaggggaaaagcgctttcccttttttatttggacccaatgaaaaaattgtattgaataggttggctgtgtgttccccaccaaacctgaagtgtgtgggcccaactcggctcgtcgtacccattgagaaacgactgaacggtccgtcgtcgtgccgactcgcgtgcggcgcgctgccttttgaactgtaacaaaggcggcgctaattataagatggtttacaaaaagtttagtattattttaatgatttgtcgtgcaactttggcaatttctgttggcctcattttatttaccacgcccaatttgtataaaaaaatgcaaaaatttaaataaaattttcggctattcttccgcccacctcctccaagtcaatgccccgcgctctcagccgctcctccgcgcgccgtcgtcgcatttcctttttcttcggctgtctttccattccgtgngaatccaaagttttcgatttccttaaaaatgacaaattattttccgaaaagaaaaccaaaaaatttcaaaaagtttccattttttaaaagttcacattg

SEQ ID NO: 39992 - DNA, 1291 bp, Heterodera glycines
tgtaattacagtggcggaaaaaagtcttgactcaagatgataaaatttgtagaattttaaatttcgactggaaatttagctgattattttttgtttatgtatatttatttaccccgatatatgggcctttcatataccacaaaatcatttcattccgctttatcattctcgtgaataagtctcctaatcaaaccttgctcaaaaaaggggcggaaaaaagtcttgactcaaacttgaaaaaccaccttagagttcatttaaaaacctgaaataattcatgctagcttatcttttgactgatctaaaaaggcttttacaccaacttgatcagatcactccttcatggtgatcagaaagtcaaaaatagcttgaaattgggaaaattttagaaaaaaattcctagggggctgggaaaatttttctgaaattttttgattgggctacctgaaagagcacaaaattctctaacgaattgccttttgaatggtgggcatacatgcgacttgtagataaaaagttatacttgtgttgaatttgatgatgataaaaatcacaattttctaccgaatttcaagggaaaatgatcaaaaattgatcatttttgagttgtccaatttttaacctaagtaagtataactttttacggtcagggacgttttcgcgccgccattttcgcgccgccgttttcgcgctgccgttttcgcgccaggaagttttcgcgccgccgttttcgcgccaggaagttttcgcgccgccgttttcgcgcggttgcatatatgtaaaagaaatatgtgtattagagaaaattgtttttttactaatttttttactcgcatcttgttttaaaatggtaaaagaacgttatttaattttattttcgatcgatcaaatttttttatttaacttttgttagaataaccatcagatcctctaaccaagaattctctgctctttctgggtttaaattattttttttagtttcaaactttattaaaactattttgattgtaactaagagtgttaatgataataaaattatattttttacgctgcaaaaatattggagcagaaatttcaaatatatatattttttgtacttgtcaaaaatttatttatatcataacatacttttgtcgaatattaccatttttaattggacattaataattttaaggcctaattattgttaatatatattattcgtaattttaacaagccgtttaatggtttttttactcgtgatgatttgagataagctaattaccaatttactttctgcaaaacaattcaa

SEQ ID NO: 39993 - DNA, 915 bp, Heterodera glycines
  unsure (1)..(915): unsure at all n locations
attaggccttaatttaaacttntggtcaagccaactttagctcgcttaggtaggctttaagttatttttaaacaaaagccaaattagttttttgtgtcccaatcgagtctattcgacactctgacgcttaaccgtatttaaaagctgggagtacggtaaagttaatcaactggcgacgatgaaaattattttaataccaaataataatttaagggaaaataaattacataatacaaacgaacataaaaaagatttgggaacaaataaaataataaataagaaattggtttagctctttaagcgatataatggatgatccctgcaaggatgaaaatttttaattagagctgagcgggaccgggaattttgacatgggaccgggactttttgggttgaaaacccgggaaaaaactgggactagtcccggtcccggtcaaaaccgggacttttgtacttgtacattttttagtaccagcgccggtcccgctctgctctaattttcataccatataagaaatttaaggggaaaataaattacataatacaaacgaacataaaaaaagatttgggaacaaataaaataataaataaaaaagtgtgtttagaatgaaaaagatgatttgtttcaggaggcaaattcttttttacccaattcgttttttagtgttataagtatacggagtgtctaacctaccgaatttaatgtctgaaaagttggatagaaattttatgactggaatttttttaggattttgtattttcttatttctatttttaaagaagcaaaaaatttatgcctgaaaagtttgatagaaattaaacgaccggaatttttttttgaggtttttgtttcttaagaaaaaattcaattggtaattcaatataatcaatgatcccctgcattaatgaaaattt

SEQ ID NO: 39994 - DNA, 675 bp, Heterodera glycines
acgatgtcaaaatggtatcaatttaatgatatgtctgctctccttattattcttttgatgtctattgagcttaggaaagtcggaaaattactcatgagaattttaccagcgatacattaaccttcgcctccacgatgtcaaaatggtatcactctaatgatatgtcagctctccttaggtgtcttttgatgactctagagcttaggaaagtcggaaaatttctccggaaaattttcacagctctacattaacctttacctacgcgatgtcaaaatggtatcaatatgatcatatgtctttctatacgaaatctaatcttcggatgttcttgggaccttagtaaagtcggaattcggatcctggaaacggtgcaagttcggcattatgcatcccctgcaattacggattacggatttccgtaatagcaaattcagttgcgcctatccatggtccagacccctgcccctgcttaaaaaaacacccatttttgttcttcatgaaatcgaccgaggaacatagtcatccgaaaaaggatatttatcagttatgtagtaaaaaaaagtgtcgcaagagtcaaaactggactggagaggggatgcaggcgacattctcccttttgcctatataaagggatattagtaagcaaaaaaagcacaaataaaaaaatttttaaat

SEQ ID NO: 39995 - DNA, 851 bp, Heterodera glycines
tttcaggcctcccacagtccaggaaaaaaaatatggatttccatataattccgaaccctattcataactttgctcaagaataaccaaatttcaaattcttgatatcagatagctgtgtcctttattagcctgcaaataaaacaaataatttttaactttcatttttacataataaagaatgaacgcttttcgttctccgttttgatgaggacagaggcaggcaacaaaaaaacccatccgggcgctattaaggctttaaattggttgattaacaattaaaaaagcatatttttgctttgtccccaccgcccgtaaatattcatgaatttttctccgtattctcttgttgtctttatgcatactggaaaaaaagcaacaacaaaaggagagagagagaacacatcctccttttaaagccaacaactcttttgctataacatttatggcttttccttttcgccgcccccctttccgtgctcatttccgccttctccttccggtttctttttctcctcttcctccggtgcggtgctgttctctgagaaaatgtttagaaaaatgtgtaagcattaaccattttaattcatatttattccacactctcttatttttgtcaatgtttcccactcacttcgctttttaggcaccgtggacgtgctcggacctgtgttcatcgctctgtagagggtgtcaatcccagcacggagtgtgtccacaagattactgatgcctgtacaaagctaatcgttatcacattaactgtactcactctcattcatccccgaaaaaaaacaactggatgatggaacaatatgatacactaacctcattagaacgcaaaatgcaacaaa

SEQ ID NO: 39996 - DNA, 1496 bp, Heterodera glycines
tctattttaagtttcagaatttttggaattttttaaccttttttattttttggcaattttttggcccttgggattttcgggttaaattttgaaaattcattgctcagtgaaggtttggtcaatttaagggaattaaagctctaaaaatagagaaaaatcaggagaattttatgggatttaattgaaatttatatcttcaaatgaaaaaaagttattccagaaattctggaaattttctatttttcagaaaaaattttatatctcggttctgaaaagtcattagagaagagtaaaatactacaaaaatccgcaattttttgctctattatataaattttatttgacctttttatcatcttttaaaataaagatacaaaaatataagtgattttggcattcgggaccaaagggggtggacaggatttttgagtggaaaaatttttctcacaaaaatcttccaaaaatatgtctttaggggttatttgggtcgctgatcacgaatacgtgatcagattttacttttgacatagtcaagacctcagaatccctgtgtgattggggattctgaggcatcattttgaggggggtggggcaggttcggatccgggcggtgtacattatttttctgttctttttttgattacttttgcatgtttaatttcacttcaaattattcgaggccataactttttataaaaaagtggtagttaaatggtgtaaagaacttttttatagagcaaaaaattacggattttatcattattcaatattgccagtacccctaacatgaagggagttatgaatttttttccgaaaattcgaaatttttcagggattttggaataacttttttctatccgttgttttactaccaaataaaaagcataaaatgcgccgtatttttcctcattttttagttattcaatcatgaatattcaccctccctatcccgggttacgaatttttgcaaattacaccaaattcccaggggccaaaaaattccgaattttcaaaaaaattttttcaccaacaaaacctacaaattattatattttttggtaaataaaaatatttttttgcagagaattttttctctattttgtcagctttacccggaatccgaacctctaaattgaaatgagtaatagatttttgaaaaattctccgaattctcgcctttgcacctaaataagttaggaaaaacctaaaccgatcatttccatccttttttattagaattctccatatttttctcttttactttattcaaattttagcggaaaaaatggggctttttttatatagtaaatctaccctcccaaacgttataaaacggggatttgttgtcaaattgttttaataaataattcatcaaatgttcaaattatccgttaaaatcaaggccacattatatggcaacaatttttcagttttttgtcactttttaatgaatattttgaatttgttgctctttttaagggactgttgacattcaa

SEQ ID NO: 39997 - DNA, 1273 bp, Heterodera glycines
aaactgttgtgaaaaattgttataactccattcagagaagagatagaaaaaaaaaaaataggtttagagagcccatgaacagctgaatcggatgcaagtaccgccgttgctgtacgcctaacagttggtgagcaatgacggaaaattgcttaaaaaagaaaccaaacaaactcatcaattgttagctcccgttgacaaaccgaagggtacattggggcaatggatgttgggctaccgtatcagttattaaaattgttgtttttcaaaaaggatactaaaactgggataacccattcagagactagtcaaaaaaaataataataggcttggactaccatactaattagaatttttagaatgtgtctgttaaatgcaaaactgttgtgaaaaattgttataactccattcagagaagagatagaaaaaaaataaaaataggtttagagagcccgtgaacagctgcatcggatgcaagtgccgccgttgctgtacgcctaacagttggtgagcaatgacggaaaattgcttaaaaaagaaaccaaacaaactcatcaattgttagctcccgttgacaaaccgaagggtacattggggcaatggatgttgggctaccgtatcagttattaaaattgttgtttttcaaaaaggatactaaaactgggataacccattcagagactagtcaaaaaaaataataataggcttggactaccatactaattagaatttttagaatgtgtctgttaaatgcaaaactgttgtgaaaaattgttataactccattcagagaagagatagaaaaaaaaaaaataggtttagagagcccgtgaacagctgcatcggatgcaagtgccgccgttgctgtacgcctaacagttggtgagcaatgacggaaaattgcttaaaaaagaaaccaaacaaactcatcaattgtttgctcccgttgacaaaccgaagggtacattggggcaatggatgttgggctaccgtatcagttattaaaattgttgtttttcaaaaaggatactaaaactgggataacccattcagagactagtcaaaaaaaataataataggcttggactaccatactaattagaatttttagaatgtgtctgttaaatgcaaaactgttgtgaaaaattgttataactccattcagagaagagatagaaaaaaaaaaataggtttagagagcccatgaacagctgaatcgtatgcaagtaccgcccgttgctgtacgcctaacagttggtgagcaatgacggaaaat

SEQ ID NO: 39998 - DNA, 1376 bp, Heterodera glycines
  unsure (1)..(1376): unsure at all n locations
aatcattctctgatgcccgcttcttccacagtgaactacctaggtttctcccgnctttgtncgancaaaccgtcgtccttttgccccacttgggactgtccacattaaacacggattttaaggaacaattcggcgatgtcaaggtgttcaaaagttgcggattggttcagtcatttaattgatttgctaatatttttatttattcccttttatttttttgtttcctcagtttgtctgcaccggcggaagctcaactcgaatgtcggaatatgcaaagtttttctcggcgatggccaatgttgcgtcgggtggaaatttgtgcaacagaacggacagattcgtcatgtttaagactggcccggtgctttgggcaaatgtgtgtgtgttttggaaccaaaaattcgctcaaactgtgccgtttttcgtttagcatggcattggcatgccatccgcgtccattttgctgtgtgaggtcagtcaccgtttgcacatagtcagacggagtactgtactcaaaatcacatttatttctatgtgcttactgtatgtcttatcttcccacctgtccctaaagctcttcaaattgctgcgtttggcctgctgtgccgatgtgctgttcatccgcctgggcacctgcggaggcatcgacgtgaagccgggcaccgtaatcatttccaacggagtggtaaacgcggccatggaaaaacacaaattcgtccagtggatccagggaaaagaggtccgaacggagcaaaaaactaaagaaaacaactgctgctaaaaggtgaaacgggacgcactgctcgacgcgcaattgggcgacgatcttttcgacacggccacggaaatgcatttgccagtggaccggggactcactttttgcaccgacgatttttacgagggttaaaacgattaattggggggggggggggggtgtcattatattttatgaggtcttgccattacattttaaacctgtaaccggcctttgtgatttcattgaggggaacgatgatggaaaccaaaacttctgggttaaaattgaaaagctcttcaatttgccttggaaaattttcataaatacgataaaaacgaactccaatcagtcgaatggttagatttcgttttagttagtagacgacgaaaagtgaaaacattaacttgaacaagggtaggagccgagagagggggatgagggacgatccccgccaacccggggaacagggacagcggagatcggaaaatccttaacaaaaatggaataaaacaaaaaatacacccctaagcaatcaaccgaaaaaatttcagaagatacactcccaaagaaaagaaaaattttcacaaaaattgatcccccaaaataattatttttttct

SEQ ID NO: 39999 - DNA, 1101 bp, Heterodera glycines
  unsure (1)..(1101): unsure at all n locations
acacgaaattctntgagaaaaaaaattgaaaaaatttcacctattttttagattttttttaatcctatcaattcaccacaaatttatcgaaaattcttttttcttacaattccttacaataataatttctaagattttttttttgaaaaatttctaacatctgtaaaggtccatctcgaatcggctggtcctgatttttaaattctttgctcttggcattgtgatgtttaaatgaacattgtctcacaattcatttgacatttaggcacgcaaagcaacaactggaaaaacggctactaaagaaggaactgagcgagaaggagttggtgaacgcgttgtccttcgagaaacaacggtccgagtcgatgccacttttggagcagcgcgtcagaattttggagcgcgagttggcccgttttgacggatcatcgacgaggggactgtgcaataacttataatttaaacatttatttatttatttgacgaattgacgcatgtaatttgaggaaaacattcattcgatgggttttgtttttgtactgcttgggggcgtcgcccaggctatgtttaaaaattgcatattttaatagggtccaatttttccattgagctatttttgaaagcattgtgagcaatttgccttgattatagaagagaatttgtttggggtttttagcatttgtccatgtcttctgcgaggcgactattagcaatagcacccccccccccccctaattaccctcctcatttacacgcgcaaatcccgttcgcctgcaacaatgttttaattaattaattacttgttgtgtgtgtgtgtgtgataacgcaaagtccgtaccccgccccacctccgctcccttcccttttcttctgtccgtccgtcttcgtccccatcgtcccttccttttccttccgccgtcgttgcattgccccaggcgttttgtgtcttccagtgacagtcgtcgctaaacgcgcggcggcagaagcatctttggtctgctgatcaacctgacatgaggcagagagattatgctgcatgcgcttttggcgctggcgcgatgatccgactgatcagtagggggggggggggggggggggggg

SEQ ID NO: 40000 - DNA, 1186 bp, Heterodera glycines
  unsure (1)..(1186): unsure at all n locations
gcagtgaatgagcgccaaaatcagtgccgccatcatagcgaanaagatgnagatggatttggtgcaaattgatttcaaaatgggcaaacttttgcaggccttacgaatgactggctttggtttgcacaaatcggttgcncagcataaatatgaagaattgaagagcaaaatggagcaaaaaaagagaggcggaaaactcggaataattgacgtgtgccaattgtggagttgcgcggaagacatcaaaaaaataagccaattaatgaacaaaaccatttcaaacatcaaaaaggagataaacaatgctgaacaattgttaaaaaggagcaaaaagttcgatttaactattattaactattaatccgattttagaagaaaaaaataattaaaatggttttataagtgagaatttccaattaaaattgtcaagctttgcatcaaagcaacaaaaatattatacattttgtttttattgatagtcaaaattgtcctagtcttttttatttgtatgcaaaacttaaaaatcgtttgatttctataaatttaaaataagagaatcttttttgaattttttaaaacatagtttttttcaaatccaaataattatattatgaatcattgcataataaaataaaccacacttaaacttatcactgataatttgttattaataaagaaatgacacttcttcccgacaaaatcttttttgcggtttttactgaatcccacggtccaatatcggcataaagattataatatgaattaaaaaattaaattaacttcctaatttaaatgggtgtcaatgacaactcgtacaaaacgcaaatcgtaaaatgaataggctaggcttaggcttgtttgggcctaggcttaagctaaggctttattttgcaaattttttattgtacgattgctttttgtatgattgccattgacgctttaaatgaatgaatttattaaaatagtaagaaatggaatgaattgggtaagattgaaaatttgttggagggaatgtgtagttaattgagagattggggtattgaattaagggagttagtgtatgaaatgaagtttttgtgtataaatgaattgatgttagttgtggaaaaagagaaggaatagaaatttaaaaggtggattaattttttggaaggaatttatgaagaaagtgaattgagtaaaatga

SEQ ID NO: 40001 - DNA, 1592 bp, Heterodera glycines
ttttgcttgtttgtatgattcacggctcagaaaaaggatgcccgtggcgtaatgaccgatggggggcaggtcaatgttgaaactatgtaaaaaaggtgaacagtaagttgcgatgggacactttgaccaccttttcttcagctcgtccctgtacagtttgtccggaattgcggtcataacgccagcgccatcgccagaatcatcgtcacagaaacaggcgcctcggtggactgaaatttgaattgattcagaaaatatctatggacagtggaaagggggattttagaagataacttacccatccgttcgagcatcactcgaccctcctgcagtatctgaacagtttgaatttattttcaaaaatatttccgtttatttattctctcgattaaatgcctttcaaatggtctctcactttatgcgtcggaatgcctctaacgctcacacaaaatccgacgccacatgcatctttttccagctgaggcctccacagggactgcgtggaaagctcatcgaattgtttttggctaatcagcaccattggagacaacggcgacagcgaccaaaagaaaaaaacggaataaaatggacagatggagagaatgggaatgaaattcgaatgagtagaaactaaaagttaggtatgtaatttgaattaattttttgaaacttaacaaactcataaacccattcaagaacattattcgagagttttgtttaatagtgtacactatgggtattggacacagtgtcactatgggtcaagcccagtgttagacaaaattgctcataacgccaaatagcgcatttggcgtaaatttttgcgcgctaattcaaacttacactgatccgtgcatttttgattgtttattttgataagccactagcggggtcagcgcattcgaaactgcccctcctaattaacgattcttaagccgttgaggactgccatattccctttgactgacacaaaattgccgaaaaagagatagccattttctgaggcccgaaggaaaaattgagagggctaatttatatgtaatattcgaaactgtcaatctaattagcgattcggaagcacattggggcctgccatattccctttgactgacacaaaattgccgaaaaagagatagccattttctgaggcccgaaggaaaaattgagagggctaatttatatgtaatattcgaaactgtcaatctaattagcgattcggaagcacattggggcctgaattaagccatattccctttgactgacacaaaattgccgaaaaagagatagccattttctgaggcccgaaggaaaaattgagagggctaatttatatgtaatattcgaaactgtcaatctaattagcgattcggaagcacattggggcctgaattaagccatattccctttgactgacacaaaattgccgaaaaagagatagccattttctgaggcccgaaggaaaaattgagagggctaatttatatgtaatattcgaaactgtcaatctaattagcgattcggaagcacattggggcctgccatattccctttgactgacacaaaatttgccgaaaagagatagccattttctg

SEQ ID NO: 40002 - DNA, 997 bp, Heterodera glycines
  unsure (1)..(997): unsure at all n locations
gtttttttcgaaaatgtcaaaatatcggcataaatcgttaaatatgggaaatagactccatcctaaaagcttcaaaccaagctaaaaatgtttttcgtccgtttcaggcctctcacagtccaacaggaaaaaatgggtttccatatgattcaacacttagtaatttcctattcataaatacaatattaaaaaaattaattatccaattttatgctttaatttctatttaacggccccaagaaaaacattaccatccgacaaagttttttttttctaacagagcacaaacaaacaaatatttcatcaatgattttaaatttatcttttttgtccaaaaatataaatacatgaaattagataattagaaaattggataaattgaatgatttcgcgccgaatttctcattagaatctcgcctctgcctggagacaaaacaaaaaagagtcttgatcaaaagcattaagcattgaattaattctataaatcgaaatttcaaggatcgagaattgaaccaaaagccctagctttcgatatttaattgttcatttccccaaatgcccgttgccgaacttcaattgggaaaaatggcacaatgcacgcaacagtaatgccgacgaacaaatttgagacgatgagaagcacagcgatggccaattgttgccaattgcggcggggctctgctgctggagctgagaaatgagcaaaatacattattgactgattaaaagcggcttatcatgcatgatcagggtgattaattaaaacattttttatggcttttgcatattttggcggtctgtgccattcttatttttcgctttgttccttatttttttggaaaagactggtttttcaaggattttgaccaaacattcctgaaaaggtttttaaaaaatccattttatcaaattgctcgaataaataattcaatttcatttaaaattttattanaaaaatctttttatttttttaataaattaaatgtgaatttatttt

SEQ ID NO: 40003 - DNA, 621 bp, Heterodera glycines
cagattccactacggttgtcggtttgcgccaggcgcggttttattcgacacaaaatccaagaaacctaggcggttgaggttgctccagtacgcggttattggaggaggaggggcgaaggcccaccacgaggccgcgaagaggccgagtgagtaccttcggtgcaggaaaattattaaattttaaaaattttttaattgctttttaaatatgccaaaaaatgtaggcttaacttttttagtgaaaattcgatcactcatattttttgctaattgagcagaagcgtaccaaactttgcagggatactccccggtaaaggactaacttacactgaaatgagcgccgagctagctggctcaaaaaaattttcgaaaatctgagtctatcgtttttatttattttttgcaaaattaattcttaaatatttttcagaaagggttgtgaaacgcaccaaattttatttacatgttagtttaggcactctgatgctttttctatcaaaaagggagatgaataaaattttcaaatacttttaattcctttttaaacaggccaaaaagtttaggctcatctttttagtgaaaattcgatcactcatattttttgctaattgagcagaagcg

SEQ ID NO: 40004 - DNA, 418 bp, Heterodera glycines
ctcctgtatttcaatcactgggactcaacccaccaacattccaatcacggggactcaacccaccagcatttcaatcactgggactcaattctgcatttcaatcactggcactcaacccaccagcatttcaatcactgggactcaacccaccagcatttcaatcactggcactcaacccaccagcatttcaatcactgggactcaacccaccagcattccaataactgggactcaacccaccagcatttcaatcactggcactcaacccaccagcatttcaatcactgggactcaattctgcatttcaatcactggcactcaacccaccagcatttcaatcactgggactcaacccaccagcatttcaatcactgggactcaattctacccaccgagcatttcaatcactgggactcaa

SEQ ID NO: 40005 - DNA, 963 bp, Heterodera glycines
agaagctttttgagcgtaattacgatttttacttacaccattttttgctaggcttagatcacatgcgattttcggcactctgataattttagcgttcataatgggatgtataaaggcgattgtagaaggaattggaagcgctaaaattgtttgagaagctttttgagcgtaattacgatttttacttagaccattttttgctaggcttagatcacatgcgattttcggcactctgataattttagcgctcataatgggatgtataaaggcgattgtagaaggaattggaagcgctaaaattgtttgaggagctttttgagcgtaattacgatttttacttacaccattttttgctaggcttagatcacatgcgattttcggcactctgataattttagcgctcataatgggatgtataaaggcgattgtagaaggaattggaagcgctaaaattgtttgagaagctttttgagcgtaattacgatttttacttacaccattttttgctaggcttagatcacatgcgattttcggcactctgataattttagcgctcataatgggatgtataaaggcgattgtagaaggaattggaagcgctaaaattgtttgagaagctttttgagcgtaattacgatttttacttacaccattttttgctaggcttagatcacatgcgattttcggcactctgataattttagcgttcataatgggatgtataaaggcgattgtagaaggaattggatgcgctaaaattgtttgagaagctttttgagcgtaattacgatttttacttacaccattttttgctaggcttagatcacatgcgattttcggcactctgataattttagcgctcataatgggatgtataaaggcgattgtagaaggaattggaagcgctaaaattgttgagaagctttttgagcgtaattacgatttttacttacaccatttttt

SEQ ID NO: 40006 - DNA, 926 bp, Heterodera glycines
cagctgatgccgtcggaaaaactccgattttttggcctcttttttttctttcagtttcaccactgattgttgaggcaatttttttcgccaatttcttttgtctacaaacattatttattgcgtttcatcctgtagtgtgtaaaaaattttcaataaaaaaaacttgttatctgaatatttacaagcaaaatttaagaccatttccaaagaggaaggaacaaaaatttttgcctaaattttatattatattgttgaattgtttgaaatgcatctgttgtctgccgttttgaaatttttcaacttttcgcgaaaagatttcccagaaaatgcatgggacaaataaaaattaaacttctattatgatcaatttaaatttcctatcagtttcgggtttgctttaaacacgctggccgatgaaaaaatggagttttatggatgtcaaattttgggacttttcttcgacgtggccatcagcgggttgtttcgtgacaaaaacaaaccagtttgatgttattcgaatgagctagacgcgctctacattttcaaatgtatcaacaaagggtctaccgccactccctggcgagatatggcctgtcaaagcagaacggggccaataaatttgaatttttgttaatcttcggcagttgcctttatttcgagcctactctacttgtgcatcttttcccaatatggcactgcttccgaattattgaactgtttcacgactgattgttgagataattttttttccgattcctttatctccaagcatgagccttataagtgattgttcatatccttctcttgaaaaaaaattgccagtaaaaaaaacacgttttctgaatattaacaaacaaaaatttttagacactttctaaaagaggaaggaaaaaaatttttcatttggccctaattatttatttata

SEQ ID NO: 40007 - DNA, 1250 bp, Heterodera glycines
ttatttctttaattttttataattttgctatttttccttttttgttttttcttcttcttatgatttgatcttgcaactttctagattatattattaaattgtacattttcttcagctttgataatgattttgtatttttcttaccattttttaaatatgtttaatttttaatgaaagaattgaatagttattatttgtgaatttagttttgtatgttgtacaaaaaatgattactattttattgtattatttattatattacattattcaatgctaaattacatttattctttttcgtttataaattttaaatttgttattttttaattaaattaccatattttttattttacggtcatataattttttcgaagttaattttttgaatctgattacttttttcactcatttattaattatttttgtgtgctttttgttgtttttgttaattgcataattatttgttatttttacttttttttatatttcataagatttgtactaattgtaatgaataatcatttatttacttcatttcatttatttattcaaaattttaaaatattatttttttaaatctttttttactattttaatatcatgttcacatgtcggttttttccttttcttcattgggccactttgatttattaattagagaattcaaatttaattttgttgcaaaatattttcgtctttttgccgaccagttgaatgaatttttgtttataaaatttttttttataaatgatttcttttacttaataattatacgaaaattaaaaatttaatttttcgtttattatgaatttataaaaattttaatttgaattatttaaactctattacttggattatcatttattttttcaaatttatttttttgcttctatgagtgggcgccacaccgattttgttgatattcatacgtaatttttttgcaattcgtaaaatagcctggttttcaccggggaatttcgtaaaatccatttgagataaataacattcattcactaaaatagttaaaaggatgaaaagaaaaaattaataatattttggtttacaatattttttcaataaaaataatcaatgttatcttgttgcttttcttgtgacctcgagacaatacaataggctttttactttgctttaagcctttcttttattatttatcagtaaaattgttataatttatttctatcattatttaatttaattttcatgctcagttctgggcttctgattccggc

SEQ ID NO: 40008 - DNA, 1119 bp, Heterodera glycines
tatattaacctaaaatattaatcataaaattatattaccattatttttgtgagacctgaaattattaatattgattaccattgtcgattttttttacaattttggcattttcttctgctgaaataggaatagacggctaaattttaatattattattataattttgggcaagtatgcaaatgtaaaaagtaataaatttatatttataacaaattcattatttaatatagataagtaatatggattgaaatttcgaaaattattaaaattttaatttaaaaaaaataatttcagaacaaaaaacttatttcgaatgttcaatagatttgggccagttttaccttctcccgtccaaaattataatgttttctgatttttatagagatatgtttttttattccttaccagggaattgagtgtttatgttgaatttttccaaaaatgtataaaaaaggtaacaaaaatatgtgtgtttaaatcaaatttatgaataaaattaattggggaaattcacaaaaattgcaaaatttcaaaattatttgctgcttaatcgattgcaaaaaaaaggaaactaatgacggtcataacaattttttttttcattgatgcgtcataaaatttttatgcaggaaaatagtttacaaaaaatttcacgtgaatttctgctgtttttcctaagtggtcagaacacactggacaaatgggaaagctggctggaaatgccaccttctccatggagaatgccaatgccaatgccatgcaaatgtaaacacacgtaaggtaatggcatccccaaatacgccaccttgaaaagcttccccgggaaaagattgtataaaaaagagcgatctaatgccagaaagtagcaacagcaatcatttattgttatatttttcactgaaacagttttttgtctggcttctcgagaatttgtatttattcaaatctgagactttaatttgttggcactcacgatctgatgagccgcttgagtttttcagcttttcccgacctttttagttttgtcaatctccgattctagcaaattgaaccttggaatttaggcgagccggatcttgaaagccttttctcgacatgccgaaacccggcgatttcact

SEQ ID NO: 40009 - DNA, 933 bp, Heterodera glycines
  unsure (1)..(933): unsure at all n locations
aatagcttcccctatagccttgtactttaaatcgtgcgttagattttttgctcccccataattgttggagtcccccaaacggacacttgaaaaaatcgatttttttgttttcggggcagtccccccgaaccgatgcgcccagatttatggggagaccgaatccttcgggaatagcttccctatagcctgtacttttattctgcgttggatttttgctccccataaatgtttgagtaccccaaacggacacttgaaaaaatcgatttttttgttttcggggcagtccccccgaaccgatgcgcccagatttatggggagaccgaatccttcgggaatagcttccctatagcctgtactttaattctgcgttggatttttgctccccataattgtttgagtaccccaaacggacacttgaaaaaatcgatttttttgttttcggggcagtccccccgagccgatgcgcccagatttatggggagaccgaatccttccggaatagcttccctatagcctgtactttaattctgcgttggatttttgctccccataattgtttgagtaccccaaacggacacttgaaaaaatcgatttttttgttttcggggcagtccccccgaaccgatgcgcccagatttatggggagaccgaatccttccggaatagcttccctatagcctgtactttaattctgcgttggatttttgctccccataaatgtttgagtaccccaaacggacacttgaaaaaatcgatttttttgttttcggggcagtccccccgaaccgatgcgcccagatttatggggagaccgaatccttcgggaatagcttccctatagcctgtactttaattctgcgttggatttttgctcccccataaatgtttgagtacacgcaaacgngacacttgaaaaaatcgatttttttgttt

SEQ ID NO: 40010 - DNA, 924 bp, Heterodera glycines
ttctgaaaaaaatatttatgaattaattatgcaaaaatacattaaaatttctaaaaatttgatcgtccataaataatttgtaattgatcaggggctcaccaaattttgcagggatacgtatcggaacactacaaatgcttactaattttcctagattttttaaacccggtgaaaattttttgcagacaccaccacttttgcacttaaaaaaatttcaaaaaactttaaaaattcatagaaaatttaaattcataggtactactgctaaatcaacgcagagacgcctttccttgacctttttaggcccctgcaaaatctggtgcgcttctgatcactactcgaaaaatgagtgattgaattttcattaaaagttaagcctaaactttttggcctgtttaaaaaggaattaaaaatttttaaaaatttattcatctccctttttgatagaaaaagcatcagagtgcctaaactagcatgtaaataaaatttggtgcgtttcagagcattttctgaaaaaaatatttatgaattaattatgcaaaaataaataaaaatttctaaaaatttgatcgtccataaataatttgtaattgatcaggggctcaccaaattttgcagggatacgtatcggaacactacaaatgcttactaattttcctagattttttaaacccggtgaaaattttttgcagacaccaccacttttgcacttaaaaaaatttcaaaaaactttaaaaattcatagaaaatttaaattcataggtactactgctaaatcaacgcagagacgcctttccttgacctttttaggcccctgcaaaatctggtgcgcttctgatcactactcgaaaaatgagtgattgaattttcattaaaagttaagcctaaactttttggcctgtttaaaaaggaattaaaaatttt

SEQ ID NO: 40011 - DNA, 974 bp, Heterodera glycines
  unsure (1)..(974): unsure at all n locations
cggattagcatcggggttacgagataganaattgtcctaaaaagagatagccatttttctgagaattaattcacaatttccgcagctcttgcggtaatggaaaaaattntgaagaggctctgcggaacggattagcatcggggttacgagatagaaaattgtcctaaaaagagatagccatttttctgagaattaattcacaatttccgcagctcttgcggtaatggaaaaaattttgaagaggctctgcggaacggattagcatcggggttacgagatagaaaattgtcctaaaaagagatagccatttttctgagaattaattcacaatttccgcagctcttgcggtaatggaaaaaattttgaagaggctctgcggaacggattagcatcggggttacgagatagaaaattgtcctaaaaagagatagccatttttctgagaattaattcacaatttccgcagctcttgcggtaatggaaaaaattttgaagaggctctgcggaacggattagcatcggggttacgagatagaaaattgtcctaaaaagagatagccatttttctgagaattaattcacaatttccgcagctcttgcggtaatggaaaaaattttgaagaggctctgcggaacggattagcatcggggttacgagatagaaaattgtcctaaaaagagatagccatttttctgagaattaattcacaatttccgcagctcttgcggtaatggaaaaaattttgaagaggctctgcggaacggattagcatcggggttacgagatagaaaattgtcctaaaaagagatagccatttttctgagaattaattcacaatttccgcaactcttgcggtaatggaaaaaattttgaagaggctctgcggaacggattagcatcggggttacgagatagaaaattgtcctaaaaagagagagccatttttctgagaattaattcacaatttccgcag

SEQ ID NO: 40012 - DNA, 1045 bp, Heterodera glycines
ccacggcatttcaggtgtcggccacttcaaatgtgctgtttctgcctttcatggccactttccaccccaattatctcaccgcttatttcgtcggcatgagtttcagttcgttggtgccaagtgtgctcaaactgatccaaggtttttttttgactctttttattttttttatttatttatttttttcgctaattttttgcgacaaaatttgaatattcaaagtatgcaaatctgagtttttgaccaagttcaggttaggcatttagaattggtaacatggggaaaccacggtttcctgactgaaagttgtttcaagaattttttctacaaaatttttccggacggtggcgtttcaacgtttccgaaccatgtggtcattcattatacatatttcttataaaagcatggtgtcgtcatgaaaaatttcgtccaacataccacacccatcgggaaaatttgaaattttttccatttctgtaataaattttcacaaacaaaaaattgcaaaatttcgccaaattttgtaaaatttgagtgaggcaggtcttgaaggggcgtgaccataagggaaaatcgaaaatttttttagcacaaaaatactattttttgcccccttaaaatttcaggtgttggcaattacgactgtgtaccaaatggcaccgcgaacagcacacttgttgctgtttacatggaaccgttgttccacattcggctgtacaacatggccatgttcgcttggatgtgtgccgcaaccgcttcgtttgcctttttgtattggaatgggcggaggaaggcaaaaaggacgacaacagcgggggcaaaggttgggaaaatgggcgacaaattgtgtgtgtgcataggtacacaatatgtaaaacggtggtggtaccatgattcaggtccgtagacaggggagtgatgaataaatttctaaaatttttaaaaaaaaacaaaaaaatcccctagcgccacttttggcatcgacagacctatattttgtcatattgttttttggaattcgagtcgaaatgcaaaaattgtgatc

SEQ ID NO: 40013 - DNA, 1047 bp, Heterodera glycines
gagtgccgaaaattgcaggtgatctaagcctagaaaaaatggttcaataaaaatcgtaattacgctcaaaaagcttctcaaacaattttagcgcttacaattccttctacaatcgcatttatacataccgttatgagcgctaaaattatcagagtgccgaaaattgcatgtgatctaagcctagaaaaaatggttcaataaaaatcgtaattacgctcaaaaagcttctcaaacaattttagcgcttccaattccttctacaatcgcctttatacatcccattatgaacgctaaaattatcagagtgccgaaaatcgcatgtgatctaagcctagaaaaaatggttcaagtaaaaattgtaattacgctcaaaaagcttctcaaacaattttagcgcttccaattccttctacaatcgcctttattcatcccattatgaacgctaaaattatcagagtgccgaaaatcgcatgtgatctaagcctagaaaaaatggttcaagtaaaaatcgtaattacgctcaaaaagcttctcaaacaattttagcgcttcaaattcattctacaatcgcctttatacatcctattatgaacgctaaaattatcagagtgccgaaaatcgcatgtgatctaagcagcctagaaaaaatgattcaataaaaatcgtaattacgctcaaaaagcttctcaaacaattttagcgcttccaattccttctacaatcgcctttatacatcctattatgaacgctaaaattatcagagtgccgaaaatcgcatgtgatctaagcagcctagaaaaaaatggtttaagtaaaaatcgtaattacgctcaaaaaggttctcaaacaattttagcgcttccaattccttctacaatcgcctttatacatcccattatgaacgctaaaattatcagagtgccgaaaatcgcatgtgatctaagcctagaaaaaatggttcaagtaaaaattgtaattacgctcaaaaagcttctcaaacaattttagcgcttccaattccttctacaatcgcctttattcatccca

SEQ ID NO: 40014 - DNA, 889 bp, Heterodera glycines
  unsure (1)..(889): unsure at all n locations
cccttaagcactccggtaaaatcctttttcatcgtctcacggttcgttgtgccaccgctttagaagncgtgccacttacgctttgaccataacttcgaattggtgttgtgggatttcatccgccaatttcttcactatttccgcggcttttgcctttgcattcactccgggacaaagtgccgaaagttcgtcaatcggtttatcgttaacaaaaatgcaaattttctctaaccgacaatctctgtaccctgaaaagcggtctcgcattaaaatgtttaaattttaaatgtgtaatttgggcacacatgggcaagggacgcgtcgcccccccccccgcttcgtcgtaacgcacccacactcttccgtcgtaaggggtgcggctgtaaaagaggtgggggagtggggcgcaggccaaagggaaacgaggaaaaatttcaaatttttttctaacaaaatttacttaaaatccatccctattaaatatccctggcgcacgtatgctttttttttgaggggtgacccttccgccaaatttaataataatcattcgctttgctcccttcaagtttacacgattcttcgacttttttgtggtataaactgaccgtcatccttttgatcaaacgaagcaaatccgctagttgtaagtttgagtttgtcaaaaaaatcgacgataatttccaccaacggcaaccgccacctcagaatcattcgcttttcgtctatgtaagtcgtctcaagcacttccccgcgggcattttggcaaagtctttcaatgttcgagaaatattaggcaggtgtcacaatactgaccaaatacattggttccaaaaaatctcaagtggaaaaatatattacccaacaaataaatactccttccatggcaatt

SEQ ID NO: 40015 - DNA, 1049 bp, Heterodera glycines
  unsure (1)..(1049): unsure at all n locations
agtgatgcctgaacaaaaattttattttagcagcatccttaatttctcaccttaatgtcagtgtctatgaatagtgacgtcgccattcgtcgaatgatgttccttgacacaggcagtttattttttcgtttttcagtgatccattcggccattgcaatgtcgatgtccgggcgttgaactgggcgaccggctccaccaagtctcatgcgcttccccccattcggtgtcatgctaaaatttttggtcacaaaaaatattaaaatgtcacgtacatttgatttctcagtttgttttcatgtgccatccagttcttgatctgtttcctgtccactttgaactttcttgctgctgaatgtatagagttctcttgcgcccactcgactgcatccagttttttcgtcgcatcgttattcctgtggcgcttcttgtcttttgcctgcgtgccttcattctcttcgttttgcggttcgtagtcatcattttctgagccttctgctatcggtgcatttccttcgtttacgcagttgtggcatacgaccattccgccgaagccttcattctcaactccaccagaatcgccacagaatgtgtgacacggcaatttacagacagaacagttgtggcttcctccataaattgctttacaaacacagcaaaaagattccattgctaaaatgaaaacaaatgtgctaaaatgttacgtcagtaatagagccgtgattttagtgaaaaaacttttttgcttttattttgataaaggagctcaaaaaagcatgtcagcattgaattttcgattttgaggccacacaaatcagactttaaggctcctcgccaaaataattaaaattttggcgtaatgtcactattttttcagtattttattaacttacctacctattccgagatttttcattactaaaagtcgcggccctagtcattaaaaatctgtcgaaaataatccccccgtctccattanaggccctgtctcncattatgtccccctttctgaggaggttgaaaataatccccccggngccttattagagcaa

SEQ ID NO: 40016 - DNA, 1159 bp, Heterodera glycines
  unsure (1)..(1159): unsure at all n locations
ttttaattactgctttccaattgttaccctaccagtggtctttaactgaacacggnccaacatttcgcccttaatttttggtcaatttgcagaaatttctttgatccgatcaaagagtccgcgttccaatcaatgtaatgtaagcaccgacgagcaaagtccttagaaaagaatgaccaataagaaaaccagtgaagtggtaaatggtttaattttacataaaaataatttggtaaaataattaaccattaaattattccattgaaattacgcatatacatagtttaatgaacgacccggaaaaaaatggcacaaatgatctagcattggtttatttcaaagagttaagcatgaaaaatggggtcggggccgttttcgtacgagcacaagtttttgctataacttttttctttgccaaccaaatccaacattgttggtatcattcgatagccctatgtatcctctattagcctgcaaaattttgaaaaatttcgttaaggttcaaaaaagttatggccagaagaattcatcaaaaaaaccagattttccaacttttttggctcgaacttttttttaaactgaacatttaaacccattccgcaattggagaccattttttcgtgcttaactcttcgtgatgtaacaactgatatatcatttgtggcattttccggggcgttcacaaaacttcagccgaattaccaaaatatcattttgacattcgaaagtggccatgaatatttgatttgataaataagtaattatgattgtcaccttctccccaagggaattggccttagaatatgcgatgaaaacattgcgaagtttccaaatgggaaagtcggcacaagctttgatcagcccattgactttatattttttcgcttaatttatatttgtaaaattttaaagcttaaatattttaaaatttacctacgaaaagcacttcaaacagagtgtcatcgtttaatccatttaaatcatccaaataaatgtatcttagcattgctttgaaaggcccaatttcgacgtcggcgacttccacggggcttctcactttggaagggcctttgaaagcatttgtttgtttgttaagcatgggactgactttcaattttgtttttaaatttttcatgacggcccaacagaatctttctaa

SEQ ID NO: 40017 - DNA, 489 bp, Heterodera glycines
ttttgtttttagttaggctaatagagcatgttaagagctttcgaatgataccaagaatgttggatttggatgccaaagaaaaaagctatcgtgcaaaaacctgctggggcccaaacgtgagggcccaactgacgggttccgccatattcttgtcctttattttggcataagaaaatttcaaaaaatttatttaaaaatgttgcaaatgacttgcgatttttaggcaaatgcctaaaatttttgcgcacttaatacgcacagtaagcacgcaaaacgcattttccgcttggtttggggtgtctacgatgactttataatgcctaactttgcctatttggagtttttgcgcctaaggtccctattttaggatttttgaaaaaatccttaacaaaaatgcaatacgaatgaaaaatacacccctaagaaatgaccaaaaaaaaattccaagaaaatacacccctaagaattaaaaaaaattttcaacaaatt

SEQ ID NO: 40018 - DNA, 999 bp, Heterodera glycines
  unsure (1)..(999): unsure at all n locations
gcggtgcgcaatcgccatttaatttctttcctaatttttaaatttatcttatatccaagaaaaatgactatctcttattttgagaaattttatacgttacaaatgctctcgagcatgataggaagtgcggtgcgcaatcgccatttaatttcacagagaatttttaaatttatcttatatccaagaaaaatgactatctcttattttgagaaattttatacgttacaaaagcgctcgagcgtgagagggagggcggtgcgcaatcgccatttaatttctcagagaatttttaaatttatcttatatccaagaaaaatgactatctcttattttgagaaattttatacgttacaaatgctctcgagcatgataggaagtgcggtgcgcaatcgccatttaatttcacagagaatttttaaatttatcttatatccaagaaaaatgactatctcttattttgagaaattttatacgttacaaaagcgctcgagcatgagaggaagggcggtgcgcaatcgccatttaatttcacagagaatttttaaatttatcttatatccaagaaaaatgactatctcttattttgagaaattttatacgttacaaatgctctcgagcatgataggaagtgcggtgcgcaatcgccatttaatttcacagagaatttttaaatttatcttatatccaagaaaaatgactatctcttattttgagaaattttatacgttacaaatgctctcgagcatgataggaagtgcggtgcgcaatcgccatttaatttcacagagaattttttaatttatcttatatccaagaaaaatgactatctcttattttgagaattttatacgttacaaaagcgctcgagcgtgagagggagggcggtgcgcaatcgccattttatttctcagagaatttttaaatttatcttatatccnagaanaatgactatctcttattttgagaaatttatacgttacaaatgctctcgagcatgat

SEQ ID NO: 40019 - DNA, 1077 bp, Heterodera glycines
tcgagatcactttttatgaacaggtgggggggggggggggggtgcggtccatctccgctcccctcccggggtgacctgcttgaaggtgagctcgaacagctccaaaaggtacagtaagtcgtctccggcggaaaatgcctcgcctcccaacccggcaattggcagtgccgttgaccttctgatgatgagattttgtcaatcaaacaaataccgtatgactaatcaaaaaatgacttacaacattttactgtgccaactttgatgactcattttaaattgtgttgagtggtaaatggagatgatcgccaatcagaaaaagaagtattgcaccaaaaaacaaaaaataaatcttacatattcgcatttgttgaaaccatggaaaccattttgatgctttgtaccgactttaaattaatgctataaatattttgccaaataaatttaaattagcgtattaaatattttgccaaaaaatttaattaatccatttaaaataaaaaattaattaaataaaaagaaacgtaagcttaaataaagaaacgtaaacaaatcaatagagatgtcaattttatgtaaatacatattttttcctggcttctccatgctctaaatacaggtacaggccaattgggaaatacaggtacagatacaggtacaggcttttttcaaaatgtcgatctctatttatgtacatatttttgacatccctacaaatcaagattgactttctcatttatcagagataattcgcttcagtataattttatttaaaaagtttaaaaatttttagttaagtgggaatgttgacgtccaatttaaaaattttggtaatttccttttttattgctttcattttgaccacgactcaatcacttggacaaaacgatggggatactaacgacggcgaaggcgatgaagacgacgataacccattggtgaagagggaggacaatgtcgtccttttaaatgcggacggtgaaaccgatgttttaaaacagtcgccaggttgaaacaaattccgacaaattaaggcaaagaaaaggaaaattttagttgtgaattgtctggtgaatcatc

SEQ ID NO: 40020 - DNA, 927 bp, Heterodera glycines
  unsure (1)..(927): unsure at all n locations
gttcatctctctttttgaaacggtttatatgtacaaacacgtaccctaattgataatttaaaaaatagcaaaaacctacaaaaaaaaaacaactttacattacagcaaaacgcaaacacacccttagagagtgcagagaaaaaatacatctctcattttgacgtactatttctttatctctgttcattaaagaaaaacagaatttactaattttcggtgtgtagttttgtgctatgtaaactctgcttaaaaattaattttgcataccgatagagaaaacaaaaaatctggtgattttgcaagggttttatggaagaaaattgagggtttctttatcctgtagagcatagctagagagcatagtcaatttgttattgtaaatttttggcttttttggccctttcactaaaacacccgaaaaaatagatcaaacaaaaacacaagcaaagatacattagtttaatgttattgcaatttttacttccattttaatgaccattcgtcttgggatcggatccgctcgacaaatgatgaatttattttgatttttttcaaagtattttacacttataaattggcacctttattgtgcctacccctctctattataatttacgtgaaaaattcaaaattattaattaaacaggaggcaaattataaataaatttaaaaagattgccctgtaatctgtgactgcagcttgaaatggactttataatctatcactggtttatgaacacttgagtcgacccaataaatactggtgtgatagatggcatggtttatcatttttaataaaatgccacacaattttgagtcctttctcccgttaatcgctaatgaataaaatttagtcgtaactcaaaaatggattaataaaataaatgtcagattcgttttctgcgcctanaataccatagnaaattt

SEQ ID NO: 40021 - DNA, 1432 bp, Heterodera glycines
atatagacctcaaaattcagattattgcttttctttgcatttgcggccaattttccaattttcgccattgggtctccggccatgtaaattaatgtaaatcaatgacctttttttgctttcaacaccgcttttttcgcggcacgttttttctcaagacttttggggaacaaggagggccggcggtgccgatagcgcgccgccgaggaaaaattttgtaatttttaatgcgatttgttaacagaatttgtaaaaaaaatgaccaattgattaagttttgggtttttaggatgcttaatatgaaagaaaaaagttggaatattttttaaaattaaaattttaattaaaataatggtaaagaaaatgtgaggaatattctatccaagtggggaattgaacccaggcgaaaaattatgaaaggtagaaagtttaaccactacaccacatgtgcatgcgtgtaatcccatgactaaatgaaataaaatttaattttttctcaaaatttctccttcttcaccaatttcctactcttttctcgaccagacccccattcttaccagtgcaaatttttaccggcggtaccggtactagacaaaccggtaacggtaatttcatttttgaaaaaaccggtaccggtaccggtagcgatgctaatgaaggcgggaattaccgcacactaccggcagcggtacagtcactgctcgacataatttaatattaccactttacaccgtttatatatactattttttcatttaattgcaataattatctatctaattgattatataggctattgctataattttataaaaaggtatgaattaattcttttttagaataaatgttatatcattttttgtccggacttttagtgaaatttaatcatttatccaaaaaaaaagaatccattcataaggttgtccttaatccagctgaaagcatgcttctattccagtgtttttcaactataattaattttatattatttataatcagaattcatatggttggtcaatattatggggtgttaaactccggtaatgataacaaaaaagttgaaagccgacaaaatgtcaaaacaatgctcagacttatggataaatctgtcctgatcagccaatcggccccacctttttcacgtcctcctcctgttcatgagccctcaaactgtgcaccggtttgccctccggctcaatgtcgccctataaaatttgtaaatttaatggaaaagtcagagctttgaggtcgtatgtacggctttacctgtggtcctgtgtcggccgccactttgtcgtcctgtccccgcaatttgttggcacttttgtgccaattgccgacggccctacttcttggccgaacgcgtcatttagttgctgatcacaaaggccgtgaaaaatttcaactgcgcattttaaaaaataatatatttttg

SEQ ID NO: 40022 - DNA, 1685 bp, Heterodera glycines
aaatcatgtttcccactcccttctcccaggggtattactttgtaaagtctttttttccccaataaacttgtcaaaccccatttttcgcaccgtgaatgttatttttattgaattctgaaccgttttgagtagattagactagaaaaaattgaaaattttgaaatcatgtttcccactcccttctcccaggggtattattttgtagtctttttttccccaataaacttgtcaaaccccatttttcgcaccgtgaatgttatttttattgaattctgaaccgttttgagtagattagactagaaaaaattgaaaattttgaaatcatgtttcccactcccttctcccaggggtattattttgtaaagtctttttttccccaataaacttttcaaaccccatttttcgcaccgtgaatgttatttttattgaattctgaaccgttttgagtagattagactagaaaaaattgaaaattttgaaatcatgtttcccactcccttctcccaggggtattattttgtaaagtccttttttccccaataaacttgtcaaaccccatttttcgcaccgtgaatgttatttttattgaattctgaaccgttttgagtagattagactagaaaaaattgaaaattttgaaatcatgtttcccactcccttgtcgcgtcccgaaaattaaacgctaaatttcgtcccccgagtgagtcatccattccctccctttgtgaatcgccgcctattttttcctttgtattggccctaaggacaggtgcagacaaaatgaacccctttttctcacgacaactccccccccgccccctttttctctacatataatcacttctgccgcttctgcttttcacttcaatttttcccccttttttcacttcgctttccatcgcttttcctattcgccgaaaatcgccaataaattcgttttcttttcaacttcgcctttggaaaataaagttttggtcagacttaattcgtggtcaaaacccagctaatcctaagttcgggttccccttcccatcccaaccacgacacaacggccgggaaacggctcgaaccctcaaatctcgtttcccattttcctaatcttattcttaaccaaaatgagtgctcctttccgagaacaaattcgccaagcctacgaagaggcacaagacattttgctggaccaaaaggattttcctctccccgctcgccaacccgaacacacggtaaccctttaccacgccgaactgcgttccatcctttccgaattggacacagaattgaaaaattccgaagaaattctcaaagaggtaaatgaaccgtacgaaaaatggatgtccctccgcacaagtatgaccggtaatgaacgaacccaagatggccccctctacgatgaatttgtcctaactgtcccatttctgagtgccatcacaaatctccgtaaatacatccgttcccttcggtcccaaagggcaaaaatcgaacaaagcataaccactgaccctggctcaaacaaaacattcccatccttggtacacctccccaaaaccaccctccctactttctctggtgactgcacctctttacaatcattttggaattcattttcgtccgctgtccatgatcagtctatccccgattcctcaaaattgttatctaaagcaatgcctttccggtcctctctgaac

SEQ ID NO: 40023 - DNA, 1010 bp, Heterodera glycines
  unsure (1)..(1010): unsure at all n locations
cgaattgctgcgcggaaaacgagcaagaaatccatcattcttctttatcatcgactttgtttgaggttgaattgaaccctgaaaagaatatttttattttaaatatttattaattttaattgatttgattattttttacatattgtacaaaaattactgtagggcacttaggacggtgctaggccatttcgtaaaaatgccaattttacagatttttcgagttcagaatatttcattaagttttcagaaagttatggcaattttttaaacatgtttggtcaaactttttgaaaactcaatgaaattttctgcaatttttatggtaatagatagagcaagccgggagctaccgtatgatgataccaagcttatttaatttgatagggtttagaaaagttatgatggatttttcttgaaaaatcggtaagtttttacgaaacgacccagcaggctttaggactattaatctgaattaaataattgctgaaatccactttttcaaatgcattattacacttaaatagggttaatcagtgcccagagtacattaatgcatgttttatgtccttgaaaagtactgtgaatttagtagtgatgctcgagaccaaaaatttccgagactcgagaccgagactcgaccccgagactcgagaccgagacccaaaaccccgaaaccgagacccaaaaccccgagaccgagaccaaaaaaacccgagacccgagacttttttcaaaaattttttcttacacacttaaaaatcgaaaaaaatcaatcttttgagtttttttctcnaaaatttttgtttttttccttatttaagctaccatacatttttccttttcatatgattgacttttttacaccattttttgtggtgctctttttcaaaaaatgtttcggaacaagggggtcccgcgggtgcccgataagccgccgccgggaaaattttttaaaaattttactgccattttggtaaccggatttggtcccaaaaaatgacccaaatttt

SEQ ID NO: 40024 - DNA, 945 bp, Heterodera glycines
cggttggacttggacatgggcggtgggcgcatcctcgcctgcagcgtcgattcatcagttcgcgtttggtctttggagggccaacggctgagggtatgcctattttttgggtttatcccttaatccgttttcaaatgctaattaaaataaccccatgggtttttcgcttttggatatttcattggtcccattaattgtcagttcactttcaccggccattccgagaaagtgaccaccgcacgctttttcaattcgggtcggtcggtggtctccgggtccaatgaccgcacaatcaaagtttgggacattgtgaagagcatatgtgagatgagcaatcgataggacaaatgcgaaataagaaacagagatttcaggtcagaaaacgctttttcctgcttcgacagtggccgatttggtgtccaatgaaaggggcattggttgtccattggtcggtcgattacggcacggaatcgaacaatccgttgcatcgaaatctctttagatcagttgccatttcgacaaaagcattcgcttttgggactttcggtcgggtgaccaaccggcaaaatttctaaaattgggcgcgcgtgtcacgtcgttggacatcacttcgggtgaattctttgcagtgccatgggacgacactcgaccatttcttatggacttttcccacagattgtcgttcccttctctgttcggctcgtgatgaaacgctgactctgatcgatctgcgcacttttgccactttgcacatttacaggtccatccctccgtccattcgtccgtctctctctctctctcttctttttaccacttttctttagtgccgaacaataccgaacttcgtccgactttggccgtgccgtggtcagtccgtccgattcttttgttgcctccggctccgccgatggtcacatttttgtatggaatttgctgaccactcgg

SEQ ID NO: 40025 - DNA, 998 bp, Heterodera glycines
caaaattaattcttaaatattttttcagaaagggttctgaaacgcaccaaattttatttacatgttagtttaggcactctgatgctttttctatcaaaaagggagatgaataaaatttttaaaaatttttaattcctttttaaacaggccaaaaagtttaggcttaacttttttttcagaaactgatcagaagcgcaccaaactttgcagggatactgaaaggaagagaaataacctattttaaatattatctagtcagttcatttaaataatttttatccaaaaaatttttttttgggttttcggggcagtccccctgaaccgatgcgcccagatttatggggagaccgaatccttccggaatagcttcactatagcctgtactttaattctgcgttggatttttgctccccataattgtttgagtaccccaaacggacacttgaaaaaatcgatttatttttgttttcggggcagtccccccgaaccgatgcgcccagatttatggggagaccgaatccttcgggaatagcttccctatagcctgtactttaattctgcgttggatttttgctccccataattgtttgagtaccccaaacggacacttgaaaaaatcgatttttttgttttcggggcagtccccccgaaccgatgcgcccagatttatggggagaccgaatccttccggaatagcttccctatagcctgtactttaattctgcgttggatttttgctccccataattgtttgagtaccccaaacggacacttgaaaaaatcgatttttttgttttcggggcagtccccccgagccgatgcgcccagatttatggggagaccgaatccttccggatagcttccctatagcctgtactttaattctgcgttggattttgctccccataattgtttgagtaccccaaacggacacttgaaaaaatcgattttttttgttttcggggcagtccccccgaccgatgcgcccaattatgggg

SEQ ID NO: 40026 - DNA, 1290 bp, Heterodera glycines
acttgaaaaaatcgatttttttgtttcataaatatttttttcagaaagtgctctaaagtgcaccaaaaatttatttacaacttaattttagcactctgatgctttagtatcaaaaaggaagatggagaaaaaatttttccttatattttggttatatcgttttgcttttggtggggtgcttggaacagtggaatcatgcgcacccgtccgatctggcaagttaagcaacgattgctgactagccaaaaggttcggtgccgtgatgaaacgaaccagcactgcttaccccgcggcacccggcacggtcccccgaaggaatggatttaattaaattctctccttcggggatttttttccattaggtcgtccgttagcgttcgattgctctagtcaatttttaaaaatttttgttgaaatatttgtcgtgctctgaagcgggggggggggcggactctttttgagaaagcgttccccgtttcagagcaatgttcaaagaaagctcatgaccaatttctagccgaccttgcgagcattctaccgagtaacaacacaccgctcattgacagtgatgctggctttaaagtgccatggtataaatccgttgagaagctgggttggtactgattaagtcgagtaagaggaaaagtacaatatgcagacgtaggagcggaaaactggaaacctatcagcaacttacatgatatgtcatctagtcagatccaagtctttaggctataagagtctggctaaaagcaatacaatgtcatgccaaattctattgtataaatatcgctctgaaggtagaaaaaatattcactaggcacgcccccccccccccccccccgcccttcaaaattttgaaaaataaataaaataataggagactcagaattttgaaaattttttataaaaactgatgacaagctaatgtgataaaacaggttaattcttttcctttcagtatccctgcaaagtttggggcgcttctgataagtttctgaaaaaaaagataaggctaaactttttggcctgtttaaaaaggaattaaaaatttttaaaaatttattcatctccctttttgatagaaaaagcatcagagtgcctaaactagcatgtaaataaaatttggtgcgtttcagagcattttctgaaaaaaatatttatgaattaattatgcaaaaaacaaataaaaacgaaagactcagattttcgaaaatttttttgagccagctagctcggcgctcatttcagagtgagttagtcctttaccggggagtatccctgcaaagt

SEQ ID NO: 40027 - DNA, 1075 bp, Heterodera glycines
atcaaactgatgtggaagagggaagagaatcagcagggggaagaggtgatttggggcagaaaattgggcaatgatttttcaaagatttttcggaaattgctcgaatgatcaaagtgatcagtgattttttcaaaattaattgctaattgtaagaagggaacatattgtcgtgtaggagggtttaattgattttcaattgtaaatttttgggttttttccctccggctccaaaattgaaaagaaaaaccaaacactttgaaaatattaacaaaaacacgttaatttaatgcgattttcctcatattttaatgaccatttgtcttggggtcggatcagctcgccaaaaacttttttttcatattgaaaattcttttcgaataaatttatttgaaaattatttttctcaatagaaaaataattttttcaaataaaaaatttgaggcaacttgttttcacgaattgaaatgctttcgctttaagtctcaaaaatcgaattgtttgaaattctcgaaaatttgaacacaatttgtgagaaattttgtatccaaattttggaaatcataaacccatatttcactttttttaaaaatgagtttgaaatttgccaacgagaattttactctcgagccaagtctcgagcgtcaatcaaatttttttaattgaggaattaattaattgaatcgcaaaagttcaaaagggtccgccggcatcttcacaagcgattgcttccgctgcaatgtgccgaaagatggaatgcgaattgggatgcactgttcttgacaggagagctgttgttggcgagaaatttctgacaagagaaaaagttttgaaaagagaaagtttctgaacatttggcattctatttttaagaattttcagaaaatcaatgcatgatcctgctgaatcctgcataaaaatcaaatttgcgggtcctgttgcaggattggaattctaaatttttcacaggacaggatccggcaggattaatcctgccaatcctgtaaatcctgtattttccaaaatatgcaggatctgcggactcgggatcctgcaaaatcctgcgcaggatcctgcc

SEQ ID NO: 40028 - DNA, 79 bp, Heterodera glycines
ccccccccctcccctcaacattttgctatttttctccccccccccctcaacattttgctctttttcaaccccccccccc

SEQ ID NO: 40029 - DNA, 1321 bp, Heterodera glycines
  unsure (1)..(1321): unsure at all n locations
cctgacgagttatgggcccgggactcaaatgtcccgctcaggccaaaaattttttctatttccgggaaaaaatcgaaatttttccgaaaaaaataccagtcgatagagctcgaaaaactatgttttggaagtggtctccgtttctctgggaaaaatcgttaaaaaatcctaaaattcaaaaacccgaaaaccgttttttaggcctaactcgaaaaattttgaaaattttcgaaattttaaaacttggtttgatagcctttcaaatactacacatttttgctcagaaacaatttttcggtcaaagcaacccctggcgagttattcgcctggtactgaagtgtactttttgagcacacttcagttagccaagcgtgcaggccagggggtggctctaataaaaaaataaaaaataccagcatgtagaggacagttgtggggagtgccctcacagcgagcactttttgatccgagttttagaaaaaaagttacgggccctaaactgcaagaaaaagtgagaaatcggtccccgggactcagtcgtccgcgcagaatttttctctataattttcccagatgcgcctcaaaaagttgtaagacccttccactactttcagggcgctcccggccttcggccgggagattttgtttttgcaaacgaaactccttgtcaatataacgtatatagtaaaatgactatctcttattttgagaaattttatacgttacaaaagccgagcgtgagagggagggcggtgcgcaatcgccatttaatttctcagagaatttttaaatttatcttatatccaagaaattgactatctcttattttgagaaattttatacgttacaaatgctctcgagcttgataggaagggcggtgcgcaatcgccatttaatttctcggagaatttttaaatttatcttatatccaagaaaaatgactatctcttattttgagaaattttatacgttacaaaagcgctcgagcgtgagagggagggcggtgcgcaatcgccatttaatttctcagagaatttttaaatttatcttatatccaagaaaaatgactatctcttattttgagaaattttatacgttacaaatgctctcgagcatgataggaggggcggtgcgcaatcggcatttaatttctcggagaatttttanatttatcttatatccaagaaaaatgactatctcttattttgagaaattttatacgttacaaaagcgctcgagcgtgagagggagggcggtgcgcaatcgccatttaatttctcagagaatttttaatttatcttatatccaagaaaaatgacta

SEQ ID NO: 40030 - DNA, 1002 bp, Heterodera glycines
ttttttgggaccacagaaaattcttttccttttcaggaggcggtcgattggacgaggaaatgaattttttacccaatgccaaattaaactatcatcggagagagaaacgggccgtttcaccgattgtcgcgcaaaataatcggacggagacaaaagcggcaaatgttgccgaattgccgacagaaaacacatttggtggcggttttcaagtggttttcccttttcacatcacatttctcattcacttctcttcaggttgtcattcaaactccggaggttcccggagaaaacattctgacgcgggaaggactgcaaaggcacgtcgccattttggaagaaatctccaaattcagcgtggaaatgttcggcgagtacgatttacacatttaacccaaaacaaataattttccattgaatttgtcttctttttagaaaatggcatttgtccgacatttgctttaaaccgcccccgccagcctctgccaaagacgaattggcccagtttatgggcgacatcatgtctcagattattccctgcgtttggatcactcccatcgattgcttttgggagggctccaaaccgcttggtccattcccagaatacgacctgtaagacattcataaaatcggattactattatgatttagaggtccttttgcccaatttgtccctttcgtgccaaatggaaaactttcatggaaaacgttgaacccggaagctctgttaaacacgacgcgttcttttgttgatgttggaatggttggcgaactgttcgaacgtgtgggtgctttggtttactcgttttgctagcataaaacaaataatttaggccggcattggcgaggcgtaccaagacaggccctgcatcgacccgttggacccggactgtccgtcgacagcacccaatcacttcgaccgttgtgcggcatatgaacatttttcaaaatggaactctgaactaccaccggaccgtcgtgtcattttgcgctcttcgaatggga

SEQ ID NO: 40031 - DNA, 1252 bp, Heterodera glycines
  unsure (1)..(1252): unsure at all n locations
aaaaatccaattnacagttacgccccgggtgccaacgaatgtaaaaaagcgtgccttatccccgctgccgtcctccttctccacaggttcggtgttcgccttgtcgtccaattcaagtggtgccaatccgagttttgccctcaatttgttcgtctcttcgatggacagcgactcgacactaaacaaatgcattttgttttgccaaatgccaacctttcagaattgtggtgtcaaacccggcctctcccgctctttcgccgtcgtcccccggcgatgtgtcgcgatgctttttatgcctggacgaccttaagaaaattatgcggtttttcaagccttttaggtcgaacccatttccgtactttttggggctgcgcgagcgatgccgtcgatgcgtttgatttccaaattcatcgtcgtcgtcgcgctttttcttcagctcttgtgttgtgtcgaaatccaattccttcttccgctttcgctcatatttatctgatggcattgttttgctgaaaatttcccagtcaaatttcctaaattgaaattaattaattgatactttgtgaccaagtaataagcctcaaaatttaattatattcatttgtcagtggtaaataaacncgggcgcgggacgggaacccaagtgttctactccaatccacgcgtgtcctcttggttttcacctgccacttgagcttgtgttggaatggcaacaactgcttgtccactcgtttgtggttcgatgatcattatatcatcatgatcatctacttcaactggctcagcggccttggatgtcgatggagcctcatccgcatgtcgatagacaattgggcacggagtaggtaccccttcccttggatgatatggaacattatcagagttatacagctcgttaatgtgccacaatatgcgccgcttttcataattgatggacaaatctggcagaacaaacgtgcgattgttcatgagccatgattcagcatataggcacacgaagtacccgcagctgttaccatcgtgttgtaccgtaagatttacggcattaaaaatcccggtcaacactgttgacggcaaaatgtcagaaatgatctttccaattttttccgtcagttgccaatccaacctgccataaggagtaggcaaagaatcgagaatatgtgtaccgcactgaacatcatggataattagagtccaatgtccagggaaatgtactggcaaaaaaatgacttctggctgaaacatttgggtcata

SEQ ID NO: 40032 - DNA, 1146 bp, Heterodera glycines
  unsure (1)..(1146): unsure at all n locations
ccagggttcgcagatctgaggctttagcctcattttgtggttttttgataggtcaatgaggctaattttcaaaattagactttgaggctttttgtggttttttgagaaattttgaggcttttggggaaaatcctcagaatcttttaaattttgataaattggcataatgtttggcaatttaaagaatttttttaatgaaaatatgcaaaaaatatggtcaaaattcttattttttcccccggcggcgcctatcggcaccgccggaccgtaaaaatccttaatttacaagcaaaaatttgctcaaattcgcaaaatttggtcatttttcggacaaaatctgttaacaaatcgcattgaaaattacaaaatttttcccggcggcgcctatcggcaccgccggcccccatttcgccccaaaagttttttgggaaaagcgccgcaaaaaaatcaacttcgtttttcatgatccaaaaaaatgcttatttctaacaaaaaaaatgctcaaattgatcatggacaatcaaaaatataacatatgaacattttaaacgtgtttagaaaatcgacaccagaaaccttttatttgaaatgaaaaataaataaaagtttatttataatttattaataaaaaaaaatacaaagtctcattattttatttgaatttacgactcatattaccctaattagtaaatcgagtaaaatatttatttaagaattttttcgtccctaaaaacgttgtcctaattattttttaccatttaaaaagataaaaaattgcactaaataataactcaattgagattacttaataatttattaatcaaaaagataataaaagctgtgatattgtttcatttggaatttaaaattccaattaccagagagaataagaggtactattaaatgaaattttcaataatattaaatatatatagcaaaattgattattaaaaaataattataatgcaaaactgagcagcgattaacaaaaaccaaatataaaaaatcaatgataaattaaattggtttgaataaataacaaaattncaatttcatacaatgattaattcataacgtaatgtataacagtatgagactttagagcagaagagatcgtttttatcttaatctaaaaattcataaaaa

SEQ ID NO: 40033 - DNA, 681 bp, Heterodera glycines
ttcttgcgttttgatgatttgaattattcatttaagtctactgcttcaatgggaaatgctatgaatggatttcatggtggaggaggaggactgtggtgaacaaatggtggtgtatgatgaatggagaagccaaccaacccaaataaattgatttgcatatttaatattgccattctgcatttgatgtaatgggggtgaggggataaagtgattcacagaaatttacggaaacggatggaaaaataaaaattgataaagtttgacttggtccgtgtacggggcgaccgcctcacaccctgagtgatattgccgctcgttagatctcgacaacttaagtccgcgggtgggaagcaacgtaagcctcccaatccctcttcagcccctgttggcagctaaagccatacacctggcctatccatacgcgtgtgggaagcaacgtaagcctcccaatccctcctcagctcctgcccggtgttggcaggtaaagccatacacccggcctatccatccgtgggtgggaagcaacgtaagcctcccaatccctcctcagcccctgcccggtgttggcaggtaaagccatacacccggcctatccatccgtgggtgggaagcaacgtaagcctctcaatccctcctcagcccctgtcggatgttggcagctaaagccatacactcggccta

SEQ ID NO: 40034 - DNA, 1087 bp, Heterodera glycines
acatcaacaacgaaatattttttgaaaactataatagcttttaaactcgcgaagttttcaaagggtaccgaattaataaaaaaaaatggttcataagaagaaaattaagcgccctaaatttggctaattgtcagactgagttgacccctgtgggtgaagtgttggattagcgccgggagcgtttcccccttcttatcctagctggctgggcctctggtttttggttagcagattatgtacatggcccaaaaagccatttgattggattttaacctaataatgattcgcacatgtaaaaataaataaacaaaacatacaaagattcaaattttttgcattttacatgctttaacctttttccgaatgcttaaatcgcttaaaacccgtaatatttggggatttgaaatgattcaaatgctaaaagatttccaaaaattttaaaggccaattccatctaagtaaatagcgtaaaatttttgctgctgcaaaaggtctcgtctttgctgctgttgggtgttggttggtcaactgttattgggggggggggggttggcatcgccgccgtcgccgccgcgggcgccccaccggcggagcagcacaaatgcaaattaaacactccccccgggggaggggggcggggcggggggcaaaattggggttattgccatggctgcgcgacgggtggggggagaggcgcggccggccgcgtcgtaatggcgcggcagatggtcgaccggccaaaattggcaatcgaatttttgggtgggcgagaaatgggggcacaatgtgtgcacagcagcagaacaaaatgttagaggacagtcgaatttgtagtcgtctcgggacaacaattcagtgtgccatttgtagtgctcgagaatgtcggtctcgataaaggtctcgtctttttattcgagtttggtctcgagaaaagtattagggttctttggtctattttcgaaaaaaatatttgagaaaaatcccgtttttattagggtattattgatctatcaaaacgattctcgtcaaattttgaagttaaatttggcaagaaaagctttaaaactgatttaaattagtttgatat

SEQ ID NO: 40035 - DNA, 1169 bp, Heterodera glycines
tttatcatatgctaaatgcttcaccagttttcttatatcaacaactttttttaaaagttcttaccaaaaatccaaaatttttcggttttaaagagtataatttttaaattcctaaaaaggtcgatcttaggggtgtatttttcatttttattgcatttttcttatgaaaatttcccaaaaatgaccgaaatatgctctaaaaacgcaaaatggcaaaatatgaatttgttctcgaaaacccccaaaatataacaacacctgggacctatttcaattcggatcaagtcctcaacttgatgactcgacttgacgaacaaatcgagtgtttagtttcaattaatttttatttatgacttcatctcatcaagtgttgaattacactcgatgtaatttcataatcgagtgtgagaatttaaaatcgaataaataggtttatgttttaattacattttaaagactcgacttgattttttgcacttgatgtacacaaaaacaaaaacaaatttcaaaacggcatatctaaatagaacaaagggtcgagttaagcttaaaaaacaaaaaccaattataaaatcaaaaaatcactagtaaaatacaacaatccaatttactcatgtaaaaaaaatttctttcgaaattgtttttttaataaatcattttaagaagcgttaagtatttcatcatttttattatagattttatttcacaaaagtgcatgtctaacaaaattcctaaaatcttgggaaacatttagagccagaaatatagacccgaacatctctctaccctaaatttccccataaattgccaaatttggtttttttaattagaaatttttttaaaagaagtaaaaataatttgcaaattcaatttttcaaggaaaatttttttgaaaattttttctcactaccgtacttgctcgattatagccccggggggctctattttctaactccctcaaaagggggggggggggacattattcgagaggggggttctaatcgagagggagtttctaatcgagcaagttcggtatctttaatttggactgtttggcgtttaaaaatttagttttttttatgaatcttatcagattataaaaacctcatccaggatttactttggcttagaagaccaatgccttccataaaatttaagctattgagcat

SEQ ID NO: 40036 - DNA, 1122 bp, Heterodera glycines
ttagttgatcagtgtcaaaaacataaggaacatatatgcaggatagctgcattaataagaaaaagaaattaaagaatctatagaagtaaaggaatattaattacgtaaattgtgtattaaatgctgcaaaaattcttcctatgtttataacaaaacactgaaattataatttacacgttaaaataaaaattaaataaaatatttgtcgaaaatctcttaaataggtgtctccaacaatgtttatcaatagcatactaataataaaaaattttttcttcaatgaactacgttaagctagaagccaacaagaaaattaaaaaacaaaaaagcaaagaaaaaattatttaataataatgcagaaatattgaaaaattcactaggccgaaatccgaaatcgaaaaaaagaacggtcataaatgtaatttaaaaaaattataacgaaatacgagtaatacaaataaaataatattttttctaaaaagtaattgatccttaagtacagtaacatgctttgaaaatgccattaacaagaaaacatttcacaagctaatttatttaatacgtgaataactagtaaaatgatagcatcttttctgacccagctaaaaacatacctgaggaaacatacaataagtgagtttatttagcaaaagttaaaaaaagtaattaaaacctaaagcaataaaatattaaatataaaaaataaaatattcagaaatctttattttttaaaaatagaaccaaggatgaaggcttgaatatgaaacaaggtggatcaattggacggaattaactttccttaatcatacatttaaaaaatgattgactataatttttgggtattataattcctattttaaaactaataactattcgaatttttgtaaaaattctttctctaaaaaaaataatttgtaaattttatgtagctaagaattttttgatcaaataccgataaaaatgacaacctgaataatttttctttaatatattcctttttcatatatttttatttctttagtatccgtataccattgcaatgagccccactagtttgtgtccgcccattgtgttatttcttacaatttgtagaatttattacttatattaattattaactta

SEQ ID NO: 40037 - DNA, 1032 bp, Heterodera glycines
  unsure (1)..(1032): unsure at all n locations
ttttattatgattacaacaaatcagcatggcgtctcgctgatatggtatgtttcagttaaggtttagccgatctacaaatttcggcactgtctattttgtaaaagcgaatcaaattcctttggattccaaagtggaattacagaattgcgacggcaaatcctaaatagacaacgacgctttcatcataaagctttaagggagacaaagtaatacgaatatttcaatttcttacttatccgaatagacaaagataggttacacacgaacatttttatagaaattccggctgaaactaaaatccctcttttggtcttaacctatgatttttggcccattatggatgaattaagtatagaaggcgtcgcagaaatacattcatattttctaaattcgggtttcagaaaattaagatttaaaagaggctaaattacagatgcttttcaaattttgggtgtatccgaatagaaagaagttggaaatcagtacttttcacgcctataaaattcgggccgaaaaaattggtgtttgtgactagaaaaatagcagatgcatatcaaatgactacagaaaattacagcctccaagaaaataattgctttgcacaagcaatattttgtagagcccatcaaacacattgtgcttataggaaaggcagaattaaacaataggggcctttttattatgattacaacaaatcagcatggcgtctcgctgatatggtatgtttcagttaaggtttagccgatctacaaatttcggcactgtctattttgtaaaagcgaatcaaattcctttggattccaaagtggaattacagaattgcaacggcaaatccaaaatagacaacgacgctttcattataaagctttattggaggcaaagtaatacgaatatttcaatttcttacttatcagaatagacaaagataggttacacacgaacatttttatagaaattccggctgaaactaaaatccctcttttggtcttaacttatgaatttttggccccattatggacgaanttaagtat

SEQ ID NO: 40038 - DNA, 673 bp, Heterodera glycines
  unsure (1)..(673): unsure at all n locations
caccgacaccaaaaacatggtaattgtctcaggtatgcctttagagaaattttatggntaattattactttttgttcatactttgattttaaaaaatgggaaaatgggggtctgatggtaccgttaggctccgtcgggaaaatttagattattgtgcaaaattaaaatgcagtcgtttaatcccataacaagctccagtcgtattttcccgcatctctttttaataacaattttctcgtaaggtcgttccggcgacagaacccttgcttctaagctgatcagaatcgctgagtcgagagagaagaagagggcgacaaacaacatggtcacattggaagtgaaggtcattgttggttgtcatgtgtaaatgtgttaaccatttaaagttcggaactttagagacggataaaattggaaggggccgaattggaggcgtatttgatgaagaagcgagagaaggaacaggaggcagcgaggataaggtgtcattggcattccattttttccaatgccaaattcaatttgaatcgttaggcttgagactgttcgccggaatgccaggcttgagaatgtcgagtcgtccgaagactcagatgacgaagaaacgttggctgctgtcgttgcctcagtgacgacaagcggaaagaatggaaatttggccaacaaaaagcca

SEQ ID NO: 40039 - DNA, 1329 bp, Heterodera glycines
aaaattttcgattctgatgtcattatcggtcactgacttcctattttggcgacttcgtcactaaaatagttaaaaatcactattttggcgttttgtcactatttcgacattttttggaaaattccttaacaaaaatgcaataaaaccaaaaaatacacccctaagaatcgacctaaaaaaatttcaaaaaaatacacccctaagaatcgtcgagctaaaatttttcaaaatatactcctatgaaatgaaaaaaatttttttgaaaaacttattttttagaacaaaacaaaggttgtcgagaaaaattcggcataacttttcttaaatacaacctaaaaaaataatttcgaatcatacgatagctcttggcttgctctataaacatgaaaaatttcagaatatttcattaagttttctgaaagttatgtctatttttttaacatttttggtcataattttttaaaaactcaatgaaattttctgaacctttttaggctaatagagcaagcgaagagcaattgtatgatatcaagattatttaatgggttatgtttaagaaaagttatgacggatttttctcgaaaaatctgtaaattggcagtttttacgaaacgacctatgtagcaccaattcttttatttattaattcaaaggtttttttgcccaaatgttcgcttttcaagctaaataacggctttattctcgggtcctctcttttggtccccgttcattttgtccttttcttagaaatcgaggggagaatggcgccactcattttctgtttcaattttaagaaaatttaatggaccaaacattttgtttatgtatttatggtttttgaattttcactgctaacgaattgtttgtatttataaagagaaaagatatttaaatttagtaataattcaatgaattcgcgaataaaaggacaataaaacgctaattaacaaagaattcattagtaagtccatttttcaaagggttaattaagcaaagaattcggctgtgatattttaggcaagaaaatgatcatttgatcggcaaaaaactaattcgaaaaaaaccaaacaatgacaaaaggaaatttctaagtaacgaatgaaacatgtggacacttctgggaatttaaataccatttttggcattttcaaacccaaaagggtgtaatttactagaaatataaatttgaaagcacgcaatttgttcggtaaaaagagtggtcattaaaacggaaattctgctgctgaattgggccgatgtgtatgacgcccattatgaggaagaagccccaatgtggcgtgctgctgacgtaaaagcataaaaaataat

SEQ ID NO: 40040 - DNA, 1010 bp, Heterodera glycines
tgcctgaagaatataaatttgactgaacaaaggcggcggcaaaaatgaaagttttgcttttttcttgtttcctaattgggatatttcatttgtattgtagctaaacatagatattttaagttttttccttgtttataattgacaaaaaaaacatttgtaagagttatgggcaaaaacagcttgccagactaaaacgaccctctgactaaaccggccagactaaaacggccagactaaaacggccagactaaaccggccagactaaactgacccggtccgtaaaaagtaccctgtaaactgtataagtgtacccctgtttttgcctttaaatcctttacacggagttggtattcagaatttagcacccgtctcacggactgaaattccgaatgatgttttagccatttttcgaatcttccgcttctctgttgtccctattttaaagcatatcccgatatttgtttttggccccattctctgttaaatttcactttcgtcaatttacggaattgtatcattcgggaaacgccgtgtttgagggcgcgtacaacgatggacacgttgtgctcatacctgatggtgaacaaagcaacagtggataagtgatcggcactcatctccaattgtgatcggaaaaaagcgatatctaattttgtattgtacataaataggttattcggacaataaaactgtaatgtgcatttttaaattggctgtggttttctaaattttgtggcaccgctcaactcgccgcacctttgttttatgctttctcgccgccattgaaaaaatgaatgggagaaaattagattcgataaatcatttaacgaaatattcttaatcagaactttttccctaaatccgcttgcaaaagaaaaaccaaaattctagctatttttttatcgggaccaccaattttgaccatttgcccgttgctgaagggagcaacccccgaaaatccatgaatgaattcttcctgattttattatggaaaaaatttttttgcaatc

SEQ ID NO: 40041 - DNA, 1310 bp, Heterodera glycines
  unsure (1)..(1310): unsure at all n locations
tgttaacatattttagtgcaatttgtgttgaaatgatccttcttggattaataatttatttcttatcttcttttctaatttgtgattcgtattaggcggacggtcttgaagcgcattttagttttataattaatttttcatatcagaaatttttattttttaaaatatttttgtttattttaaatttgtttatattttcaaatgctccacagtgacattataagtttttattttttttatttcaactgatgaataaataattttcttttttttaataaacaaatgacttttagaattaaaatgaatgtttttagtttatatttcagcagctttcattaattatttatgcattaatgctcgaacctcgcggattacggcttgatgctgatggctttgttcataatctgcagtgaaagattttcccttaaataatgtttttttcatcttttaaattttatgttgcactgaaaaaattaatttcctttttattataagatttttacttaaacagaagaatctattttattatacctttttttgatgatgctattgcaaaccaaaatttttagtaataataataatatagtataagcaaattaaaccatatttttaaaagtttttcgaattttttaaagtttattataatttattaacgagaagcagtagttacatataccgacttatcgcagtgcgcgaaatgtttttcgcgcacaaacgccagggtgtcgggcggttttgtgtttgaagttgccgcttttggcaggtgttcgggattggtgggggcgggattctctttgaaggcgccgacatcccgagggtattggcgggtttcgggaagtgattgattgattgatttatggtcgggagggggggggtgctaattgcgcgaaattttgattgatttatggactcgaaaaagggagggtggtggtagggggaatggggaatgcagcgcgagttatcgcaatgcgcgaaaacaatggaaatgaatgagggggagtgcgctgggtggcggcggtgacatctggcaacttgtcgtcgctcaacggaattttgacaggatgcgggggggggggggggagagatgtcagagaaaggatggaagggtataatatgcagtggtttggctgaggggggggggaattcaatggaaaatttggagaaggaaatattattaatgtgaagctggcggcaccgtcttttgtatatggcggccattgttcggacacttctgttgatcgttgacagaattgtaagtatctttgggagaaatgggtcgcttggacatcactttctttccnccaataaac

SEQ ID NO: 40042 - DNA, 705 bp, Heterodera glycines
  unsure (1)..(705): unsure at all n locations
ctttatgtttagtagaagtgtatgtttcaccnncgcccaatttctttntaattgtaaaaaaatntagtaatttctcgggggttttattttcaaaataagtcgaacagttcgccatcccaactcacctatgactaacaatagctgggaatgcaacgattgcaaaatgtcattttcattggccttccgtgtcccattccttccgattgaaaattctgactaaatatcaaattaacaaaacaatgaagggtcgtcaaatatactttatttggttcgcccttgtttatgtactccaaattgcaagtctgcgcaatgacggtctccctcatgttgcgaattttgtcttcagaacataaaagctgtcgcagcagcgctcgtccgttccgcccgtcacacgggtcgtcagaatgcggatgaccatccgcagaaggcgttgccgacacttcaccagcaacaggaacaaagtcgactcccttggaggaaccgtctcgtaaatggctacaaaaggcgaagcgtaatttaccgacacattcggaggcaccacttttgtaccttttgctaccactcgaaatgaacgttttcgcggaatgggctcatcattttcatcaaaagagaattgctgatgcgaacgttgctggtgagaaacaaagtgagcggaagacgtcatcggatttgggggcacagaagaggggggatttgagggagcga

SEQ ID NO: 40043 - DNA, 620 bp, Heterodera glycines
gtacatttttaaatactttaaaatatatttaatttttttcagtaaaaagtgggaagatttaaatggcagtgagtattctaaacggaaaaatgatacccttccgatttgcagcatttgggacgtcgggaaaaagttttttgtttttgtttacattcccgtcacatttcgtaatgactttttctcccccccccccccttttgggcatctatttttattgctttctttattttgggaccattttttaattttgattaactaaatttttggagaatttttctcacaattttccatttttgaatattctattaccaattggtaaacttaaaactttataagtacacaaacatttaaaatttggtcacgtgattaatctcatctcattaattggttccttctcgtcctccccgtccattgtttaactgtttaaattttagtgtaatttttgtgtcaaaaattggcgaactgtcagtcacccaacaaatttttttccctttgtctatgctccatctccccacccattcacctacacactaaagtgtcgctggaatttggtgaagaatgggaaggcgggggggggggagaaaggacatcggaatgtgaggggggggggggggtggagg

SEQ ID NO: 40044 - DNA, 875 bp, Heterodera glycines
ggggggggggagagcaatggcctttttattctccagggaatttttaatttatttttttgccagaaaaatggtatctctttttttgagaaattttttccatacaaatattctcagcatgggcagaggggggcggagagcaatgtccattctattctacaggggaatttttaaatttattctctatgccagaaaaatggttatctcttttttgcgagaaattttgtaccatacacatattcccagcatgggcagaggggcgcggagagcaatgccatttctattctacagggaattttataatttattctctatgtcagaaaaatggttatctcttttttgtgagatattttgtaccatacaaatgttcccagcatgggcagaggggcgcagagcaatggccattctattctacagggaatttttaaatttattctctatgccagaaaaatggttatctcttttttgcgagaaattttgtaccatacaaatgttcccagcatgggcagaggggcgcggagagcaatggccattctattctacagggaatttttaaatttattctctatgccagaaaaatggctatctcttttttgcgagaaattttgtaccatacaaatgttcccagcatgggcagaggggcgcggagagcaatggccattctattctacagggaatttttaaatttattctctatgccagaaaaatggttatctcttttttgcgagaaattttgtaccatacaaatgttcccagcatgggcagaggggcgcggagagcaatggccattctattctacagggaatttttaaatttattctctatgccagaaaaatggttatctcttttttgtgagaaattttgtaccatacaaatgt

SEQ ID NO: 40045 - DNA, 594 bp, Heterodera glycines
aactttataactctattattatcatgttcttgtcctttttaggaggtcattgactcagtcgtggccagattcgacgctgatgaccagttgctatgctccctgcctgtctgtgccccttacacatcgatgcaacgtttcaaattcaaagtgattttgcattggtccgtttcttgacaaaatcaaacattatttaggttaaactgactcctggcatgttcaaacgtggaaaagcggtgaagcaagcgcttgagctgtttaatgttcgtcagttaaataaaaacccatcaattgcaattcccgttttagcgtgacaaatctctctcgcaagctgaagtgactctcctcaaaagtcttacgggtgaaatcgaacgagtaactcaattattgccgtcgaaggttcgcgtgtcggcgccagcaatgaatgtgattaaaagaaaaaaatgattttcaccagaatataaacatacacatcgaatatgcatttttgaagcactcggggtcccattgaaaaataaagatatgttcatgtactaccagttttctctgcttggggagaagtcactagaacgggcccagtacccggtttttaccggg

SEQ ID NO: 40046 - DNA, 360 bp, Heterodera glycines
acaatatatacatacatacatagaatgcttctcacttctcctgttcttcacttcaccatttccattgacttcactgttctgcattggaataaagcgcacttctctaaccgtctactcgctcattattcccccactctttggctggtcccccgtgttttccgcccattcgtctctccgcccgccgcccttcttagcccttccgttgccccctcgtggtcatcccccctcccggtcgttgtccatcccctttgtgcgacaagtgctgtccccgtggcggctccataaaaccttgattttcattgataaagtattttttgaggaaatacttttgaaccaaacctcatttgcctgattgatcta

SEQ ID NO: 40047 - DNA, 730 bp, Heterodera glycines
aaatgttctacggttatggcaataaaattgccaaattgttgatgtttgtcaccaattttgccattttcctcatcggcgtccgcttcttcgttgcattttcggtaaacacaaataattgcaaaattttctttattaatttggaaattagaagtaatatattgacttttcagcccaaattcggaaccaagtttcccgactttgacagtgaggcgcactttgtggatgaattggacaaggtatttaactgggcgaaaattggttaggttcttataatccattgggtgaaatttgagaacagagtttcccaaaaaattgtagccatttaaaaaaatgaaatatttgatgttttcgtttaaaattgaatttgactaccaacaaaatggttttgcatgtttaaattatacaacataattttgtcccattccgaaccctggattcgaataaaactcgaaaattattttttgaacaaaaacggcacattttcaatttagcccctccccccccccccccccccccgaaaaaaccacatggggacccagcaaaaattttttgtcataaaaagtcgtgaagacttgttactagggattttggggttgctaatcacgaatctaacatcgatttttgcaaatcttttaccataactcgaactgaaagtcgaaaacttaagttttttggatttcgcttttttaaatcgaatttaggtttgggattcgaaattaggattaaatat

SEQ ID NO: 40048 - DNA, 946 bp, Heterodera glycines
taacatgcaatttattggttttttaaggtggaaaagataaattggggattttttggtaatttattaaaaattttgttcaaaaagaattaatttcttagaaatgtaaaaataagatattaggcctaaaaccccaaaaacaaagttttatttagttttcagtctccattccatattttcagaaatttttttacgaaattttttttattttttcccaaaattgtccgcaaatgtccgtccgcaaatgccccactgcggcgttaatactatattttattttttcttatttaattgatttaatattatctaatttattttaccttttcattatattactttttattttttgcatattattttaccaaaagtgtaattaaatttgattttatcgtttatttttattacattttttaaatatgctaagcttcaaacgcatttattaattaaaatatgtcaaaatctttcttccaaagacttacaattattctgtttttttattattaattagtttaatatttttatagaaccatttttctctaaggcctttaatattttggttttaaataaagttgatatgtttatttaaatttttaacatttgtaattttattaattaaaatttgtattttcatacataaaagacaataacttttttatcatgcatttttgtaccaaaatggaattacaattatgacaaaatcaaaagtgatattagtcaaatccaataaaccgttaaatgataataaaataaattcattggtgtccccatttttaaaattgaaattgtttaattgcttgatttatatgccttaatttaaagttaaataatttgaataataaaattttttaataattagtccatttgtcaaattacaggttggttttattattcataattaaaaataacaccaatatatatataatatcgttagacaaaaaataaaactgtt

SEQ ID NO: 40049 - DNA, 1302 bp, Heterodera glycines
  unsure (1)..(1302): unsure at all n locations
atttgagtgaaaaactgtaattgaaagaaatgttgataccatttcaattccattttgaggcgattgaattttagcgattgattggttcagataaatgaaatatcaattaattaatattaagttttgcgaaacaactataataatttgagaatataatttaaatatttttaaatgaaaatattttttgcggtgcgcgctatcgaaaattctcttttcagaaaattggataaattcatttaatatattttcttgctaaatacaaaaatcaaacagcttacctatctggatatcaaaaacgaactccacgatcatttcgttcaattcagtcactcatcattcagttcattgtttgtgtgagccggtcaatccgggcatggaaatcacattgttcgtgccaggcacattttgttgcgagtggtctccttgaattacagcataattaattagtgacaagttctccataattggttttacccttggggccgtcaaatgacactttggcaatgctaatgccaaactcggcacatttcgagtcaatttcactgatttgcccaccaaactgggcactcaatgcctgccattcgctgttgttgctggcatgggaagaagcggaggcggcaatggcgaacatggcacggacgaagccgaggctgtgggcacactcatctaaaaggcggaaaatataaaaataattaaaataaaataagttaattggctaatttggcaatggatttgatccattagtccatcaataccagaagaatggttggcaagagatgcttcgatgtcggccaaaagagttgcgtcgccgcccttcgagcagccgatcagttggcctttcaatgcgcccgcaacacttttggcatccaaacaaagcgatgacttggaaaaggaatgggcgaaagtgccaacgtaattggccatcagcgaaaccactttttgactgccgggacagcacggatctgcagaaaacaattaataattgcaattaattaattatagttagttaagaaagattaattacgcggtgctgaaacacaacatttgcacagcaaacagaaaactgctacgatggcgagaagagagacggacgaagaaggagaagacatttttgaatgattttggctgatttggtggaatgaataaatgatgctggttggttgatgggattggcttattcatattgcttaaatacgcttttttgttggaaagtgccgacattctttccaagttggcattggctggcggcggctttttctttttgagaggaaattgttggatattttcaaagantattttcct

SEQ ID NO: 40050 - DNA, 1062 bp, Heterodera glycines
ccccatttgatgctaattaataaataaattaataatatccttattcaatgttgcctcattttatgttttgatttaattttaatcctaaaatcattggttagatcattcttctaaatttcgttaatttaccattggtccaatgctcgatttttttggttgaggaaatcagaaattatttctgttttagcaattcacaataacttaatagcaacaaaatttatcatgggatgaaaatgtattatttaaagtgtttgaatattcatttttttataaattcaaaaatttattttctccttataaattctttacttttttccgatgctttcgaattttcggcctctaaaaatctaattgtgagacattcaaaggtcaaaccgcataaccttcagcggtttcatatgttttggttgcaactttcttaaaaaagtgaatacaatttaaaagatgaattttggcatttcgccaaatcatgttaaaaatgtgtgcattcttttgagtcttgaccaaatgttactgttttgagaaatgacgactggtgaggagctccttcggttggcggatgacgatcgcttgtggacatttccggatgagttggtgctgcgcgttgtcggcattgaccactgctcagcggttgaccagggctacccgtctcatgtgcagtgccaattcttcaaggcattgtttcttgctgtgtgcccaagatttttcaacgtgttcagtgaaggggggggggggggtgatgtcaccaatccggcgggcatttcatccctgagcattggttcgcccaatcgcttctgccccaacccgccgccaaggaaatgaagagcacacctagcgatgacaactcttttgatcctcgtaccaatccgacctgatgagttgtttccactcacatcattagcagtttcttaaaggaaataccaattttatgttaattatttttataggatcatcacagaataaggatttccatgtccaccgagacggtgaacttatgacacattggaacgaatattcaaaagatatttcaatatttcaccttttgtcacgagtagaagccga

SEQ ID NO: 40051 - DNA, 935 bp, Heterodera glycines
  unsure (1)..(935): unsure at all n locations
aggcaaaatatgaacgcttagttgtccaattaaaagcgctttttgaaataattgcttgaaccggtaataatgagaatgtcattttttaaacaattctacgagacaaatactggacctcctatcaattaggcaaaatatgaacgcttgttgtccaattgagagcgctttcgtaaatgataattgcttgacggtaataatgagaatgccattttttaaacaattctacgagacaaatactggacctcctatcaattaggcaaaatatgaacgcttgttgtccaattgagagcgctttcggaaatgataattgcttgaaccggtaataatgagaatgtcattttttaaacaattctacgagacaaatactggacctcctatcaattaggcaaaatatgaacgcttgttgtccaattgagagcgctttcgtaaatgataattgcttgaaccggtaataatgagaatgccatttttaaacaattctacgagacaaatactggacctcctatcaattaggcaaaatatgaacgcttgttgtccaattgagagcgctttcgtaaatgataattgcttgaaccggtaataataagaatgtcattttttaaacaattctacgagacaaatactggacctcctatcaattaggcaaaatatgaacgcttgttgtccaattgagagcgctttcggaaatgataattgcttgaaccggtaataatgagaatgccattttttaaacaattctacgagacaaatactggacctcctatcattaggcaaaatatgaacgcttgttgtccaattgagagcgctttcgtanatgataattgcttgaaccggtaataatgagaatgtcattttttanacaattctacgagaaaaatactggacctcctatncattangcaaatatgaacgcttgttgtccatttaaagcgctt

SEQ ID NO: 40052 - DNA, 917 bp, Heterodera glycines
  unsure (1)..(917): unsure at all n locations
ttgaattttcttgtgattcacctataattttcagttactaagttgtcagttttattctttaattctataggtaaatcccgaaaacattgcaccaattgacttttctacgataggtaaatcccgaaaacattgcaccaattgacttttctccggattttaagcccgagtgttgaattttcttgtgattcacctataattttcagttaataagttgtcagttttattctttaattctataggtaaatcccgaaaacattgcaccaattgacttttctccggattttaagcccgagtgttgaattttcttgtgattcacctataattttcagttaataagttgtcagttttattctttaattctataggtaaatcccgaaaacattgcaccaattgacttttctacgataggtaaatcccgaaaacattgcaccaattgacttttctccggattttaagcccgagtgttgaattttcttgtgattcacctataattttcagttaataagttgtcagttttattctttaattctataggtaaatcccgaaaacattgcaccaattgacttttctccggattttaagcccgagtgttgaattttcttgtgattcacctataattttcagttaataagttgtcagttttattctttaattctataggtaaatcccgaaaacattgcaccaattgacttttctccggattttaagcccgagtgttgaattttcttgtgattcacctataattttcagttaataagttgtcagttttattctttaattctataagtaaatcccgaaaacattgcaccaattgacttttctccggattttaagaaggagtgttgaattttcttgtgattcncctataattctcaaaaggtaagttgtcagttttattctttaattctataggtaaa

SEQ ID NO: 40053 - DNA, 1035 bp, Heterodera glycines
cggagggaagaaaagtggacgaatggcgcagacgatctttcgaatgggcaaagtgagtgggcggattgtgctgatgagagtgatggcggtggttggacgggaacgaaccgctgctgtccagcgaagagttgagaagttctgcaaggaaacgccaaattctgacagactacgaaagacgaccaaaaaacagcataatgcgaacatatggaggacacggtttaaaaaacattggcttaaacaaaggcttaggtttgggccaagtgttaaaatagtaaatcgtataaacaaacgaattaaataaattcgattttaaatccctattgatttggcgaaatgttttttccttatttaattaaagaaaactgaggaaaatggaaacgaaataaatcaatgaatggtaattcttatttttattaggcagtccaaaaaatagaataaaatacggtaagaaaaaaacatttatttggccgacctttgccttttttcgccttcgccctgcccggggctatcattccccgccgccccctcaattccccgggctttttgccctgaaaaagcctcacaattcaactaatttggccctctttcatcacggtcaactgacagtgtattcggccgagtttagagatgaagaaaaagtaaaaggagagagaagggagggacagagagaaagagagagagtgtgagagagaaaaagaggggaagagagcgaacgcaaggtttggcacaacgaattgccaaaaaaggctcaaaaacatcgcttggggaaaattgaaggaaagagaaagcaggaaatggttgacgtaggaacaaaggaaatgagacggataaaaaaactgagagatgggcggatgggtatcttctccagtcaagagtatgggatgaagaaaaggccaagagagttttccgttgcttttcccgtgaacaaaaatagcgcaatcccaaggggccaaagaggaataataaattgaatgaaagagaaggaacggccaaattatgatgagatgagaatgccgaagtgggacgagaaatggg

SEQ ID NO: 40054 - DNA, 503 bp, Heterodera glycines
  unsure (1)..(503): unsure at all n locations
aaaaacacaaacaacggcagcgaaaaagangagccacgcgaaaacacagcacaaacgacagcaggcagccaagagaaaaaccagacaaaagacaaagcccgggggacaggacaaacggccgagacaagccgccgccngaggcagacacgcagggcggggcaaaagaaagacncngggggagacgcngaccgaaaagngngagaaacaggggaagcaagaagaggcagaaagcggcaacacaaaagccacagacaaggccaaaaacaagaacaaaagcagccacaaccaagcagaagaaccgcgggaacagaggaaaacacaaaacgcgccgccaagagagcaacaaagaaaagcaagagccaaggacaacgcagcggaaacggacacaccancagaaagcaaaaacagaaacaacggcagcgaaacggagacagccaaagcgaaaacacagcagaaacgacagcaggcacccaagagaaaaaaccgacaaaagacaaagcccg

SEQ ID NO: 40055 - DNA, 969 bp, Heterodera glycines
  unsure (1)..(969): unsure at all n locations
aaaatggtgtagtaaaaaatcgtatttcgctcaaaaagcttctcaaacaattttagcgcatccaattccttctacaatcgcctttatacatcccattatgagcgctaaaattatcagagtgccgaaaatcgcatgtgatctaagcctagaaaaaaatggtgtaagtaaaaatcgtaattacgctcaaaaagcttctcaaacaattttagcgcttccaattccttctacaatcgcctttatacatcccattatgaacgctaaaattatcagagtgccgaaaatcgcatgtgatctaagcctagcaaaaaatggtgtaagtaaaaatcgtaattacgatcaaaaagcttctcaaacaattttaacgcttccaattccttctacaatcgcctttatacatcccattatgagcgctaaaattatcagagtgccgaaaatcgcatgtgatctaagcctagaaaaaaatggtctaagtaaaaatcgtaattacgctcaaaaagcttctcaaacaattttagcgcttccaattccttctacaatcgcctttatacatcccaatatgagcgctaaaattatcagagtgccgaaaatcgcatgtgatctaagcctagaaaaaaatggtctaagtaaaaatcgtaattacgctcaaaaagcttctcaaacaattttaacgcttccaattccttctacaatcgcctttatgcatcccattatgagcgctaaaattatcagagtgccgaaaatcgcatgtgatctaagcctagaaaaaaatggtcaagtaaaaatcgtaattacgctcaaaaagcttctcaaacaattttagcgcttccaattccttctacaatcgcctttatacatcccattatgagcgctaaaattatcagagtgccgaaaatcgcatgtgatctaagcctagaaaaaaatggtctaagtaaaaatcgtaattacgctcanaagagcttctcaaacaat

SEQ ID NO: 40056 - DNA, 1048 bp, Heterodera glycines
atggcacgccgattgaaatttgaatacaaaaaagaatgtgctattgtatttggagatttgccccccgaggttaagcgagacacaagtcaaacggttcaacgaccagaacgacccgtgcaaaattctgcttgcaaccgatgcaattggaatgggaatgaacttgaacatcaaaaggtcgcttttctttttaaattgcatgggtcaattaatctttgatatttttcagagtgattttcacaacattgaaaagtcgtgatggctctttgctccctgcgtatttcgtaaaacaaattgccggcagagctggcagatacgcatcagcatattgcaccggcgaagcgatggcgttggatgatgctgatgctggactgcttgagaagctgatgaatgaaccaattgattccattgaccaggccggcattttgccttcattcgaccaaattgaggtgagtccacgctctttttcattcatttattcagaaccctttaataatccattgaagatgttttcctttcacttgccgcaatattcgctgactcaactgctagacatattcgtttcaatttgcacagttagcgaaaagtactttctgtgtttgaatgactcaattaaacaaattgcgcaactcattgaacacatccaactttcacttcgggttctcttctcatcatacaatatttatgactttgtcagcaattaaggaacgttacattttctgcctcaccccaatcccttccggtgctcacccctttcttaactcggcttttatcaaaatggtccgacgttattctgagggcaatgcaataactttcgcatggatccgtcctttggttttgcctgagttgcgaattgtcgacagagtcgacgcggtcaatcgacttgttgacgtatacgattttatgggcgcgtacctttggcttagctatcgttttgaggtaacactttatttgcagagaatcaatctttacaatattttctcaatatttaggaacatttttctgaccgagaaaaggtccgcgagttgcaacgagaatgtgtgggatttat

SEQ ID NO: 40057 - DNA, 204 bp, Heterodera glycines
cccccccccccccccccccccccccccccccccctttttttttttttttttattaaaaaaaaaaagagggggggggggggggttgtttttttttttttttttggggggaagggagaacccccccccccccccccttttttttttttttataggagggggggggggggggagaaaagaaaaaaaaaaaaaaaaaaaaaaaaaaaa

SEQ ID NO: 40058 - DNA, 1080 bp, Heterodera glycines
catctttggtagttcgctttggaatagcaagcccgaatgataaatagctcgagcgcaaaacgcgtgcatgtttgggaaaagtatcgttcattaccaataattgaggggtttatttttaaatgaaattttatgataaaccttattatctcagaagctatttaattgattcgaatgtttttatcgcggttaattagagcaccgaaaactggtttgaatcgtgaagtttatcatttctaactcacttctcaaaattgttgataaattgcaaatatatttttccaaaagtctgtagacactttctgaaaataaattctatactcatgtattttccacttattagattttgcaggcttattgctgcatgttctttgacacttcttcaaaataacctatgccctttattcgttcaaaacaccatctttgttgtttcgctttggattgacaagcccgatgataaatagctcgagcgcaaaacgcgtgcatgtttggaaagtatcgttcataccaataattgagggtttatttttaaatgaaattttatgataaaccttattatctcagaagctatttaattgattcggatgtttttatctcggttaattagagcaacgaaaattggtttgaatcgtgaagtttatcatttctaactcacttctcaaaattgttgataaattgcaaatatatttttccaaaagtctgttgacactttctgaaaataaattctatactcaggtattttccacttattagattttgcaggcttattgctgcatgttctttgacacttcttcaaaataacctatgccctttattcgttcaaaagaccatctttgttgtttcgctttagattgacaagcccgatgatgaatagctcgagcgcaaaacgcgtgcatgtttggaaagtatcgttcataccaataattgaggggtttatttttaaatgaaattttatgataaaccttattatctcagaagctatttaattgattcgaatgtttttatcgcgggtaatagagcaccgaaaactggtttgaatcgtgaagtttatcatttctaactcacttctcaaaattgttgata

SEQ ID NO: 40059 - DNA, 878 bp, Heterodera glycines
ccttctctagtctgggctctaccaaacactcacatcccccctgaaatgcaaacgaaaaaaattcttgccgaaaaaatgtttatctcttttttctcctggggatttgaccgcaaacttggtaccaacatttgccttctctagtctggctctaccaaacactcacacgatatttgaaatgctaacgaaaaaaattcttgccgaaaaaatggctatctcttttttctcctggggatttgaccgcaaacttggtaccaacatttgccttctctagtctggctctaccaaacactcacacgatatttgaaatgctaacgaaaaaaattcttgccgaaaaaatggctatctcttttttctcctggggatttgaccgcaaacttggtaccaacatttgccttctctagtctggctctaccaaacactcacacgatatttgaaatgctaacgaaaaaaattcttgcccaaaaaatggctatctcttttttctcctggggatttgaccgcaaacttggtaccaacatttgccttctctagtctggctctaccaaacactcacacgatatttgaaatgctaacgaaaaaaattcttgccgaaaaaatggctatctcttttttctcctggggatttgaccgcaaacttggtaccaacattttccttctctagtctggctctaccaaacactcacacgatatttgaaatgctaacgaaaaaaattcttgcccaaaaaatggctatctcttttttctcctggggatttgaccgcaaacttggtaccaacattttccttctctagtctggctctaccaaacactcacacgatatttgaaatgctaaccgaaaaaaattcttgccgaaaaaatggctatctcttttttctcct

SEQ ID NO: 40060 - DNA, 1271 bp, Heterodera glycines
ctccgatgaaaagtccgaaaaaacgacaatcaattctctcccttcaagccgcaggtataccggcaaaacggcctaaggttttgttggtcgatgaaaaaatggaagaggcgaagtgcacttcatgggctgacaaatacaggtggtggtgattcttataaaagctttttaaatataggcgatttttttacatttatcattcgacacattcctccagaatgttaaaaactgacaaaaaattaaaaaccttttaattcggttactttctctacagaccgacttcactcaaacaactgattggacaacaaactgacaaatcttgcgccaacaaacttttgttttggctgaaaaattgggccaaaaataatcttaactcaccgccttctgctgaaaagaaaaaaggcatcgtctccagtacaaaacaaaaaaagaaataatttgtttatttagctcgtccaaatcaattccaagctcaggttgacggagccacgtttaaagcggctttactttccggccctccaggcattgggaagacgacttgcgcattgttgtgctgtaaggagctgggactggctttcgtggaaatgaacgcgtaaatataacattgctaatgaatgggtaacgattggttccataactgacaatgacccacgaaaaaatctaaaaatttagaaagaaataacacattttgattagcttattactagggctgccaattttatgtaaatacatatttttttcctggcttctccatgctctaaatagcaggaaaaacactttcttttttgtgtttgcgaacaaaaaccgggacttttatttacatatttttacatattcggggtttttatacatatttacatacctatttcggaattttctatttgtacatattttggatttttttcatatatattttcacttttttttttacatattttgagtattttttacggaaatttttggaaatcctcaaaaaaaaatccaaaatttcggcaaatatttttgtacatattttcatttttttacatattttgaaaatttataaagaaaaaataagtttgaaaatgttgcctaaaaataccaaaaaaagtaatttttatgtcattttgtggctatttcatactttacggggatcttctttcccaaaaaaataccatttaaaaaaattttatttacatatttggggttttttgtacatattttggaatttttcttatatatttatgtacatatttggaccactttttgtacatatttttggcagccctactcat

SEQ ID NO: 40061 - DNA, 816 bp, Heterodera glycines
atccacatttatgtggcacccaaattttggaactgtctcgcctcgggtggggacttaaaagaaaggtggaggaaaatgtttgaaattttcaagtcaaaatcttcgttcttaaattttatcctattgttttcgcgcttttttcacggttttcgaatcgcggaatcgtgcgggtttaaaatttaaaagccgaaaagtttctatgatttttaacaaaaaaaatcatttgttttttttcattctttagaccctaaaatagtgcatgaaaaggggcgggtttgacgacgagggaattccttacaaagggacgcaccccatcgaatttttgcaattttcagttccattagagcccaaaatcccccacctaaattgactagtgatagtccaattaaggtactattacatccacgtttatgtggcacccaaattttggaactgtctcgccctcgggtgggacttaaaagaaggtagaggaaaatgtttgaaattttcaagtcaaaattttcgttcttaaatttaatgcaatagttttctcgctttttttcacggttttcgaatcgcggaatcgtgcgggtttaaaatttaaaagccgaaaagcttctatgatttttaacaaaaaaaaatcatttgttttttttcattttttagaccctgaaatagtgcatgaaaaggggcgggttagacgacgagggaattccttacaaagggacgcaccccatctaatttttgcaattttcagttccattagagcccaaaatcccccacctaaattgactagtgatagtccaattaaggtactattacatccaccatttatgt

SEQ ID NO: 40062 - DNA, 988 bp, Heterodera glycines
ttatttttattctcaatcaagagccaattttttttaattctcactgtttcattcaaatttagaattttgcctgccattgtttattttacattgacgaaaatgccgacactttgatcaaatcggatggatttttgcaaattgaccaaaaaatgttgtgcgaaattttggaacgcgacgaattgcaaatccctgaagaaattcaatgtggaatgcagtaaattttttttaatttaaaaatgttacaaatttatttttaaataagtccgaatctttttttaatcactaaattgttttgaataaaaaaataaaattttctcttcaatttccttactattttctcttctctgactcgtcgctgctaccatttttagcggcgggcagagaagagaaaaatagtaaggaaatttgagagaaaaacttctctcaatttaacttgatatttctaaattgtgtttaaaagcggaaattatcgcatcgatttttttccataatgttccttttttcacttatttttattctcaatcaagagccaattttttttaatactttattttcattcaaatttagaattttgcctgccattgtttattttacattgacgaaaatgccgacactttgatcaaatcggatggatttttgcaaattgaccaaaaaatgttgtgcgaaattttggaacgcgacgaattgcaaatccctgaagaaattcaatgtggaatgcagtaaattttttttaatttaaaaatgttacaaatttatttttaaataagtccgaatctttttttaatcactaaaaatatttgaataaaaaaataaaattttctcttcaatttccttactattttctcttctctgactcgtcgctgctaccatttttagcggcgggcagagaagagaaaaatagtaaggaaatttgagagaaaaacttctctcaatttacttgatatttccaaattgtgtttaaaagtggaaattatcgcatcgatttttt

SEQ ID NO: 40063 - DNA, 1454 bp, Heterodera glycines
ggtcagttgtggatcattcttaaaaagtgaaaaatgtttaaaaaaattcgtttcatagcgaattggacggattgtctcgcgagcgtggcgcccattcggcgttcaacgtgccaacgttggaggcggccatttacagcgcgcacgacatcaaagcgtgccgcgaggtgaatttggcatcaacaaccccgcccccccccccgcccttcagagcacgacaaatatttcaacaaaaatttttaaaaattgactagagcaatcgaacgctaacggacgacctaatggaaaaaaatccccgaaggagagaatttaattaaatccattccttcgggggaccgtgccgggtgccgcggggtaagcagtgctggttcgtttcatcacggcaccgaaccttttggctagtcagcaatcgttgcttaacttgccagatcggacgggtgcgcatgattccactgttccaagcaccccaccaaaagcaaaacgatataaccaaaatataaggaaaaattttttaaaaaattttttctccatcttcctttttgatactaaagcatcagagtgctaaattaagttgtaaataaaatttggtgcgctttagagcactttctgaaaaaaatatttatgaaacaaaaaaatcgattttttcaagtgtccgtttggggtactcaaacatttatggggagcaaaaatccaacgcagaattaaagtacaggctatagggaagctattcccgaaggattcggtctccccataaatctgggcgcatcggttcggggggactgccccgaaaacaaaaaaaatcgattttttcaggtgtccgtttggggtactcaaacaattatggggagcaaaaatccaacgcagaattaaagtacaggctatagggaagctattcccgaaggattcggtctccccataaatctgggcgcatcggttcagggggactgccccgaaaacccaaaaaaaaattttttggataaaaattatttaaatgaactgactagataatatttaaaataggttatttctcttcctttcagtatccctgcaaagtttggtgcgcttctgatcagtttctgaaaaaaaagttaagcctaaactttttggcctgtttaaaaaggaattaaaaatttttaaaaattttattcatctccctttttgatagaaaaagcatcagagtgcctaaactaacatgtaaataaaatttggtgcgtttcagaaccctttctgaaaaaatatttaagaattaattttgcaaaaaataaataaaaacgaaagactcagattttcgaaaatttttttgagccagctagctcggcgctcatttcagtgtaagttagtcctttaccggggagtatccctgcaaagtttggtacgcttctgctcaattagcaaaaaatatgagtgatcgaattttcactaaaaaagttaagcctacattttttggcatatttaaa

SEQ ID NO: 40064 - DNA, 905 bp, Heterodera glycines
  unsure (1)..(905): unsure at all n locations
aaagatgctgttttgaacgaataaagggtatagttattttgaaaaagtgtcaaagaacatgcagcaataagcctgcaaaatctaataagtggaaaatacatgagtatagaatttattttcagaaagtgtcaacagacttttggaaaaatatatttgcaatttatcaacaattttgagaagtgagttagaaatgataaacttcacgattcaaaccaattttcggtgctctaattaaccgcgataaaaacatccgaatcaattaaatagcttctgagataataaggtttatcataaaatttcatttaaaaataaaccctcaattattggtatgaacgatactttccaaacatgcacgcgttttgcgctcgagctatttatcatcgggcttgtcaatccaaagcgaaacaacaaagatgctgttttgaacgaataaagggcataggtattttgaaaaagtgtcaaagaacatgcagcaataagcctgcaaaatctaataagtggaaaatacatgagtatagaatttattttcagaaagtgtcaacagacttttggaaaaatatatttgcaatttatcaacaattttgagaagtgagttagaaatgataaacttcacgattcaaaccaattttcggtgctctaattaaccgcgataaaaacatccgaatcaattaaatagcttctgagataataaggtttatcataaaatttcatttaaaaataaaccctcaattattggtatgaacgatactttccaaacatgcacgcgttttgcgctcgagctatttatcatcgggcttgtcaatcgaaagcgaaacaacaaagatggtgttttgaacgaataaagggcataggttattttgaagaagtgtncaagaacatgcagcaataagcctgcaaaatctaat

SEQ ID NO: 40065 - DNA, 1200 bp, Heterodera glycines
  unsure (1)..(1200): unsure at all n locations
gattttagtgtatcaaaacaccgcattttgccaatttctcctaaggntnnaggntttatannantgntgatgngttttcatttttgnngatttgannnttnnnaattttnataattnnattnattgnganatannnatgattnagaatgggaagngnatttnagtgnggantttgnattnnannttgatnagnagttgtttgtaaatnatgggngaatngttgtangaatgtgngtattgagtnggttgggnaggaagagaatgagnggnaatgantngtgtaatttgtgtgganngtatattggangaggngnaaaaangncgtntagtttgtntaatatnnatttttttggtacggacaaccgctttatcttcaactgttttttgggtccacgcgccatatttttggaagaaaaggattaataactaagtaaaaatcataaattaggataagggaaatattttttcatgacaatgaaaatttggttgtttttcgactatcagtcaagctttccccgggccatctacgagtaattgagtacttttagtttaggtatccaatgaaaaaccatcgaaggggctgaatgagttgttgatccttgcttaactttttcggacacaaaacatacacattctatttaatgaaaattcaaaagaaggaaggagaacattttgaaatgtcggatcttttttcatcaattcggattgttctgttgcccctgaacacgctggtaaaacaaatgtcggtcgctggttatgtagtacccgagaattctgttgtcctccattgggatagttcctaaaacagagataaggcataaaaattaatattgggacacttaaaagcagctctaccttctttaaaaacgaacaaacgcagagaatgagcggtggtatggacggagttggccaagcgaagtttgaacgcgaacacagccatagtttgatcaacattgtcaaaacaatgcgctccggttccgtcacgagcctcggcaataattttcattttgtttaaatttaattggcaaaactaaaagaaaacttcaacatgaaaaacaaagcaagataacaatagagtttcgaattgtgcatatgtgacgtacaaactaattttttttagcaaataaatcaaaaaggaaacattcaaaaaattaaaacaaattgatttaagtgacaaggataaaaatgtaaacaaaacgg

SEQ ID NO: 40066 - DNA, 1303 bp, Heterodera glycines
cccccccttttttcccccgcggaattttttttttttttatttttttgcccggggttggggttatttttttaaaaaaaataaaaaattttaaacttttttttccccccccttttccccgggggttttttttttttttttttttttcccaaaaaaattttcaaacccctttttttgccccgggaaattttttttttttaaattttaacccttttgagtagttaaaaataaaaaaatgaaaatttgaaatcatttttcccctcccttttccaggggttttttttgtaaattttttttcaaaataaacttttcaaccccctttttccccccggaaatgtatttttattgaattttgaaccggtttgagtagatagactagaaaaaatgaaaattttgaaatcatgtttccactcccttctccaaggggtattattttgtaaagtctttttttcccccaataaacttgtcaaaccccatttttcgcaccgtgaatgttatttttattgaattctgagccgttttgagtagattagactagaaaaaattgaaaattttgaaatcatgtttcccactcccttctcccaggggtattattttgtaaagtctttttttccccaataaacttttcataccccatttttcgcaccgtgaatgttatttttattgaattctgaaccgttttgagtagattagactagaaaaaattgaaaattttgaaatcatgtttcccactcccttctcccaggggtattattttgtaaagtcttttttccccaataaacttgtcaaaccccatttttcgcaccgtgaatgttatttttattgaattctgaaccgttttgagtagattagactaaaaaaatatgagtgatcaaactttcactaaaaagttaagcctaaactttttcccaaagttaaaaagcaattaaaattatattcacctccattattgatagaaaaagcatcagagtgcctaaactaacatgtaaataaaatttggtaagttcagaaccctttctgaaaaaatatttatgaattaattttgcaaataaataaaaacgaaagactcagattttcgaaaaatttttttgagccagctagctcggcgctcatttcagtgtaagttagtcctttaccggggagtatccctgcaaagtttggtacgcttctgctcaattagcaaaaaatatgagtgatcgaattttcactaaaaaagttaagcctacattttttggcatatttaaaaagcaattaaaaaattttaaaatttaataattttcctgcaccgaaggtactcactcggcct

SEQ ID NO: 40067 - DNA, 999 bp, Heterodera glycines
cccaaaggcctacggtcgaaatttgccaaaatatccccaccggagacgcatcttcattctcataagagcaaatggcactcactcatttttagtccatccatcatccatttacgtcacccaaaaacagaatggcacaattcataaaaaaagaaaagaattcagaatggcatgacacacttataaaaataaatccttcagttttggccttttttgtattgtgccaacccttcacttcccatccatttccatcacaagcccatctatgaataatgccgcattgctcttttttgtttagctaagcaaaagtgtgcccaaaacggagaatgggcggaggccaggacggggatggagtgtttaatgggggaatttgcaataatgacgaggaagatgataataataattttgtgtgccgccgcccgccatggcggccaactccgtcccgcgtttccgtcctggccaagccttgaattcaatgtcgaagcgatgcaaatgaattttcagtcctaaaatttggtcgggacggagttggcggaactgatttgtccacctctcccatccacataattttgaagagttcttctttagccgcgattaacataacgtctcccccgccccttactgcccgcctccctaccgtgccaaaaggacgaagagaacaaaaaagagtgaaagagtgggggcaatgatgaagaatgatggcacgaggagcggcatttgaattggcggcacggccaaagagacggaaaagcggcgccgctttgttggggatcaaccaaataaaaggcgacggcacgcttcaaaagcggcatttggcagaatctcagcacaaagtgctgctagctgtaagcataaagtaaaaccagtagaggtcaaattaattataataactgataaataaataaatgagtcgttctaaaagcatttgaaaaaatctaataaaagtcatttttttgaaaatatgagtttttaaactcccatttttacctcccaaaatttggg

SEQ ID NO: 40068 - DNA, 687 bp, Heterodera glycines
ttgcgggattttggaaatttcgaaaaaaagtcaattaaatttcaaaaaatttccaaaaaaaaaacctgacattttgaaaaagaaacttttaggggctcgcgggatgcattaaaaggggctgatgggtcgactaaggtttttcgaatgaatcagatggtaaaaagagatcgggaataaaatctattaagggtacatacatttgagtattttgttgcttttcaaaatctattttttacggcacattttccaaaaaaaatttttggagcagaggggggggggggtccggcggtgtcgaaaggcgctgccgtggggaattttgaaaatttgagtgtgctttgttaaaagattttagcaataaaggcaggtttttgggatttaaggtgtagcccaatatggcgggccgaaggcatcaccaggaaaattttcagtgaaatttgtgatgaaaaatgagttaaactttaattgaatttattataaactttttcaaaaatattggcattctgttttgaaattttcaaaaaatcctatgcgaatcctgcggaatcccgcacaaaagggtcccgctgcgaatcaaaattctctgcgggacgggatcctgcgggattaatcccgcagatcccacaatcccgcattttccaaaaaatgcgggattgcggactgggatcccgcaaaattccgcgcgggatc

SEQ ID NO: 40069 - DNA, 1146 bp, Heterodera glycines
cccgcccttcagagcacgacaaatatttcaacaaaaatttttaaaaattgactagagcaatcgaacgctaacggacgacctaatggaaaaaaatccccgaaggagagaatttaattaaatccattccttcgggggaccgtgccgggtgccgcggggtaagcagtgctggttcgtttcatcacggcaccgaaccttttggctagtcagcaatcgttgcttaacttgccagatcggacgggtgcgcatgattccactgttccaagcaccccaccaaaagcaaaacgatataaccaaaatataaggaaaaattttttaaaaaattttttctccatcttcctttttgatactaaagcatcagagtgctaaattaagttgtaaataaaatttggtgcgctttagagcactttctgaaaaaaaatatttatgaaacaaaaaaatcgattttttcaagtgtccgtttggggtactcaaacatttatggggagcaaaaatccaacgcagaattaaagtacaggctatagggaagctattcccgaaggattcggtctccccataaatctgggcgcatcggttcggggggactgccccgaaaacaaaaaaaatcgattttttcaggtgtccgtttggggtactcaaacaattatggggagcaaaaatccaacgcagaattaaagtacaggctatagggaagctattccggaaggattcggtctccccataaatctgggcgcatcggttcggggggactgccccgaaaacaaaaaaatcgattttttcaagtgtccgtttggggtactcaaacaattatggggagcaaaaatccaacgcagaattaaagtacaggctatagggaagctattccggaaggattcggtctccccataaatctgggcgcatcggttcggggggactgccccgaaaacaaaaaaatcgattttttcaagtgtccgtttggggtactcaaacaattatggggagcaaaaatccaacgcagaattaaagtacaggctatagggaagctattcccgaaggattcggtctccccataaatctgggcgcatcggatcggggggactgccccgaaaacaaaaatatatcgattttttcaagtgtccgtttggggtactcatacaattatggcgagca

SEQ ID NO: 40070 - DNA, 1041 bp, Heterodera glycines
tctgtcccggacaaagtcgaacccatttcccctcccagccgatgccacatagggaccaagaaatcagcagaacttcccaaaagaaaaaaagaaacaactaacgtgaaaggaacgattttggtaacgtgcgatgaacgtggaagctcggatagcctccctggggtggcatgtcctggcggaatttttcactcattttcaatggtcagcaaaagaagtggcaatcttgaaaaaaaaagaaattttaaaattgacagacagaaataaaataatatgaaactaaaatataattatcactttacaagtcctctgataatgtatttttggggtccctgatcacgaatctgacatcgattttgaccaattcttaatccttaacccgaacgaacattaataaggaattcgaaaaatttgaattttcgactttttgttgaattcagttaggtattaggaattggtaaaaattgatgccagattcgtgatcagagaacctaaaagcccaagggacaagttttcatgactacatattttttacaaaaaaatttgcaaaataaaatggtctatccccctttggtttttgataaaactcaaaagtgaggcacttttgtaagtaaatgaatttgaaatttcgatcttccggttcagttcgggattagaaattcggaattgatcagatgcgaaatttaagaccgctaacacgttttccctaattctaggacaaaaaaatttttttgattaagaaaaagattttgttgttttaagtagagagcggcgcaggacaggatcctgcgcaggattttgcaggatcccagtccgcaatcctgcatattttggaaaatacaggatttacaggatttgcaggattaatcctgccggatcctgtcctgtaaaaattttgaattccaatcctgcaacaggacctgccaatttgatttttatgcaggattcagcaggatcctgcattgattttttgaaaatttttaaaatagaatgcccaatattcagaaactttcctttttcaaaatttttttcttaataaaaatt

SEQ ID NO: 40071 - DNA, 1363 bp, Heterodera glycines
  unsure (1)..(1363): unsure at all n locations
tgctaatgacaaagaattaattaataaatttaaaattactataaatctcacaaataaaaaaatactttattaattattttttaaaacaacttgccattttcatcttgaataaactcaaatgaacttgtaggagttgttgaaatccttgattcaattcgttcgagctgtttaattctgttccacacctgttcatatatgaatcggggtataatcaaatggcaaaagaccgtaatcaaaattcaaattttccataattaacggatttggatttaatttattgattttgggcaaaattgcctaattttacatttgaagtaacttttttgatttttctaggtttgcatcaaaaaggttaatttaaactgaattntangncaaaattccccgaaattacgcgatcaaaaattttgtgcttagaccgaaacgtctataaactataatagcatgcttaacgtgaataaattaaatcaatttcactgcccacctgtttgagctcggtggataataatttaatattgccattcgcttcacgacattcctgcatatacaaaaaaaaaagaaaaaattaattgcaattgggaaactgtgaacgggattgggaaaaaggcaccggcataaaatntacgggtttcaaatcccgacattagaatgcatatgccgagatttgacgggggcacaaattagccgacctgtttcgtttcagcgatttgttggttcaattgctgaacaccaaaagaaatttgacgaatttcggcaccgtaagcggcgtcattaggtgctgttaaattggggggggggtgataaagagaatattataaaaatatttctgatacgaatattacttcgggcatttgaagtatgccttgtcgtagtaacatccaacaattcagccgctgacatcaattcctgcatgaattgcaaatcagaaaattggtaatgaagtcgattttggggcagcatatttgctgaaatgtacaaaattttattttctatttttgtatatatttttgttttaacaaaaaataaattaagtaaatcgttaattcattttatgcctcagatacaaaaatgttcattttgaattcaaatttttgataaaggcaattagtgagtgactaaaatgttcccagcaataaaagacatccccgtccgtcaatcaaaatgtgccaaagaaagtataattattgtttttttaattaattaatctctgattattgatccaacattttttgttggatattattttttaatgtgtttaaaatgtaatccatgtatttttctgaggcccattttattttttgtcccantaatttatcattgtcaatcaaatatgcatttttaggtgttgttcgaacgggtctat

SEQ ID NO: 40072 - DNA, 909 bp, Heterodera glycines
gcatcagaaagtttgtaaatcaaaagaatggggttatgggtgatgatggggagataaaccatcgacaaccacaaaagattacagctgttggcgctggaaaaggaccgcccgtttggaaaattccgaagaagtccacaagcaaaaagggaagtgatggtgctgggaaaccgagtcgagagagccacaacaaccgggagagccacaacaaccaacagtcggattcggcagccaaggggggatacaacggtttgaacattgacggactctttgaggagattgaacagcaaaagaaccaacggacgattaacgaaaatggcggcaacagaaaagaacataacgaagtggcggacacggacagtggcaacaacggtgtgcagtgggaaatgcaatgtaaaactaaatagcgcaccgatacaatgacagcatttattgcttttgcagcggaactctgttcagccaacggacgtgatgacttggtccggtcgccatcacttgctccacaatcttcgccgaacaagttgcagaccagcaaaggcattccaaaacaggagtgtgatgatgagaagtcgcagggatttttcggatctcataagtcgtcgacatgtaagttttgtctgaaaataacttgttttcattgtctatatagtaatatttcatccgttataactcaaataatatgtctcacgatcagtttgcctaaattcggtatttcagtaggactggcgttgtacaaggctgagaaggagggacgcgaattacgatctcgtcatttgcgcagcggacagtctccacaaaatgtgccaaactcatctgtggtacgttccgctttacgttacactacttttaatttcgactttgttcgaatcggtcccgtgggtcgaaattcttgatcatagcctttcagtaatc

SEQ ID NO: 40073 - DNA, 1433 bp, Heterodera glycines
ctaattatctataaagaaatataatatttataaggtttcttttgagggttttctataagagaattttaattgtaattattatatctattaaagaatcagtatttattattttgattcgtaatagtttttgccctataagctcgttttgggcaagcctgtccctgacagataaatccgtattttccatacccttaaaacattaaattgtcaagtcaatcgaatattggcggttttagcgaaataagcaaatatcagcccatggcgctcctcatactgcttcctccgccctctgtctcgccccactatttctccgtcgttgcatgctcttttttacgttttttggcttttatttgttgttttgcgtggggagccgaagctaaaaaagtatgcgtgtggcgaagctaaaaaagtatgagtgatgggtgatcggaaggggcgggtcatttcagtaccgaataaatgattttgattaattaatataaatattttaatcatataattagatttgctgaccttaattataatttagatttattatttaaatatttcccaaacaaattacatttttgtgagagaaatacagtgcccacaaaaagtcatgactcaaacctgaaaaactatcttatagttcatttaaaaacttgaaataattcaagcttgcataacttttggtgctgatcaaaaaaatctcttacaccaacttgatcagattactccttcctagtgaccgggacacccaaaatacactgaaaatcggggaaattttcgaaatccctagggggctgggaaattttttctagagaaaatggacaagcctcttggcaagagcacaaaatttgctaccgaattgctttagaaatgatgggtctacgatttgtacatagaaagttatacttggttgaatatttaatcaccttaaaaatgatcaatttatgatcagcaccataaccttttctagaagcattcaaattaaataatcttggtatcttttgatagccctaagtgtcctctatttgctttaagatttcaaaaatatggttgtgtttcaaaaaagttgtggcttgtaaatttcataaattgatttggtaaacctttttgaccacaacttctttgagacacaacgaaattttttgaaattttaaaggcaaatagaggacacttagagctatgatatcaagaatgtttaattaggatgcttcttggaaaagttacggtgtcttaaatttgtcaaattattctatggtcgtgtctttttttttgtggtcgtgtaaacttaaatatagccaaatataattttattattagctcttattcaattataaatttaaataattaattaatcattagaataactcttccgtactgaaatgacccgccccttccgatcacccatcactcatacttttttagcttcgcccacaatacttttttag

SEQ ID NO: 40074 - DNA, 714 bp, Heterodera glycines
tttttatctttaatataaaaaagttcttcctataaaatgaatttttaaatgcaaaaccaaaggggggaccccatggatttgcatttcatgagaaatttttttgctcctaaaattgccaaaaaatacttttctggggtaatttgaggtgctgaacacgaatatcactttatattgcgttttggattttttggagggtggtaaaaaaattttgaaaaatcaataatttttggcccttgaaaattcaacctaaattttaaaaattcataactcgcctcaaaattgtccaattcagctcatttaaagcattaaaaatcgagaaaaatagggagaattttaagttattttttgagtttccatattttaaaaattcacaaaattaggcctggatttctcaaaaattttaaattttcagaaataaatttataactcatttcaaaaaaggcgctaaagaatatttaaatattcataaaatccgcaatttttttctctataaagagaattttattttacctttttatctcttttttgaaaaaagatacaaaaataaaagtgattttgtaatttgggaccacaggggtgtgaccaggatttttgagtggaaaatttttttcaccaaaaatcttttaaaaatatgtctttagggctattatgacgctgatcacgaatacgtaatcagattttactttggacgtcgtttagccctcataatccctg

SEQ ID NO: 40075 - DNA, 1608 bp, Heterodera glycines
gcaaattccaatttttacaattaaaagcaatgaatgcttcctgaatcatctaagtgtactccgttaagataacattgctgtgataaacggacaattttcgccaaatgttggggatcactttgttaagataaaataagaaaaaaataatccattgataaattaaattcaataaattatcgggtctaaaatagtcctaacaaattcataaaagcggcaaagtccaatgagttttactctgttgacaacttcacgaacaatttaatgccactgaaagtaatcatttattatgcgattgcgatacatttgatgtcatctctgttgtcttcataatccaaagttcagaacataaaaatccgaaatatccaaatttcgtagcaaataatccggattttctggagagttgaggtctgacgacaatgctatgcgtttccgaagaatagaatccgttttcggtttacatatagttataggcataatttatctatgtcaaaatggtcaataaatttctaaattacttttaacttttttgagccgatcccatcatccctaaagcaaatcccctccccccccccccaccaccacaaaaactcataatattttttggctgtgccgcatgacaattctccgtttcaatataaaatatttagtcagttgtactgcaccaatttcttgttgatcggttccaatttcgaacctgcgaagcttttgataggcgccaagtaaaatgctttttttctctctttttgtatgctcaattccgtttgtttcacgaggaaaattaaattattatgaaattaatttaccaaagaaaaaaagcattaacgagaaaaagagacaaacaaaagcttaattaattggatgtttgaccaggcgatggcaggcaaaaagttaagcaaaaaaggcgaagcgctcaaaaattggaacgcataaaaggcgagcgaaaattgtgaaaagacaaataattcattaaagtaaaatcctattgtgaattggcatttctctgtttaaaatgcgcttcgttctgtccctcgcccttttggcacttttcgtcgtccaatgctccgccgacgactcatcgccgtcctcagaggcagctgatgagaatccctctgctgcccatgccgctgctgaaccatcagcggcaggcgatggagtgccgccgccaccgccgtcggccgaaggggcggcagccgaacgaaagaagcgcagcggagggaaagtcgcaccggcactaatcctttaaagaagccgaagaagaagagaagaagaagcggaagaacggaaggaagaagaaactattgatggaattgctgggagagaattggtaagtgatcatattatttggaagcgacacatcaggaatatgaattcgcaaaattatagggatttacgaccctataaaagaaagcattatcaagtccttcttaacactgaatgaaacggctctccaaccttacttaagtttccgaactgaccaagtgatgaaaatccacgcaattgaccattgctccccccttttaccttgatcccatccttttttttttccccccccccccccccctttttttttttttgttttttttttttttttttttttttttccccccc

SEQ ID NO: 40076 - DNA, 803 bp, Heterodera glycines
atggccaaagtgactttgtcctcatttttgtcatacaatcctctgctcgggtccatcaattccttaattatgtgcagtttattgtgaaattccaatttaaaatttaaatcttaaaatacatcttaggagaactttttatgctaaaatttatctattaaaaccttaggattttaaggaaaattctcaggacaaatacatagataaatcctaaaattgtagccctaattatgcactaatgaccacctaatggagcggcgtacaaaagggaaaaggctaaacatttttcgttgctttggtcattcatttttatttctgccaatattttccacagaagttcctttaggtacactttgacttcactttcacggcttgtccaaatttcctctcgcgcaaattcagaaaatttctaaatttctagcgcgagtgtccctcttccatctccgctggaaatgttccaatcagaacaccgcacatggcgtggaaacttcaatgggaattgtccgggcaaatcacgaaaattgtcatgcaaatggaccacactttgcacttcttgcattgacagaaggccaagaggagctgaaaattgtaataattttatcaaatcattaaattgtattttcaaccaatttccttctcaaatttcaacaatgcgatgagagggaaacgaattttgaacagtgccgggccaagcgcagaacggcgatttgcagcggaacagaaaatacccttttgacggcacttttcgtcggcccaacggagtgcctaatgatggaaaacaaacaaatctatttagatgccacaaa

SEQ ID NO: 40077 - DNA, 1019 bp, Heterodera glycines
cggtgcatacgaaatgcaaatgatggcacagtgcaagcgttgcaatgatcgctgcagctgcgccggtgccgagattcgtcggctgctgcccttttctcctgtccaacatcgcaaaaatacttgaattttattttaaaaatctgttaatgataaaatatattttttaatttattgtattatgttatgttctataaaatcctttcttattttaacccatttctatagcccaataaatttgacccgattaaaacccaaaccgtttgaagataagtaaaaataattataaaatatttaaatttgaaatttgacattaaaattattattaaattttatttaactgggtgtttatttttttagattctttggcttaataataacctaataataatataaaatgtgaaaaattctactaattggatttgacagtatatttcgaaaaatggcgtaatattgaggtgcatttctattgtaacaatgacgcccagtgaaatttgcaaatttattgcaataattgaagtgcataattaagaaaaagtattctaaaatttgaaaatgaggaaacggaagaagacaaaaaaaaagttgggcgagggagggcggtgaaagtgttcggaccagcagcagaacactttgtgctaggatggatgagttgctgccccattttctcattttcagcaggcagttggatttggcggacggtggtggagaatgggcgggcgacccgaccttgttttgaattttgaagacacttcgccaactttatttactttcactcttctcgtctacatatttaaaaagatgagcgacgtgcgcattaaacgaacagaaaaaacggcggtggggggaaaatttgcactaagttttgtcggggtttcgcgcgattaaaaattcaattaaaaaatataaatttataacaattgttcttgattcaccaattagcttgaccattaatacaaatgaaagattttcacgtttgttaaaaaaaaactcaaaataaattattaaaaaaaaattgaggg

SEQ ID NO: 40078 - DNA, 561 bp, Heterodera glycines
ccgaattcctcgaaactcgatcagtaaaagtcgcttttgaatacatgtccaaagaaacatataataactcctctaaacttttaatcaaaatttactaatacaaactctcccctcctccgaaatctgaaaaatttaaaattttaatggtaaaatactagaggtgcgccgtgactgaaaaagcccgtgaaccgtaccgtgaccgtgaattggtcccgtgaatcgtgaccgtgatcgaaaaaacccgtgaaattcacggtaaccgtgaccgtgagcgtgaatcacggcgcacctctataaaatactaaaaaattcattcccaaataataattaaaatttttaaatttgcaggcaaccgatttgccattttggagctaaaaattatccttgttcatgtgttccgacggttacgcttctccactacaattccgttcgagaagaatcggtccgcttttgagtctgtggccaggcccgaaattggctgtcttttgcatgtccatgatgcgtcgtcataatgccaaacaaaattgaaaaagagtttttttttttatgaaattcgatatg

SEQ ID NO: 40079 - DNA, 186 bp, Heterodera glycines
cgaccccgacacttccaaccccgaccccgaccccgacacttccaaccccgacgaccccgaccccgacacttccaaccccgacgaccccgacacttccaaccccgacgaccccgaccccgacacttccaaccccgacgaccccgaaccccgacttttccaaccccgacggtcgggggcccaacccta

SEQ ID NO: 40080 - DNA, 1357 bp, Heterodera glycines
ttttgctgggcttagatcacatgtgattttcggcactgtgataatattagcggctcataatggggatgtataaaggcgattgtagaaggaattggaagcgctaaaattgtttgagaagctttttggagcgtaattacggttgttacttagaccatttttttctaggcttagatcacatgcgattttcggcactctgataattttagcgctcataatgggatgtataaaggcgattgtagaaggaattggaagcgctaaaattgttggagaagctttttgagcgtaattacgatttttacttaggccatttttttctaggcttagatcacatgcgattttcggcactttgataattttagcgctataatgggatgtataaaggcgattgtagaaggaattggaagcgctaaaattgtttgagaagcttgttgagcgtaattccgatttttatcttagaccaattttttttaggcttagatcacatgcgattttgggcactctgaaaatttaacaaaaaaccacaaaaaacctcaaaatttttcaaaaaaccacaaaaaacctcaaagcctcatttttaaaatttagcctcattgacctaccaaaaaaccacaaaatgaggctaaagcctcacatatgggaaccctgatcttagggctctcgaatgataccaagatcgttggattttgtttacaaagaaaaatgttacgatcaaaaaacatgtactcgtacgaaaacggcctggccccagaattgatctatccaataagcaacttttacaatcctatttcatgaacagaaaaatctttggtaatatatagaaataattaaatgaaaatggcgattaatatcgtttagaatctcttttgttaattgccagcagtaaaataaaataaatattcttaagatttgattaattactcttaataaacagatgcaaatttcactaaaaagttaaatcttttaattaaataatggatttctcagaatacaattataaacttcaatgaacgatgaaaataactgacattttattaattgtttaagaataaaactagctaaatgatatttaataatttcaaatccacaggggtcaacgtggaaaaaaactcggaatttctaatatttttttaataaagaggaacaattaattaaaaactcttttttcattatttcacggaactttatctgcaaccttttttgccccacagaacagatatgtatgaaattatttatgaattttttattttaatcgtttccttttttcacgcactctcatgtttttatgtatttttttttaattttatttcacatttttttttcatttaagtattctttcattaggtaaatcatttttttt

SEQ ID NO: 40081 - DNA, 1479 bp, Heterodera glycines
  unsure (1)..(1479): unsure at all n locations
aaaatttttcaaatttttaataaattttctaggtctctcccgcattttcaagaaaaatttttcaaatatttcagttaacttcccaggtcctgcattttcatgctcagataccaacaattttgtaatagttgtcaaaaaaaaactttttaattgtaggcttagattttcctgcgaaccatccacggaattttagtcaaaagggtataattagcaaaatgatcggaaaagcatccaaacaagttgctttggaatattcaaaaaatatttttttaatatattaaagcattaaatttatccaaattaaatctttttgtcctttttaaatattttccgagaaattcttgaaatataagataataatttattcgaccattttccattctgccgatcactctgatcaaatttattgtagtatccagatgattaattaaataccttttatttttatctattgtttacagtatgaattaattatccttgaattaatgttttaatcactgtcaaccaattaaactttaataattaattgaattaagtttgttttcccactattaactaatataatcattatggattcatttatttaaactatgtatttaacgaccgtttataaccaatgacaatcatttttttgatcaccctaatcacttaccttttttgatcactaactgatccactaatttcaaaatttccaataactttttcataactaaatatataatcatagcaattaatcccataaaatatcaatttaaataggcaattctcgacaatgcatgtacatacaaattgtccatcgtccgtctgtcaataattttccgtccaattgacagccgcccccggggctctaatcgccgcccatttctttcagcagtgatcacaattttatggtggttttgtggttggtggtggtggtggtgaccttctcacctcctcacctctgctcctcacctctgctcctcctcttccaacccaccgacgttttatgccttccttaacgcctcgtttagccgaattttcccgcaaatcgccacccaaagtttggggcactgatccgtcccccgcccccggcgccccccaaattgtccaaccaattccaaacgcgccatttgtgggggggnggggagatgacctctgccggtgccgacagatgatcattatgttcatgttatggtgatgatgatgatttatttgctggctggcgatggcactcaaaaaaaaacaaaacccatcaacaaattgctccgcgccgctaatcggcgcatcaaaaagcgagaaaatgcgcgaaaaaatggcgcagcggcggcgacggcgcaaaatcgcgccgacaaaaagagcaattgtttttttagtagttgaccttttacagggtagagctatttataaaattataaatacgtgaatgtgattattggtctcaattattgtcacttaaatttattttcacttttttatacggtaatcaattattactgtact

SEQ ID NO: 40082 - DNA, 1018 bp, Heterodera glycines
gaaagttgcaaagcactttgaagagagagttaaagaggacgtgaaccgatgagtggaaacggacagagctggcgtatctggtctgcattcacccgtttgttgctgtacgttgggctgctagcctccagactggggtttgctgtccttctttctgttcagtggcgaatggggcatttgcaggcggagtgcgctgagatgctcggagtagctgcgtgagctcggtcttgaggccagcctttcggggtctggtacccggatcgggggagtgctgtttactctgggtgaattgtgcaatggtttcgggtccgtgttgactcgagctgggggtcggtggcggtcgcgtgcgacacgtaccagcaaccagttcggtccagctcgggctctcagttgtgcgttctcggtgtaaaagccggtcatctgttcgacccgtcttgaaacacggaccaaggagtttagcgtatgcgcaagtcattgggtgttcaaaacccaaaggcgcaatgaaagtgaaggcttcttacggagctgatgtgtgatccctggcactgcggtgttggggcgcaacatagtcccgtctcgatcgcatgcgatggggcggagacagagcgtatgcgctgagacccgaaagatggtgaactattcctgagcaggatgaagccagaggaaactctggtggaagtccgaagcgattctgacgtgcaaatcgatcgtctgacttgggtataggggcgaaagactaatcgaaccatctagtagctggttccctccgaagtttcccccaggatagctggagctcgttaagcagttatactcggtaaagcgaatgattagaggacttggggacgaaatgtccttaacctattctcaaactctaaatgggtatgaagccagggttgcttgactctgaacccaggcgttgaatgtttgagctccaagtgggccatttttggtaagcagaactggcgatgtgggatgaaccaaaaagggagttaaggtgccaaagtgcccgctcattagaccc

SEQ ID NO: 40083 - DNA, 756 bp, Heterodera glycines
attgcttattcatattatttctttacatttaaaaaatatatttttcactctctaaacaaatccggataaaatgatgataattttatcaacaaaactgatcacattgtccgttctgctgcttccaattttgcttggcattgccaatgccgcgggcatcggcgacagacaaaaaagggcggtggaggaggaaggacgaaaaagcgtgagcgaactgtgtgccatccatgaacagaagttcaaggagttattcgaggttgaaagaggaagtgccgaaaaggaagaagttttatggatggaaaaaattgaaaataaagcggacaaagaggaggaaaaggaaaagcagaaagaaaaggaaaagcgggaagagaaagcggcagaagagagaatggatgctaaaaatgaagcatggcttagcactttgttgggcaattatttgtgccaaaaattgcgggggaaaggcggggagcaaaatgatgagaaattggattatgccattgagaagaatgtgtggacaacgcccgcaactgtagatcctttattagcctgcaaaatttcaaaaagttgcttttctaaacatttttgaccatgtcccgacttgctctggggtcgggccaaaatgaattcacggtgcggggttcaggggcaggcagggacgagactcggaattaataaaaaaagattccgggaaatgccctccttcttgggtaattcatcagcaggatcgaaatggtgaacaaaatatcacaaaattgatca

SEQ ID NO: 40084 - DNA, 934 bp, Heterodera glycines
agtcagcacattacataaagaaaaaaactgacgatctacctcgcggaaaatcagttccatcatcgtgctggagattggtagctgttggcaacaattgctcaaagagagtaacaattggcgggaaaggaggccaagcttaaccaaacattttatgagtaagatgggaaaaaagacattttcaaacagacaactcactgagaataatttttatctcatttaagagaccagaaatgttcggcaaaacaacgggaacgggcacgttcgacaaacgctcgcgcagtgacgccaaatgcaccgcaaaatttctcacaggcatgacaaaaaattcaatgtgctaaacaaattaactgtacatttgattaacaaaatttgtttgaacatacttcacgggtatgcggtgttatgcgaacgaattgttgtgccatttcaaatgcaaataataggtaaattaattaactaaggctaaaaacagttacaaaattaaaatgtcaaattggcagagtttcaatcggaaatgcttagaaaattatgagaaatgaacagaaaggtcagactattttaagaaaacatcacggaaataatgaaagacaaaaggactttttcttgcttattaatagggcccggatttatatagaaaaaaaatccaaaatatggattaaatacagataaaaaataggaaaatatggacaaaacattctgaaaatttgttcgagtcttaattttttttttttgtaagcgaatgttgctaatgaatttttttgcacaatttttgtttagtgtattgctgatttggccgtttgattgaaaccatcaatgtgctcgtttggttgatgggggagaagccgagaaagaaataaattttgtttaaaaaatcgcaaaatagacattaaataggcacaaaaatcctcgaataggcactaaaataggaaaaaaa

SEQ ID NO: 40085 - DNA, 852 bp, Heterodera glycines
  unsure (1)..(852): unsure at all n locations
ctaatttattggcacgaacatctggtggtggaatcatcttcctgcaattaggggtcattaacaccatcattattggcacacgaaaatgtcggcatattcaaaggaaatgatagcatttgttttcttgacttggattgctctcgagagtgccgtgccgtgaatttgttatgacatttcaagactttctggcggcattttttcatcgaaatggtcattctcgaaagggcaataaaataatgttcctgccctccggcggagagcacacattaaatgcccgaacaccgaatggacgagacccaatttttaatttgccaattgtggccaagtgacaaaatttaaaaaatccggaaaagaattctgtaatcatcagagtgaagcgattacctagtttttaaattttagtttaaattttttaataattttataatcaaaaaaaaaaccaaaattgtgaggatgataagtaaaatttttaatgactaaacaatgtgaaattataaaaccccccaaaaaaatttaatttttttttgaacaaaatttccgagaattttgggaaaaatttgaaaaactaagaaaatttattaagaaattcgccctctccaaataaggacaattctttgaaataaagacacactttccttgactcgagaatactctcgaacagaatgctctcttcgctgtatgttgtttatatttatttaataattaattaatataccccatttttatgccattctaatctttgagagtacggcaaaaatccaatccatttttgtggccattggtgnntctttgagtgtggcaaaataaatcaatggactgtttnttgaacagnnntttttttgtgccgtaccc

SEQ ID NO: 40086 - DNA, 877 bp, Heterodera glycines
agtttcttaaataattagagaattttattgaataaccccccacattacaagttttcctatctttacaaataataaacacatataaatatttattttctttcctttttaaaacttagcctaaaatccacagtttgcctttttggtgcaaaaaaccgacgaaaagtgccaaaataagaacttagttattagattaaagtccaaaatttggaaaaaaaaataataaataattaatggaatatttaacataaaagcgatcttggggaagaatgaaataattggtggaataagcataacagtcagctctttaataatttttttcttattttcaatgaagcaaaaatgagaaaaaaaattgatggatttaacatacatatcattgcattatagagatcaggtgaaaaagtgattgtaatttttcaagtattttgactttaatctaataattcaattaaaaacaaattgagtttcccggcggcggctgtcggcaccccccccccccccactttccccataaacttttataaaattttacgcaaaatttaaattttggtaatctttcttttaacatgtaaaaatgtaattgcactttgaattttttttctcttttaatttgtattggttccataaataatttgtcaattttttgtaaaattaagtttaatttctatttatgtttaagatatatatttttaagttattgccccgggtcattttccctctcgtaaatgaaacaccaacaaaacgacggagaattaataattgccctaattgcccattcgcccgctcgtcgaatgtcttctctttatgtacacattcaacgcacaaacgaatgttaaatgaactgaacaaaattaaatttcttttatttaaatttaaa

SEQ ID NO: 40087 - DNA, 1037 bp, Heterodera glycines
  unsure (1)..(1037): unsure at all n locations
caatcgcttagtgctttaagtttttgtctttgactttgcttttttttccatttatttcaatcggctagtgctttaaaggttttgtgtttttgactttgctttttttttccatttattccaatcgaccacgttaattcattctctatacatttagtgtcttatttcatgaaattatattaatttaattttaaataaagaggcaaattttnacagaaaataaatagacgctgactaattagctaacatttataaagaaagtagaaatttgattaaatgcatatacaatatacaaaatattacttttttaaatttgtataaagcttttattttgtctttgactttgcttttttttccatttatttcaatcggctagtgctttaagtttttgtctttgactttgcttttttgtccatttatttcaatcggctagtgctttaaggttttgtgttttgactttgcttttttttccatttatttcaatcggctagtgctttaaggttttgtctttgactttgcttcggctagtgctttaaggttttgtctttgactttgcttttttttccatttatttcaatcggctagtgctttaaggttttgtctttgactttgcttcggctagtgctttaaggttttgtctttgactttgctttttttccatttatttcaatcggctagtgctttaaggttttgtctttgactttgcttttttgtccatttatttcaatcggctagtgctttaaggttttgtctttgactttgcttttttttccatttatttcaatcggctagtgctttaaggttttgtgttttgactttgcttttttttccatttattccaatcgaccacgttaattcattctctatacatttagtgtcttatttcatgaaattatattaatttaattttaaataaagaggcaaatttttacagaaaataaatagacgctgactaattagctaacatttataaagaaagtagaaatttgattaaatgcatatacaaaatattacttttttaaatttgtataaagttccta

SEQ ID NO: 40088 - DNA, 1610 bp, Heterodera glycines
aaaaattttcgcaaaaaaagtttcttcaaaaatttattatttaattttttgcaaaagtttgcggttgtcggggagaaattgataaaaattttttggtcacttttggggatttttttttgcataaagacattggagtttccaatttttagcacctattttgcacttttttggcttaagaaagtatgaaaatttggcttctcttcagtttctttatcttctttccaatctttttcttgttgttggcctccataacaaggcgatgattttatgttttaaaaattcttaaagaaattgaatatttatgtctcgaacggacagaaatatttattttgttttaaattttagttcacaattttatgcaaaatctcacatgctaattattttgtatttgtttttttgttacattttgcatgaaattttattgtggtaaacaaaaatagagataagtaatttaaatcaaaacaataataaagattcttcaatttaaaattgatacatttatcaaaaaaaaccttcccaatcaggcccatcacacaaaaaactgattcaatttcaattaataattcaagaaaggacctatcatttctcaaacaataattcattcattcattccgctgatcactgcttggccccgcgtgacacgagaacattttttgtcacttttatctagggttgcgtcaccgaccccgacatttttggccattttcggggaaaaccccgaaccccgacgcttccaaccccgaaccccgacccttaaccccgactcggggtcggggttaaatatacacctctaagaatggaatttttgttggggaaaaggcaaaaaagttataagaaatttgaattttgttctttttataaaaaatcacaaacatcggaaacggctttatgtaacctttgtcataattctttttcgtgtaagaaatcgtcgactaaaggattatgggatcatttaaggtcgaagcattatgacgaatttgagcaatgggaaaaaaccaaagaaaaagcaaacaaagaagtactaaatttaaaagtttctataatttttaaagtatttaggggcaacaaaatattacgaaattttttcaacaatctgatgatcaaaagcaaaaggccgacgaattggttctgaaattaatgttgcggacaaattcatcttttttaatcaccgaatcgcctgaattgagagagctgtacagcaaagcatttcctggatttgaagttattttttctctttattattcctaaaaaaatcattttttgcagctacattgtagggactatttccgtaaaattgttctaccaaaaatggcaaatgcaatcaaagaaaaaaatttgttcacaagtttcaaacgattatttcacaataacagagtcaaccgacttcaagtccttcattattaaggttataaattctctttaggttatatttaagttaaaattttagcattactattcatcatattgacaatgaattcaaccgaaacgattttattttggaagcagtacctatcgaatcacattctggcgacaacattgccgactcaatttataatgcacttgatgaaaacggattaaaaattgagaaattaatttccattgtccgtgat

SEQ ID NO: 40089 - DNA, 1102 bp, Heterodera glycines
  unsure (1)..(1102): unsure at all n locations
gtgaagattaagggacgcaaaagagacgatttaaaagcgattcgaaaattctatcgactgatataataacgatgcagtcgcggcgttggtgaagattaagggacgcaaaagagacgatttaaaagcgattcgaaaattctatcgactgatataataacgatgcagtcgcggcgttgacaactgagatggaaccaaaagttccataatatctttccataaggctggaaaggcagaatttgaatgaccagtcgatatttacactgagcacccgttgaagcgggtgatgcgaagcaatagcaaactgtatttttaaattctggccgcaattctaccaaaaacgtgtttagactgcagtaactcggctcagagtgaagattaagggacgcaaaagagacgatttaaaagcgattcgaaaattctatcgactgatataataacgatgcagtcgcggcgttgacaactgagatggaaccaaaagttccataatatctttccataaggctggaaaggcagaatttgaatggccagtcgatatttacactgagcacccgttgaagcgggtgatgcgaagccatagcaaactgtatttttaaattctggccgcaattctaccaaaaaacgtgtttagaccgcagtaactcggctcagagtgaagattaagggacgcaaaagagacgatttaaaagcgattcgaaaattctatcgactgatataataacgatgcagtcgcggcgttgacaactgagatggaaccaaaagttccataatatctttccataaggctggaaaggcagaatttgaatggccagtcgatatttacactgagcacccgttgaagcgngtgatgcgaagccatagcaaactgtatttttanattctgggcgcaattctacccaaaacgtgtttagactgcaataactcggctcagagtgaagattaagggacgcaaaagagacgatttaaaagcgattcgaaaattctatcgactgatataataacgatgcagtcgcggcgttgacaactgagatggaaccaaaagtccantatatctttccataaggctggaaaggcagatttgaatggncagtctatatttacactg

SEQ ID NO: 40090 - DNA, 1672 bp, Heterodera glycines
  unsure (1)..(1672): unsure at all n locations
aactttgttctcattttctccaagatttgtcctccctaccacgcgctaaaaaacaaaaaaaaatttggaaaggaatctccctaataaaatattgatcacctcaaatgaattagtgaaaaaattgaaaatggaaaaattcgataactaaatgacaaactgacagcgcacaattttttggcaaaagcaactgaagtaaagagcttttatctccgttttaaatcaggctaagaaaaaaagttttgcggtaatgaaaataaatgaattacaaaaaaatgaaaaataatgaaaaaagacagggatttttagggggttgagttaactgaaaaacaatttttttgtattcaaaattcaaatttggcgcgctaaatgacccaattatttccccaaatcctgccagtgctgactcagctgtcatttataaaatgattgatggccaaaaatgcgcattttggacctaaaaaatgacacgtgactggtcatgtgaccgaattatttcgaaatacaatgcaccgcgcggaaaatgagtcagctgtcaaggataaatgccccaactgtcaatgaaatatgcaaacaacagctggaccccgtccatcccgtgacaggcgttccgcctatcacatgagccctccggggccactataaaagctgcaattgcgcaaaaaatttttcttttttcgagaaaaaatattgctttggaaaatatttcgcaaattgaattttaattcaaatttaccaataaaatatttattttatatacaaaaaaagtccaataaaaaaaaacaaaaaaaatgtctcaggcgcaaaaaaaattcctgaccgtcccggctgaaaaaagaaaagaaagaaatataaaaaattatttcaaaaaaagtattaatgaaattaaattaaatgaaaataattatgtcgaaatttcttcgactgaaagatcaatgcctgattatgggatacaagaaaatacaataagatttatttttaaaaacccaaaaaaagaaaaccgtaaagaaatgtcagaaaatttcaaaaaaataatagaaaatatgattaaaaaatcaatgcttaaaaaagaatggggtggaaaacccagcggatttcaattgatttgtattgtgaaatattgaccgaccccataattttgccggcccgagacccaaaaatgaatacggcggacaccgttttacatgaaatatttcggatcaaccaatcgtatacagaattcgatttgttgcagcagccaatatcttgtattatagcgacatatagtacacccgttgggacaggtaaaaattaaaagtttattttaaaaaatatattttttaaggatttaaccctttggattattgtgaaattaaagagttagggagaatttgtgtcaaaaatatggacaatttttgtaagttaaacaaaaaataatttagcaccaaaaaattttaggtttattttatgccttggttttaagcagattttatcaattaattaacaaaaatgacgaagagaaaatttcgatggatcaatttcgtaaaattataaagaatgaacagagacaaagcgaagcagtaaaaaaattaattattgatgctaaaattaatatgaatgaaaaaacctatggtttaaatcatttgcaaatcgttcaggatttttgggtaagtaaacttannattttaaggattaa

SEQ ID NO: 40091 - DNA, 1652 bp, Heterodera glycines
  unsure (1)..(1652): unsure at all n locations
gataatgggttgcggtatggaattttactgtcaatcatatgtgcagtaaattggaaaatcttttgatcaaactgggcaatttaaaatttgaatcattatttatttatttttgattacggtgtatgattttttacggtaattactgtaaaaaaacacatcaattcgctgctttgttaagttatgagtcaaattgattatccttggattggttgattttttgttcctactcgctgccactcaattcgaaatggaagtcaagaccgctacagtaatcatactggaaaggacggtaattgccactaccttagtctaacaccatggctactgtataaaaggcttcgagattcggctccccaatcgctaaaatttgagtgccagcgagaaaagtaaactaaatgaaatgtttatgatggatgcccgtcgccaacaccgtaggacgagcgccgctgggagtaactactgtagccgtgctcggcaccgcctgctggaccggcgatcacaccgccgccgccaccgctggacaagctaatgctgctcggcgagaattgaccgcttggccgattttgcagcgactgcgcgatgtccggatgttgttaaagcggaaggtaatatgcgtccttctgaaaaagtgtatgaatcggcgtacagggtatgtttgtcaccatggtcatgcaaatgtaattataaacatttaaatttttcaagtcattaaaatgcaattaagtcaaaatgaatttatatattcgatagacctaaaaattctctattagcttgcgaaatttcaaaaaatttcattgaggttcaaaaaagttctggacaaaaaattccgacttaaggttttgtggaatttaattaccatatctttttatatatttaagtaaaaaatttaataaaattatattctgatagaaaacacctagagcttttgaatgataccaagaattattaatttggttgaaaatggaccaagttaagaatttatatgtcttacatttttttgttttcctatcacatggcggatttaggaaacgcccatggtggcggtttttaggaaacgcccatttggcggtttttaggaaacgacctagcacctaaataaataaagcgcgaataacttggaaaacgacgcagcataaatttctgaacttcgcatgaaaaaaattttataataaaaaaaatatatatatatatatatatatcaggggtgggacaactctcgcctctcgtctctcgcctctcgccaactctcgccatttttggtactctcgcctctcgtctctcgcctctcgttttttgggacgagaggcgagagttgaaaatacacccctaaagattgaacttttgagcagccagaaaaattttcaaatttacgcgaaaaaaaaatcttaaatctctttctttccttccttaatgttttctctatttttggatagctccaattcaaatatggtctgctggctaaaccttctgcctttcattatttttctcttgngttcaattccccaacggtacagaatttttttaataatttctttaaattattttcaatttgaattntaattaatanaaaatatttcaatttaaaaattattattttttctttttttaacagcctaaaaactgcaattaaccaaaactttgataattttttg

SEQ ID NO: 40092 - DNA, 982 bp, Heterodera glycines
ctaggcttagatcacatgcgattttcgccactctgataatttagcgctcataatgggatgtataaaggcgattgtagaggatttggaagcgctaaaatgtgtttgagaagctttttgagcgtaattacgatttttacttagaccattttttctaagcttagatcacatgcgattttcggcactctgataattttagcgctcataatgggatgtataaaggcgattgtagaaggaattggaagcgctaaaattgtttgagaagctttttgagcgtaattacgatttttacttacaccattttttctaggcttagatcacatgcgattttcggcactctgataattttagcgctcataatgggatgtataaaggcgattgtagaaggaattggaagcgctaaaattgtttgagaagctttttgagcgtaattacaatttttacttagaccatttttttctaggcttagatcacatgcgattttcggcactctgataattttagcgctcataatgggatgtataaaggcaatagtagaaggaattggaagcgctaaaattgtttgagaagctttttgagcgtaattacgatttttacttagaccattttttctaggcttagatcacatgcgattttcggcactctgataattttagcgctcataatgggatgtataaaggcgattgtagaaggaattggaagcgctaaaattgtttgagaagctttttgagcgtaattacgatttttacttagaccatttttttctaggcttagatcacatgcgattttcggcactctgataattttagcgctcataataggatgtataaaggcgattgtagaaggaattggaagcgctaaaattgtttgagaagctttttgagcgtaattacgatttttacttagaccattttttgctaggcttagatcacatgcgattttcggcactctgataattttagcgctcataatgggatgtataaag

SEQ ID NO: 40093 - DNA, 1221 bp, Heterodera glycines
  unsure (1)..(1221): unsure at all n locations
cattttatttctcagagaattttaatnntatctatatcccagaaaaatgactatctcttattttgagaaattttatacgttacaaaagcgctcgagcgtgagagggagggcggtgcgcaatcgccatntaatttcacagagaatttttaaatttatcttatatccaagaaaaatgactatctcttattttgagaaattttatacgttacaaaagcgctcgagcgtgagagggagggcggtgcgcaatcgccatttaatttctcagagaatttttaaatttatcttatatccaagaaaaatgactatctcttcttttgagaaattttatacgttacaaaagcgctcgagcgtgagagggagggcggtgcgcaatcgccatttaatttctcagagaatttttaaatttatcttatatccaagaaaaatgactatctcttattttgagaaattttatacgttacaaaagcgctcgagcatgataggaagggcggcgcgcaatcgccatttaatttcacagagaatttttaaatttatcttatatccaagaaaaatgactatctcttcttttgagaaattttatacgttacaaaagcgctcgagcgtgagagggagggcggtgcgcaatcgccatttaatttctcagagaatttttaaatttatcttatatccaagaaaaatgactatctcttattttgagaaattttatacgttacaaatgctctcgagcatgataggaagtgcggcgcgcaatcgccatttaatttcacagagaatttttaaatttatcttatatccaagaaaaatgactatctcttattttgagaaattttatacgttacaaaagcgctcgagcgtgagaggaagggcggtgcgcaatcgccatttaatttcacagagaatttttaaatttatcttatatccaagaaaaatgactatctcttcttttgagaaattttatacgttacaaaagcgctcgagcatgatagggagggcggtgcgcaatcgccatttaatttcacagagaatttttaaatttatcttatatccaagaaaaatgactatctcttcttttgagaaattttatacgttacaaaagcgctcgagcgtgagagggagggcggtgcgcaatcgccatttaatttctcagagaatttttaaattatcttatatcccagaaaaatgactatctcttattttgagaaattttatacgttacaaatg

SEQ ID NO: 40094 - DNA, 1550 bp, Heterodera glycines
acgttctgcttcagacgctgaacaaacgtcgcgaactttcggaaatgttgcgctctcagcttcagttacgcaccaatcatctgcgtcctgcctggaaaaattttcgcgtccattgcaacgaactgacaattcatcctgctcaaactgcatatgccatgcgcggttatcttggcattacggtttttttaatttaaatttatcagctcctcaattgtatagatatacattgtttttaggtccgtatttactactatgtgaagcatggcgtaaagctcgtttatcctcagcttccctgtgttcttcaatttggcggtggtgaccattgttctctgtttccgcttgagtgtctgagcgtcataaaaggcctgattaatacgcatcgggtgttttatgtgtgattaagtttgctgtgttattgttgttgttttttttaatttctcctagataaaaaatgttaattattcaaaattgtaccgcggtgtttaaattacagctgttgcctttcacaaaagagcagtttttgaaaattgcaaaaaatggcttcaattccgagtacgacccccaacgatttcatgcaatcatcatacgactacgtctccccaaaaaacgcactcttgcatgtcttttatttcgttcagcccgtgctgtgttgactggtgtgccttgtccagacagagcggtgcgcgaggcacaaaaaatcagacggagggtgcagcatgcgttgggctcccagctaggaatccacgagttacgtgttacaaatgttgttggttcttgcactttatcacatcgattgtccatgctgaattttttaccaacactggacccacacaggttccgcaacatcaaatatgatccttcaattttttcccgcatgcgttgtaaaatagtcattgacgacgacgatcacactttggtcactgggggggggggatcattctggaaaaatcattttaacaggatctaaaaggcaggacaatttgaaccacgctttgcattcattcttagctgtcttaaataattgatttgttcatccaattgtaataaacacttttttgtttttgcaactgattttttttattgattccaagttgacacccaggacagttagaaattaaaaaggcatcatcatcatcatcaacaccaccatcatcggcattaaattgctgtaattcttgctcctgctgatgctgaactgtttgcgcttctcggaatccaaacggggttgtcttcatgccgggtcgaatgcgccccttcacataatggggctgatagtctttgtgagcttcgtgggtgtacaggtccgaacacggacttcgaccaatttgaggaaatttgattcttattgacgcactgcttcccggaacaacatgaacatcttccatgttaagcacatcgtcactttggaatacaatgttaggcggagtgttttgtggaattgtaaaaaaaaattacatttgtccatcaatgttgtaatgttccaaaacaatgtgcttcatggactcgaagaaagcagttgctgggcggaataagaaagacgaaaacttcgg

SEQ ID NO: 40095 - DNA, 1470 bp, Heterodera glycines
ttttcagcacccggaagttcactcgttgcaacggatccaatccaattgggtcccgctgatcagactaaaactgatcaattttgatcatgaaattgatattgtgttcgcttcaattcctggagagcagcaaattgatgccgatgatttacggcagcagaatattttgacaaaatttgaagaaatgatagaaaaattagacaacaaaatcaaacagctaaaagaagaagaagacagaaatgatcaagcctcattaacaaatgccaaggaacaaatactaaagtcactccgatcactcgctggtaattaattaatgaataaagtatataattaagtatatcattccatattaattaatgaatattaagcctaattacataattaagggtatcattccaatcttcaattgcttgcaatgaccaagaagaataataattttcataaattacttttgctactcaaactgtgggcaaaatgtgagttttctaaaaaaatacaattgcaaaaaaactcacaaagcgattttacttcataaaattggtcttttacattaaaatttagctaattacatttataataatgcaatgggcttcttcaatggcacatcgttgggcgttttggcggcaaaaattgtcttactgtatcccgaagcgacagtaccatttctgttggaacgtttcttcttcacttattattcatggtcaaactttaattaattaattaaaagcaattgatgaattcagggaatggcctttgcccgtacaaattgccgaaatccgacccaattcatcattaaattggaatgcatgggatgagcaaaaacatttgttgtcccaatacggtagcggcggtgcgtacagtaaacttatgataccggtgatcactcccggcttcccggaaagtaacagtacatatctaattaattggcaaacaacaaaaatcatcaaaaatgcacttgatgagggtatttctttttttattatacataaatttaaataattttgaaattttgaaattttttttattaattatcaaattaaataaattaccttaatttaattgtattttcacagttacatttcaaatgttttaaattttaaaaaccaatttcctaattctatgcttttcttaattagcatttcaattgtttcattcttcaaaaagtgaaaatgaaaaattgcctatgctctttgaacaacaaataaaattccacgaaaaggtaaattaataattataaattggggacaaaaataattaggtaaatacgcgtaaataattccctattaattacagtactctcaatattttgcgatcacttgtgtcgcatccgatttaaatatgtttaatgaattttgcggatttgttgttacacgcatacgcgttcaacttactcgccttagcgactgcacgcgtgacgatgtcgatttttgtcatttgattttgttaaatcgctgtccaccgtatacttacaaa

SEQ ID NO: 40096 - DNA, 929 bp, Heterodera glycines
ttttaaaatttttcaaaattctgactttttcatttacttatttattttttgcaaattaatttcataagtattttttcagaaagtgctctgaaacgcaccaaatgttaattaaaagttaaataaggctctctgatgctttttctatcaaaagggagatgaataaatattttaaaaatttttaattcctttttaaacaggccaaaaagtttaggcttatattttaaaaagttttatcgaacctagcgcactaaaatcgatataatctctccaaattttgcaggccttctccattgtaaaggactaacttaacctgaaaaaatgccaacgcttgttgtttttaaaatttttcgaaattctgactttttcattaattatttattattttgcaaaatcaattcataaatattttttcagaaactgctctgaaacgcaccaaatgttaattaaaagttaaataaggctctctgatgctttctctatcaaaaagggagatgaataaaaattttaaaaatttttaattcctttttaaacaggccaaaaagtttaggcttatattttaaaaagtttcatcgaacctagcgcactaaaatcgatataatctctccaaattttgcaggccttctccattgtaaaggactaacttaacctgaaaaaatgccaacgcttgttgtttttaaaatttttcgaaattctgactttttcattaattatttattattttgcaaaattaattcataaatattttttagaacgtgctctgaaacgcaccaaatgttaattaaaagttaaataaggctctctgatgctttcactatcaaaaagggagatgaataaaaaatctaaaaatttttaattgctttttaaatttgcgaaaaattttaggcttaactttttttatataaactgatcagaagcgaaccagattttgc

SEQ ID NO: 40097 - DNA, 1730 bp, Heterodera glycines
  unsure (1)..(1730): unsure at all n locations
aagttgcgggcggcgtcgctgcggaacggtcgatgattccgccggggacaatgctcagtgagtgggacacatggcgcgtgcgtttgcttgcacccgcgtgatttctgtcaaattgcgtgtactccgtgtacaggttgcacgattgacctgctctccggtgcggaaaagctgcagcagcagcaacagcagcaagcgagtgcgatcaccttgtccgcaccagcaacagatgacccggttatgggtcgcgcttcggctaacagcagcccgcagccgcaacgctcagcgcgctcgggtgcgcctgccgcgggtgagacgctgtgcgtgcgactcgcgctcagcaacgaagtgccaatacggtgacgcgcactcaaaaaaattttaaatttttttttttttacaataatagagctgtgcttctttttgcggaaggaattttcgcgtcagaatgttatgcaatgtgattttaaaaaaatatttaaattaaattttcattaaaaaaaattcaaaaaataatttaattgaagcaaaaaaaaaatttggaaaaaatttattttttaaatttattttgacaaaaaaaataattttggttttgattgtatttaatataatttttattaaaaaaatataattaaattatattaaagtttttttttgtttaaaaaaatttctattaaataattttctttaaaataataaaaaaaattaaataaaataattatttttattgggaaataaaattattttttaaattttttgaacaaaaaatttagtgactttaattctttttaaatatttaattaaataaaacatgattaaactaaataaacaaaagttatcttataaacacaataaaattttgtttgtaaattgctaattttatattattttattttaattattaattattggcatttttcaagccacccgaatgggaaggaaagtgccgacatggtggtccgattcaatccggccaaaaatgtgttggccgaactgttcatcaaagtgtttgccggcttttccatggagtgatttttaattgtttaattacaaaattattattttaattacctaattaattatttgttcactaattaatgaattaaggcgccatttgcgtgtttttgaagtcaatcagctgttgccacgttttgtgacatttgtccaaatggacccagcctttggaggtggttattttattatttgacaattataaaaataatttattaattttatatatttttaattgctaaagaaataattcttcagagatttgtttattttgtaaaattaaatataattaattaaaaaaaagcctaacgaatatactttatggaggtattaactaagtttttgcatcaaaaatttataaataaaaattaaggaggttatgaatttttgaatttcttgaaaattttttggtgcaaaacttacttttaacaccctaagtaattcttgtttaattaaaaaatttcaaaaaatgcaagaaatttgcgagtattctaattaattaaagtatgtatgttttagttaattatattaattaatcgtttgtatgctttatatttttanaataatttttanaattaaaatttnaaattaatttatttgaagagacgcccgaggcatttgtggcatttcgtctccactgtcgggtggatcaactgcgatcatggtacaaattttgcaaggatcgaatttaggttttaaatctttaaaaatttccattttta

SEQ ID NO: 40098 - DNA, 647 bp, Heterodera glycines
  unsure (1)..(647): unsure at all n locations
ccaggggcgttcgaaaaccaaaaaaataattttcgaaaacgaaaacgaaacgaaaatatttatttttaacgaaaacgaaacacgaaacgaaaattcaaaattttaaaacttgaaaactaaacgaaacgaaaattttttgacggacgaaaacgaaaacacgaaaacgaaactcaaaaagtgacgaaaaaaggggacgacacgaaaacgacacgaaatttcgcacacccctggtcggcacccggaccctcccttgttcccgaaaattttgaaaaaacgcgccgcaaaaaatgcataaccgttgatatgatgaaaatgatcagtggaaacaaaaaatatccattgtataaattttcacctttttgggtttcgttaaatttgcccgttatgtcctttaaaatcagtatacccgtccttggaaagagagtttatacgagccctgccttaaaaagacttaaaaagtattctacactttgtttgaagcttctaacatgcagtttagtttgagtttgatggtttttcaccanaaagtctcggctggggcctagtctaatttgtaagcaagcatatgccactgatttctcatacaacaataattcctcattcactttttttcactgattgcttggccccgccgcactcaaaagggc

SEQ ID NO: 40099 - DNA, 784 bp, Heterodera glycines
atgccgaggctaaagccaagaaagacgcataagagaaggctaatgccgaggctaaagccaagaaagacgcagaagagaaggctcagaaggatgccgaggctaaagccaagaaagacgcagaagagaaggctcagaaggatgccgaggctaaagccaagaaagacgcagaagagaaggctaatgccgaggctaaagccaagaaagacgcagaagagaaggctaaaaaggatgccgaggctaaagccaagaaagacgcagaagcaaagaaaaaggatgaagaaatgaagaagcaaaaggctaagcccgaagaaaagcctgaggcacctgccgaagccgtagccgtagtgccggaagcgaagaaggcggaagagactaaggaaaagctgaagcaggaagagaaaccagtgaaagtgccaccatctccagcagaaaagaagagaaaagacgcagaagagaaggctaaaaaggatgccgaggctaaagccaagaaagacgcagaagagaaggctcagaaggatgccgaggctaaagccaagaaagacgcagaagagaaggctcagaaggatgccgaggctaaagccaagaaagacgcagaagagaaggctaatgccgaggctaaagccaagaaagacgcagaagagaaggctaagaaggatgcagaggctaaagccaagacagacacagaagagaaggctcagaacgatgccgaggctaaagccaagaaagacgcagaagagaatgctaatgccgaggctaagccaagaaagacgcagaagagaaggct

SEQ ID NO: 40100 - DNA, 1258 bp, Heterodera glycines
  unsure (1)..(1258): unsure at all n locations
tggataatgaaacgatgccaaaatggggagacggcggcggttcgatgggagtgggattacgaaattttgggcgattttaacagaatcttcattagggtggatggtgtcaagtgcattgggtgagtaatagaaaagcatttgattttgtttaataagtcaaattacgctgaatttaggtattgtctccgtaaggagagaagctggacaaagcatcgaaatggggggagccttctgacaatgaacggtcaaaagaacaaaaaaagtgatcagctgctgaaatggactaattgggaaatggtcgatcataatttatcaatgataaaacgtaatttatgaaaaaataacagatacatataagtgcaaaacatagtatttttgttgagaaattttcccaaaaaatgtcgaaaaattgaaaaaaaagtgacaaaacgccaaaatagtgaattttcactattttagggaccgggtcgtttcggcgccgacgattcggcgacgacgtttcggcgccagggtcgtttcggcgccgcgccaagccagaaatttaaaaaataaaaaacacgcgaaaaggaagtggtcgctgatcaatgatcacgaatccgggctcagaccagcgctttttctgtcttttatatgaatttagaaaacaaatcaaaaaactgtccccaattaaatttttttgggagttttggccatttttgaaagatttttatcaaattttacaaaatagtttggaaactttgtgaggaagtccttggaggcattacatccaatttgttaaatatattcacatatcaactacaataaaataatcccatgctcttatcgcacactgatcagcaggaaaaaatgcaaatgatcaatagagtaaggtttagaattgaccaaaactaccggaagaacgggtcaagaaaaggataaataatgatcagagaaaaacaagacgtattcatcgaaaaatgatcaagccacaaaagaatacccaaaattggacgattggccaactaataaaattagacgatttacttaatcctaatgaatttacttgaaaccgtaaattttgattcgcaccttttggcgcacaacgacaacccaaagagaatcgttttatttttcgaaatcgcttttttcaagttctaataataaaaaaaacaagttgatcattccaataacagtaaaagaacaatttttatgagcatgtcaataattccataattcaaattnggtcgatcacttctcacaaatcaaagtaaatgtaaaa

SEQ ID NO: 40101 - DNA, 1322 bp, Heterodera glycines
aaaaagataagaaaatatattaaaatttaagtttaccaaaagccaatacgaggggtgtaaaaaaagtctcgggctcgagtcttaaaaatcgagattaaaagccaagaccgagagtcgagaccgagacaaaaaacctgagtcttttctcgactcgagaccgagaccaataaaacccgagtcttttctcaagtcgggacccgagactctcgaacagcactgctgattacccacataattttctgcgattgggtcataagccaacaaaaggttgtcttccgctcgcttcaactgccatgcctgaatagttggaggaaaatttatgatcaagatgaggaatggcaagcaggaggagatgggggctcggcggagcgcagccattttcaagcagtacaaagcaaaggggggaggggcaagtttgattgaaaactgaaaatttactgtcattataacatgctttaaataaacagaaaaacattaaaaaggtgctttttttgattaagggaggctgatgaaacaaaaaattatgtaaaaaaaagaaaaacgaattttttgaattttttattcagaaatttaagaatttttcattaaaaattttgtattaatttctgttaacggatgataatcgagaatatttatgtgtatttttcataatgaatccaaatggtggcaaaaatgtgaaagtaaatcacattaaaatggatatgttttttctgtgttctgccgctgacggcgctgatgatgatgagacttcccacgatgacaaatccacaccattttacaattattttattttaattttttaaataaatttgatgaaataattaatatattactagttatggttttttttaaatttaggtcatatcccaatatacaaagtaagttttatacatgcatattttggtcttaaaatttaattatatttttaaataattaatgctaaagcgttaatcttaaatattgtaaaactgtaattaaatttggtaataaatttcgaaaaattttgatttcacccttacattagtcatcattttgatggttttttaaatattgtaatggcctttttcattatgatggtttttttaaatgtcgccctttatgattgttttttaaataacgacatagcacccttgaacagcattgaattaatagaatattctaaggttcgtcaatggaatgtgaaatattttaaaaattaaattaaattaaatttgacccatccttctctcaactccatccgtctcttcgcgttccatcattttaaaaaaatttgtctcatttaaataataaaaaactaaaattgttgttataatcaaaggcta

SEQ ID NO: 40102 - DNA, 1263 bp, Heterodera glycines
  unsure (1)..(1263): unsure at all n locations
gatggcacaatgcctgggaatgctgggtgattatttgccatattcctgttttttcaggtgtctccgttcgtctcccctcgtcccgacctcccttccttccaattggacttccattcggaaagggaccgctgcttgcgcgagcggcgtctcttcgaagaccccggcactttttccattccttggcactttgccacttattttcaatgtttttttctcagagttccctgccaccgaccgaagcattttcttcagcaaatctcctcctgaaggcttacaatggaaaaggccgggggtaattagtaatttgttgattgatttggggtcattaattgttcttttcgctgtttaggagctgacttcggacccccaactgatcgcctcttcctcgggtgcttctcgcttcgacgtcgtccaaggccaactcggcgactgttggcttttggctgctgctgccgtgctgactttgcgcgaggaattgtttttccgcgtggttccgcccgatcaaagcttcacggaaaattacgcaggcacttcaaaatacgaaagctaagaaagcctttgaaatcaaatttaggcattttccacttccaattttggcgttacggccaatgggtcgacgtggtaattgacgaccgattgcccaccaaagacggacaccttctgttcatgaactccgccaaacaccactccttttggagtgccctgctcgaaaaggcctatgccaagtgagtaataatcattgattggcccattttccaattttcgctttctttgccttaggctttacggctcttacgaagcgttaaagggcggctcaacttcggaagcgctggaggactttaccgggggactcatcgaacattttgaacttgccgagatgagcagggagcagctgctggctgtgctcgtccgtggctttcagatgggctcctttttcggctgttccatcgatgtttttgctttttctttttttcaattatgcttttccttttttgctgattaggctgatccctcaaaaatggaggccaagttggacaatgggcttgtgatgggccacgcctattcaatcaccgccatccaatcgctgcacgacgacgtcgtgctgttgcgcgtgcgcaacccgtggggacagcacgaatggaacggacggtggtcggnacgggcgnccggagtgggaccaactgacggagagccaacgacgcgcactngtgcgtggaantttggagagggacgcgaaanttttggatgtcgctggacgatttt

SEQ ID NO: 40103 - DNA, 1065 bp, Heterodera glycines
ttggccgatctcacatttcattggcgcggaggacggaactgttggagatgtcgtccgagcgtttgatgccgtcgccctctcatcaaaagtcaaagtgggactgatcatgatcggtcgtgatgcgttgatgcgcaattaaaccgccgacagcatcatggacaaattggggcgactggtgcagatgtgtgccacgttcccccatgtgaccttcttttggcttccgccgccattcgtccgtgatcgacaattcgaacacgaaacactgatcggcaaaatgcgagacttctttggccaaaagaagaacatccaatttgtggccacaacggcgacaggccgttcgcttcttgaaatttggcgctacggcaacggctacaacactgatcatgtgtcgcctgagggagtgatgaaagagaagggactcaacatgttgaaggcgtggcttttgacgcaagtcaaggaatttccgggtgatcaggagttgggcattgagaagaagaagccggagagtggagagaagggaaaaggagcggggacggcagcagatcgacaacacggccgcaccgagccgcctccattccgacgcgacgggcccgtctttcgccgctcgaacagccgaccgttcgttcagcacccgtactcgcgcaccgccgttgatcgccaccctttccgcccctttcgcacgccgaatttgccgaatcccaatcgccgtcactttgatcgctgaggacatcgctcgttgcaagccgaggatgtgataattaaataatgacctcatttgacttttaaagttttaattaatttggcattttgtttatttttttgtgtctttcattttcattttattttttttttcactcttcgcccggacttaaaatttgtgatgcggattgtgtgtggtaattttaatggtgcttttaattgttgtgttgtttaaattaaattgatttggattgctgtggctttaagtgattttaacttccttctcattcttctccttcgccccgttttggaattcggcaaaagagcagagaaggaccccggcaaaaaggcggctattttacgacg

SEQ ID NO: 40104 - DNA, 331 bp, Heterodera glycines
ggcacaacaaaggagggactgaaatgggcaggggagaggaggggaaagggtttgcattggcataataaaggagggactgaaatgggcaggggagaggaggggaaagggtttgcattggcataataaaggagggactgaaacgggcagggggaggaggggaaagggttggcattggcataataaaggagggactgaaacgggcaggggagaggagggaaagggttggcattggcacaacacaggagtgactgaaatggcaggggagaggaggggaaagggtttgcattggcacaataaaggagggactgaaatgcgcaggggagaggagggg

SEQ ID NO: 40105 - DNA, 1221 bp, Heterodera glycines
aatttgatttccgatcaactttttaccgtcggatccaatctaaaaatcttagtcgacccatcaaccccttttaatgcatcccgccagcccttaaaaatttatttttcagcatttttagatttttggaaattttttgaatttaattgaaattttttcgaattttccaaaatcccgcaatcccgcgcgggatcccgcaaattttaaatgcgggatttgcgggattgcgggatttgcgggattaatcccgcgggatcccgtcccgcaaagaattttcagtaccaatcccgcagcgggatccgcaaatttgaaatttccgggctctagacactacattaagttaaataaatggtttcattttggatttatattataggtccgtctcattttgtcttctttcttcactattaatagggctcggatttttaggtgctaaaaatccctaaataggtactaaaataggtgctaaaaaagtgcaaaataggtgctaaaaaccccaaaaaaggccaaaataggtgcgaaaataggtgttaaaaattaaaaaatctagaaataggtaaaaacctaaaaatccgactcctaactattaataatcatacacaataggcgatagataatgcattcattaaatttaaaaaatataactacctaattaaatttttctctttaaatttcatcaatattttttttaattaatttattattttttatattcattttattatatttaatttgatattttaaattttggcgatatgatatagtcgtaaatggtcattgtcgaaacggcattgtcgaaaaggtattgtcgaaacggtcattggcgaaacggtcattgtcgaaatgtccagccaccgtttttggaagtttctctaatattagctggttttaaacgtgcatttcgcaattcagtaaaaaattttcccacacaatttccaatctaataatgtttcaaaagaataatattctgcttaaagttacattttataaataattttttttgaaagttttgcagttttagaatcctccaaggtggccgttttcagggaaaatctatcaccattgtacattttatattttgccattttcatccattatttggtccaattaacttttaaataatttgatttattttttcaacatcagattgcctattttcaaaaccaggacaaatctaaaatgacgggatatgccaaaattggcattattgatgctgggttctca

SEQ ID NO: 40106 - DNA, 1146 bp, Heterodera glycines
  unsure (1)..(1146): unsure at all n locations
atgattagagagagaattttggggaaaagccttttgtttgctaaagttccttgggcatttgncctcattccgctaattgatcaggagattgaccagccgaataccatccccattgtttagagtcgttgattgtgcataggatatatatgtacaaaatatatatatttggtggctttttgttgtccgttgaaagtccgtcgtctgcccgtggtccaccaaaataatgttgtcaaaattgtttaagctttgttttttgctccgtttgatccgcctcctctctcagcttttgttgctgatcatccgatttgtcgtccgtctctcatcgctttatccatcccgctctctcttccccctcccctctatctcccccgcgctctctaaccctctttctcttctgtctgttgtccattgtgtctcattggcttagtgtttaattttttattgggttggcgttgtgtaacattttttccgacaattctctgcccctccatttgctgctgctgtccttgtgttgttgttttgttgtgtggtattccacccggtttttccttttcttttatttatttccttgtcattgtgccccaattttcccattggccgacgtgaaaatatttttggcccattttccgctgcttttgttgtgtttgtcgaccctctcaatgatcacaatgtgtttggtgtttgtgtgcttttagcgtgataattctgaacagttcataatatgtatttttttaggtgttttggttttatttttggcgaacaaagcgaaatttttgttaatgtttttagaattaattggcaattaaatggttggaaggaaggtaattaaaaaaagtcacctctcattaaaagtaaatatatagtttcacaccttcgctaattatcactggacaaattgaataagaattaggaataaatatatgtacgaatgtaaaaattaaacaaaataggcacttatacaggagagacttggaccatgccaagatttcccaagggtttgaccatgaatttggtattgtattgaaaaaaatgcatcaggatctggaaaacttaaatatgaacctttcaaggtccttcgatctcgtgaaattatgataattattgaaattacattcaaaggctggccaattaatgtttaatgatgca

SEQ ID NO: 40107 - DNA, 1065 bp, Heterodera glycines
  unsure (1)..(1065): unsure at all n locations
ttttttgagcgttggcaaagaggggggggggtctggtggtcagcagcgcagcagcaagtatcagcgcgtgtggagttagagaaagagaaaagagtgaacggaaaactgagagagtaagatgtgagagaagaaagaaaagatggatgagagagtagggagacagacagttagagaaaagagaataaaaatggcgacatggcttgctagcggagaagggaaatggacactgaccatattaattggactttacctctttaaagcactaattttataagcattaaattttttatttaaaattgttttttggttagataaatcactattacattcatggcaccacgacgcaaaagaaaggcgacaaacaatggcaccgatcaacacgacggaagtgacgcagaggcgccagcagcagcagcagcagcaattgatggcaccggaggacaagtgctattttggtctttgctaagagggctttttggtttacaaaattcaccagagggtatatgagtatttaattgaaaaaaattgttaattttggaaaattcggaccattattgaattaaatttgacggtacaaacggacaagcggtaattttttttccctgaaaatttattcctctaatttgcagggcaacaaagtgttgtggcaggcgctggccaatcagcgcatttcatcgtccatctcgcgcagcacggtctcgcgcacagcttcgccggcactgtcttcttcctccgcttcttcgaatgcgtccagacggcaacgaaaaaatcacagcaaaattgggcgtgtaccggtaagaaaaaaaatttttgtattaaagtcaaacacacacacacaaacacacacattcacttcctagataaatgtgaatgacgattgcccaaatgtgccgcctggagttttgcccaatccaaaaacgcgccagtaccaggtcaagagcgtgttggcacagttcactcacgcatcggggaggaaatgctatttcttggagtggctcggtgagtttgatgatgaaattgaaagaanaattgtgtgaatgannacgtggacggatggataaggaa

SEQ ID NO: 40108 - DNA, 698 bp, Heterodera glycines
tgaggaaaagagaaataaatatataataatcaagatatattttggattttttatgttaataatatataatttaatttttctgataaataaaaaattactccatgtaattcgttcgtagttttttttaaatttttcttttgattattacttaatttaatgcattctttttatagtatttatttatccatatctattctagctgcacaatggacataatattttctacaataatatgttttttctaaataaataaattttatttattaattatacaattaattagaagttgtaaatattttgcaaaatttacggtaatttaatttttaataatgattttttatataatttcaaaaataaccttttttggtaaattacttaaaaaattatttaatttgataaaaataatactcaaaataaaatggaaaaattaagaattaaatatttgacgtaaagattggcgaaaataaaatttacttttcattagacagtattacaaatcagataaaaaatatatattaattgatttataatttaatatataaaaaaatcataatcaattattaaaaagaaactgaaagtggttaccatattagttcgtacaatttcctgtgagccaaatttccttgattatgcatgatgactaaaagctcatcaataaaaaacaaatattttttgtatttttaaatataaatattaaa

SEQ ID NO: 40109 - DNA, 1025 bp, Heterodera glycines
gtcacttttgcttctccttcttccgatgatgcttttgtattgtgcagtgcccagttttgttgtttgttgtgtcgtcaatttgtgcacacttctgcctgtgctcagctgccgttgatttgatttgatttgatggcacggacggaggagaacagcagcggcaataaaatagaggaaaaattaatattatttggaatgaatggccggaaatgctaacatcactcccttttatactgctcattcattcgaaatttgaaatcctttttttaccgaatcagagccccgagcccctataataagtgtcgctgatcacggatctgacatccctttcgactaccggattaagatttaaaaaattggatatttcgtggctcagcgaaaaaaggggccgcttaaaaaaggcgtcaaaattttatgcgcaaaattctctccccttataagggggtttctgtgttcactttcgtcatttttgtttttgtttcaacttcaactacaacaacaaatgatgccgtcgcgttcatttttcatcaaattcaaatgggaatttgcctttgtcgcgtttctgctgctgctcagtgaatgcttttgctcggttggcgcacaaccaaccggcggccgaaagtaaaaatgccatttttttttgcaaaattttccattttcacctcccctttttatttcagtgtaacaagtccaagtacgacgggatcaacaggttcaactatgacgacaacaacaacgacgaccactaccaccaccagcagcacgccaacgacgccaaatgggacgacgacgaaaaattggagcgaatcattagcggctgctgttggcggaaagaccacacttgtgctgatcatcgttgggtgcgtttgtccttgtttaccatcattcattggggaccgaccatgacgaaggcgtgtttttttgaatgtcgacaatggcacgaaattccggcattttgggttgttgggggaccgaccctgacgaatgagtgtttttgggatgtcggcaatggcacgaaattctggcat

SEQ ID NO: 40110 - DNA, 662 bp, Heterodera glycines
aaaataggcactaaaaagcctcatttttagggggtgtaaaatgataaaatttattcaaacaagtaaaaaaattaggacaaatcattattgagatatataatttattaaatcaaaaattgataatataaagtgatatgatagcaaataattatttttaaacaatagaaaaattggattaaaaaaatatatatttataatattcgctagatctttaatttaaaattatttcattaattgaaaatttttgcattacttttgttttaatattttaaaattttgaaagaaattttatacaatattagggaaaaattttttatcttattttatagtttttataaattacaaaaaaaaactgtttaaatctttgaatgagttgagttttatttattcattgttgaaatcaacttttatttattcgattaaatgccaaaattattattttttgttttattttttgcatcataaatccattattaaatatttgttatcacttctactgtgaagctttagaactaaaactaaaagatatacaataattgtatttaaattgagtagtttcactttataaaatattgcgattaacattagtatttaatattctcttctctatttattattataatcattttttcatttatattttaaaaataaaaaataattga

SEQ ID NO: 40111 - DNA, 189 bp, Heterodera glycines
gttctgggctccgggtgggccgggtgccgcctcatgaaggggctcgacactcaaatctacgacgtcgtttgcgtgtccccgcgcaatcacatggtcttcacgcctctcttggcttccacgtgcgtcggaactctcgagtttagaaccgttgccgaacccatcgccaggatccaacccgctatctccaga

SEQ ID NO: 40112 - DNA, 1180 bp, Heterodera glycines
tattaaaaccgcagaaaaaataagtaaaaaccgaatcctcaccctacccattaatacgcaaaaactatacatactaaacatgccttaattgtcaatttcaatttttttgtttaataatttttcttggcagattttgattcattagatttgatggcaggcgtatctttgtgtgctagtctcttctccctctttcttgttgcccccccccccccccccccgctctctctctctctctgccctctgttctctctcctttctttgccttgtctctttctctctccctctccttcgccgtttctctttcgtcacactttcgtcagcactgtccatttcaaccaatgggcgtgtaacatgttgggtttttgtggattcgttttcattcatcagatagatgaagcgcgctctcaccattcgcttctttgaaaagagatcgttgagcttcgcaatacttaagtggcaaagcaaacagtcgaagtctattacaacactttttaatttgttatttttacattgacactcacaatcaatcagacatttcttcattttcgtttaagcatgaataacattaaaaatactaaattttatttcattttagaaagactatgaaaaaatcattcgtttcttttctgttttttacggcattgctcgtcattgtttgctcaaaagaggaggaagggggcgcaaaggaaaagaagtacggcacaatcattggtattgaccttggcaccacctactcctgtgttggcgtctacaaaaacggcagagtggagataatcgccaatgaccagggaaaccgaataacgccttcctacgtggctttcacaccagactcgggcgagcgtctgatcggagatgctgcaaaaaaccagttgactctaaacccggaaaacaccattttcgatgccaaacgactcattggacgggaattcaccgacaaaaccgtccaggacgatatgaaactttggccttttaaggttccgaaaagcacgaatatttaataagaaaaaactatttttagatctacaacaaggcaaacaagccccatgttcaagtgaaagtcggtaacgaggataagcaatttgcggcggaggaggtttctgctatggttctgacgaagatgaaggaaattgcggagtcttaccctcggtaacaagtgaaaaatgccgtcgatactgtgccg

SEQ ID NO: 40113 - DNA, 886 bp, Heterodera glycines
tgataattttagcgttcataatgggattgtataaaggcgattgtagaaggaattggaagcgctaaaattgtttgaggagctttttgagcgtaattacgatttttacttacaccattttttgctaggcttagatcacatgcgattttcgccactctgataattttagcgctcacaatgggatgtataaaggcgattgtagaaggaattggaagcgctaaaattgttggaggagcttttggagcgtaattacgattttactaacaccattttttgctaggcttagatcacatgcgattttcggcactctgataattttagcgttcataatgggatgtataaaggcgattgtagaaggaattggaagcgctaaaatcgtttgaggagctttttgagcgtaattacgattttacttacaccatttttttctaggcttagatcacatgcgattttcggcactctgataattttagcgttcataatgggatgtataaaggcgattgtagaaggaattggaagcgctaaaattgtttgagaagctttttgagcgtaattacgatttttacttaaaccattttttgctaggcttagatcacatgcgattttcggcactctgataattttagcgttcataatgggatgtataaaggcgattgtagaaggaattggaagcgctaaaattgtttgaggagctttttgagcgtaattacgatttttacttacaccatttttttctaggcttagatcacatgcgattttcggcactctgataagtttagcgttcataatgggatgtataaaggcgattgtagaaggaattggaagcgctaaaattggttgagaagctttttgagcgtaattacgatttttacttacaccattttttgct

SEQ ID NO: 40114 - DNA, 1683 bp, Heterodera glycines
  unsure (1)..(1683): unsure at all n locations
ttctctggctctgtatctctttatttttctttaaatcagccatcaaaaatacctacctctaaaatgaccatttttacttacttaactctaactccctaaatacttttccattggtattgatctcttgccagaataatggcaacatattattgataataatggcgggtattttggatcatgattgtgttttgttgaaattcaaaaaaaaattttaataaaaaaaatttgggtatcaaaaattatgttccaccctacgtacatacattattaaattaaaaattaattaaataagtttgaacaatgaaattattcattaatattttttctttatctattcgattatatggcaaattgattaaagaaatatattattaaaatattattcataacattaaatttaaaaaaaaacaaaaaaataataaaatgagaaatatttattaaaactagatagggtttaaatctcaattaaacaaaagaattagttgaaaactgtatatcaagtttaaataaaattataaatcataatattataatagaattactttaaaatctatgagtgaataaaaatctggttttactaatggaaaaaaggaaaaataaacaaaatttaaatgatgaatcattaaactattttagctttttaagcataaataaaactcaaatagacatttaaaataaataataaggttgaaaaggggtattanaaaagaaaaattcgaatctgtgaattaaattctgtatttgctctaattatcccccaatctccaattatcccccagtctaggaggtgtttgaataatcccccagtctccatttatcccccagggggataaatagaattttcagaaaattatatgtcgtcaatttttttcaacaaacaaacaaaatcgacagtaaaagtactacaaatgccaaaatagtggcaaagatagtggcgaaaagtccataatgacataattttcagccaaaaattgagcaaaattttttttattcactggattctgttgcaaatgaggttacatttccttctaatattttagaaaatattgacattttttaaatccaaaattcttgtcaagaaaaaaattagggatgaatagcttgcaaaaattttgaaaaaatagttaaatttgaaaaaagttatagccaaaaaagttggaaaatctggttttttgaattcttctgaccttaactttttttaaacctaatgaaatttttggcaattttgcgctaatagagaacacttagggctttcgaatgataccaacaatgttggatttgattgacaatgaaaaaagttatagccaaaaactgggctggcgccgaaacgaggtggccccattcttaggggtgtattttttgttcttgcattttgttgagaaatttttcaaaaaaatgtcggaatagtgaaaaataggtggcaaaatgctaaatttgtggcaaaaaaactattttagtggccaacttccaaaatgttttttatagtggcaagcccaaaatagtgatttaaaaatgccaaaatgactacgaaaacccaaaatttttcatatttttggggtgtaatttttaaaaatttccaaaaaattgaactttaggggtgtatttttcgcttttttgcattttttctgtgaaaatttgccaaaaatggccgaaatatggactaaaacccaaaaaggcgaaata

SEQ ID NO: 40115 - DNA, 1078 bp, Heterodera glycines
ttactgtcttaggtatagtttttccataattcttttccttttaatactcttttttcttcccgttccgaattgacgcccaaccccacctttttcgagtacattatccattcccttctttacttcattaattattgcttgtttgtttggtgtttcagctttctctattgtatccaatacacgtgttccagtgtctaatgcctctctacccaataatgtaccagcagattttaattttggtaaaagtgctctccataaaaacctcaacacatctcctactcctccacctcgctgacgcccataccctcgttggtatgggggtatcccgcgaaaataattaaaggcttctcccgagccaatctgctctactacaacaaaatcatcaaagctaactgagtttggatcaaatatttgatgcaccatatttattcaattattaatatatactataatgtaaaaatgaatatttaaatactaaaatacaatagattttttaaatgctaatacaagtaatgttgtaccccattggaatggaataagccttccctccctagtcctaatttcaatttcaatctcgttaatttcctttactctcaatcacgtctccaaattttccttcaacgacaacaattcgcaaaagtgaagcgagttggtcccctactattacattctcagtgattccattaatgtacacacaaaggctgtctataccaccctttaagtcacaataatactttgctatagctccactcagaatttttgtcgggtcttcgaacccgagaatgtagccgagttgagccgacaactcaataaagtcaattctttggtcattaaaatcaattgaaaatttccgccgctccttcaaatatttaaataagactgtttcaatttgttttgaaacaattaaatcctttaatgattctccacgtgttttgacacctacaatttcttcctctattggtttactagccccaattttttcttttaatatttcgcctcttgtttttccttttgttttttcttcttcgggaatttgttcaattctatttttcaatgcttcgcccatgggttattctttctt

SEQ ID NO: 40116 - DNA, 1030 bp, Heterodera glycines
  unsure (1)..(1030): unsure at all n locations
ctttttgtttggcaactggtagaaattggcagtgaaaaaaagtttgttttgtanctatttacaataaaaatttatgtagcatttctaaaaaggatgtaaaaataagttcttgcgtaatatttttatattgtgtgtgaagaatttngagtctgcttctgatgcaagtggaaaattttcnagcttttctcgaaaagttttttcncagaaaaaggatgggacaaataaaaaactaaacatctctcatgaccaatttaaatttccttacattttgggtttactttattatgctggcccatgaaaaaatgcagtttttccggtgccaaatttttgtgaatttttattcggcgcgtcataagcggattgtttggtggcaaatacaaacaaattttgtgtaattcgaatgcgctatgcgggctcgacatttccaaatgtatcaacaaagggtctatctccactctctggcgaggtatggccagccaaagcagagtggggcataaacaagaattttttaatctttggtatttcctctattttgtgcctgctctacatttatgtcttgtgccaatatgcctattgcaacagaaatttattcagctttcccgataaattgttgagataattattctagacgattttttcatatctcaatgcttaactatcgcctttttgtttggcaactggtagaaattggcagtgaaaaaaagtttgtttgtaactatttacaataaaaatttatgtagcatttctaaaaaggatgtaaaaataagttcttgcgtaatatttttatattgtgtgttgaagaatttgagtctgcttctgatgcaagtggaaaatttttcagcttttctcgaaaagttttttcccagaaaaaggatgggacaaataaaaaactaaacatctctcatgaccaatttaaatttccttacattttgggtttactttattatgctggcccatgaaaaaatgcagtttttccggtgccaaatttttgtgaatttttattcggcgcgtcataagcggattgtttggt

SEQ ID NO: 40117 - DNA, 69 bp, Heterodera glycines
  unsure (1)..(69): unsure at all n locations
ctgcannggtccacggttgggcgcatgcccctggctgctgaagccaggccccgggccggcgccgccacg

SEQ ID NO: 40118 - DNA, 966 bp, Heterodera glycines
gttgtacatgtggggtttcccccaaaaacgcattactatctgcgggtgagcctacaaaaatgtcgggttgaaaattgctttctcagaagaatagatactctcagaaaaatggctatctctttttttctacaccgttgtacatgtggggtttccccaaaaacgcattactatctgcggttgagccctacaaaaggtcggtttgaaaattgctgtctcagaagaatagatattctcagaaaaatggctatctctttttttctacaccgttgtacatgtggggtttccccaaaaacgcattactatctgcggttgagccctacaaaaggtcggtttgaaaattgctgtctcagaagaatagatattctcagaaaaatggctatctctttttttctacaccgttgtacatgtggggtttccccaaaaacgcattactatctgcggttgagccctacaaaaggtcggtttgaaaattgctgtctcagaagaatagatattctcagaaaatggctatctctttttttctacaccgttgtacatgtggggtttccccaaaaacgcattactatctgcggttgagccctacaaaaggtcggtttgaaaattgctgtctcagaagaatagatattctcagaaaaatggctatctctttttttctacaccgttgtacatgtggggtttccccaaaaacgcattactatctgcggttgagccctacaaaaggtcggtttgaaaattgctgtctcagaagaatagatattctcagaaaatggctatctctttttttctacaccggtggacatgtggggtttccccaaaaacgcattactatctgcgggtgagccctacaaaagggcgggttgaaaaattgctgtctcagaagaaagatattctcagaaaaatggctatctctttttttctaccaccgttgtacatgtggggggttcccccaaaaacgcattactatct

SEQ ID NO: 40119 - DNA, 790 bp, Heterodera glycines
ccgttcatttcttttcataaatgaacaaagaaaaactgacaaacatttagaagtagcatcattcattcaatattgtcaagagattcgcttgcttttaatgttcttttccgtaaattttttattgaatggttcaaatatcaaccgttaatttaaagaaaaattggatatttttttttacaaatcgttacacgctggcttttgttcttgtccgtaaatttgttgaagtcgttaaaatatgaacgtcaatttaggcgctcgaagtgcagaaaaatgcccagcaaaagacgatggaatatctgaacaaaacgaatgaaagactgaaggcgacgggtaaagaaaaaaatgaaaataaataaataaataaaaattaataaaaatgacaaaatattttagcatattattaccgccattcaaagactgctttggacgaagttcagaagagaatcgccgtaatggaagtcatcgtgggcctgctcatctttctgattttcacttcgccatttgcttattatttttcgttttagccatttaatttatcatttttatggcaatctccttaaatttgctaccttaacaaatcacttttcttttgtctctcttttttatgtaactcattcagctaaaaattgaaaaaaatgaaatagtctctccaagtgttttttaattaaattaatatatcgaaagaattctgagtaatttaaaaaaaatcgtgaggtctattttaaaaattggtatttttaagaaaaatctgttaacaaatttcaaattttcaaaaaaaattttcctcgcg

SEQ ID NO: 40120 - DNA, 1168 bp, Heterodera glycines
cggataatggaaaattccatttggccttcttcccgtattccaccgtcaaacactcggccaaaagcgcagagaatccgcttcctaattggtaataattgcctttggcattgttttgtgccattcttttgcctgttccaccgccaaacgaatggaacaggagaaatccctgaaggcctgaacagttctccgccacttcttaaatggttggaatgccgttctttcccttcttcgcttcactactccgaattctgtccatgcacactccgatcagctcctttccgaccgtgtaatggcctcgggcgtagttgttggccgcgtcctctttgccggtgatcagttgctcgggatggaacaactgtctgtaggcacctccccggacttcgtctaataattcccctaattaattcttaattgatttgatcccaaattattcttcttaccaattaccgtcgactccaaatcaatgaacaacgccctcggcacgtatttatctgaaacaattaaagacattaaaacgttatttttatgcttaattcgcgtctcggcaaaaaatgtgtccactgaattgtcggccggaccctcctcactgtccacaaatcggccctctgagttgatgccgtgctcgagacagtacaactcccagcaagcattgccaatttgaacgcccgctttttaatagttatttttaattaattataaattgatttagtgcaccttggcctatgtgtagagaaaccacctctctctttaaaaaagaaatttgtatttaatcttaaaagttttgactaccccaaatttgcccatttgattgggtaaaccgcggaaattttcttttcgaatggattaataaatattggcaaattgaggataaaagtttttgagaaacggtggggggggggaaagagggcggaaacgagcaatccttccagatgaatggaggcattggcacgacacaaattgtaagtgtcttaatggtcgaaaatggaaggacattaagagggacttagagtttatttatttatttatttatttattttgcatttccttttgattatttttaatttaaataaatgaaaaatgaaatgatgataaataagatatttaatttcttatttattctctttttaataaatatccaatgtttgtttcaatttttttgtctttttct

SEQ ID NO: 40121 - DNA, 707 bp, Heterodera glycines
atcttaattccattgatgatgaacgtgagtctccaccagcgtcctgctgcggttccaattcccatgcagtgggatttgacaacgacagtgtggacggatcgctctctgcgatttttcgcttggttggagctgcgtcggcacgcctttgcaatatgcccttgtccttggcatttgttgcatgtggcgtccttaaatcggcaatccgtacgccaatgatccgactgtccacatgagccgcacggatgcgttggtgatccgtggcttgccttgccataattggtgtttggtggacgcgcgggttgctccttggcattgttggtcctcttggttgttgcggtgggttgtcttgtgatttaatattttattgaaagattataaattgttttttattctagattcattttatattttttatcttttggttttcattagataatttttattctatcagagtaaatctaattactgtaattttcgcttgatcaatcaaatggcttaaattactaaaacttaataatattcgtttagattttaatttaaaataattaataattcaactcatgtattaattattttatttttaaagatggcactgcaccgctcattgctgagcatttaataattctgcaaaattttaatgaataaaaaaatcaataaaaattagttatgacacttttgcaaatcacctcatgaccatgtccttcatc

SEQ ID NO: 40122 - DNA, 956 bp, Heterodera glycines
  unsure (1)..(956): unsure at all n locations
ctttttgagcgtaattacgatttttacttacaccaccccccccaggccttagatccatgcgattttcggcactcccttataaagtgntgataatgnggatgtataaaggagattgtagaaggaattggaagcgttaaaattgtttgagaagctttttgagcgtaattacgatttttacttacaccattttttgctaggcttagatcacatgcgattttcggcactctgataattttagcgctcataatgggatgtataaaggcgattgtagaaggaattggaagcgctaaaattgtttgagaagctttttgagcgtaattacgatttttacttagaccatttttttctaggcttagatcacatgcgattttcggcactctgataattttagcgctcataatgggatgtataaaggcgattgtagaaggaattggaagcgttaaaattgtttgagaagctttttgagcgtaattacgatttttacttgaccatttttttctaggcttagatcacatgcgattttcggcactctgataattttagcgctcataatgggatgtataaaggcgattgtagaaggaattggaagcgctaaaattgtttgagaagctttttgagcgtaattacgatttttacttacaccatttttttctaggcttagatcacatgcgattttcggcactctgataattttagcgctcataatgggatgtataaaggcgattgtagaaggaattggaagcgctaaaattgtttgagaagctttttgagcgtaattacgatttttacttacaccatttttttctaggcttagatcacatgcgattttcggcactctgataattttagcgctcataatgggatgtataaaggcgattgtagaaggaattggaagcgctaaaattgtttgaaaagctttttgagcgtaattaccaattttacttacaccatttttt

SEQ ID NO: 40123 - DNA, 894 bp, Heterodera glycines
aaatgtgactttaatttcaatcactttttacagttaaattcatataatctgaaattggctctgaattgcaaaactggtcattagtgaaaatctgtttgttgatttgactccgaatgttgattttatttcggccaaatgttgacttaatttcaatcacttttacagttaaattcatataatctttattggacatttgacttaattatcataaatatttaaaaatatttaattcattattaaaaataaatttatttatttaaaaaaaatcagaatgaatatttctcatttaatgtaaaattcagttcttcgttttataagcattcaaaatttctgaaatacgttaaaaagtgaaaaaaaaattatgaatgataaattaactataacattaaattaatgaccaaaaaatttttatttagccgcagatactgtttatattaaaaaaaaattcgaatgtattttccaataaaattttgtcaacatgtaaaaaatgtttaattttttatccgatcttcaaaagaaaaaaaattcgatctaaataaagattaatgcattttatacatttctaatattaaagaaaataatgaagaaatataaaataaaaatgcaagttctacaccagggctgttgcaagtttcgcctttcgctatttcgctttttttgggcctttcgctttcgccttttcgctttttgactgaaaagcgaaataaaagtacacccctaaagattgggtttttaaaataaataattaatataaacattaaaggagaaaatctatagaatttatcttttaagcttttttatgaaatgtctttaatttggaatttcttcaaactttctgggcgggttgctttctgcaaatcatgtaattataaaaaggattttcctctgcgatca

SEQ ID NO: 40124 - DNA, 743 bp, Heterodera glycines
  unsure (1)..(743): unsure at all n locations
gctttgcctctaaaaagctcttgagagatttatttagaatgtgaaaatttattttcattattattttggcatttctntagcatgaactggtagatttattagtgctgacaattatattaagtagaaatcactcaggctgtcttttaaaatgtttgacagccattcaaaaattttttataattttttgtcctataattaaactcattgaaaataaagactgctttgcctctaaaaaggctcttgagagatatattttagaatgtgaaaattttattttcattattattttggcatttctttagcatgaattggtagatttattagtgctgacaattatattaagtagaaatcactcaggctgtcttttaaaatgtttgacagccattcaaaatttttttataatttgtgttctataattgaactcattgaaaataaagactgctttgcctctaaaaaggctcttgagagatttattttagaatgtgaaaattttattttcattattattttggcatttctttagcatgaactggtagatttattagtgctgacaattatattaagtagaaatcactcaggctgtcttttaaaatgtttgacagccattcaaaaattttttataattttttgtcctataattgaactcattgaaaatttagactgctttgcctctaaaaaggctcttgagagatatattttagaatgtgaaaattttattttcattanttatttggcatttcttt

SEQ ID NO: 40125 - DNA, 933 bp, Heterodera glycines
aatatcaaaaattaaatggatcggagtcatttttggacgcccccattcttaggcgcaagagaaactaagaaacaatcaaattttgggttgataaaatctctaaatagtgattgaaattgtccaaaaaaaaagttttatttagcgttttatgtgacatggacataattaaattatttgtatatttttttaagatggcccaaaacagacgaaatttttaaccaacgcatatggcaaaatcgaatggaatttctttaaacacatccataacgacaaagtgatccatgatatacattcacattacaatgcacaggaaaagatcactattctagtcgaaaaggcaccagataagcgaattatgactgaatacgttaattatgacgagatgcataaggcaatggaaaaatcatatggaaaattatgcgaacggaattacatcgatttctctgaattgccggtgagtttaaaaaaattaattaattgttccatcaaccttaattaatgttatatctagggttggtcacgaccggttattaaccggtacccccggttttcggttatgccggttttcgacccccagtttacggtttcggtttttggcgcaaaaaagccgggttttggttcgatgaaattattagaggtgcaccgtgacccacggtcacgattcacggtaccaattcacggttattccgtgaaaaatttacactggataaattgaaaatttacgaattacatattgttttcatagagaaatttggtcattttttgggcaaagttgctaagaaacagagcaaaattttcaataatttcccccggcggcgcctatcctatcggcaccgccggctccctcccctattcctgaaacttttttgaacaaagccaactacctatattggagaggaacaaataaaaagcaaagtttcaaggatgatccca

SEQ ID NO: 40126 - DNA, 926 bp, Heterodera glycines
tcgttccaagttcgcttcgattgtttgtccccgtgcttttgtctgtttatttgtcctaatggactgggcattcttttcacctttcagctgatcatctgctgcagatgagtgagtcatcgcccctttctccgccggcggaggcggcgcatccaatcgccccgggcacacttttccaaccgatttccgttgccggcggcaacaaccgcaactccaccgggtccacgaacagcagtcaagcaagttccggcttcgaaagtgccaaagtaggcccaatgaatgccaacgggcacacattgattgacgtccctcttccggattcagagttccagttcgcaccatttggcaacttcgaccagttccggcagttgttcatccggcatcggttcgtcgaccgctgcagctgtcctcccccattgttccgtctttccccccaacgcttcgcccgaagctcccgccagcgcttcctcccgcctctcttccgctggctcttcaactcattgtcgttcttccgcttacttttccatctccgatgggttggattcgtcaattggccctggcgggactttgacagtccaaaaaaggacaaaagaaaaatgcccccgagtaaatatcaccgaaatgatggccaagggcataccggtaatatccaaccgaaggctgttaaatttataatgggattaaaaaaggaggcagagatttatgctgagtggcttcaaaggctgtgcctttccgagtatttggccctgtttcttggccagggctatgatttgccgacattggcacggtcatcgccggaggatttgacaactttgggcattacgcggcccgaggaccggaaaaggcttttccaagacatccagacttggcgaaatgtaacagcgaattgcaaaaaaatcaattgagtcgaattttccctttagtgcaag

SEQ ID NO: 40127 - DNA, 761 bp, Heterodera glycines
taagagctgcagaaattgtgaattaattctcagaaaaatggctatctctttttaggacaattttctatctcgtaaccccgatgttaatccgttccggagagcctgttcaaaattttttccattaccgtaagagctgcggaaattgtgaattaattctcagaaaaatggccatctctttataggacaattttctatctcgtaaccccgatgataatccgttccggagatcctcttcaaaattttttccattaccctaagagctgcagaaattgtgaattaattctcagaaaaatggctatctctttttaggacaattttctatctcgtaaccccgatgctaatccgttccggagagcctcttcaaaattttttccattaccctaagagctgcagaaattgtgaattaattctcagaaaaatggctatctctttttaggacaattttctatctcgtaaccccgatgctaatccgttccggatagcctcttcaaaattttttccattaccctaagagctgctgaaattgtgaattaattctcagaaaaatggctatctctttttaggacaattttctatctcgtaaccccgatgctaatccgttccggagagcctcttcaaaattttttccattaccctaagagctgcggaaattgtgaattaattctcagaaaaatggctatctctttttaagacaattttctatctcgtaaccccgatgctaatccgttccggagagcctcttcaaaattttttccattacc

SEQ ID NO: 40128 - DNA, 952 bp, Heterodera glycines
gcaaagaatggatgatcccatagtgtccatattatgccctaattaatacagtcagtcccgtctcatgtgcgtttttctatgtcttatccatgtaaaaaattttttttgacaaaatccggaaaatcaaatttttatttatgcctagtatttttgtaatgtacattcgcgaaacatttcgtgggctcgagtcatgagaaggaaactcggctctgatcaaaaaccaaaacgatcaagacaaaaaaaaacagattttttttgttttgccaattttgctgagcagcatgaaattgggccaacccattaaatcaaatacttttcggtttggttacgtaataatttcgccattggcttaaaaaaatagaaaaacatttaaattttcgtaatttaatgtcgaaatcaaaactttctatctttttatttaagtcaatcaaattattaattgaattggccttttttaattattattattatatttgcgaaaaaacatattaatacactaattaattagccgggaactcacaaattacctcaatttctttgccgcatgtaatgacggcaatattttcgacttcgccctcctctgctatgtggtcatgaataaactggcagatgtggatcatttggatagtgtcaaagatttcctgatcatatgctgcctcgcaatggtgccattgtaaaatcagcggtgccattgtgaaaaaggtgatgatggcacaacaacaactcagccatagtgccattgtaaaaatatatttttgcttaaaaagaaataaataaatataaattggtaggttgtggagtgattcattatttatttttttgaatttcaacgtggaaaaacaaaaattataatgaattacgtaaacaaaatgaggtaatgaaaacatttcaagcttcgcaaaaatttggccaagtttctgggattatgtttcaaagacctcagcatcaagct

SEQ ID NO: 40129 - DNA, 646 bp, Heterodera glycines
  unsure (1)..(646): unsure at all n locations
acaactttantgcattgggacaagaaatccccggggggaggggggagacgaagatggggcgggggaggggaggggagggaaaggaagggagggagtgccacgaatgcattagtggccgtgacagtgtcggaatggcatttttgtgaaaggaaacgattgtctatcagcagcgcagaagagaaaagccaccaataagcatcatcggatacaatgccaaccgattaggggaggggaaaagcggactttgggattaaacaggaaaaatggcaaaagtgaaattggaaaagcggagaggaaggcacttcaggacaaattgcttgtagcgaatttggacaagtttgcgttaagggacagctaaaagcaaagagaaagcgccgacaataataataagcaatttccgttcatcaaaaggctgagggaggtgttaattatgtgataattagcggagattggcgacggcggcggccgcggggggaggggggaggggggagtgatggatgggagtgacacgacacgcaataaatgcatggatgagccatctgatcggcaccggcttgcccgtttccacaggctttgacggtcctctgaatgcgaggcccaaatctgcccaccttcacctggaagaaaaccgcaaaattgtgcgccg

SEQ ID NO: 40130 - DNA, 824 bp, Heterodera glycines
ttctcttctctcctcactttgtcgcgtttcccccttttatttcttttctgctctcttactctctctcgcttgctctctctcttacaaaacaaaaaaacgaaaacaaaattgaataaacaacccttttttggctgtagtatgtgttacatcactttctttttctaacgctcttttttaattttatcttctttttattgaaaaacgaaacgccacacaaatttaacttgacaaaaaggggcggagcttcctctcacttaatataaagtaagggcttgaaaacactgtcgtgccaaaaaaagaatgctgcgttaaaaataattttaaaaaaacattgaacacaaattttggcaatcttttgttaattgaatacgaactaatttgtgcaaatagatttctgctgtaagactgaaaaagtcttggaacggtatttattgtgatgaacaattaaagcaacagacgattcgaaaacttccttattcatttttcttttcttggcttcctgttctaagcaaaatgttgtcgatgctgaacgatcgctttactccttctttggctcctccttctggcgtgacatccgccgatttttgctaaaacaattcgaatttggcaataagagaggaacagagcagacagaactccggtcccacctttttgagcggaacggcgacagaagatgaagtacccgtcggtgctttctaaaaataaattctaaaatttagagataaattgcaaattatttattgatccttcaaatattcgataatgaaagggacggaacagaatccagatccctatttcaacgaaaaacagtttagaatttttga

SEQ ID NO: 40131 - DNA, 1040 bp, Heterodera glycines
  unsure (1)..(1040): unsure at all n locations
cccacccgtgttggttggcaccggcattgccgagagcattccgatgaagttgaacagaatgccaacagccaaagcgctaaggaagcacctttttaacacacgcttgatctgagagccataattatgctcaaagcatatgatacaaattcggtcaatggtcatgaaaaacacggacattgggatggttgagagcagcaaatgtgccgaaagcgctatgaagaaaagtgtggcaccatcgtaaagcacacctgaaaaagattttttgcacaaaacggtccagttacaaaaattgatcagttttaaaattggaaatgaaaaaaacacaatcaataaacaaatttttgttaaatttcataatgaatcggaaaaatgaaaaattttcaccctaatttgaggagttttattgcctaattgcacgcaaatgcgtagttttattgcctaattagcattttgccttttaatattttaatggttgattttggagactttgaatttaaacatatttcactgatcagtgatcaccttccgttgggtgccaaataatgattgcatgaatttcatatggtaacagcaaaagtgcggcacacaaccaattgatcaacaatgccatgaagaataacgaaatattcttgcgcacatttgagcgaaggagcagaaagatttgcacaattgcaaccgagtggaaaatgatggccaaaataaattcggccaaaacaaaataggaaccagacatttttaatgagtgcgctaaaatcagggataattaattaatgcatgaattaattaattaaaatggatattattatgactggacttttttaaagaaggcgataaaatcggggaccattaattaattattaattanaataatgaaaaaaattcaaattntgtgtcaataaaaatggtcaatatgtcattgngagcattacnattcttaaaatttttacatgtaatttaaagcgtaatttaaattgccaaataatgatncattaacttaaagcatagtacaattatgagcnaatgatatcaaaatgaatatt

SEQ ID NO: 40132 - DNA, 614 bp, Heterodera glycines
agtttggtgcgcttctgatcagtttctcattaaaagttaagcctaaactttttggcctgtttaaaaaggaattaaaaatttttaaaaattttattcatctccctttttgatagaaaaagcatcagagtgcctaaactaacatgtaaataaaatttggtgcgtttcagaaccctttctgaaaaaatatttaagaattaattttgcaaaaaataaataaaaacgaaagactcagattttcgaaaatttttttgagccagctagctcggcgctcatttcagtgtaagttagtcctttaccggggagtatccctgcaaagtttggtacgcttctgctcaattagcaaaaaatatgagtgatcgaattttcactaaaaaagttaagcctacattttttggcatatttaaaaagcaattaaaaaatttttaaaatttaataattttcctgcaccgaaggtactcactcggcctcttcgcggcctcgtggtgggccttcgcccccccccccctcccacgtccttcagagtacgacaaatatttccacaaaaatttggaaaaattgactacagcaatcgaacgctaacggacaacctaatggaaaaaaatccccgaaggaga

SEQ ID NO: 40133 - DNA, 878 bp, Heterodera glycines
gaagggagctgacagatagaccaaccaaagtggagctttcaagggattgagtgttttgttgaagcgagatgggggtgctgatgaggacgacgaagtcgtcaacactcagccacgtcctcccgcccctccccctccacctccaccaccacctcatcacccatctcaacaacaccaccgtcgccctcccagccttcccgatcagcaatcttcctcatctgacgatagtcatccgcctcgtcctcctcgtccaccacgtcctcagcgaacaaagaaaaaccatcaatcttctctgaaacatggtcgtttgaaccaatggcagcaaaggcgtcgtgacttacaacaacaacaaccggtagtacgtgatctcctcgctgaagcagcagctgctccgttacctgaaagtgacgatgaacaaatgctggaaggtgggtatctgctgccaacaccatcacaaaattatggagacataccagtattgcctgactatgcagatgaaattgaggaaatggacaccgcccaacaaagacttgcaagcagaagaaagttaaaagaggagcagagactagataaaaataaaaaatataaaatttactattcccctccaccatctcccacactaccacccgtgtacaaacgaccagatcatcctcctccacctcctccgcctcgttctatacccaaagttgaactgaaaagggatccacaaccaacaaagttgaaaaaatccgcctcgccaccgcctttaccattgcctccacatcgcgcaaagagagaaccaaaaatagagctcgcccctcctccacctcctcgcaatgtctccaaaagggaaccgaaaattgaactagctcctcctccccttcctcctcgtcacttcacca

SEQ ID NO: 40134 - DNA, 935 bp, Heterodera glycines
agaaaagcactgtttcctttcctccgggctggcattctctcgagataatctctcaagtggcgtgccggctgcttctgctgctccacgagaatgccctcctccggataaagaagcatcattccccaagcccttggctaatctttttgccctcaggcacaattttcgtgtttttgttgccatttgtcatcccctcgggggcctcttctgtcttagggcctccccggcggataaaggcggcccctccgccggcggtgccatcgacagcgggggattccgccaaagaaaggacggcacacacatgtcacattgatatactttgctcttttaaagccaacctcttctccagcattctttcgcttttccattaaatccgatttggaatgggtagagcggttccttttctgcttctctgcccattgacaccgcttttctctttattttaaattcaatttttctctaaccatctcgtaccttttgtactctctctcgctcttctctctgttctctctgtttcccttttctttccattcactttttcctcaaagtttctccttttttcccacaatctttcttttttctgccccatttttctctgctcgctcgtctctccctcactctctttctagctgttatttcgttgttttctctacgccttgctcgttcattctccataccgccatcacactctctccattattcccattctctgacctcatatgtcaaaaacacatccagaaaacagcccccccgggggccatcatcaaaaagggaaagaacggccaaacgaacttcaccaattcattctttcattcattcccccccccccgctctctctttctctctctctttctttttctctcttctcctctctctctctctgtctccctctcgttctctatctctcttctatctatgtgctctctctcttgtaaaat

SEQ ID NO: 40135 - DNA, 1086 bp, Heterodera glycines
taatcaaaaatgcaaaaacttggtggggaattgaactttggcaagccaatagatccacttttatcccactgggccatttgtcatcacaaccatttttgtttatttcctaaatttacataaatattttttccgacagttaacgcggcgtccgagcgtgtgatgaccagcagcagttgttggccgagtggtggacggactgacagcgggcgcgcattgtggaaaatggttaggcaaataaaacaattttatagagcgaggctataagaaatttacaacacccaaacgcgcgctaaaaatgggttaatcaaaagcaaattttgagcagattttatatgtggaatttgatggacggggggagattaacttcttttttcttgcaaattcttccattaaccacaaaaccaaatataattccgattgtggtaacaacaacaacaaattttttttccaacaaaaaaaacgaaacacaaatcaaaatgttttttttttaaaaacataatcaaatctctggccattttccggctcttcttccggctcttcttcctcctcttccccttcttcttctccttccccacttccctccgccgcgccgccatcatcctcttccgcctcttcctcttccgcctcttccccctcttcctcttcatcccctggctgctcatcagccttttcatactcgtacaaggcgtcctctgggtggtttaattcccagagtgagttgccgagcacccttaaccaaaaatagatataacaatatcgtaaaaaaatttttttcaaaatttttggaaattcggcattttagaaataaaacttctcattcgaaaagaaaattatttttcgattaggctattacagctatgatgtttcgcctgtggcattttgtcctgcttccgggacaacccctctcctgtccgtgtgacggacagccttttttcggcctcattttttccacattccaaatttacatagaatttagcgggatttaaacagaaatgaacaaaccttctgaggtcacgcggccggatggtgttcttctccaccgggtaggcacagagctgaattttaagccattataaattaaatgct

SEQ ID NO: 40136 - DNA, 1120 bp, Heterodera glycines
ggtccaggaccaggctttttttcagcaacctggattttcctggatttttgtccaggaaatccaggtcaggctttttttaaaatactgagctctaattattatgaataaaatttaaatgtatttagaagagggatgagaagccttgggataataaaaaaagtatgaaaattggtaagatccaaataccttaaaaaaagaaaataaaaaatccaaactttttaaaatataggaaaaaaagagaaattggtcattaaaatgcagcatttctgaaaacttagcacacaaaaattgatctttagctattttaggcacatttttttttaaaacaaattttaccctaatttgcagaaaatgataacgaaaaatgtcgtttttgtagatctgtttttgaaaattttaagaaagccaacccggaacgagaatggctctcgagcctgagatgataaaatgccgagaatttctcgactcaaaaaccgagaatctcacccatcatcatattaagctccccttcattttaaattataaatttattaaaatatttgaaaattctatcttcatgtaatctgattggaataaagacttcaacggattgtcatcttatttagcaaaatatttttgttcactaaaaattattattgtgcatctatatgtactaattacgaatatctaccaattaacacaaaaattacttccttccccgttcaaatcttttttttttgttgccaaatttggtcaggcaaacaaaaattcaaatataaaatgccttttatggggataactatttttaaaaaaccaattaacatcgcactaaattctgtactttaggcctatttggccaaattcggcacaaaaatttctcaaaaatttaaaaattaaaaagaaaaaacaaaaaaatccaaattttctactagattttataaaaatgtcaaaataactttttaattaaaatcactctccccgctcaaatttcttttctttttttgccccaaattgccagaggcaaacacatacattcacacacaaaatgccttttgtggagggattttgcctgccacgggggaagggattaagccgtaaacttttcgttgaagccaacaacatattgcgcgaaaatgccatt

SEQ ID NO: 40137 - DNA, 1105 bp, Heterodera glycines
agctgcggaaattgtggaattattcctaagaaaaatgggccatctttttttaggccaattttttatctcgtaccccgaagcaaatcctttccccagagcctcttcaaaattttttccattccgcacagagctgcgggaaattgtgatttaattctcaagaaaaatggctatctctttttgggacaatattctatctcgtaacccccgatgctaatccgttccgcggagcctcttcaaaattttttccattaccgcaagagctgcggaaattgtgaattaattctcagaaaaatggccatctctttttaggacaattttctatctcgtaaccccgatgctaatctgttccgcagagcctcttcaaaattttttccattaccgcaagagctgcggaaattgtgaattaattctcagaaaaatggctatctctttttaggacaatattctatctcgtaaccccgatgctaatctgttccgcagagcctcttcaaaattttttccattaccgcaagagctgcggaaattgtgaattaattctcagaaaaatggctatctctttttaggacaatattctatctcgtaaccccgatgctaatctgttccgcagagcctcttcaaaattttttccattaccgcaagagctgcggaaattgtgaattaattctcagaaaaatggctatctctttttaggacaattttctatctcgtaaccccgatgctaatccgttccgcagagcctcttcaaaattttttccattaccgcaagagctgcggaaattgtgaattaattctcagaaaaatggctatctctttttaggacaatattctatctcgtaaccccgatgctaatccgttccgcagagcctcttcaaaattttttccattaccacaagagctgcggaaattgtgaattaattctcagaaaaatggccatctctttttaggacaatattctatctcgtaaccccgatgctaatctgttccgcagaacctcttcaaaattttttccattaccgcaagagctgcggaaattgtgaattaattctcagaaaaatggctatctctttttaggacaatattctatctcgtaaccccgatgctaatc

SEQ ID NO: 40138 - DNA, 839 bp, Heterodera glycines
cccccattccactaattctcatttattcgttctttgactccctagaactatcgcaaatgtatcacttaggcgggcacgccatgccattctctcggtggaaagggattgttggttggttagcattgcttcttttgcctttgcctgtcatctgctgactgacttcgtcttttctcttatgctattggtgcggtaaaaggaaagaaaagtggcgctaaatataatttggcggtctcggcacaaagtgtagcgatgaattgtatcgattttaaatttgacacttcaaataaacccctttttgtgctttttgtcgttcggttccattttaaggcttttgtccattcctttggatatgttgtcattttgttctttcgtctttctcccaatccacccacaattgccttggttctgacagcctttgtgttttgtgtggttacccctccccgcgaggagtgcccgtttcttcgcctctggcaagcttcgtctgtccgtgttaggcacacacttccagcatcagctgctccccttccttccattgggcacatttcccttcccagtgcctgccacggccatccctcccccctttttgcattttccctcatttatatttgtattcgttccttttctcaggctaagaagacaccacattaataaatggaatacccccccctggtaactgattagagacgagtgaaaacagtctgaattgaagtttcgacttatgattttgaatccgtgtttgggctaagaattgacaaaattccgttccaccgtgagtcattgggtgggggggggatgggaagcagtgagatagactaattttaaatgggaaaagacgacca

SEQ ID NO: 40139 - DNA, 1144 bp, Heterodera glycines
  unsure (1)..(1144): unsure at all n locations
ttatcaaaaaaaggagatagccatttttctgggataacctataaaatataaaatccttctgtgaaataaaatggcgattgtgcacagccctccgtctcatacgcaagcgcttttgtgaggtataaaatttctcaaaaaaagagatagacatttttctgggatagagtataaatttaaaaattccctcaaaaataaaaggtctattgcgcaccgccctccctatcatgctcgagagcatttgtatgtgtataaaatttatcaaaaaaagagatagccatttttctgggatagagtataaatttaaaaattccctcaaaaataaaaggtctattgcgcaccgccctccctatcatgctcgagagcatttgtatgtgtataaaatttatcaaaaaaagagatagccatttttctgggataacctctaaatataaaaatcctctgtgaaataaaatggcgattgtgcacagccctccgtctcatacgcaagcgcttttgtgaggtataaaatttctcaaaaaaagagatagccatttttctgggatagagtataaatttaaaaattccctcaaaaataaaaggtctattgcgcaccgccctccctatcatgctcgagagcatttgtatgtgtataaaatttatcaaaaaaagagatagccatttttctgggataaactataaatataaaaattctctcaaaaataaaatggcgattgcgcaccgccctccctatcatacgcaagcgcatttgtgaggtataaaatttatcaaaaaaagagatagccatttttctgggataacctctaaatataaaaatcctctgtgaaataaaatggcgattgtgcacagccctccgtctcatacgcaagcgcttttgtgaggtataaaatttctcaaaaaaagagatagacatttttctgggatagagtataaatttaaaaattccctcaaaaataaaaggtctattgcgcaccgccctccctatcatgctcgagagcatttgtatgtgtataaaatttatcaaaaaaagagatagccatttttctgggataacgtctaaatataaaaatcctctgtgaaataaaatggncgattgtgcacagccctccgtctcatactcaagcgcttttgtgaggtataaaatttc

SEQ ID NO: 40140 - DNA, 1244 bp, Heterodera glycines
  unsure (1)..(1244): unsure at all n locations
tgaaaatttccatttgatggtttttatataacgaacccctccattgatatatatattttagccattttcggctctgggctatatggtcaatattttccaaagagagagttaagagagagagagagaaggaaagaaatagtgggggagaaagagagagaaaaggagagagagagaaagaaagagaaaagaaaaaatggcaaaagtgagagagataggggaaagtaggcacagatctaaagaaagagagaagcaagcacgagattgagagagagagatagagaagtacatttgaaaaaagacctagagaaagagagatagcgaaaataacagcaaaacacacacacgcactcactttttggctttgttggccaaattcgccctccttggtgatataggtagggctcaacatgatggtgttcggcgacagcacaggccgtttgaacggtgccgtcggcggtgcggaggaagaagcgccctacgggggcaacaaaatatttctctgatatgcttttgatcaatggtgatgtgatcagtgatcgatcgctcagccccttttcgtttttggattttttaagtatttgaaacttaaaacttcgaggcgctggttaaaaagtggcgctctttgaattttattaaaaaccccaattttgaacaatgagagagagcgacagagagagagaggggggacagagagagagcgagagaaaaaaaatcgagcggtagagaatagtagaaacgaaaacagaaaggagagagttttgagagagagaatatgaaacgacagagagagagagagagggagagaaacagagatgcaagagtcttctatcacttagaaaaatttaagaaaatttcgttaatgttcaaaaaaagtatggccagaaaaattaataaaacagatttttaatcattttttgccataagaatcttaacgcaaatttttcatgtttttgtaggataatagacaggcctggtatatttgagggtaatcctcattttgtgattttttgataggtcaatgaggttaaattttcaaaatgagtctttttgtggttttttgagaaattttgaggctttttgtggttttttgagataattttgagggttttgctgggaaaacttcatcnagattttttaaattgtgaataattttcattagtaggcataatgtttgacaattatataattagaattttgttttttaataggtaaatctatcacacggaaatcttacctcatattta

SEQ ID NO: 40141 - DNA, 714 bp, Heterodera glycines
  unsure (1)..(714): unsure at all n locations
ctctgttcctagttttttgaaaaatcgcaccgaaaaaagcggttttgaaaagcaataaatagtcaaatttatgacgattatcagtttttgtttatattaattgtagtatttttttggcttaatttattaattcgtttcaaaatatttttagatgatattaatttgaaaaacccaaaaaattattaaataaattgcttttgtttgaaaattattttgtctctgtggctctcacaaaatataaagttgtaaatatattatgcttttataattttatactcttgaacccaatatataatattttatttctttaatcttgattgtttttatgttgtattaatttttcattttaactctcataattatttattaatttaattaatgcatttaattaccatcatcctcatcccccgtcatattgctagattataaaattaaataaaattgaataaattttattattcttcccccataaagcaaattaagtgaaaactgctttaaaggtttaatttttagcattttttatagtttattttttattaaattattttggtttcccatattggacaaattttattaatgttgaaatttgtttacaataagtagttgaatattttattaatctgaagagacttttcccagtattttttaatcctttttttccaaggnttaaattaattgtaaattccctaatattcttttcccgggttaaaacca

SEQ ID NO: 40142 - DNA, 530 bp, Heterodera glycines
aattcgaatttttccagaaattctggaataacttttttccttttttagatagaaattccaaataaagtccataaaattctcctgatttttctctatttttaaggctttattcctgtaaaattgatcaacccttcgatttgttatgaattttcaaatattaggccaaaatcccgagggccaaaaaattgccaaatattttcgaatttttaaaaaattccaaaaattctgaaacttaaaatagacatcatattcgtactcagcaccttaaaaatacccagaaaaaaatttttcaccctctttttcaacccaaaaaaaatttccgaaaatttctagggggcctagctcgaaaatttttgaaaaatttccggccatataatacactattcgatagcctttttaaaagctctacaattttgctctaaggcaatttttggctaaaaacgatccctgacgagttataggcccgggactcaaatgtcccgctcaggccaaaaaatttttctatttccgggaaaaaatcgaaatttttc

SEQ ID NO: 40143 - DNA, 810 bp, Heterodera glycines
  unsure (1)..(810): unsure at all n locations
ttttacttaaactgtgtgagcttaagaaacttttcgtaatttctgttgaatttatttatgtttaagataatttttatgtttattttatactaatattttggtaaatattatttgtaacattagaaaataataattgttgcacttttgacgatccttaagaaaggagagtcaataaataatcgaaatttaattgttgagttcaaaataggattctgctggagggttttccgtggcgtgttcaccaatttgaatcttttttgaataaaaaagcaaaaaaatggtcaaaattaggcaatgtttaaatgggagaagccaagttgaatttggaaaggaccaaaagagtgccaaaaaagaaggccaaaaagacgggatgggaaaatatgaataaaatagtccatagccaaagcaataaaacactttttatagcttattttaggtgaaaaagataaaaataaaaataatttcggcaggcaaagcatttaaaccggtttcaacactttggcgtgagctttattggctttctgcattgtattcgaaccaaatataaaacctataaaattgattttgagttgggccattacgaaggaatcaattttccatttggttcaccccaagtctttttgtaatttgtttctcccatttaaaatgtcaaaaattttgtccatcgatacataaataatttaaaaaattattggtcgtaaaatatgcacgaacagagagggaaaaggaaaaacggtgaataaatagaatgaatgagantatttatctgtaaggggagcggtggacagcacaattagggggggggggggg

SEQ ID NO: 40144 - DNA, 1114 bp, Heterodera glycines
  unsure (1)..(1114): unsure at all n locations
gggagtatccctgcaaagtttggtacgcttctgcctcccataggaaaaatatgagtgatcgaattttcactaaaaaacttaagcctacattttttggnatatttaaaaaggaattaaaaaattttttaaatttaataattttcctgcaccgaaggtactcactcggcctcttcgcggcctcgtggtgggccttcgccccccccacaccccacattataaaattcagatttcaccgctttatccccaaattcaaccactgttgcgtgctggctttttccttcgcaccataaaagaagacaatttttggatgtccatgaactacggtaatgagacacggttggccttacacttcagttgggtgaataatcgcactttggtcgacccagttcttgaacaaattgaagaggtgaattttatggaaaaaaacaaatcctaattaggtgggtttgattaagttaattaggggaataattagcaaaattaaatgattaaatagggataggtggtgaaagagttaattggcagtttttttgtaaataaaataagaatttgagtgatttccgtcaaacacccgtataattgaattttaaatattctaacaattatttatgtttttttagattaaaaagatgagttctcgaatatttttttcttaaataaattttaatttttcgcaccaattatgcattttaatttcaatcatcagaaactgctcaaatttgatgtccgtccgcattgggccaagtattatctgatgaaaccttgccaatttctgcccaattatcctcgccttgaggaatttaggtaaaaaataaaataatgcatgctaattacttttatatataaatgttaaaattgtaataattgttaattagccactgtgcataagaaaattatttgcagacaattggcagaagcaatggacccagcgcataagtttcgaaacaaattcataaaagaaaatgtttttaatgagatataagaaatggaaatgtaccaataaaatgatttgaaattaattattaaaataatcattacaattaattacttattcatttatatgaatgtgcgaagagattaacaaatacattttataaatatgagaatacattaa

SEQ ID NO: 40145 - DNA, 87 bp, Heterodera glycines
ggcgaggcctggatcgagaccacgtccggcgcgatctttcgcgaggcggcgcccgagctcaccgagaccgcgctcggccggctggcg

SEQ ID NO: 40146 - DNA, 1280 bp, Heterodera glycines
  unsure (1)..(1280): unsure at all n locations
cgaaaaattataaacgtaaacttataaaacaaatcggcaaaaaatgccgaagaaagagataattgaattttgctgacaaatgaggtaagcgaaaaaagcaatgtaaaacaatgaattttgttgcatatatttctttgttactcgctaaaaataaaatttctttcattgtattaaacaataaattttttgtcattctttattccactgcacattttagttggaaaaattaaaagaacataaaaaaaaatttcttttgcaaatttattaaaatttaaataataaattaaagttttaatttttgcacaatcaataaaatattggataatgaatgattattaataattatccataaaaccattgaggtagaattattttagctattttcctataattctcttctttttcacgcaatgcttccaataaaattttgctttttcaaattatttctttattggcaatttacgctgattctgagccagcaaatttcgtccaaaaaagaatgccgagaatttgaacagaatttattggtattgtttggaggaaataaagcattttctggtgccattgaatttgaaccccttgaaaaatggaccaaagaatgtttcgctgattggttttgtgaaaaaatcaaaacaaaatttgaaaaaagtgctcaaattaatggcgaaattgaggaaaaaatgtcaaaaatgcaagccaaattttgtgaagaaaatgaaaaaggaaaaagcattgaaaaagcgatgaaaagcgttgaaaaagaaacggaagaaataatccaaaatatgaaaatcgaccaaaaaatgcaagaaaaaatgcgaaaaattatggaagatggcataaataaaaatgcattaatcggagagaaattgaaaaaaataatggaccatttcaaaattcaatcattttcggatttgataaatggtaaaagcattagttttggatttattaaccttcaaattcaggggtatttcaaattttgttcggtgaaacggaaaaaatcaaacgcagtcattgataaagcacaaaaggtacagaatttgtgggttttgtgattgattcttgaacagaaatcacaaatcaccttttatttcggggtttttgtgcctaatgtgcctatttcgccatttttggcccttttttcaggattttcagaaaaatccttaaacaaaaatgcaataaaaaagaaaaatacaccccttcgaatcgaccctanaaaattcagaaaatacacccctacgaattgaaaaactttcccaaaaattaacccccaaatttaa

SEQ ID NO: 40147 - DNA, 843 bp, Heterodera glycines
tggatatgagttagaaaagaaagagaaataatttcggacatcttgagaagagctgcattgaatgcttcagtctccgctgctgtacgcccacgcgttgttgagttagggtcgagatcgtcatgaacaaatacaacaaggaggaaaatgaaacaattcggtgctttgccctagggttggagaaagcaatgcgcagaatagctggggagacttagggttagcgcatcaattatttttctcagaatgtgatcggggtacaaaaaatacgggtccaaaaatgggtgtaaatccgcttggagatgcgttagaaaagaaagaaaaatatgttcggacagcttttgaagagctgcattgaatgctgcagttgccgctgctgtacgcccacgcgttgctgagttagggtcgagatcggcatgaaaaaagacaaaaaggaggaaaatgaaacaaattcgcggctttgccctcgcgttggagaaagcaatgcgcagaataactggggagacttagggttagcgcatcaattatttttttcagaatgtgatcggggtacaaaaaatacgggtccaaaaatgggtgtaactccgcttggagatgcgttagaaaagaaagaaaaatatgttcggacagcatttgaagagctgcattgaatgctgcagtcgccgctgctgtacgcccacccgttgctgagttagggtcgagagcggcatgaaaaaagacaaaaaggagggaaaatgaaacaaattcgcggctttgcccctcgcgttggagaaagcaatgcgcagaataactggggagacttagggttacgcatcaattatttttttcaaatgtgatcgggggacaaaa

SEQ ID NO: 40148 - DNA, 1219 bp, Heterodera glycines
tcagcagcagcaacagggcggcattcatgtacgggctggagtgatcagggataaatgataaaatgataaatgattgaaaagagccaggggatatgagtgcaaaatgatcagagattggattaaagacgataggtagggggtgataagaagataagtgatcggaaaaagtgaaaggaacagggggtgacaaattaatcattgattggattaacggataagcagggggtgataaaataaatgatcagataaagataatcatgattggacaaaactgggaccaatggtttaccgtgatcgaataaaaaaaatatgagtgattggcgatgggtgttaagctaatgagtttcagacaacagcaatacatgcaatgattcgaccgatcaaaattttatgaaattgatcactgccgatttaaatgtgattttctattcagagaaagccctctggcgcttccatcggtctattggcaccaccaacagaattgcaattcatttcattgtttggttatctgcaaattcaatgtcgcccgcccatacatcgcaaatcgcttgaaggcattaaaaaattaaatttaattgaaatttcactcccagcggggcggctaattaggaaaatttggaaatgaagtgcaaaaaaaaattcttgaatcggagtttttttctaaagaacggcttgtgaaaaaactaaattcacgggtccactaagtttccttctatggattttttaaaaagcccaaatttttagttttataactttcttagaggtttttttaaattttttacaaatatttcaaagaaattttccgtttttattttactaaaataaaactctatgaaagtaagaaaatgaaaattttctttttttaaacatattttcagggaagggggaagcgtagggaacgaactgctccaccaattacccaaactctgtttgtcataatcgttctgagtcgatccacaaaaaaaactcagtgattgataaaataattaaatttaattatataaatcgatgtcaatgaatttaattatacgattaaaatttaaacataaattaaaaaagaaaatataaatttcaccatttaaaatgcttccgaaataaataaatggatgaatgaatttgacgcattgcttgctgcttcaaaacttagaatttcaagccattctattgttattttattcttttttcaattttagtatgaaatttcatgccgttaattttt

SEQ ID NO: 40149 - DNA, 1237 bp, Heterodera glycines
tatatctttgtgatttttggaaagacaatagagttttttaagagcattcgaatgataccaattttattgaatttggtcaacaaagaaaaaagttatgatgctctaaacttggctcacacggaactgactcgcttcgctacagtatccatgctcgcttcgctacagtatccatgctcgcttcgttacagtacccatgtgtaaattttttttctttttttgcagataatgttcgtgctgcattggtccacttcgttggtcacatttttcgtgttcattgtgctcttcgtgttcatcaagcacaacaaatcgcacatcaattggggcacgtccaccgaggcaaaccgttaccggcgcgcactgaactcgttgctgaaaatttcgcgcacggaggaccatgtgaaaaactacaggccccagttgttggtgctgagcgggaacccggtggcccgtcaggtgattagcatttcgaaggacagacagaccaactgctgattttcaaggacaagggcggggagggggatgttcaggaaattaaggaaaatgatatacggacaatttgtgcaaaatattgggtccccccaaataatgaaaatgtaacaattattagggggtataattaagagaataataaattagtcgcaaattattaattggaccaattcagaaagcttaattattagtatgggaataaattgcccggtgggtgggactcaaatataaggaaggcctcaaaagaatggttgttacagggagtgtgcgactccctcaaaaaaatttcggaaatcggaattccggcggctaaaatttcgtccatcgtatatcggaattccgagcccaaaattcggaaattggcaatcggaaatccgcaccctacacatccctgctgtcttaattgttttttcaaaattcacctcaggcacttgtcgactttgcctactgtatctcaaacggtagaagcttgcttctgtgtgggtgggtttaatatctttgtatgctttaaaagcaccaattttattgtatgaataaattaatcatttattacacagacacattgtgccacattgctcatcagttcaagcaacggcgctaattcgaacccttaacaatcagtcagtaggcaaaaatcacaataaaaatgtttgcaccgtaatcggcaatctttcggaattgcggtcccgaattttttttttttttttaattggtaatgcactttttctaggcttaaaaaatacgctaa

SEQ ID NO: 40150 - DNA, 1314 bp, Heterodera glycines
  unsure (1)..(1314): unsure at all n locations
caattactgagcggaatttgggggagggggcagcaactaacgccgttttcaactgcgtagaagaaaggatgaaaagtggtagcgtaggggaatttgaaattgaatatgaaaaagctgaaataacggatgcggaagggggaggtgaggggacgaggggtgggggaatttggggccaaatttggggggaatttggtgcggaataaggtgccttacactactaaggcacaacaaatcaaaaacggatgaacaaaaaaatgaaaagcattatagacacaaaaaatgaattaagggcttaaatctttttcgtgtggcctgtaaaatccgtcactacaaaccaattttccaaattgcagtcactttcatagactgtaatttaaatgaaaatatgaagaaanagtaaacatttaaataaaaacagcacctaaaaggtcgccattttgttagcacacactaattatgcgaataaattccttttttatgtttgtgactaggcactttcaacccttatctagacctatctatgccttctccaaatgaacatctcgcatatttgcattaattcttatctcgaatctgttcacttaaatgggttctatgggaagggtggtcctttgattataaacaaaaaatggcccttgtccgattcgaagaggcaaaaacgaacagaggaaaaattctgctttcccgtcttggatttgaatattgcttcgaaaattaatcccgaatcgaagaaggctatgagtattggaaatgtcccaagcgtcccacatattgttctggccgggcatgtgttcagcttcagtggcaagttgataacaatggaacccgttataaaatggggcgcgtaactgccgaaaacaatcttcccgcaactttcggacagcataccgtaagcaacaaaattcgctaatacctttcggtgtagataagacaggcaaatgagcaaattcgagaagaagctgtttcgatgatcggcgaaaaaactactgcgatcgttaaaccggaccaatattcttgtttaatgttaaaacattatttaggccgttaaccaaataggcccgtaaaaacttttagaaggagcataaagaaaaattttagtaattgttttcaaaatttacaactcaagaagaaaaaatagtaatacgattaaaaaatagttaactgttgaattttttctttcggagagagtgttgaggaaaattccctccctttggtaactggtataaaccaagatattttttattgtttgttgttgttgaataaataatgaaaagtttgacccagttttccctnttttaaccaaatttgngtaaa

SEQ ID NO: 40151 - DNA, 1482 bp, Heterodera glycines
agagaatgtaaataataaatgattattttttaatgaacttccttaaaaagaaataattttaaaaaaataaaagatttttgcgggtgcgacatttgacaccggcacttcgctccaaatattacctcataatcggcatagttatcgacaattgtaacctctaatttttgctaatatttctcttttaaattcatacatttgtatgaatcacaaattatttgtttttttaataaaattttgaatattttgttttgcgttctgcttaagcactagagcaaacaaaactttgtcagatttaattctataaacccctggaaatactacaaaaaatacagtgcgccatatttcttgttacaatatgtaatggcatttggagtatagcgattcacccaaaaggttatcggcagaaacgtcgctgaaaggttttttggaccataaaaacaaattaagaattcttggtaagtagctctttaaaattctgtcaaatctcaatatttcgtcaagtttcgaaaaagttatgacaagaaggcaccaacactctattatcacttactttttggaaattttttggcgcagtaattagcattagtaaaaacgtatattaaataaattttaattttataaataaattttttttcatttaattattttactgaacaaaattaacaattgcagaaaaaatggaaaaaatgaagcaatatgggcagaagaaaaagaattcctatgttttccgataggaaattgctgaaatttgaaaatctcaacagccttgttagccagcttttaatttttatttaaagaatttttgaattattttttggacatattcgctgtaaattttttagtcttttgtcatttttgttcttcacgaattttcttgttgaaaacctgggaaaaaacggaactagtcccgataccggtcaaaacttgtcaaaaacgggacttttaatttgacgcatttttgaacaaaactttagttaacttgtaacttttacatttccatcagagattcgctattattcattttaaatagggtacttccccgaacattttgtggtaatgagtttttcctattcagtgattatttgtttaaattgaatttttttcattaatgactggtgcatttatgctgtttatatttactcaacttgtgatcggataaattccatacgtaaacttattttttttcaaaaataaattttcccatccatcaaaattgggtgaaaaatgttcaatgttgaagcaataaataataaaatgaaatatgacaaattgaatgaaaaaacttagtcccaagcaggccaaaatactttggagttattattataaaaaataaaaaataataattgagtaattaaactaaataaaaccaaaaaattcttacatagacaaattatatttttcaattttttactcgaatgccaaccgagaaaattttgcctatatttttgcagttttaacgttaaacacatggctccataaaaa

SEQ ID NO: 40152 - DNA, 1031 bp, Heterodera glycines
agaattcaataaaaataacattcacggtgcgaaaaatcggttttgacaagtttattgggggaaaaaagactttacaaaataatacccctgggagaagggagtgggaaacatgatttcaaaattttcaattttttatagtctaatctactcaaaacggttcagaattcaataaaaataacattcacggtgcgaaaaatggggtttgacaagtttattggggaaaaaaagactacaaaataatacccctgggagaagggagtgggaaacatgatttcaaaattttcaattttttctagtctaatctactcaaaccggttcagaattcaataaaaataacattcacggtgcgaaaaatggggtttgaaaagtttattttgaaaaaaagactttacaaaataatacccctgggagaagggagtgggaaacatgatttcaaaattttcaattttttctagtctaatctactcaaaacggttcagaattcgataaaaataacattcacggtgcgaaaaatggggtttgaaaagtttattggggaaaaaaagactacaaaataatacccctgggagaagggagtgggaaacatgatttcaaaattttcaattttttctagtctaatctactcaaaccggttcagaattcaataaaaataacattcacggtgcgaaaaatggggtatgaaaagtttattggggaaaaaaagactttacaaaataatacccctgggagaagggagtgggaaacatgatttcaaaattttcaattttttctagtctaatctactcaaaacggctcagaattcaataaaaataacattcacggtgcgaaaaatggggtttgacaagtttattggggaaaaaagactttacaaaataataccccctgggagaaaggagtggggaaacatgatttcaaaatttttcattttttctagtctaatctactcaaaacgggttcagaaatccaataaaaaataacaattccccggtgccgagaaatggggggtttgaaaagtttattgggggaaaaaa

SEQ ID NO: 40153 - DNA, 1262 bp, Heterodera glycines
  unsure (1)..(1262): unsure at all n locations
tttgaacaaaatnttggcaaaaaattgtcgtttttggtcacattaaacacttccttgggcaatgcctcggcccttttgttcattgaaacgcgaaaaatgtgctaaatttttttgaaattttgtggaaaaattgttcatatatgttgaaatttttgaatatttaatttccggcataaaaaagcattatttacgttttttccccaaattgtcaactaaatgcgctatcaatggcttgcaaataaattgagcaactaagattttttttcaaaataatttcgtaaaaaatttttatcttttttcttaaatcaaaaattttctcacttccccaaattttatagttcatcaacttttgattaatcatttgatttaccaagtcgtggcctgccccgaccaaagtgtccgcaattgagcccataaattgcatgtgactccatccaattgtgggcgaatagacgaggattttaagacgctttttggccaaacttttttgaggcgcttcttccaatggatttgttgaagccaaaagtgtaatttgacaaatcaaaattaatgcgcacaactttgtcagaagcgttggcattttgcaaaaaaaaaaatattattgtaatattttaattttgggaatttcacacttatttttgaggaacaaatgaatgttgaaagaataaaaatgaattcaaataaagtgatttcttcatatcgataagataaaatagaaaaaaaagtagaacaacggaattaataaaatgaaattaatttattttaaaattttcattaatgaaataaacaaatgctgaaaaatgaataaacgacgaagtgttttcaatttagtattatcagtctcaaaagtaagttatagtttcagattttttttaataggaattcaaactacagaacacaaacatgtgattaattgtttgaaaatttcgggaaggaatgcatgtgactttgttttggatttgataatcctctttttctgatttatattattttattttaattattttttaatttttactgatataatattttaaaaatttattattaatatatttttaactttttgttgacttcacacgattacgataaatgccgaaagccgatcgttagggggtgtaaaaaattatcggtctcgaatctcggcgagtctcgaagaccgagacccgaaaaaagcccgagacttttctcgagacggagacactcgagcaccaaactgaaaaggattcggcggatgggcaacacgacagaaaaataaataaaat

SEQ ID NO: 40154 - DNA, 666 bp, Heterodera glycines
caaattaaattttaatattataatgattttttataaattattaaaataatttaatgatatttccgaaattaaacactactcataccgttttttttaatttgttagggtactttctaaatcaattatatcgaattcaattactatcgaaatcacgcagaccgagagaaaattaaaatataaatcatttaaatttgatttgttgtgtccggattcgggattcgaaatagatcaaaatggatgcaggattatgatcattgatcaacgccccctgaaaacctataaatccgtttcttctgaacaattgaaattaaaattttgtggggcttttccgtaattgaaatccacagttacgtcagccctcgaactcacacatatcctccttctccttcagcagaaatctttctaattaagcttctcgccgattatgcattgtgcgcccggggaaggactcgccagaaaaggtcaccaaaaatcacaaattgccaactatcaatgatttaaaaaatagaatgtcattagcgctctcatcaaactcataagcataacttaacaagcttactccgtctccacccgttctcacaaataaaaaaggatcgatttccacgtggatttttaatttgcattgttttgcttttaatgctaggaagtttctgctgcaataaaaaa

SEQ ID NO: 40155 - DNA, 1335 bp, Heterodera glycines
aaaaataaataaaaatttctaaaaatttgatcgtccatactcctttgtaattgatcaggggctcaccaaattttgcaggaatacgtatcggaacactacaaatgcttactaattttcctagattttttaaacccggtgaaaattttttgcagacaccaccacttttgcacttaaaaaaatttcaaaaaactttaaaaattcatagaaaatttaaattcataggtactactgctaaatcaacgcagagacgcctttccttgacctttttaggcccctgcaaaatctggtgcgcttctgatcactactcgaaaaatgagtgattgaattttcactaaaaagttaagcctaaactttttggcctgtttaaaaaggaattaaaaattttaaaaattttattcatctccctttttgatagaaaaagcatcagagtgcctaaactaacatgtaaataaaatttggtgcgtttcagaaccctttctgaaaaaaatatttatgaaacaaaaaaatcgattttttcaagtgtccatttggggtactcgaacatttatggggagcaaaaatccaacgcagaattaaagtacaggctatagggaagctactcccgaaggattcggtctccccataaatctgggcgcatcggttcggggggactgccccgaaaacaaaaaaatcgattttttcaagtgtccgtttggggtactcaaacatttatggggagcaaaaatccaacgcagaattaaagtacagactatagggaagctattcccgaaggattcggtctccccataaatctgggcgcatcggttcggggggactgccccgaaaacaaaaaaatcgattttttcaagtgtccgtttggggtactcaaacatttatggggagcaaaaatccaacgcagaattaaagtacagactatagggaagctattcccgaaggattcggtctccccataaatctgggcgcatcggttcagggggactgccccgaaaacccaaaaaaaaattttttggataaaaattatttaaatgaactgactagataatatttaaaataggttatttctcttcctttcagtatccctgcaaagtttggtgcgcttctgatcagtttctgaaaaaaaagttaagcctaaactttttggcctgtttaaaaaggaattaaaaatttttaaaaattttattcatctccctttttgatagaaaaagcatcagagtgcctaaactaacatgtaaataaaatttggtgcgtttcagaaccctttctgaaaaaatatttaagaattaattttgcaaaaaataaataaaaacgaaagactcagattttcgaaaatttttt

SEQ ID NO: 40156 - DNA, 609 bp, Heterodera glycines
agcaatcattcaaaggccattttgtagagaattttgtgctctttctctataaaaataaagtttccaacgcaattaattcttcttccctttgtgacgacatcattcggaactcggccaaattgtgctaattgctgccaaaaatgaaccgacggtaatgaattttaaaagtcacaaattcgtcgtttatttgactaaactgttttcccatttcagttggatttgcaacgacgtttggatggacattttcccctcttttgaccgtcctcaactcggcctcaaattggcacttctttcgccacgttttaattcgctggtggacaaatattttgatggcaaaagcgaattgccaatttggagacaaatcgtaattcgtcgcaagggcattggaccagaaatgaaactttatgtagagatggattacgaatttgtgccatttccattgcccgaccgtccgttgcccagcaaaatccgttttgaatggcttcagattgagtaattaaaaaacagttttatggcaataaaagcatttatttcattttcagttacattgatcactccgtcatcgcttttcttcgttcaaatcaccaaatttttgacaaaagagacacc

SEQ ID NO: 40157 - DNA, 956 bp, Heterodera glycines
  unsure (1)..(956): unsure at all n locations
ccattgtcacaatttccccccattgtatttctcacacatcccacatgtatgggtttaattacccaagtttgagataaaacttgcggagtaatttggtgcaaattcttgggcggcaaatttgggcaattggcggcagcgaaaaacggacaaatcggcgcagacccctcccccatctgcgtcaagtggcgacctgggcatatcgactggccattcaaattctgcctttccagccttatggaaagatattatggaacttttggttccatctcagttgtcaacgccgcgactgcatcgttattatatcagtcgatagaattttcgaatcgcttttaaatcgtctcttttgcgtcccttaatcttcactctgagccgagttactgcggtctaaacacgtttttggtagaattgcggccagaatttaaaaatacagtttgctatggcttcgcatcacccgcttcaacgggtgttcagtgtaaatatagactggccattcaaattctgcctttccagccttatggaaagatattatggaacttttggttccatctcagttgtcaacgccgcgactgcatcgttattatatcagtcgatagaattttcgaatcgcttttaaatcgtctcttttgcgtcccttaatcttcactctgagccgagttactgcggtctaaacacgtttttggtagaattgcggccagaatttaaaaatacagtttgctatggcttcgcatcacccgcttcaacgggtgctcagtgtaaatatcgactggccattcaaattctgcctttccagccttatggaaagatattatggaacttttggttccatctcagttgtcaacgccgcgactgcatcgttattatatcagtcgatagaatttcgaatcgcttttaaatcgtctcttttgcgtcccttaatctcactctgagccgagntactgcggtctaaacacgttttt

SEQ ID NO: 40158 - DNA, 918 bp, Heterodera glycines
  unsure (1)..(918): unsure at all n locations
ctgaccaatttggccatatatcagttgctgtatgcattcttaccaatttntggggtattttaaattaattttaattttaaatttttcaaatttcttaaggcccccaattcgagcttggcaagttggttttatttctggcattctgttaaacgctgctgcgggatcaaatgcgattgttctttattttaacaggtcattatcattatcggattattattattttttttcatttaattaattttaatttattactttattaataattaacttttagcactgaatatcgccgcgtgttcaaaaaagaatttcgcattttattcaatcgtttttgcaacacaaatggtcatttttaataaataaaattttataaaaatattaatctatttgtatttaacttttggaaaataaaacagtttttaaatatttttaaacaaattttaaattaaaaattttttagctgtccaaactattgacacaatccaagtgcgaagtgccaacacaaacaacaacatgaacaacatccgatcaagccaacagatgaatgtgcattcgatcaatttgaatcgctattgaaatggacttatatatttttttattttcttttatcgttttttttttaaaaaataaaattttttattacgatttggcattatgaaaaaattaataaatttgtttgctagctgtttaatgatgtcaagaatttggcacagtttctattttgttccaaatttggcgttgacagtttctcatttcattttagtttttttcattttcttttttgtatagtttttccaattatttttccattttccaatgaaaatgaaaataaaatcctttctgaatgattctgcagaatggtagatgatgcagaccaatgaattccgactttaattagtcattagcagatttataaatcaa

SEQ ID NO: 40159 - DNA, 1017 bp, Heterodera glycines
  unsure (1)..(1017): unsure at all n locations
tcccatatgaaccaagacataaaaagtgcttttgcgcccttcttcccctctggtgtccttcattttagaaaggcactgaaccgtatacaaaaactctcacattctaaaataactcagttaaaacagcttttaattttaattgttctgaaaccaataattttgtctgtaaaaaatagtctcatatgaaccaacacataaaaagtgcctttgcgcaacaatctcccctctggtgtccttcattttaggaaggcactgaaccgtatacaaaaactctcacattctaaaataactcagttaaaacagcttttaattttaattgttctgaaaccaataattttatctgtagaaaatagtcccatatgaaccaagacataaaaagtgcctttgcgcaacaatctcccctctggggtccttcattttaggaaggcactgaaccgtatacaaaaactctcacattctaaaataactcagttaaaacagcttttaattttaattgttctgaaaccaataattttatctgtagaaaatagtcccatatgaaccaagacataaaaagtgcttttgcgcaacaatctcccctctggtgtccttcattttaggaaggcactgaaccgtatacaaaaactctcacattctaaaataactcagttaaaacagcttttaattttaattgttctgaaaccaataattttatctgtagaaaatagtcccatatgaaccaagacataaaaagtgcttttgcgcaacaatctcccctctggtgtccttcattttagaaaggcactgaaccgtatacaaaaactctcacattctaaaataactcagttanaacagcttttaattttaattgttctgaaaccaataattttatctgtagaanatagtcccatatgaaccaagacataaaaagtgcttttgcgcacaatctcccctctggtgtcctcattttagaaagcactgaccgtatacagaactctcacatgctacataactcagctaaacagcttttaattttaa

SEQ ID NO: 40160 - DNA, 981 bp, Heterodera glycines
  unsure (1)..(981): unsure at all n locations
ggcctttttgatgtcctggaagagcaaagagtgaacatgagaaaatggtagattttggtttactgggaagatgcgctcatcgtacacagagtgagcggcatttgacagtgtgaaaggctcctcaatgcaaatgcaatgccattgggacaacgtgttgaagggcgactggaaatttatcaggcacattcgaccaaccccaacacactgacaaatgagaaaataaaaaccaacttgattttgtgccacctgtgccctgttgacctttttgcccattcgaatgcttatcgcgtccgcgtcaaagctaaaagaatggacagtaataacacactattgaatgagttgttaacaattgagggtgggtgatggggaaaacggggactgaaccgggcgctaaaattcatcaacggcacaaatatccgcaataaagccctaagtttcccgaggagttcccccttcgtgtaatcagtcccactcgaattggaaggcgtagtaacggaggaagccgagcagcaactcgctgagcgtcgcgtcgtccttgaactgccagcccatcgcggttggaattggctcgaacggcaacgacacgttcagcgtgcgcacatccgcacgtacgctgaaccgtttcgggtacatttgctgcagattgggcagcaccggtggctgtgcaccgcactgcaaatagtggatgaccatcagcaccagcgagtacgatgtgaaggaggagcaggccgagtcgttgatgccgtgacgctttgcccactctttgaccaccatcaccaacggtcggacacgccagtcaactgcggagaatggaaggatgaacaaacaaacaaaaaaaccatagggtctgtccgaggcaaccgaattttggacaancaanaaagcaatttttatgggttttccaaaacaggcctctcggggatgacaaaaagccgtttaatgaagaacactcacaagagctgtagtacacatcaaatgcgt

SEQ ID NO: 40161 - DNA, 579 bp, Heterodera glycines
taattcattaccagggctgcaaaaaatatgcaaatgcatatttttttcctggcttctccatgctctaaatagcaggaaaaacactttcttttttgtgtttgcgtataaaaatcggcgacttttatttgcatatttcgaggtttttgtgcatatttgcatattttggctttttctgcatatttcgtgcatattttgccattttttgtgcatatattccgattttttgcatattttgccattttcggtatattttttccgatttttaatatctctcaggaaaacatttgcttatgcctaaaattaaatcaaactctgcatggatgcgcgagtggatcaataggatgagctttactgccgaaaatcttgaaaaatttttgatctgaaattgcaaaaataaccgataaaatttatgctgaagaaacttttttttttaaattattttgcacccctaattttcaagtttttttgtgcatatttgatgcatattttgcgatttttgtgcatatttcacgattttatttgcatatttatgtgcatattttggccatttttcgtgcatattttttgcagccctgttaa

SEQ ID NO: 40162 - DNA, 878 bp, Heterodera glycines
  unsure (1)..(878): unsure at all n locations
ttctttttgaattaactataattttttaactttgtttctttgttatctcattagtttaatataaaattgctatgacgaaataaataaaatatgataacttcacaattataagaaaaaataaataaaattcttaatgataatcttatattaaattaaaagtgtttgattttattttttttaatataatttttattattcttaaataaaagaaataaataactttcaaaaaaatatggatattatattctttttatttataataatctcgtcggttattcctctttgtgcaagtttctgtcaaacaaatttttactttaaaaaataatgattaaatacactatacaaaaccaaaagcataattaattattatggcatttttaataatgtaatatttattatttcaggtttattttttatctagagtcgacaattaattctttttacttttactctcgtggcgtaaaaacggaaacagtcttggtttcgacctgttaatattcaataaattttttaattaataattcttattggcaaaaatttgttgtgaaaatcgttcaaaaaaaaataattcgtataaagttttaaatatatcatatcaaacgaacattagaatatttcatggttaatatttgaacaccaatcttgtataatttaatttaatgttgttatgattatgcaatcagattatattgaagataataaaatattaatttttacaattaatttaaaagcttttttattatttaccttaaattgattgaaatgatttattttattgatatttgattatttttccagtggatttattttataacgtaatgattatttaatgtggtcgagaataacttaacatttagggcttttcattanattctcaa

SEQ ID NO: 40163 - DNA, 846 bp, Heterodera glycines
  unsure (1)..(846): unsure at all n locations
tccagggatggtgatgtgcctgctctcctacggtgccggactcgacgagcaggctgacgacagtgacaaaatgacggcactgcattttgcggtgtccaggcgcaacctgcagatcacacgcttgctgctctgcctgggcgccgacccgaacgtggccaatgcgcacggggacacgccacggcatttggccgccaaattgaacgagtaaatttttttttttttggggcggggaggttaataattcatttttgggcctaaattttcggtacttcgtgtttggctacccctccccctcgagggcgggtagcaaacaaaggagtatcaaatttttattattcctcacccaaataaaggaccccaaaagtccaactctcgtttttgtcctcttaaatatgtcaaaatttttcagggttgatttgctgaaaagtctgatcatatgcgatgctcggcgttgtccactcaccaaggtaacaagcacagattttgctatatatataaaaaaaaaatttttttttctttgccttccaaaaattttttcatggtttcaaattgggtaaacacatccatctctcacgttttgtgaatccacaaatacgcatttttgtgttacaaaaattcgcttttttcccgtattttaggttggctgtgtgtccggttgtgtcaacgagaagcagttgcacgagctgaagaggccgtccaccagttcaatgccatcatccgccaccggcaacaccacttcaacatcttcgacggcatcgtcatcgtcgtcaagcagttcaacaacatcnggcagcggcgtcggccaccgcagctgctgctgctacggcaccaccagctcaaccagca

SEQ ID NO: 40164 - DNA, 962 bp, Heterodera glycines
  unsure (1)..(962): unsure at all n locations
cgcgaagaggccgagtgagtaccttcggtgcaggaaaattattaaattttaaaaattttttaattgctttttaaatatgccaaaaaatgtaggcttaacttttttagtgaaaattcgatcactcatattttttgctaattgagcagaagcgtaccaaactttgcagggatactcnncggtaaaggactaacttacactgaaatgagcgccgagctagctggctcaaaaaaattttcgaaaatctgagtctttcgtttttatttattttttgcaaaattaattcttaaatattttttcagaaagggttctgaaacgcaccaaattttatttacatgttagtttaggcactctgatgctttttctatcaaaaagggagatgaataaaatttttaaaaatttttaattcctttttaaacaggccaaaaagtttaggcttaacttttttttcagaaactgatcagaagcgcaccaaactttgcagggatactgaaaggaagagaaataacctattttaaatattatctagtcagttcatttaaataatttttatccaaaaaatttttttttgggttttcggggcagtccccctgaaccgatgcgcccagatttatggggagaccgaatccttacggaatagcttcactatagcctgtactttaattctgcgttagaggttgctccccataattgtttgagtaccccaacctgacacttgaaaaaatcgatttatttttgttttcggggcagtccccccgaaccgatgcgcccagatttatggggagaccgaatccttcgggaatagcttccctatagcctgtactttaattctgcgttggatttttgctccccataattggttgagtaccccaaacggacacttgaaaaaatcgatttttttgttttcggggtaggccccccgaaccgatgcgcccagatttatggggagaccgaatccttcggga

SEQ ID NO: 40165 - DNA, 1077 bp, Heterodera glycines
ttctgatccgtcatcgtcggtgcgttgtttccgctccctctgcctgcgcttttgcgtaccgtacgttccgatgcctcacgcgtctttcgctcgcgccactgctgtctttccggcacttcgatgtacgcgaggtccgtccgggcgcagctcagtccgttgctgcgtcgtaggtgtcggatgagcacggtcaccttgccctcctccagactttccttgttcgttgttcggaacccttccgcctcgtcagactccccaatgggccccatgtcctggcctacgccgtcctcctccacctccaacaccgccatggcgtcctcctgctccgttgccgggcaacaactgtcgctttgaagcatttcctcttggtccgtcgccccgtcacgttctccatctttcttcgtgttgtccaatggctccaccttggcgacgggtttcttcacaagggcctgaggagcggacactttggaagttgccaaagcggacgaaggctcattttgtggtggattttcctttaactgttcgttgggagagttcggtgcagacgacaaagcagcagtggaaggaagatttaactgtgaaaagcaaaagataagacacacatcgatggaaaagggacaacaaagaacaaacctcggtagatttggaaattgaacccgtcgaatttgttgtcgtcgccaccgtccccgccggaggcgtaatggtgccattcccttcggcgtcggggcgtctcaacagcaaaggttgctctgcagcgctctcttcaggaacagaggtttcaccagaattggacactgtcgcattcgcttctttgacgtcctcttgctgttgtggtggcgaaggcgttcgggaagaagcggcggacggaagtgccgaattgtcctttttgtgccgcttcgagtcctttgaagagggcgtcggcgtttggtctgtgcccgagtcggtggtcgctgtcccttcccgatgtgcacgctttcgactctttgtcgcatttcgcagaggcgtgctccgcctctgctgctccgtcgtgacgacattgctctccgccgtcccttcccgtgacgctgcttctgttcccct

SEQ ID NO: 40166 - DNA, 998 bp, Heterodera glycines
cctctaaatataaaaatcctctgtgaaataaaatggccttcactagcagccctccgtctcatacgcaagcgcttttgtgccgtataaaatttctcaaaaaaagagatagccatttttctgggatagagtataaatttaaaaattccctcaaaaataaaaggtaaattgcgcaccgccctccctatcatgctcgagagcatttgtatgtgtataaaatttatcaaaaaaagagatagccatttttctgggataacctctaaatataaaaatcctctgtgaaataaaatggcgattgtgcacagccctccgtctcatacgcaagcgcttttgtgaggtataaaatttctcaaaaaaagagatagccatttttctgggatagagtataaatttaaaaattccctcaaaaataaaaggtctattgcgcaccgccctccctatcatgctcgagagcatttgtatgtgtataaaatttatcaaaaaaagagatagccatttttctgggatagagtataaatttaaaaattccctcaaaaataaaaggtctattgcgcaccgccctccctatcatgctcgagagcatttgtatgtgtataaaatttatcaaaaaaagagatagccatttttctgggataacctctaaatataaaaatcctctgtgaaataaaatggcgattgtgcacagccctccgtctcatacgcaagcgcttttgtgaggtataaaatttctcaaaaaaagagatagccatttttctgggataacctctaaatataaaaatcctctgtgaaataaaatggcgattgtgcacagccctccgtatcatgctcgagagcatttgtatgtgtataaaatttatcaaaaaaagagatagccattttttctgggatagagtataaattttaaaaattcccctcaaaaataaaagggtctatttcgcacagcccctccctatcatgctccaagagcattttgtatgtgtattaaaattttctcaaaaaaa

SEQ ID NO: 40167 - DNA, 1139 bp, Heterodera glycines
  unsure (1)..(1139): unsure at all n locations
ctcaataatttatgcaattttagtccagcacagttttcctttatctatttcaacattaactgaaatgtgtatgcaatttcttgacgaaaatgctgaaacagtcatcaaatggcaacaaatgctcatgatgccaaagcaaataatcgaaatttttctttaccgttccaaaatccagatcagcaatgagatgttattatatgactttgtaaactgcattttttacatcattttacttaatttaatttgtgtatgttttactaggccatccgttgggccaaacagtggtgccacgacaatgaaatgccaattacggtagaaactcttcgcaaaacgcttgggaagcttatacagcgcatacgttttgtccatatggaataacaatgtttcgaagagcaaattggtactaaaatgggaaatatttttaaaaattaattttttttttcaagtgccatcaggcattttgaccgagcaacaaattgccgaaattcgaccatttcttttgccgaattgccgtggaatgccattgcctaagacgttgaagccacaaaaccaagaaaatacttgtacagtgtgacaatcacaatggaaattgaacatttaacgaattttgttggcccaatccacagccgtgccttttacacttgtggccttaattggcatatgtccatcgcttgtgtcggtggctgggcagaaaacagaaagaccttactgtgcactctcaactgtaaccgtgacgaaaacggtgggaatgaatgatgaatttttgtctcaaaaccccctggggggtgaggtcaacagaaaattttgccattgcaatccccagccatgaattaatttattttttggaattttaatgaatttataaagagaattagtcaaattttcataaatttctctctttcctttagcttatatgtaagcactgtttcccaaaaaaacaaatttgttcccatttaaattgtatattctaattaagagccgtggttgatgtactgcaacttttgngccatgccgcgaattgatttcgcatggtttgttttggcagatgatcatctgcangacagattcttgctcggcgcatttgaaggagaaattaaatccaatacaaattatgtgcaaaaccgtatcttgattgaggt

SEQ ID NO: 40168 - DNA, 1430 bp, Heterodera glycines
  unsure (1)..(1430): unsure at all n locations
tttttttttttttttttttaaaaaaaaaaaaaaaaggggggggggcccccccccaaaaaaaaatttctccggcgtttccccacaaacatattttaataatttttgtggaaaaaaaaaaaatttttttctcccccccccccccccccccccccccccccaaaccttttttttgtgtgttgtngttagaatgtttaattaaaaaaaaatttttggaaagtttcttaaaatttggtttttcaaaaaaaaaaaaatacgtaccagcagtgccctttgaaatcttgtcaaagctcagcactgactatgcatggcagcgccagactcaaaaacccatttcctcaagaaattaatcaaaaatcgaaatttggtcagtttttgacaaaaatctactagcagtttacnntcaaaatttcataaatttcccccgancgacgcctattttaaattcactgaatcgaagtgctactcaatttggtttgctacacagccgatgacacttactacctcaaattattataaaagcataaataaaatttgaaaaaatgttaagggtgggtcgacgtaagcttttaccacacagcgggggccaactacaattaggaatgacaaacgataaaattttactgttttcctagtttttaggattgtagaatcaagggaaaaaatgaaattggaatgattccaatattattatttattatgtgaagaggacaaaattggaagcatcaattacctaaaaatactgctgatttgagagcagtaaaaaatgccagccaaaaattccatttttattgttaattaactgatcgattttcggacttcctctctgtttggccgttaattcgccgatcgatcaaatggatcaattccgcgtcctttccgatcagacactcccgctttgaattggcttaatgtgcagcgaataatatgccctcagggaaaaggttccaaaggacaaatgtttcaaatccatgtgaaaataattcaaattaaaattcctattcctatttgaattcaattttttcactaaaaagtaaataatggccgctcccgtgccttttcgtgccgattcaaacacccaccaatacacagcatcattcccggggccaatttattatagggacacttttggattagagcaacaaacggacgaagcggagttggaaaatgaggcgacaatgggtaaaaagagtaatttttaattaacattaaaaaatatattatataaaattaatttaaaagaatcaaatttaatttgcataattggccccatcggattatccactcaattttctaactaattaattacccaattagcagcaaagttcggcggccattcgtcgtccgccgttccgccgtcactcactttccctcccccgctgtattaccgcgacacttttgggcttgaaccattggcggaggacgagcagaat

SEQ ID NO: 40169 - DNA, 1218 bp, Heterodera glycines
atttttttgaaaatacggtaatatattttgaaaattctcacgttttccggttttggccgcttcgatggccgaccggaggacaattgagcgcttcttacgtccgccaccgccgccgcaaccgcagcagcaacagcctaaaacttttttggttaaaacattaaaaacagtcctgaaaattcgggaaaaattaggaaaaaatttccaaaacatcgattgcctggaccttggcaatttgatcagcagtggtgggttacaacattggcacggcccgacacaggtacagccacaacagcaaggcttactgtaataatttaaaaatataaaaaaatttcagagaatttaaaaaatttcctcttaccaacagcagcaacaactggcatcagcaaaatgttggttctggtcaatgtttgcaaacagaatgaccaacagaaatgggaatgtgaagagcaattgcattttattttttaaattttgttttttaaattttctaaatttaaaattatttaaaatatatttttatttattattatttttgagggggggggggtaaataaatatttttaaatttatttaaatttgcacttttttgtgaatcgaccaactacggtagttttaaatatactttgagtggcatttttaggaaacgacccaccaccagtgttaccaatgccgtcaccttccaaagccacaaattaatgcggcgattgtttctgccgcttttcacgaatacggcagaagaaatgacggcggaggattttgcttttcccattaaaaattaatttttattttaagaaaaacttgccaattttgaattgataatcatcatcattttggtgtttgcattcttttatcaggggtaatagaaataaattttttaattttagcttggaaaaaaattttccttaaccaaaataatcgaaaaaccgaaaataggggattctgattaataatgggtcgtattctacattaattttttactatttgatgtattaattaattcataattgttaaaatttttaaataagttatcggaaaattaattttttaattgaattggtcgacaaagaaaatctttacattgctttttattattgtaagtcatagtttttgtttttcaataaaaaatttattacttaacaaaaacatccgccaaaattggcacacttatgataatcccatttgtttaaaatattgcttcatcatttaatataaaaacac

SEQ ID NO: 40170 - DNA, 633 bp, Heterodera glycines
agttggccgccggaccggaatgcctatagttttcctctttgcgccgtcaaaagttacccctgcatgccaaatttcagctccccccgattagcggttccggagatttttgttttagcaacgaaacacgatttgattttatagtatataaactagcgggtgcgtgaaccgtcggctctgggcttgggataaagcgcttcgcgctttgggagcttcgctacctagattagctctggttgtggagattttgaatttttaaaaaattatctgggacttttaggccgcttcgcggcctcgaacgggcgcttcgcgcccgttttttaaattttgttgggcttatacgggcgcttcgcgcccgtttctaaatttgttgggctattaaggcagcttcgagacctcagacgggcgcttcgcgtgttgttttatttcttatgcctcattccgggttgtctgtgctgacaaaggcggacggttgaatttggctaatcgtaaaatctgtgacgtgatcagttgatcatactgatcccttgttgcttgtgaagatccgctccgcggcggcggacagcgatcagttgaccagactgactcctctccgacctgtcgaccttgtaccagcgtctgccatccgctgatcac

SEQ ID NO: 40171 - DNA, 1010 bp, Heterodera glycines
  unsure (1)..(1010): unsure at all n locations
tgagcatactgtagtatcgtagccttaaaaaaagaatttctccaaaataaaaatgcaaaaattcttttgtagagcgaaaaattgttcagcttcatacttaagaaaaattgaaaatttttggaattccgataaaaaattgatttatagagagagaatntagttcttgggtatgtattgtagttgaccatattttttccgcataactcgaaaatcgatgaaccaactttttgttcttgatagagtgaatgttgtgcaattttcccatattttatggcgaattttcaatttaagtgccagaaaatcgggcagttttcgtcttttttttgtcttggtatccaatcgggcacttaaaatataagtccgcaaaacaaaaacaaaaattggaatttttggcattctttcggtcccaccaattcagtctcagtacatttttgagcatcataagaattttgttgacaaaaccaacgaaaattggggttttcgaaaagtacttaacttgctatattagccaatccaaaacataaagtttctcaaaccttcaaaataaataaaatatgaaaactttaaaatacttttagcttttaattttgcaacttttcttaaagagttgtttaatcgcttaacaattacctatttgcttgaattattcgcttctaaaacaacatgtatagattttgtacatattaattgtgaatgaaaaatgcactgaattggcatgggattgaacggtgctgggacgttagtcaaaaaccatcaaaatgggcgttagtcaaaaaaccatcaaatgaataatttttgacagaaaattattcataatttcgtctaaaatagatcaaattttataatatagatatttttcgatagccctaagtgttttctattatcctgcaaaattagaaaaaaattctttaagtttaaaaaagttatgacctgagaagctcaaaaacccaagtttttttgaacatttttagtcataactttcttgatacttaacgaaactttttggaatt

SEQ ID NO: 40172 - DNA, 1243 bp, Heterodera glycines
  unsure (1)..(1243): unsure at all n locations
tccgcaatttggccaaatgtcttccgttgggccattcgtaacatttgcncaattccattcgtcgcttntcgttcttcttccgactccaaaacggtgcctttccaatattcccatgcaaatggtccattgtttcgacgatcgtttcgatgtcgccattcattggctcatcaaaaagccatcggtcaaacgccgtcaaaacatttttaatgcgaaaagaatgcgacggattcttcaaatcagagatttttagaatatttattaaatggaacttaagaaaattaactcacaatttgcaacggaatttccttttccgttttatccgttaatttttcgccctttggacttagacaagaaaaaaggcgaaagtgagcaatgaaagctatcagaattggcaaaaaagaaagaatcattttcgaaagagaaaacatttagaaaataataaaaaagaaatatttgcaatgtttttaagggatgcaattttaattggatcgatattcaatttaagatttgccaatcacttccaccaatttagtgacgacaattatttaaaaattacactctcgcaaaatcgagacaaataattagagaccggaattctcaaaaatgccggaccggaccggactggtattttcaaaaatgaccggattcgggatccggtctctcataatccggtcaatccggtaatccggtcaatccagattttcaaattgccggatccggaaccgaattccggattggtaaaaatttatatttcacatgttaatttgggaaaaaacccttaaaatttcatctattatatgtagaaatttggtgcaccagaaaatgtcgtcatagaaaagacaatgcgccgaaaaaaatatataaaatttcaatttttcaaaaaaaatttaaaaaatttattttaaagttttttatttttgaaaacctatgtttaatgaaaaaataaaaaaatttttttgcggcgccctttttccaaaaacttttgggaaagaaagaggtgggtcccggcggtgccgataggcgccgccgggaaaaattttgaaaatttgaggcgatttgcaaacagattttcaccaaaaatgagcttttttttttttgctgttttgggcaaattttttaaaaagaaaaaaatttttgtagggcccggcggtgctgacaagctcccgccgggggagaaattgaaattttgaccattttaagttaaagaacattatgccaaataagaaattttttcaaagaaaaa

SEQ ID NO: 40173 - DNA, 1110 bp, Heterodera glycines
tttctaaatatttttttcagaaagtgctctaaagctcacccccgcattatttacaacttaattttagcactctgatgctctcttatcaaaaaggaagatggagaaaaaattttttaaaaaatttttccttatattttggttatatcgttttgcttttggtggggtgcttggaacagtggaatcatgcgcacccgtccgatctggcaagttaagcaacgattgctgactagccaaaaggttcggtgccgtgatgaaacgaaccagcactgcttaccccgcggcacccggcacggtcccccgaaggaatggatttaattaaattctctccttcggggatttttttccattaggtcgtccgttagcgttcgattgctctagtcaatttttcaaaatttttgttgaaaaatatgtcggctctgaagtgcttgggagggggggggtgccaaaagaggaggattttgagacagtgcgggtgagtgaagaggcaaaacgaattcactcttttttccatggcacattcaatctattcgtttgggtcaatttatggatttgacgatttggtatacaatcaaacaatgctttcagttgattagcaatggtgcatacggcgccgtttatttggtcaaacatcggcggagtcggctgagatacgcactgaagaaaatgaaaaagcaaacactgctgatgcgcaaccaaattgagcaagtttatgcggagagggacatcctcactttcacggacaatgtgagttgacaaagccatgggacggaaaaatgttactgtttcagcctttcgtggtgtgtttttacggttccttcgagaccaagcagcacctttgcatgctcatggaatacgttgagggcggtgactgcgcttcattgttaaaagtccctaaaatttgttttcaattgtaccaattcatttcagtccgccggaactttgcccatcgaattggcccgcctttatgtggcggaaacggtgttggccatcgaatatttgcactcgtgtggcattgtgcacagggatttaaagccggacaatttgctaatcacttccatgggacacataaactgacggatttccgccctctcaaaaattgggtttatgaat

SEQ ID NO: 40174 - DNA, 933 bp, Heterodera glycines
  unsure (1)..(933): unsure at all n locations
ccccaataaacttgtcaaaccccatttttcgcaccgtgaatgttatttttattgaattctgaaccggtttgagtagattagactagaaaaaattgaaaattttgaaatcatgtttcccactcccttctcccaggggtattattttgtaaagtcttttttccccaataaacttgtcaaaccccatttttcgcaccgtgaatgttatttttatcgaattctgaaccgttttgagtagattagactagaaaaaattgaaaattttgaaatcatgtttcccactcccttctcccaggggtattattttgtaaagtctttttttccccaataaacttttcaaaccccatttttcgcaccgtgaatgttatttttatcgaattctgaaccgttttgagtagattagactagaaaaaattgaaaattttgaaatcatgtttcccactcccttctcccaggggtattattttgtaaagtcttttttccccaataaacttgtcaaaccccatttttcgcaccgtgaatgttattttattgaattctgaaccggtttgagtagattagactagaaaaaattgaaaattttgaaatcatgtttcccactcccttctcccaggggtattattttgtaaagtctttttttccccaataaacttgtcaaaccccatttttcgcaccgtgaatgttatttttattgaattctgaaccgttttgagtagattagactagaaaaaattgaaaattttgaaatcatgtttcccactcccttctcccaggggtattattttgtaaagtctttttttccccaataaacttttcaaaccccatttttcgcaccgtgaatgttatttttattgaattctgaaccgttttgagtagattagactagaaaaaattgaanattttgaaatcatgtttcccactccctttctccagggg

SEQ ID NO: 40175 - DNA, 861 bp, Heterodera glycines
catcggtttcgtgtcggtaactgattatttaaatttcctcccatctaagttgatttatttaaagcagttttttgtcttcctttattattctcttgctttgaggtggatttttgtttgtcttctgtcggcgttacttttttaaagttttactgtattcgctaaaattaattaaatttctcagggttgtctttctgccttagctttgatgaaataaatatatattagctaaatattattctttataatcattttatctgtcatgtaaacatttttgtcgttcatatttatcgaataattccttcttgaaacatttttaagtcctgacatttatttaatttattttctccaatttttgaatccaaatttattccaggtgtattttttatttgggtttcttctccattgattcattggtttaaaattttatttttcaattgtttgaatttaatcttgctattaatattttttggcaaaatattgcattttattatatataataactgatcaaatttttactatttttgtacctttctcttgctaatttctctgttctgtgcgatttctgatcagtgctttctttatcttgttcgtacttaagcttttagattaaaaggaaaaactttatatgatttaaaatttttattaataaaacttcctattttatataaatttttatttataatcttctataaaatataataattgggtcaattattttcaaaattttttgagcaatttttatcattattattatcattttaaaatatgctttttctgacaatgactcctaaaattaaatagaataattttcagaaaaataatttattttcatttgttatttatttatttatttatattatc

SEQ ID NO: 40176 - DNA, 306 bp, Heterodera glycines
ctcgtgaccggaaaatcggtcagtggaaaatgcgtcagtggaaaatgcgtcagtagaaaatgcgtcagtgataaaaaatactttaaaataaagttgtatggcatttgtattgtaatatagaagtaaacttctataagaaaatcattctcaattgcgaaccccggacccaaactcgaacaaaaaatcgaaagtcaaaatttcgaaattagagtttttcttcaaaattggtttaaatacacagaaacaaactgaaatacatcaatcctgcaataggagatcatttatgccgtttttgaaccaaaaatg

SEQ ID NO: 40177 - DNA, 931 bp, Heterodera glycines
ctatacgtttaatcatttatcagtgccattctgttatcttcctcggatttattgaaaactgatcagtgatcttgatcccgtcctaattgttttacagtttatgttaaaaattagagactaccccagaatcggtacgaggccgagatcccaaatttgcgcggaccgcgaccgtgggattttctgtccacgacccaccccagactcgaacctcacctcttttaattgactcttacgataactactaacaaatatgacaaaaacaattagccaagattgactggtgagtgtgtgatttaaattgtactgatctgcccagggcattttttaatttgcgcacttttttgctgctacgtatcacgcgctttctacgctgtgtgtaatacactttttgaatggagagaggttccccggagggcgggtggtggtggagtggggtgactgagtggccatgcggttgttattgtgctgatgttaggtacgttcccaatggggaacgtgtcgagaggggaggtacagaaagaacaaaatgtcgtacactataaaggccagggtttgttctttgccttatttcaccaacccaaccaatgaccatttttgttttaaattcctatttcactcattcgcctgtcccttccattttttttcgtatttttcgctcctttctccgccatcccaattccctccaatttatatagcgaccgcgagaataaccacgtggtgggccatgtggtttgttagtgaaagaggcgaaaaaaaatgcatgcgggcggccattttgggtacattgtgctacaaaatgggaaatgacgtgactaatgatcactttaatcagtcagcgtttccaaatttttaaagccaaattttcatattactcttcaatttttggtgctcggtgcgggtgctttataaatattttagtattattttgaat

SEQ ID NO: 40178 - DNA, 1415 bp, Heterodera glycines
  unsure (1)..(1415): unsure at all n locations
agaggatgaatatgaaatgtgcagaatgattttantcaaactaaaaaattcattttttattttattggtaaataacttgatacagataaaatttgtttttatatataaatttatattacaattttttctatagtaatntaaaatacgatttagatgttttgatttaaatattcatttttagttcatgagctttttcggtacatttttttcattatgtacattataatttatgtagctgtcattaaagaaaattaattaaaaaacccctttttaaattaaatttgatcaactagtacaactgttgaagttatgagctttgactcatctcggtggccataatataatttaaaacgtacgctcgtccaggtttgacatcgccaacatgttaagtttaacatttacatgtttatttatttttaagttttttactaccttactataataattagtttattttttttatttattggtttataaaaaacaattaacattttgttatgaaactatttttatagatacttcaattttatttgtttttggaacttactagtaatgtgccccaagtttatgatgattataaatataacttttattataaaaatattttttttataattttctcaaatgatatgaagccatttaacatactttattataaaaagaattatttaatttttctcacacagttcatggaaagtattttaattaaatttaataattagttatttttggttattttttgttaaataaacttgtaaagtaaattttcatcttcacgtatcaactgttgcttgtatgtatttttgagtggtaagggtctatttgaattataaaatgcaaaaataatagtttaaaataatttagatttaaaatagtttaaataattaagatttattttgcttattttattcaataagtttattatttttaaaatgaatttttatgtataggtttcgaatttatttttagtgagagatatgtatcttagatttgaaaaaagcttcattaaacatattttctgagaaaaaagcgtttgaaaggaaacacccacaggtcttgcagaaaaataaaaattaaacactgttcaatatacttttctttggtaaaaataagcaaaaaataacaatcaatgtaaaggaagggaattaataaaaagtataaaaaacttgaactcggccattaaacctaaaattcatttttgaagcctcataattttattgcccgctataggtgtgtaatatacaatagaagtcgaccctgctctagcgaatagtatatcatacatatgcagtacctgttttacagttccgncgngtggntgcctttgtagtgaaaataattattaantatttaaccgcattacacatagaagacgaatattgtttagtaaataatggctaatttttcattcaaaa

SEQ ID NO: 40179 - DNA, 1537 bp, Heterodera glycines
  unsure (1)..(1537): unsure at all n locations
ccccacagtttcaatagtataatgaataaataaatttaaagaaaaaacagtgaaaataaattttttgtagctaaacataatttttgttatttaacaaagataagattccgcctccgcttcctcgaaatcatacgtcgcgattgatttacctaaaaataaaaattcaattaatacgaaaaaaaattttctattattattttttaaatataattttttatttaagtttttttttcgaaaattaaaataaatttttaaaatgattaggcaaatattttgctgtatttagaatttaatttgattatttttattatagcattttgatcaataaatttatttttttttctgaaatcccgaatccaataaactattttcacttattttttaaattgcatatattaatgttcaagtaaaccagctaatttcgatttaaaatgtaaatttaatgtcactacattttagtaccaaaacgacccctactcggaccaaattccaacattacccgtcactttttggcgacggaattcgcatttgaaacttgaccaagaaattatccttctcatttcattanatttttgaattcaaagtacaaaattcgattctctcctttttaaaaataaaatgagcttttttaaacaaaaattatattaattaaaattaattataagaagatattgataaaaaaaagatattaaaataaatgtaatctttgaaatttttttaaaagttcaattctgacaaaggaagggtcggcaagtgaccgtggaatttccaaatgaagcttggtgtgtgggtgtagatcaccccaaggttctattgtaaaattttagccatttttgccaaatgagctttttaaatatttttccattaaaatcaaaaaattacattaaacataaatatgcaataaatataaatatcctgtaggtttataaaaaaatatttttgtatgattttttttttgagtatcttatgtatcaaaatgattgaaaaattaaaaataaagtttttttttataaataattttttgataatttactataaatgaaattacaattacaaaattttcaatatatattatccaaaattaataataaaattttttgtaaaaagaactagttagaaaacctatttaaaataaattgatcagggaagtttagtaaaaacttttttagaaatagttttaattttaaaaataaaattaatgtgttgcgtttgatagcccgtgaaaaaactttatatttggtgagttgaaattttttattatttttaaatttgaaataatattagacatcgatgaattaatttaccccaagaatatttttattcttgtgcgctacttcctgacaggatggttcagttgactctatacatttcttgatttttttaaagatcaatttattaaattagttaaaagaacggattttaattaaaaattatatttcctattataaaattttttaaagttatctaaaaaattatatatgaatatanctgactctgaatgattataataaataaaattatttttcagctagctaat

SEQ ID NO: 40180 - DNA, 951 bp, Heterodera glycines
tattgggtcataactcgtcaggagttgattttatcaaaaaatcgtctaagagcttttttgcagagaattttaagcccaatctaatgtgctttatctcatgtttttatcttgaatttaaaaaaagttatgaaattaaatttaattttgcaattcaaaaccataggggggaccccatggttttgcatttcatgaaaattatttttgctcctaaattagccaaaatgcatttttatggcataatttgaggtgctgaaacgtatatacgctttattttgcgtttcagactttttggaaggtggttacaaatttttgaaaaatcgtcactatttgggccccgggaaatccagtgaaatttcgaaaattcataactctttcgtttttgatcaaatttagtggaataaggtttgaaaaatagcaaaaaattaggtgaattttatgagatttgtttggaatttctatcttccaaaataaaaaagttattctaaaaattctggaaattttcgatttttcagaaaaaaattcagaactcggttccgtaaaggtgtttttgaaattttaaatactgaaaaaaatccgcaattttttgctctattttataagccgcgaagcggccgaatgacctcaacaaaattaaaagacgggtgcgaagcgcccggcctgaggccgcgaagcggccgaatgttcttaacaaaattaaaaaacgggcgagaagcgcccgtcctgaggccgtgaagcggccgaatgtcccgcaaaaaattaaaagacgggcgcgaagcgcccgtgctgaggccgcgaagcggccgaatgtccccaaaaaattaaaagacgggcgcgaagcgcccgtgctgaggccgcgaagcggccgaatgtccccaaaaaattaaaaaacgggcgcgaagcgcccgatgctgaggtcgcgaagcggacgaatgtccccccaaaaattaaaaa

SEQ ID NO: 40181 - DNA, 1104 bp, Heterodera glycines
acttaatccctttcaattgcatttgttcatggagttttattatggaattaatttctttattttggtagcttttgacgagttcaatagcttcgtgattttttataaattcttcaaagccagacttgctggttgtagaatattcaaataagaataaaattataagttttcaaataaaaattttattcatttttctaaattatagcaatattatgattataaaaataaatacaactaacagataaaatatttataattatatttttattttttgcgttgacatataaaatccatcatatgcatattaatttttttatttacgtagctcgtaaaattatacgtgttgggaattattgatttacacgctattatttttttatataattatatgatttagtgaatcgtataataaatttaaatatttttattcacactgagactatttgcggttcgcccacactgagactatttgcggttcgcccacactgggactattttcggtttgcccacactgagactattttcggttcgcccacactgagacaaattttcggttcgcccacactgagaccattttcggttcgcccacactgagactattttcggttcgacctagcaccaaaattttaatttttaaaaattttgggaaaagtgcagaattgggcccgctaaagaaccgcccaaaacatgttccaatcaatctcttatgacctctgatcaatataaaaaatagtcccgaggtgcggaaatgttgttttttacttgaaaaatggtcagacagagcaaggtcattttgacgtcacaaatatgattgtaaaatagtaaaatcgcacaaaagggatatttaaagcaacaaaattgctcgatcattactaccgatggaaaatatctttaatttgattcgacttggaagtgatgtcgttattaatcccgacactgccgtaaaaataatggcctaataccaaatgagagagaatgccgcagatgtcgaattccaatgacaattcgaactgacaaaggtccagctggcacttttcgatgcagacgttgcaatggcccatcgcattaagtaacagaagggacatgatttgaagccgttcatggaaa

SEQ ID NO: 40182 - DNA, 1132 bp, Heterodera glycines
ttttgttcatttaattttagaatcatttcatttttcgcgactggtcccttttgaatgtcgcgtcttcgcccgaatttgggcattttcggctgttttcttggcaacattgaggacggaacggtgctgcaacaattcatccgagaggcgcatcaaatgaagacgaaattggccagcgaaaacgaaggaggaatttggaatggcaaaagtgtttacgaatcgccgcttttggtgtaaaaaaatggaaaagaatacaatggaagtgattgaaaactagggcagaaataaataaaaatatattattgtgataattattattgaaataaacattttttaaaatattgtagccaataaaattgaagggtaaattgctctatttattggtactttaaaatttaaaatacaaatttaatttaacattgggacgatcagcaccaccggcctaaaaacctgcttaactttttaaaaattgactagaaaatcaaattgaaaatatagaaattttaaaaatgaaaacaaaatgaattttgtcgatccccctgatcgggaatgtacttcccgaccaagtttgccgaaaaagactttttgacagccaaatgagtctattaaaaaattgcaatcgtttcccttaactaaagacacttaggttccaactaagagtttttgatttaaaaaatgatgagttttatggtttttcttattcacggcacaccgcgaaacaatatttccttagaaatgtttaaatttgtcttaaaaactatataataattgaccattctttttgtagatttcaaaaatacattaataataataataatttatacgcaaagcgtgaaaaacaacaataagataaagcaaaatggtcgcacatgagagtggttcataaatgtgtaaaacgatccaaatcaattgagtcaagaagtttagaaaaaacagttgaattttgtaacctaacttctttaggtaataacctatagaagcgagaagcacgaacaaaaaatgaatggtatctaacattagttgagcaaaaagttggcttaattaaattacccagtctactagaaaaattgggttgaggtttattatatttaattaggacaaatccattagttatttcaggaaaagtcttagatca

SEQ ID NO: 40183 - DNA, 896 bp, Heterodera glycines
tccgcgtttgtggtagtggacaaggctgaccagttttggactagcataataaatgagggagtgcgatgcccggggcactctcaaaaccctttggaaaggttgcaaaacgatgggaggacattgatgagaaatgaacggagcgaatgaatggatgctcttcccgtgaatgtttggcttttaccgaaaatcattcgtcgcctttccctttgccttagtctttttcttaaaatgcctccttttttgaccatttcaaccttttttttattctgttatgccgcaatcggctcactgtaaacgccgccggtgccgtccttttcttctcttttctcggagttttcgtcggtttcgtccccgccattctccggcgcggcttttcgttcaacgcaagcgcattcttcattttggccttttgtttttgctcctttcacaaacgaatggccaatttggagaaatcgcgtcagtaccaattaatgtcataaaattgacccaccgccgaagcaaaaaaattcctcaaattcgcgtccctctcattcagttccgtcatttcctctctcgtggccagcggtgcccccgccggtttggccggtctcggcactgccggctctttggggtcattgggcgcttcggcaggctctggtgccgcaagtgctctgagcaatattgggccacgtgggaccttttggattagaattggtgcttcattttaaaaaacatttagtgtaccaattggctcaagccgcccttcaactgacgggcactggggtgggcattgccaatcaggcatcagaaaggtacgaatgccaaggaaccgatcggtgcattcattcagagaattctttcagtgcttggttccctgtggtcgtggaaaatgcggtcagtttgctgtgtgaagaaaa

SEQ ID NO: 40184 - DNA, 959 bp, Heterodera glycines
tatcccagaaaaatgggctatctctttttttgataaattttatacacatacaaatgctctcgagcatgatagggagggcggtgcgcaatagaccttttatttttgagggaatttttaaatttatactctatcccagaaaaatgtctatctctttttttgagaaattttatacctcacaaaagcgcttgcgtatgagacggagggctgtgcacaatcgccattttatttcacagaggatttttatatttagaggttatcccagaaaaatggctatctctttttttgataaattttatacacatacaaatgctctcgagcatgatagggagggcggtgcgcaatagaccttttatttttgagggaatttttaaatttatactctatcccagaaaaatgtctatctctttttttgagaaattttatactcacaaaagcgcttgcgtatgagacggagggctgtgcacaatcgccattttatttcacagaggatttttatatttagaggttatcccagaaaaatggctatctctttttttgataaattttatacacatacaaatgctctcgagcatgatagggagggcggtgcgcaatagaccttttatttttgagggaatttttaaatttatactctatcccagaaaaatggctatctctttttttgataaattttatacacatacaaatgctctcgagcatgatagggagggcggtgcgcaatagaccttttatttttgagggaatttttaaatttatactctatcccagaaaaatggctatctctttttttgagaaattttatacctcacaaaagcgcttgcgtatgagacggagggctgtgcacaatcgccattttatttcacagaggatttttatatttagaggttatcccagaaaaatggctatctctttttttgataaattttatacacatacaaatgctctcgagcatgataggg

SEQ ID NO: 40185 - DNA, 1051 bp, Heterodera glycines
  unsure (1)..(1051): unsure at all n locations
aatcgccccccaccccgcccttcaaaattttgaaaaaaaaataaaataataggagactcagaattttgaaaattttttataaaaactgatgacaagctaatgtgataaaacaggttaattcttttcctttcagtatccctgcaaagtttggggcgcttctgatcagtttctgaaaaaaaagttaagcctaaactttttggcctgtttaaaaaggaattaaaaatttttttaaatttattcatctccctttttgatagaaaaagcatcagagtgctaaaattaagttgtaaataaaatttggtgcgctttagagcactttctgaaaaaaatatttatgaaacaaaaaaatcgattttttcaagtgtccgtttggggtactcaaacaattatggggagcaaaaatccaacacagaattaaagtacatcttataaagaatctactcccaaacaattctttctccccataactttctactcatcatttctcctctattacccctaaaacaaaaaaatctattttttcaaatctccttttttcatactcaaacatttatcaccaacaaaaatccaacacacaattaaaatccacactataatcaatctattcccataatattcaatctccccataaatatctccccatctcttctcacaatctaccccaaaaacaaaaatccctcctttttttcttctttcctttttctctcctctttctttcttctttnccttctctcctcctcccctttctctttctttcttttccctcccttctcccccctctttctttctcccccttcctctccccccctcccttcctctctccttccccccttcccttttcttctcttttttcctctctccttttcctcttctctctctcttctctctctctcttttcctcctccctctttttcttctccctctctnccctcttctcccctcttcttcttnctccccttctctctggttgaagggcttccacacaactnccccaaaaacaaaaaccttagtagatcaagtgtccgtttggggtactcaaaccatttatggg

SEQ ID NO: 40186 - DNA, 1742 bp, Heterodera glycines
ctccgcactccctctctctctcttttttctttatctctctctctcttctccctcttttttctctctctttctctccgcactccctctctctctttctttctctctctctctctctgtctttctctctcctccgctctctctctctctctatctgtttcttctctttctctcctctcttttctcccttcgttttttaccttcaagtgcaaattgccataagtgtcctccaaatcgcaccgtatcaaatcaccgtatttcctctgctccgcctccaaaaaggcgtcttctttttttgccgcccttttcccttcgcttttgctcgcatttccaacaacaaaacgaatgaccacgtctttgggctgaatttgaatattttcctaatggttctcctccgcctactttgaattcttcccttttccctcgtgggggccgactgagccccaaagggcagtcagatgaccttcggggcccagttggtccggggcccagtcgtaccagttcctcccccaccaaccgctgtccgtccccaactctgtcggattgcctcccgccgtatcgctccggtgccattccgtcggctcatcaccaaaactacgccaagcacaggtcggccggcacatggaaatgcgacggcactcgagaaaggcatttggatgcggaagggaagatgaaagttggagaaatggacgacggaagaaaaagagaaaaacaaaggagaagaaggagcggaagaagaagaagaaggaggaagagaagaaggaagagaagaaggaagagcataacgggaagagaaaaagggcctaaaaaacgacagaggttttttgtgttgcttattattagagcccggattttgcagcatttgctgaaattttttcttggggcgtgctaataagcatgaaaaacgcatttctaacttggtttgaggcttctaggctcaactttttttttgctgattttggcttaaattggtattttcatgcttaatgctgagcatgtaatttttgtgctgaatttagcatttagtgcttatttttgtgcttaattgccattttttataaaatattgactaaaacaccgtctctcagcaataaaaacgaaaaatacatccctaagaatcggccctaaaattttcaaaaatgcacccctatgaaaagaaaaattttctcaaaaattcatccacaaaatttttttctttacaaactttttgctttaaaaatgtcaatttttgctaatgaaatattagaattgtcagtgcgaaaaaaaattgagaattattgttaaatgataaaaatcttttgcctaaaaagcaccaaatttttatgcttttttcgatttttatgcttattttgcattttcatgcttatttcgtgcttaatttagtattttttgatgctgagttaagtgtttaattactagggattctttttttaggcacaaaaaatcgcgaaataggcacctaaaaaggcaaaaaaaaagcgcaaaataggcatcaaataggcacaaaaatccgcaaataggcaaaaaaaattttaattaacgctttttaggtattagaacacgtaaaaatttaaatattttaattgtaaatgaaattataaaataatttaaagttttttccagatacggacaaatttttaaaacaaataatttttattgagaaaaaaataaataaatttttggaattattttttttgaaaattttttcaattcctatggggtgtattttctgaaaattttttttt

SEQ ID NO: 40187 - DNA, 1230 bp, Heterodera glycines
  unsure (1)..(1230): unsure at all n locations
aaagagaacatgatatgatgatcagaaaagttaaagactaagaaggtgaaataataataaaggtagttaagcaatattaagagtgaaaccngacaaaaatgatcaagaaaaaagaaatattgtgagaaagagtaaagcttgctcaaggcgtctgacaatgagaaagagatttgtgatcaaaatgattgttgaagaaaaatgattgttgatcaaaatgaatctgatcaacaatcatgtgggaaagaagggaagaaactgttcagaaatgatcagctaagagagcgatcggaacaaaaggaattgagagatggtgaaagaatgtagagggaacccaatcataaaactgatcaaatatgacctgttaggagaatgatcaaaaaagtggaatttgactgatcggggtgatggaatgatggccaatgatgtgagattggggggggggttagagtagtcgttggccaaatagcgcagcgatgtgatgacgacgagtgtttgtcgtcgtgatggtggcggcggtggtggcggcggtaaatgaaattgtttgccgacgactgattggtgttggcgttggggtggggacagtggtgctgctgcgctcgctttctgctgttgatctgtctgatgagtgtgtgcgcgtgttgcgggcggtcgctgcgtcttttcatcccaccgccgcctccccctccccggcgcaaaagtgcgtacaaattgtgtccaaattggccccttttaatgcaatcaaaaaaaaaagtggaagggaaagtgcgcaaaacattggggagaaaaagtgatcggcaaaagcaacaaacattgacaataaatgtgcaaataatcagcatgaaaatgagatttactgatttggtgggggaagtgaaaaaacaacaaaaaaagcagtaaaagtaaacaaaaaataatttaatttaaaaaccatttgatcaaaatttagaatttcataccctgtaaaaatttttacgccaaaatagaaaatgcggacgtaatttcgaaaatcgcatttaaaatttaaggttttcagataagagaaagcttgggggctttattcgtgctttgttggcgtcgctttatgtaataagcggcattggtcttctctgatcggcacctttttgcatttattttcctaataataaacagctgatcggaaatggaatcatttttaatgcacatggacaaaacaatgatcaccagaacccgttggttctgtggcgcgatcta

SEQ ID NO: 40188 - DNA, 1515 bp, Heterodera glycines
ttcccgttttttgcccataggctaacatttgttagcacaattctttttagtttcacaaattatttcaatttttcttacttttccttcgcaatatcattcattggttactttttctctttcagagagtggttgtctgtctggaggacaccatccacattcacaacatcagggacatgaaagtgtgtggtttgtaatgttgtactggctttttttgaaaaaaaagattaaatcgttcacgattactagtaaatgccaaattccccccccccctctcccccagtgaatattgtattgatgctgcctaattttatgcacattagctttctcccttgggccaaacctttttcaaatgttttagatatcccttcgttcagataatgcacatgctgaaagacacaccgccaaatccgaacggaatcgtcgacctgtccatcgcggacagcaactgttttctcgcttttccgtgttcgtccagcacgggccatgtgtaagcgtgcacattttgggaaactattttaatatttaaaagtgatttgcccttttttaagtttttttttaaatttttaattccaaacaatgcaactgggctaactaatgatagggcgtgaaaagaattcgagagcagccagttagagacagacaagacaattactatagtagcgacccttttgagttttcagcgccatgtccctggtgtcctagtgtattgcattgattttgcttcttttcaggcatatattcgacgctgagaatttgaacacagtgtgccaaatcactgcgcacgacggagtgctcgcagcaattcgtttcaatcccgagggtaacaaaatggcgacggcatcggagaaggcactttttcacccgaatatgtctcttgtttcagggttttctaatttttagggcactgtcatccgcgtcttttctattcccgacggagagcgtctgtacgaattcacgcggggcgtcacccgctacgctcagatcaattcattggcattttcacaggactcgcgtttcctttgcctgtcctccaacactgaaacggtcggttcaatcaaaaaaagggaatttgacgggaaacaatttgaatttttattcccattttttttttgtttttttaaggtgcatttgttcgctctccttacgccgtttgaacagcagcaggcgtaccaccaccactcgcatcaccaccagtgccaaaagtggggcggcttccaagcatttcttttagcttttcatgggctatttaaaaataatttgtttttctcccccataaataattggctgttaaacttttaaaaaattccaatgtaaatgtttttcaggtccgatgaaacttcccaagagggtttaagcagttgggtcagttatttgtcgcagcaggcaagcgcatatttgccccaacatgtcaatgagctgatgcttcgcgaaaagaagacggcgccggcgcgtctgcccattctcggcactcttagtagaggtggcaattccacgcattcaggtgcagcaatggcg

SEQ ID NO: 40189 - DNA, 728 bp, Heterodera glycines
tcccctttttcttcactacacaatgagatccttgcgaaatttgcagcttcctgctcattgagtcggttatgaattgtatgttcgaacatttcttcgaagtcgaattgtcgtgcttttttgttggcatttcgactttgtgccaaattggctgactgtttcgctggttttgtcgccgattctgcttcgtcctgttgttggttttcgttttcctgcttttgcattttttatttttgcctttgttatttttttctgttcttttcataaaagcaaaagagcttagaataacaaaaataataatctgtgaaaataaagtgaaaagaaaaggcttttgcatgaaaaaaagaaaagaacaaaacaaaaagaaaaaacagattaatcatttttaaattatacaaaataattagtttggcataatgtgcaaaggaccattcgtttctttcattcactccgtctgttgaaacaaaagcaaaaacatttaaatgaaatgtttttttcataacatatttatttttcataaattttcccatttcgaccaattcttttctttggtccctttgcttttattgcctttaaatttagatgtgatttattgttttaaattttggtaaatcgatggtgaaatttgtgtaaagccgaaaatgttcgattttggcttaggccgcaaaatacaacgaaaattgagccgcaaaggtccgaaaatagcccttaagaaatgggccgcaaatgtc

SEQ ID NO: 40190 - DNA, 1403 bp, Heterodera glycines
  unsure (1)..(1403): unsure at all n locations
attaagaattttgaccctattttcattaaaaaaattatttattttgcggtttttctcaaaaaaccacaaaaagcctcaaagccccattttgaaaatgtagcctcattgacctatcaaaaaaccacaaaatgaggctaaagcctcagatataccatccctgctttaatggtttaatcaatgtttatttgaaaaggcattttaattgtttaaaattcatttttaccattatatcctcctcataatattcgattgctacatacgttggggtggccacgtaaaactcacgtggcacaactttatttgccagttttctcgggttttcgaaaagccccaccggtatgaaagtggcaccgtcataatcgatcaatttcagagtttcctcttcgtccatttttttgacatacataaaattattcggttttatgtcgccatggattgcgactaaacacatgaaatagggttttattatcagtaaatttaatgaaaaaaaaaagcgaaaagtacacacaaaggatcgggtttttggaaattttaaaaaaacaccaccttaaaagaagagatttttttcgaaattttggcaaatttttaagtattttgtttgcttccgaaaaattttcgctgacaacagaatgagaaatttcaaaaaaccttgagaaatgtatgtatttcgtttgcaattgtgaagctagaatttgattaaaaatatgacatttttaagatattttgcctatttttatccatattttggtccatatttggccatttttggcctttttagtccatatttcgggcttttttagtccatatttcgcgttttttagtccatataatttacaaccctagttatgattgttatttttgatattttatttataattttttttctaaaaaagcgcccttttttatgcaacgacctagtaataagatttgattttcttgtcaaaaatatttttcctaatgagctttatgaactccgttattaaatttgagcaatggttcagttttaaattttaatgccaaccaatcaacacgtacagacacccattggaatacggaataggagagaaatatatataaaatatgtgtgataatcatcaaatgaattatttgataggggttataaagaacaaagaattcaattaaaagtcaaaggtcatttcacattctgctggggaacttttctacgacgcctccggaagcagcagcacctgaaacagtctctggaagtctcatcaatagaaaatgtccatacttccaaggggcaataaaaagggaaaaagagcaacactcacttcacttcgctgtgctcttcctcctngtgacgatttgggggctgggggcctcgcgctttcctcatctctcntgcgtttgagtttacacctanaatcccagcattaatcatc

SEQ ID NO: 40191 - DNA, 890 bp, Heterodera glycines
taatcccgaattttatccaaaaatacgggatttcggacagatatcagcagcaaaatcccgcgcgcatacgtttcccgtcacttttctgtggttttacgtataaatcaacccctacccccagcaaaaaactgatcgcttttcttctctgtaaaaaattcaaaataataataaaaaaatcggttaccgtaactaatccactcatcccaaccaaaagaaccaagcccactttttactgtaaaaatcaattacagttagattatgcttccttcctaagcaaaagaagcaaatccgtttcaatctacagtaagcttatgctccttcccatacaggggtgtgaaaaacggacccattttctactgactgtaaaaattacagtaagtaatcccccattcattccaagcaaaagaacaaagtcaccttttgtactgtaaaaattaactacagtaagcctatgcttctttcccaaacccacttttgcgtgctcggtcatagtcttcctgcagcatttctttgttacaatacaagtcaccgtagcacaccaatgttacggttggacttaggtacggtatcgcaggtggcggaacatcgacccatttgggaaggtcaaaagcagacttaaaagcgcagaattaagaacggaacagaaagaatgggaaacccgcgccaggatcagtcttgccaaggacaacaacccagcaaggaaaaaaacaatttaaataggctacacctcgtttttcaaacaaacaaaaaaaaacgaatttttcgagaattaaaaattgtgttttttttaattttaaaaaactttttttttaaaaaactaaaaaatcccctcttaataacattcgaaaaaaagattcttttcgtcgaaaaataaatgttatatttttatt

SEQ ID NO: 40192 - DNA, 232 bp, Heterodera glycines
aaataataaaatagtacatatatctataaaccagataaatggaaaatgtacattgacaaaacgtaaaaataatttttttttttgaaaaaaaattttgtttttttgaaaaattgagtcctaggcctatgctggtgggtgcctcgtgctcatctccgggtttaattatctgctgctggttatgctcgttaacccggatttagcgctaaaccctgagacgacgagcacgaggcac

SEQ ID NO: 40193 - DNA, 1434 bp, Heterodera glycines
  unsure (1)..(1434): unsure at all n locations
aataattattattattattttaaaatttaannttggttaatttaatttaaaataagcnttattatttgttgggctatctttttatgntaagaaaaaataatttgccttgggcaatttaaatttttgtcaaataaaaataaaatgcttttcttatgaagtttcattcagatttattcgcttttatttcaaagtccatactcaaattcggttattttactgatttacccgtaaaattggaaaagtacctaattataatctaaaattttttttaattttgaaagggtttctcaaaaatttgtaccatttataaggaggatttcgaatttaaatacatacaataactattttattggacaaaaaacaaaatttatgaaattcttttctggcattgatttgtttcgatttttccactgttcatcacagttaacagaacgtgaaaaattgaacaaaaagtgatataaaaaaatgtttattgtatttgtaaatcatcgtaaattattactttttaaagtaataaactcttaaataaatttttaaataatcattaaagcaaaaataaaaataataaaaaaaatgatcggaaattgtcagttatttttaaaatattaatatatgggaaaaaacaattctgctataattcatttttgaaacaaccatttttgatagaaaataattataaaaatatattttattttttataaataatacccagattttagtgaccgaatgagaacttttaagatgataatttaaaaatccttaaatcaaaaataaatataaaattacataaattattaaaaattgcgattttcaactgtttgtccaggtaagcagtcaaaaaacatgagtttaaagtaaataaaaaagcgatattacaaacctaaaataataaaagtaaaaaataaatgtaaaaataaaaaataaaacagaaataaattttctagtgaacaaaaacgaaaattttgtaaattttcgaagttatttatataaaccaaattaaatcatttcaatcactccaaaacattaattttgaaattatttccgggttttgataataaatttttttactaaaaataaatcaaaaagtaaaattatttaaaaacaaattacttatttgaaattgttagggatgcaatttggccaccctttggtggcatttgaaaaaaaattatgaaatccaaatcccttttatggcattgatttgctttgatttttccacttttcaaaaattgattgcaaaatataaaataanataanaatgtaactattgaaaaaagaagccgtacatcanaaagtanaagaagccgtcgtacaagaccaagtttacgattacttgggacatgagaatattaaaaaaataaaaataaaataaacataataattttgntttacaaatataaaacaaaacccaataaaagaaaatatatatttttt

SEQ ID NO: 40194 - DNA, 777 bp, Heterodera glycines
tttttttagatatcaaatttgttcagtttagttggaaatgacgcgagttgtggttgatcaaaatcaatgaaaaaaaaggcattgaccagtgtaaattttgaattagcgcgcaaaaaacgaaatgcaaggaaaaaagcaaaatttgtggagtttgaaaatgattcacgcattaaaattttggcgtatttatacgctcagaaaaaaattcggaaaatctgaccatttattttatttttctgcgtataaaaggtgctgcatttttcaatccgcaccattgtccttattcctaaatattcaacaccggcagcgtgaccattctgcgccagccacaaattgcacagcgacacatcccatcctgcgccttcgccacggaccgcaacacatcgctggccaacatcaagcgcaatggagacggacgaacagatgtgggacatgccctactaccacggactggtgcgttttggtggttaatgcaattttgaccactaattcttttgcttgtttagctgccgcgagaggacgtcaacgatatgcttgtcagagagggcgacttcctgatccgcatgagcgaggagacttcaggacaggaccgcatctacgttctctctgttaacagcgatggacggcaccacctcatctttcgttccaagcgtggaatggttgcggtggacttcaacagttggacggcagaaatgggagctcgcacattcgaccatcacgcagggcgctgaactgggcaagggcgcgttcggcgttgtcaagcgtggcgtcttccgt

SEQ ID NO: 40195 - DNA, 277 bp, Heterodera glycines
ttgtttaaaaaattgttaaatacgctttggccaaaaaattaaaaatttcccatgggcacgcaaaaatgcgattaaattggcagagtgaatagcaaaatcgaatttgctcaatttccaacggcactctttttggcatttcggatggaaattggcattttaattcttttttaaatttcccaatttcagaataaatttttgttcatcattaaaaagcttttcgaaattaatttttaaatcactccgattgccccgcccctttccctctccccctttctcc

SEQ ID NO: 40196 - DNA, 1310 bp, Heterodera glycines
aattccttttgcaaagcgttaatttcacaattaaagaatttggaccttcgggtgatatgtgaaaatggatatttacagggaattactgaaattgaagaaatgcgttcaaagcttttggctggacttgaggaaagattcggtcatttggagaatgagaagtgtgtacatatttttaaatttcttttaaatttcttttttagattacatgctctttcaacattcttggaccctcggcgaacaactgagtattaatggctctgagcgtattacatctgaacatgttgaaactgtgtcgctttttgttgttccacctcctcccaaacaacgacgtacattacttgattccttgtcagaaatggcctcaaccagcaaatcttttggtaatttttaaaagatttcttttattatgcatataaaatttaaagtgcaaatcgaatcgacatttgacgatgaactcaaaaaatattgttcggttgatttgattgggcaggaattggaccctttggattggtggaaaataaacgaaggactatttcccattatcgctgcgcttgcaaaacgatatatttcggccccggcaacaacgattggaagcgagcaacttttcagtgttgcgcgtgatgtgtttgactatcgtcgatcaaaattgaaggctgaacatgccgaaatgctcatttttttgaacaaatcaattccgaaaattcgattttattgatttaaaattttgcttttttattttttctttaataaacgtattgccgctcaaaatttgtgcattaaaaatatttttgtgttataattaaatttttgaattactcccgctcccgcccgggaatcccgttaaaaatggacgggataagaacgggatcgggagtataacgggaatcccgttcgggactacctttcccggcaaattttggactaccgatcgcgctcccgctccggaaatttttttttaccggactctatggctaacatcccggagcacactattttagccatattcatgttaacttgtattggtacttaaatcagtagaaagcaatcaaatatgttatcaatctatgttttcctcttatttattggtacgagacttaaattccgtagaattcgtgtacatccgcgatttgacaggccataccgtaaaagatttgggtaaatagtaattgttttggtgttgataaagttcagataattactaataaaaaatctcaatcttatcattttacgagaaaaagcatgcgacgagggaaacaatggaatatttcaaagaatagcgacaagattgtacacgtgaaatcaaggcaaaa

SEQ ID NO: 40197 - DNA, 1485 bp, Heterodera glycines
  unsure (1)..(1485): unsure at all n locations
cagcacacagccacgggcaaaagccgcctgtttcacgcaacagcccggctgacccgacctttagagccaattcttttcccgaagttacgaatctaatttgccgacttcccttacctacattattctatcgactagaggctgttcaccttggagacctgctgcggatatcggtacgatcaggcaggagattcaaatagcttccctcgcattttcaagggccgtgtggagcgcacgagacaccacaggaaccgcggtgctttacgggcgcaacatccctatctcaggctgagccacttccaggcacgcacaccctaaaccagaaaagagaactctggctcggactccacacgacgtctgcgagttcatttgcgttaccgcgcaaaacagctcttgcgaaccgtcatttccctagcctggcgtgggaatgttaacccacttccctttcggcaaccggatggaccaactgcgcaagcacagaaaagtcgtcatccgtagtgtgttacggcgttagccggtgccttaggatcggctgacccacattcaactgctgttcacgtggaacccttctccacttcagtcttcaaggatctcacttgaatatttgctactaccaccaagatctgcactggtggaagctccggccgggcccacgcccaaagccttcaacgcaaccaccacgaccctcctacacgtcatggccagactacgcgacaagcacgtgtacaagccaatgacggtggagtataggtggcccgctccagcgccatccattttcagggctagttgattcggcaggtgagttgttacacactccttagcggattccgacttccatggccaccgtcctgctgtctatatcaaccaacaccttttatgaggtctaatgagcgggcactttggcaccttaactccacgtttggttcatcccacatcgccagttctgcttaccaaaaatggcccacttggagctcaaacattcaacgcctgggttcagagtcaagcaaccctggcttcatacccatttagagtttgagaataggttaaggacatttcgtccccaagtcctctaatcattcgctttaccgagtataactgcttaacgagctccagctatcctgggggaaacttcggagggaaccagctactagatggttcgattagtctttcgcccctatacccaagtcagacgatcgatttgcacgtcagaatcgcttcggacttccaccagagtttcctctggcttcatcctgctcaggaatagttcaccatctttcgggtctcagcgcatacgctctgtctccgccccatcgcatgcgatcgagacgggactatgttgcgccccaacaccgcagtgccagggatcacacatcagctccgtaagaagccttcactttcattgcgcctttgggttttgaacacccnaatgacttgcgcatacgctaaacacgttggtccgtgtttcaagacgggtcgaacagatgaccg

SEQ ID NO: 40198 - DNA, 1658 bp, Heterodera glycines
tttttgcattagaatatggccactgagctcggcacggctcatttcgcgcaacttttttggaatttcatcgccccaaaaattgtttccaccgccctcacggcttggcttcatcacgtaattatcaggatgagcaatggcatcctaaagaaaattagatcccgtattgaggattttcgggtttttgttggattttgcctagttttcgagactttcacattcctaatccagactcccaagttttaaaaggtggtaagtcattgaaaaataataaatttcacagcaattaaatgaacattctgtccaatccaaaaattcccttaattttctaaaattccgcctatacatttcttattttgattcaaaatctattaagaaatcaaatagaaattctgttaaaagtcaggcccaagcatcaacaatattacccaatttttgggtaaaaatattaaaaaatcgtcccaaaatttttcaaataaaaatttaatttcaaagacatttgttctgaatttgaaaaccatcatgatgcttatgataattacctgaatcacacgcttggtgttctcattatccgggtcatctaagccatacaatccggtgaatgttttgtgaattgcagtcactttgtacgcttcatttgggtgcgggaaaaagcgttccaccatcccgggctttgcgagaatctgcggagaaatgaagcaatttgcaacagcatataatcatcttatttaataattataaataatttatattttaatgtgttatttatatcaaaattcataaaatcacctgctgaatcttcttttgacttgcaagtgcatttgccacagttggtattttctacaaatgaattaaatatgattttaaattatctttttttcattagaaaattgcttttgattttttaatacaaaaattagttaaatttggattttttggtgttatttttacaaaataaacaattttaaacgaatataagttgataatttttaaattttgtagctttaaaactgttaaatttaacttttacagtcgttttacataattaaaatttttttttatgcaacataaaatcttacaattgctgttgatcgttcgatcataagccgagcgttgaaaatgcgttcatctctcagggaagaaattgatcggtagaaagcaattgcaactttttgtgtgccataaagcaatgaatggtcattgccttgcgttagcctgaaaaagagtgctattttacgatttttttaaaacaaattagcacacattttggattggctaattaattagcgtactcaaataaattaaaagaattaattatgcttaaattattatttgtaaaatgcctacttactcttcagcggcttctgttaatgacatttgaacaatttttattttattttttgaaacattttccatcaaataattcagctgatattgttcatagtttcggtataatttaccagcgacaattaaaataattgcgtctttgtcatcaaactttttcctttaatttgattaagaaattaaacaatcaataaatatataaactaataataagccttatataaccaaagaataattattgtatttaattttcattttaaattaattttaaatgtttaaaaaattaattaatccataacttttttttccattttata

SEQ ID NO: 40199 - DNA, 824 bp, Heterodera glycines
ccccccccctctcccctccccctgagaaaccggaaatgaaatatttgttattttggtagaatttttggcaatttttccataatttatggattcaacaaattgttcacgtgccattcgtaggtacctttagcagtttgacacccattcaaatgatcaaaaaaaaaagcattgcgtcccttcaggggtcattttccctttttcggccatttttttattccaacaaatttgttgcattggaatgctgtatatgtatgtttagaaagctccctttaacaaaccgaccaaaacataaataaataattaaaaagtttattttttaaataaaagaaacaaaattttaaaaaaatatctaaatttcttaatgattttaaatgttctattttgaaaaaaaaaatttatttttaaataaatttctgtttacaattttttgcatatttttttgacattctgcttttgtacgttatgccatgaatccaaatttggagtcttaaagttggtcggtacgttttggtgcgcacaattcaatttgacccgcttcactttatctccgcctcagcttatcacagcttatcagcaccattataaaaaaaaattgtgtaaaaatgcttttttaggaccaccaccaacacaaatccatcccccgccccgttttttcccacaagcaaagcaggggacagacatatgacaaagcaaaagcatgggaatggggtggcgatggcttcttcttttccttatgtcccctccctccgccgcgccgcgccgcgccgcgccgatttttcattttttacaactttttccaaactcctcgcgaagaacgacgtccc

SEQ ID NO: 40200 - DNA, 1017 bp, Heterodera glycines
aaaaaaaaaaaaaaaaaaaaaaaaaaaaaaaaaaaaaaaaaaaaaaaaaaaaaaaaaaaattttttttttttttttttttttttttttttttttgttggggggtcgcaaaaaaaaaaaaaaaaaaaaaaaaaaaaaaaaaaaaaaaaaaaaaaaaaaaaaaaaaagggggggggggggggggggggggggggttgttctttttttttttttttccccttcctccgggggggggggggggggggggggggggggggggaaaaaaaaaaaaaaaaaaaaaaaaaaaaaaaaaaaatattattttttttttttttttttttttgtttgtggccgcccccggaaaagagaaaaaagaaaaaaacaaaaaaaaaaaaaaaaaaaaaaaaaaaaaggggggtgggggggggtggggcgggggggggggggggtttgttgttttcttctctttttttctcttccccacaagggggcgggcgggggggggggggggggggggggggggagaaaaaaaaaaaaaaaaaaaaaaaaaaaaaataaaaaaatattttattttttgtttgtggggggggggggggcggcccgccccccccccggggggggggggaggaaaaaaaaaacaaaaaaacaaaaacaaaaaaaaaaaaaagcgtgggggggggggggggggtggggggttttttggggggggtgtgtttttttccacaaaaaaaaaaaaaaagggggcggggggggggggggggggggggggggcccaaaaaaaaaaaaaaaaaaaaaaataaatttttttttttttgggggggggggggggggggaaaaaaaaacaaaaaaggggggttgtttgggataaaaaaaaaaaaacccccccctcccccttttttaaaaaaaaaaaaagaatacaacaaaaaaataaaataaaagggggggggggggagcggggggggggggggggggcgcctttctcttttttttttttttttttttttctcccccccccccccacacaaaaaaaaaaaaaaaaa

SEQ ID NO: 40201 - DNA, 820 bp, Heterodera glycines
ttacctgtaaattttgcaaaaaagaaaagacaattcctttcttttgtttgtgtaaagtggaaaatcatgtgagcatattttaaaaatatttacattttttaaattttgtgcttaattagtcattcattcatttcctcgtcactcagtccatcgttaatgcgtttggctctgtccgccactttttttgcaattcgtttgttcaatggcattgctttgtcacataaatggcaccgtttgcggcacactttggccatttcctcgtaatagggctgaaatgtgcaaatttgaattcgaattttgaatcaattgtgattaaatctgaacaaatcacacacattcacttccaagtgatcgggcggtggcggttcgcacgaactttcatcggcgatctgacaatcgttggtcagatcagcacattttgctgtggggaagggtgatcacttcaatcatttccaaattaaaaattaaatatttatttcctacgtgtgcagaatttgcaagtgcgtgcgcacttttgcatgtcctcctcgaactccttctggtcgcacatgtgccttagtccgatgcatccgtcctgagtgtccgcgcacgcgcccgtcgcgcacagaccgcacgtggacgcacaagtcgtagacatcggaaagaaactgatcagaaaagagagagtgtgatcggaaatccaccggcgggggttagctccgcacgaccaacaccgactctcacagcgattagccccccccccccgacgttttcgattcgatcagtccaataaaaaaagcaaaattactttaccaatcacttaccattgccgtcatatttt

SEQ ID NO: 40202 - DNA, 1402 bp, Heterodera glycines
caagttttcggcacggaacaacacatcaatgcatggcacgggaggaacatttaataacaatgccgtacaacaatatcaacaacagtcatactgtatggagatgaattacagtaggcagaagatggaacgaagacgggctgaccgtgtggtaccaatggcaccgggacaacctcagccggcacaaatcctcatccgccaagttacgccagttgagaatgtaaacggcaggcctagaacatcgatggcacgcttttgagaagagtcgagaaattttttgaaataaattacgattcaacgaagtgtgtgatttgtcatttttttctgaatttgtcctaattcggagtgagtcatatcttaattttatttttatttcattgattgtaattatttgaagaagacaaaaacccttgattccaagttttgtctattaaattaatttaaaatctcattacatcattattttaagtgaaataatgaaattttaaaatatttcaaaaatattcattataaatatactcaaaaactcaaaagttagcagatttttgaaacgaaatctattttttagttttacaaaattcttgattattgaaatctaatttttgctataatcaaaatttttaatccattagagatgagagattacaattgataaaatatctcttttttgcattggatattattttgggaaagaaaaaatagcttggaaaatgcccatccaaaaggagccgtattggagccaaaatcgttttgtgctcggatcaacaaacaaattagggtcgatggcattgaagttgtctttttcgttagattcaagtatctgaaggatttctgagtcaggcagggtctggaaatctagattttttggcttataattggatcagaatttgcattcagtaaaaatccatgaaaatggttaaattcggaaaatagattccaatgttattcactagattagagtgaaacttttttggtattctgaaccgcctaaaatcagtttgagatcatgatatccagtaattttcatgcaaataaacttaattctaattcgggagacaagattgaattccatgatacgttattttcaagggatcattctctggatctatactaatctaaacaggatgttgccactttgtacgacttacccatcctaaatcttgccaagtgcccggccgaccactgctactcactgcccgtccaatcaccgcggtatgagtgagcttttgctgaggattcattaatgtgccgtcaactggcacgcagtagaaaagccaatatttcttatccttgccctcgccgtacggccccgaaacgtcgggtgcccaaaattcgttgtttcttgccaaccttaacaaattcgttcatgatgatttgaatgaagggatttcggattgtgccaact

SEQ ID NO: 40203 - DNA, 60 bp, Heterodera glycines
gcccataagtaacaagccaggataattttgacattgttacttctaagccctagatctcgc

SEQ ID NO: 40204 - DNA, 1536 bp, Heterodera glycines
cgtatcgatcgtcaaatttgcacttttcgtcgatcgccaaccacggttttttgactaatgacccgcaccgatgggacaatgaaatggaaattcgggaaaatatttacctgaaaaggggaaaatttaggaataattcaacaaatttataaaatttaattatttgagaaattttcattgttcctccacaggattagcttatttctttcctccgggctgtctgtctacctttgtccgctcgtcaagtcgcttccggtgacaaaagcataaatatttctgcattcatagtttagatcagggcctgtcagatgaaaattttcaaaatcattatttttctaacaaaaaataagcattttgaaaattttattactatcaaaaaaatacaataaaaagtttttttgcggcgcgcttttcccaaaaaaactttttggggacaagttttcagcggttccgaaggcgtcgccgggcaaaattttgaaaagttgagtgcaatttgttaacagattttcacaaaaaaatagtttcaatgaaagaataaaactaatgaggcaatgtaaaaagcatttaaaaatgaaagaattagtttttataattataaaggagttataaaataaatgttttaatttgatatcgaaaacggattataattagaattaaaaagtgaaaaaacaaacttattacacatcaaattattacacaataaaagcaaattaaaagaaaaaaatatataaaatgactctaaaagatttaattacgtcaacggcccaaaagaatatataaagtaacgaagattaaaatttcgtaaagaaataaaaaaataatttaaaaaaacattaattactaacaatattttctaataaataaaatgataaaaaatgattaaaaatatatataaataaatattaaaaatcgatatatgcaattaatagtattactattaaattatttaatgcacaaaagaatataatttaaataaaaaaaattcaattaatgagaaatattcgttcaagggtatacagaacagatcgccatgataatatgcgctaaatcagaaaaatgattattcaaagcattaaaactaaattatatttagtcaaatttattttaaaataattaatttgtttatttaattaaattaaatattaatttatttaattttcaacataaaatacattttgattaattctttaataaattttcaagtgtaaaattttgggatctctttttaaattaaattttgcatattcgaattctttattttaatctaaaaataatttttattaaacctttttattgagccaatttagataataaaaaatatttaataagtttaaaaaatttttcgactcgtaaaaatgtatgttaaagcttaagccaatcaatcataaacacatttgttaaagtgcaattattttaatatttagtaaattaaaaagtaaagcgcgcgggttcaattaatattataataaaagtgctaaaaatagacttcgaaaaaaaaaatgattcaaatttcaatagtttataaattaaatatttcaa

SEQ ID NO: 40205 - DNA, 681 bp, Heterodera glycines
ccctctctccctctctctctctctccttcttcctcttcccccactccctcttttccatctctctcatttctcctcatctttcgcttcacatctctctttctctccctcttcctctaccccaagtcccctttttccacttcctatgggaaaaattttaattttgaactaatattttgtttattttatctgataaaattttccaagaaattcactcccattgatcgaaacatttgatattcctattaagattaaggttaaaattatttttctcaacgagaatgaaaattcttttctcaaattaataatttgacacattaaatagaattttatttattatttttcgtgaattataaatttagttttaaaattgaatgggttaaatttttcaaaaattttaataattttatgaaaaacgttttgtctttattttggcaatttgtaaccggattttttcttttatttcctccattcttttggaatttttagtccatattattttgggttttgaccatataaatcggctctggtattaatttggatatagcttgtttttgcaaataacagaagctttatgccaaataattattttctgtaaatttaaatcatttcaaaatataaataatttaattaattggccttttgtttccaagcttttttcccattgattttttctcatttata

SEQ ID NO: 40206 - DNA, 991 bp, Heterodera glycines
  unsure (1)..(991): unsure at all n locations
tttcntggcgtagaatagccatttgaaaattctctgtgaattaaaatggtcattgctctccggcccttgactcgctttttggagcatttttgaacacaaaattactcagaaaaagaggtagccatttttctggcgtagaatagccatttgaaattctctgtgaattaaaatggtcattgctctccggcccttggctcgctttttggagcatttgttgaacacaaaattactcagaaaaagaggtagccatttttctggcgtagaatagccatttgaaaattctctgtgaattaaaatggtcattgctctccggcccttggctcgctttttggagcatttgttgaacataaaattactcagaaaaagaggtagccatttttctggcgtagaatagccatttgaaaattctctgtgaattaaaatggtcattgctctccggcccttgactcgctttttggagcatttgttgaacacaaaattactcagaaaaagaggtagccatttttctggcgtagaatagacatttgaaaattctctgtgaattaaaatggtcattgctctccggcccttggctcgctttttggagcatttgttgaacacaaaattactcagaaaaagagatagccattttctggcgtagaatagccatttgaaaattctctgtgaaataaaatggtcattgctctccggcccttggctcgctttttggagcatttgttgaacacaaaattactcagaaaaagaggtagccatttttctggcgtagaatagccatttgaaaattctctgtgaattaaaatggtcattgctctccgtcccttggctcgctttttggagcatttgttgaatataaaattactcagaaaaagaggtagccatttttctggcgtagatagacatttgaaaattctctgtgaataaaatggtcattgctctccggcccctggctcgctttttggagcatttggtgaacacaaaattactcagaaaa

SEQ ID NO: 40207 - DNA, 1017 bp, Heterodera glycines
  unsure (1)..(1017): unsure at all n locations
tgtgtcaatatggaagacgaagacgcncctgcttcggaagaggtcaaaatgttccgaagacgcgaatttgcttcgcgtttttgtttccgctcttgaccggtcgttaaatatctctttctaggcataaaatagtaataaatttaatctgaaaaaagaaatgcctaattataacagatttgtttccaagtaaaaccaaaataaaataatttcaaaatttatcgaattaaaaatatgatttatcgtcagttaaggaaaaacggtattgtgaattaacaaatgaatagtgaagacactaaggaaatgtggagaagaatagattgcttttatgctggtagaagagacgaggtcaaagatcatagtgagtaggatacgcatcaacaaaagagaaaataaaacacaatcaattctcattgagaccatagacaacaaaattaacctttttctctttttttactcattaaacttcattagaatgaaaaatagaatttgaaaattttaaaaataaaatagctataaatgaacattggggactcgaacccatgacatcacatctataagggcaggcacactaaccacttgaccaccaagttacttgctcacatcccttttaataaccttttccctttctttctttttttgaaaaaatcctgatcaaaagtgcttgagctccctttttagggcacttcccggacccggacccaaacaattttggtatcattcgaaagcccagactttgtagactgaggcaaattgtttcgattttcgatttgactatttttaaggtatgcaaaaaacgttcaaaaatggaacatctcaaaaaagtgcaaattttgactcgtttttcgaacacagttcgaacaattcttaaccgattgggatgccgataatttttccttatagcccttaaaattccacgtcgattgaccccactctcgccccgtaaaactcgctagaaagccttaaattagtttttaagtgagttagagggggtagattcttcttatatagggaatatat

SEQ ID NO: 40208 - DNA, 85 bp, Heterodera glycines
gcggcgtggaagcaaggcaactcgatccagctggatcctgcagcgctggcgttcgtgtttacgaccacgccgcagccggcgtcgg

SEQ ID NO: 40209 - DNA, 82 bp, Heterodera glycines
cctcaaggggccgagggtagcggctccactggtcccccgccgcccgccattggtcaccttggcggtaccggcgggcccagcg

SEQ ID NO: 40210 - DNA, 867 bp, Heterodera glycines
  unsure (1)..(867): unsure at all n locations
tttcatagtgaggaacggccccgtgggttcgaatcccaccgggcgtgttacctttaaatacccaaaccctggctttaacacaaagcaaccaccagcagggcacgggtttgggtggatgaagaatgccgaagaacaacataaaaataggcgaaaagtctccgccaaaaaagagttaaaaaagtgccaaataccgtacccattcacttgctgaacacagtatttgcttaattaaatgtatgattctcggaaattatttcccatgcacaaaaaaacattaacacgcaacaattatgtgaaaaggcaattaggtattttccgagaaaattaaggtaatgccgtgacagtgaataaaagcataaaattgcatttttattggtatggcactcattttttttatacataaaaacttactcaaaacacttaattttggttatatttcaattataaataaaattattcaaaattttatagtttttttttcgaataaggacaatttttaaaccaaaatttttttatgaaaaaaaaaattaaattatggcgatcaatttttgaaaaatttttcaatttatagggggtttattttcagaaaaattttcgggacgtttcttaggggttatcttttctttaattgcatttttgttaggatttttccaaaaaacctgaaaattggcacattaagcacagaaaaacgaaataggcaaaaataggcattagaaaagtcagcgtttaatgcccaaaccnngcgcaaaacgcgtctttcgtgcttatttgctgagcgtatgaaaagaaagctacttataattattnaaatttattcagaaacaaaaatttcatttgatttttaataaattaaccggttttgaattc

SEQ ID NO: 40211 - DNA, 1072 bp, Heterodera glycines
ggtgctaggtcgaaccgaaaatagtctcagtgtgggcgaaccgaaaaattgtctcagtgtggtcgaaccgcaaatagtctcagtgtgaataaaaatatttaaatttaattatacgatttactaaatcatgtaattatataaaaaaataatagcgtgtgaatcaattttgaagtcattttgacattctaatctaattgaatttttaaaatttattttgggaaatttcatcaggtttcttttaagcgtttttcatttttcatttggtacacttatctttgacccataaattttattctttcgaattattcaagttaattcaagcataatgtaatcttatgatatttgtggaaaatttaaaaaaaacgtttataaaattattttttatataattatatgatttagtgaatcgtataattaaatttaaatatttttattcacactgagactattttcggttcgtctcagcacgtgtaaaatttaaggaaattatattcccaattgtttttgcctgcgcattgctcccactgattttgtacaattgcgttcggatcggatagaccaagtcgaatgtgcgttcgaattggcccatttgaaatgccacaatgccatcgcacaacgatttgcccagcagacgcgtaatccgcgcattgtccccggtaccgaaactgaacaaataattaattgttaccatttcaaatgcaaaaaatgcctgtcaaactgtgaaacattctccgagtgttccgtggccaattcgctcagtttttcgtttttctcaggacggttcaacaccaaagcgatgtgcgcgtcgctgaatgccagcagctgatcggcgatgtgccgttccgtgagtcctattagcgcgtgccatcgttcatttccaacttcgacgccttccaattcgagacgagctaacaaagaagcggcatccgtcagactgagccaagcgccacccgaaagggcacggtcgagcacctcactaagagagagagaaagagagacagaggaataatttcacagaacattggcgaatttgcgatttattaaatgaatagccaccaacttgtcataaact

SEQ ID NO: 40212 - DNA, 1491 bp, Heterodera glycines
  unsure (1)..(1491): unsure at all n locations
cctttcactcacattgtcttttcgttcgtggcatcaaactgaatggacaccaaaaattatcattgtacaccaccgtttgcgtttgccattgggnnnggcattcattcttttctttacctgtccatttcgatgtccgcttcactaaagctgacaatgaacagcaaagtgatcaaagagaaaaggctgagggggatcaaaagggacgtgcgcattttgggagaaattttgtggttcaattgccggcgaagttttgcgggaggcccttttaaagcgcgggggggggggcgagcgaagaccgacgaacaacgattcttcgagagaattgcgcgattggctgccaaacacataacgaaatgagtgtaacaggccaatgatcggccatttcatttgcaatatcttccgcccgcatagcaaacaaggcgaggtccgaacaatctttggttttaaaatgcacaaaactggttcaactcagcggattaaatgtcaaattaagaattgatcggaagatgggacttttctttttgtgttttatagctcggtttccaaaccaaagaaaaaagtatgggcgaagagttgtaaaaagtatggatgaacaggctttggggggaagggccgtttcagctcgaataatcaaatttaattagttagatttcagggctccgaatccgtattcaggaacttttccgggtccacctttttaccccgggtgaaacttcaataattcacgtgccccccggatttacccattatgtttttacaaatatcgaatattaaataataaaataaatcagttagtgatattaaatttatcaatcaatatactaaaataattaaatttaattgagaaacggcacttcccttcagaaccctcacatccattcttttttcgcttcgtcatagcacctaaccggtaaagatgtgcgagaatttttatgaaaatcaagatgagaaatttttactaccgaaaaccccgatccgactcattgttaacaaacaccacatgaaaatggcatttatatgagggaaaaggttttttttcaattttgttatttctgctgactcaaaatagctttgaaatggctttaaaaatacggctttgtttaagcttctaacatgcatttttatttgacttttttctactttttgggatttttatgatttttttgcaccaatcaaccctcccccattttcagtggtgcaaaacagggatggaattccgaggcaccaaaaaatttcggaagtcggaagtccgaggcccaaaaacttttcggaagtcggaattccgaccccaaaaatgtcggaagtcggaatttttcaaaaaataaaagaatataattaaaattttttaaatatttagtaggctaaattttaatgatttcaaactgtttttaatatatttatttgaaaattttttaatgattttncaaatatttttatgtaattttacattattttggaattttttttgggacccgtacacccatttttttt

SEQ ID NO: 40213 - DNA, 1062 bp, Heterodera glycines
  unsure (1)..(1062): unsure at all n locations
aaaacactattttaaaaaaaaaagtaatctaaaaaaaatttnataaaaagccgtaatccatgagaagagctgagacgcaagactttttaaaaatttttattgttcacctaaaaatcgattaagactttctattaatttaaaagccaatttcttgacgcttttcctaacaaatttttgcttttattttaattttattcaattagcaccaatttataaatccaaaaaactcaagttttcattatttaaggactttcatgtgataatttttgaactgcttcaattttgcggatattttattttttttaaaggattccaaatttctgtgacgtcttctaactgtgtaattattataaaagtgatttgaaaattgagaaagcccttcattaaatttgtaatatttttctccttaaattttgaatctctaaacagattgttttaatttaccaaatgaaataaaaaaagaaaatcatataaaataaattaataagctcaaaataatttttttagcaaaatttaaaataataaataaacaagatctaattatattttatgaaatcacatatcaaacacaataaaacaagactgaacttttaaaaaattttaatttaatattttattatataagactaattttttagccttaattaaaataaataaacaaaataaaagataaaattttgtttgttagaataaaaaaacatcatattccaaaagggagattataaaattaatttaactgattaaaaattaattaaattaaatacaaatttaaaattaaaaaaataaaagaaatcaataaaggnatnataataaaaaataataataatntnanatnattgataaataaatnaagataagaaaagnagggtaaattttatttngatttgggtgtgnaaattagaatataaattaaggaattaaatattatatatattttaataatataaaatatttaatgaaaataatttatatttgaatatgaatttttaattatatttaattttattaatgtttnattaatattnattaaagaaaatttaatagttatgttataataaattt

SEQ ID NO: 40214 - DNA, 1179 bp, Heterodera glycines
aaaaaagaataataattatatacttcaaaaaacagaagatttaacatcttaatattttataacaaggagttaccattgagaaaataaataactttaaaaaacataaataaattttatctatgagtgaattatcaaaataactcaaatgtgtactatttgttcccgtttatctctaatccttattgacacaattgtggtttgatattcattaagctataaacgataagatttattttcgtaaaaatattaataaatgaaatattaaaaaatgaattatgataaaggttttcaacatacttaaataaagaataaacaaaaatgaaatgataccagcattaataattgaattcttgtggaatgaatgacattcaacaattgaaaaatttagccaaaaaataataaaaatatttttatttaaattttaatatttattttcaaaccatttagacgaaaatcattttttattataatttataaaactaaaatataaaaaatttttgtttgttaattttaaatataataaagaccaactaaaaaattaccaaaattactagtaaatcaaattcaaatttataagtacaacaattttagcaataatgatatagtttaatgcagtttaaaagaataagggtacattttaaaataaaattgaatatgtttatcattctaatagaaacgatttaaataaaataattaatacaatcaattttaaaattaatcgaggaaatattaatagagaaaataaatattctataataatctcaaaataattttttaataaaaaagttttaaataattttaataaatcttataataaaaaaatgaataattatttaaataaacaaaaaattttttaatacgatattgattttaaatactaagaaattcatcatttacttcccaaattttcagacttcgtgcagcaggaaagttattcaaaaatttgaattttaaagggtacttgactactaattatgtttgttctatttattacaaaaattttgtaatttgagagagaatatgtcaaacaaaatcagcagaaagtttaaaaagcttaaaatatttcgaatggtataaataaaataaaataataaaaaaaatttaaagaaatataaaaatgaaaataaataaatgaataatatataaaatattctaaataacagctaaatgcatagataa

SEQ ID NO: 40215 - DNA, 906 bp, Heterodera glycines
  unsure (1)..(906): unsure at all n locations
tctttgaagaaaacaaaaaaacggaagaaaggcggtaatttcattttttgattaatttttattctctttgtttttaattaatttaattaattttgggtttttattttattacgctaattacttttcttattaatgatcttgatttacaaattgacaattgatttatttgccatagtaaaaatttgtttaaaaacagtttacgaatggaatgatacagatcgtcatatttaaatgttttttaaatatactttgaaacgaatccaaaagtgtgatattttttgccattgatgatagctcagaatgatttctgacttgagtttttctccactaaattttgcggctctgaattaaattacctcaaaacaaagattctttattttatatattcatccgtttaattcgttgaagacaaattaagaaagataaagaaatatttcaaaatccaagaaagaaatccgaaaattagcgacaaaaataattgataataaattgcaaattggctatggaacgctaagaatttggaaaaagaaattttcttaagttttggagagtaattctcgagggtgttaatttaactttcctggttttcttttaacacctataacttgaacgaaaattacttcagcaaatctcttaaaattaaaagatataacatttaataacaaattttaatttaaaaaaatataaaatattttgaagaattgatttaattgttcggtttacgtggcagattaatatttgtaaagataaataaaatgagatacttttctgttttggggcccaaagttgatttttttttaatcaacagcaagctaatagaattgcagatccattcgaagagatattaactcaaattatggcatttatgcctcangaaataatttggtgtgtagctttagcaattct

SEQ ID NO: 40216 - DNA, 1056 bp, Heterodera glycines
attacttttggactaattaatgccaattaacgaacatttaagagaagcgaagtgccttttcctttctgaaacggtcgtcggccattcgaagggattaaatgccgaaaaataaaagaacgaaatgcaaatccaacagcagacactttttgcttgatattcacatattttgcaattctcaaattcgttccaataaattatttccgaaatgccccaaaaaaaattggccaattaatcattcattaaataaacaatttatccattatatttggattcacatgttcaacataaagttcaaatgagttaaataggcaattgccccgcgaagaatttcaattttggacattttccggcccttcccctggcggtggtgggccgacggcggcaacaactcgcgcacatggccaaatgcgcgattgaacgcctcgactctctgccgttctctgttcgcgtgtaaactccgatattttggagtcgccctaaaatgttaaaataatcccaaaatttgttgaaattaacggcaaaaccttctcagtcggcgtctttccgcccgtgccaatgcctttttctgctgatcacatgccatttgacccatatttggaggaaatgaacacaaatgaaatgaattcgccaaagcggcaaattcattttgcatttttcccccgcggccaaattaaattctctcataattttccctaagggaataaaaacccaaagcgccacaaattgaatccaattagccaattcaatccggcgaagctcttcccccatggaaaaaattggggggggggggggtgggggaattcatccatctcttttcgtagtttattcctttgcctcttcctccgcctcaccgcctcatcatccatcatttatttgtcatcattaacttcgtaatcatcatcatcattcatcgttttgatcatcattcccccccccctctccgccgcttttctctctcatcgcagccgaattgtccccgtgccgtcagcctttttctgacagattgttgccgcacatcgtccgacaacagcttaaagcattggtcaatgtttttgt

SEQ ID NO: 40217 - DNA, 1015 bp, Heterodera glycines
tctagagtcttatggcaaatatgccttaatattttttaattctgagattttaatcggaatgaattggaaaatgagcatggaaaagtcatggtaatcgggccaatgaattttaggaatcgtaaatcttttggcattttttgttttattaaaaaaaagtttgatcatataaatgaaggtcgaacaaagaagacattcaaatatagtaaaagtagaaacaatgaattttcgtaatttgtttttttatcaaatatttaaaaaatattgaaaaactctcaacaatttataaaattaatgtcccgccggcgtttccatccgatgcctttggccaaccgttcattgcccattttttgctttcttttcaaacgaatgcttttcctacgtttgtgtgctgtgcgtgagtgagtgtttgctgtactgcaaatttttatttaattataaattatcatcggcagatgacttaattaccaattattattgtccatccctttttctttttttgttcgggagggtaaaatttatgttttatgtaaattaaattactgaaaatggtcgaaagaccgtcaaacgaagatgaagatgaatgggttcattcatacgacattttcacattttatcaataaacaaatgaatttttgatttttaaaaatgactaatttagtatattatttaaattatgaatgacagatttttatatccgaattttagcaaaaggaaaattaaataaaaggagttgcctaaaaagaggtagaaacataagtggcattttataataaaatgacaaaaattttgaactgctctgttccacaatgatgcgcgctttactcagcatgtttttttgttttgtttttaataaaatcaaataataaattgcgcctgttaattataaattaatttaaattaaaacatttttaaatgctgacgaatgaatggaatgtttcagtgaatgccaatttgtttattatcatccatccgtcattcctttctcgcccatttaccgcactcattgtcagtccat

SEQ ID NO: 40218 - DNA, 1112 bp, Heterodera glycines
  unsure (1)..(1112): unsure at all n locations
aatcgattgggctgactagactgcatatttgcaganatagcaatggcagtctattcttaaaggcctgacgagttatgttcgacaaacatcctgtacaccataaatcgatttgcaaatttagtcgaactatataaatttttcaaaaaatgattcatcttttttatggttagcgcatatgtctctagctttatagaaacggtccccgaatctgcgaggaactactttttagagaatttctatagattattattttgcatgaatccttcgcttaaattcccatttatcttataaagtcagattaaattaattaccccgatttgttttagaattggtccaaacacgcttgctaatagcttttcttttcgaaaagagaggcgaggaaaaataaaggttgcatccaaatgtaatttttttttacattgaagcatttggatggcttgctgtttacagttggctaagtcttctttgcaagaagtagcacaacttttgtttgggccaacgaccccaaaccattcgaatagcaatcgattgggctgactagactgcatatttgcaggaatagcaatggcaggtctatcttaaaggcctgacgagttatgtttcgacaaacatcctgtacaccataaatcgattttcaaatttagtcgaactatataaatttttcaaaaaatgattcatcttttttatggttagcgcatatgtctctagctttatagaaacggtccccgaatctgcgaggaactacttttttgataatttctatagattattattctgcatgaatccttcgcttaaattcccatttatcttataaagtcagattaaattaattaccccgatttgttttagaattggtccaaacacgcttgctaatagcttttcttttcgaaaagagaggcgaggaaaaataaaggttgcatccaaatgtaatntttttttacattgaagcatttggatggcttgctgtttacagttggctaagtcttctttgcaagaagcagcacaacttttgtttgggccaacgacccaaaccattcgaatagcatcgattgggctgactagactccatatttgcaggaatagcaatggcaggtctatcttaaaggcctgac

SEQ ID NO: 40219 - DNA, 857 bp, Heterodera glycines
tatcgaaaaatgtaagtgctaccagaatgcaagcaaagtgtgtctacattgtcgcatgggcatgaaaaaacactagaatgtagcaaaaatatggaacaaaaataattaaaattttaaaaattaaattaaaaataatattcgttcaaaattgcgacagtgatatgagaccattggtgaaaaattaaaataatctttgatttacgtaaaagatataaaaaaatgaataaaaagcaaattcataaaaaataacattttttacggtaaaaaatataataaatatttttttataataaaatttaaaaaaatatataaaagagacctgaaagaaaatttttgatatggatgtcgagcagcatgaattttatgaaagcaatcatcaaagtttattattatactaatttaaaaaatacgaaattaaattatttttaaagaaatattcatgccaaaattgttaaacatgcatggcataagaatccagtaatttattttatatgtatatattttttattcaagttcctcaaagaaataacacaaattagaattaatttgatttaaattaagaatccaacaaaatatttccaaaaaaaagaaaataataatatcattcctttaaatgcgacagcaatctattaattgaattctcaaaaattttagatatataagacaaatcatggattatcccgcaatgtaaaagaacacacaatgtttcgaaaacgaggaaataaattattaaaagatatagacaaaaatataaattcaacattaaattattttaaaaattaaactgacaaagtcagaaaatttgagatgtttgtttattaattttattgaaaataaataaagaagaaaaccttaaa

SEQ ID NO: 40220 - DNA, 1319 bp, Heterodera glycines
ccctgcaaagtttggtacgcttctgctcaattagcaaaaaatatgagtgatcgaattttcactaaaaaagttaagcctacattttttggcatatttaaaaagcaattaaaaaatttttaaaatttaataattttcctgcaccgaaggtactcactcggcctcttcgcggcctcgtggtgggccttcgccccccccccccctcccacgcccttcagagcacgacaaatatttcaacaaaaattttgaaaaattgactagagcaatcgaacgctaacggacgacctaatggaaaaaaatccccgaaggagagaatttaattaaatccattccttcgggggaccgtgccgggtgccgcggggtaagcagtgctggttcgtttcatcacggcaccgaaccttttggctagtcagcaatcgttgcttaacttgccagatcggacgggtgcgcatgactttctgaaaaaaatatttatgaaacaaaaaaatcgattttttcaagtgtccgtttggggtactcaaacatttatggggagcaaaaatccaacgcagaattaaagtacaggctatagggaagctattcccgaaggattcggtctccccataaatctgggcgcatcggttcggggggactgccccgaaaacaaaaataaatcgattttttcaagtgtccgtttggggtactcaaacaattatggggagcaaaaatccaacgcagaattaaagtacaggctatagggaagctactcccgaaggattcggtctccccataaatctgggcgcatcggttcggggggactgccccgaaaacaaaaataaatcgattttttcaagtgtccgtttggggtactcaaacaattatggggagcaaaaatccaacgcagaattaaagtacaggctatagggaagctattccggaaggattcggtctccccataaatctgggcgcatcggttcggggggactgccccgaaaacaaaaaaatcgattttttcaagtgtccgtttggggtactcaaacaattatggggagcaaaaatccaacgcagaattaaagtacaggctatagggaagctattccggaaggattcggtctccccataaatctgggcgcatcggttcggggggactgccccgaaaacaaaaaaatcgattttttcaagtgtccgtttggggtactcaaacaattatggggagcaaaaatccaacgcagaattaaagtacaggctatagggaagctactcccgaaggattcggtctccctcataaatctgggcgcatcggttctaggggactgccccgaaaacaaaaaaatctatttttt

SEQ ID NO: 40221 - DNA, 1260 bp, Heterodera glycines
  unsure (1)..(1260): unsure at all n locations
gggggggcgcacccccaccaggaggccgcgaagaggccgagtgagtaccttcggcgcaggaaaattattaaattataaaatttttttaattgctttataaataccccaaaaaatgtaggcttatctttttgagagaaacttcgacccctcatattttttgataagggagcagaagcgtaacaaccttcgcagggatcctccccggtaaaggactaacttccactgaaatgagcgccgagctagctggctcaaaaaatttttcgaaaatctgagtctttcgtttttatttatttttcgcaaaattaattcttaaatatttttcagaaagggttctgaaccgcaccaaattttatttacatgttagtttaggcactctgatgctttttctatcaaaaagggagatgaataaaatttttaaaaatttttaattcctttttaaacaggccaaaaagtttaggcttaacttttttttcagaaactgatcagaagcgcaccaaactttgcagggatactgaaaggaagagaaataacctattttaaatattatctagtcagttcatttaaataatttttatccaaaaaatttttttttgggttttcggggcagtccccctgaaccgatgcgcccagatttatggggagaccgaatccttccggaatagcttcactatagcctgtactttaattctgcgttggatttttgctccccataattgtttgagtaccccaaacggacacttgaaaaaatcgatttatttttgttttcggggcagtccccccgaaccgatgcgcccagatttatggggagaccgaatccttcgggaatagcttccctatagcctgtactttaattctgcgttggatttttgctccccataattgtttgagtaccccaaacggacacttgaaaaaatcgatttatttttgttttcggggcagtccccccgaaccgatgcgcccagatttatggggagaccgaatccttctggagtagcttccctatagcctgtactttaattctgcgttggatttttgctccccataattgtttgagtaccccaaacggacacttgaaaaaatcgatttttttgttttcggggcagtccccccgagccgatgcgcccagatttatggggagaccgaatccttccggaatagcttccctatagcctgtactttaattctgcgttggatttttgctcccccataattgtttgaaaagcccanaacggacacttgaaaaaatcgatttttttgttt

SEQ ID NO: 40222 - DNA, 277 bp, Heterodera glycines
tataataacgctgcggacatctacatttttgaattgaaaaaaaattggtaattactctttctttttctccatattgaccatcatactcatactccccccacccttttcttcttccgccacccacctcccccgctacgcgccgctcccctccctctcttgatagtttaaactggaggcgggaaacgacaatctgatccccgtcaagctagcttctgcaggtcctgctcgagcggccgcccggggatcgatccccgatctagtaacatagatgacaccg

SEQ ID NO: 40223 - DNA, 923 bp, Heterodera glycines
tgttgggcaaatctatgacatttaaaaaaaattaatttttttagataaattcgattaattttgttgcaattcccatttctttcttgctcacctgtttgtcactttgctgcacaaatttgacgggtttctgattctaaaaaaaaaaaaaattttttttttaatacatgcaaggtaatataaaaaaattcgttgacctgcaacagcttgaacatgccggtaccaatgcccatcggtgtgccaataatgatgcactcgctgacacccgaaattcggtcctgttggccaaagaaggcggcctcgtaactacaaaaattgtgtgggaattttgcggtgcagctcagcgccccccccccccccgactcttccgccctccccgaaaataaaaaataattctaacttaaaacttttttaaaagaaaatttctagaaaaatatttcatcataaaatttgacaaaaatcccaagaattttaataaatttattaagaaattagtccctaaatttgaatgaaaaatagtaaaccgagcaaaatcctcctgaaaaatcaggcacgaacccccccaaaatcgggcaaataaaataattcccggtttccaaggcccaaaaaaaggtctgaatgtcaaactcacaggtggtcaatggtccgctcaaatgaggccaacagcagcacggactccttcattttgaccagcccatcacgcgtaatgcccaacacttggccactgaaaaatttcaaaatttttctttaatttttaatgctccccgtgctcaccggtaagtcatcaaatcggccaacaattgcacgtgccgtctgtccaactcaatgccgtgttcgcccattgtggtcaaaatttcggaaatgattgagccgcgtgccgcctcaatgcccagcacttcggcaatcaccagggcattgttgaacct

SEQ ID NO: 40224 - DNA, 724 bp, Heterodera glycines
ccgccgggggaaaaattgagcattttgaccatatttttagcagattttcattaaaaaattctttattttgtggttttttggaaaatttaacaaaaaaccacaaaaagcctcaaaatttctgaaaaaaccacaaaaagcctcaaagcctcattgtgtgtgagagagagtgagaggagagaggaaaaaaatatagaagcgatataataaatttaataattttttttattaaacaatttatgtaaaaaaaaagtccaacattgaccccttgaaaacagcaaaatgatgataaatcagcagaattggcaactctgatttaatatacatatctatttcagttagaccttcaaaacattcaaagcaacactaaaatgatgcgatctattgctgaagagaaaggcggtttactttcttcgacattccaatttcttgtacaaagtgattcgagtgaattaaggtactttcgttagttaaaaaagtaatatttgcttgaagttaattgccaattaaaagatcattggcgcttttagaaaaatgattatgtttcaagttcctattcatgaaaaacttattcttttgcttctaggagtccctgatcacgaatctgaacatctattttgacctattactatttcctaaaacttaaatcgaaactaagtttatttggctcttattcagtttgtccccgcataaatttttttttaaatttctaagtaaaaaagtcaaa

SEQ ID NO: 40225 - DNA, 1082 bp, Heterodera glycines
catttgcttaaggtttgaccggctatgtgacggtggaaactgatcagaacacgcgggtgttcgttttgtccaatcgcaattatggccaaggaaatgcgctgcagattttcatgcaattcgcatgggtcgatggcaaattggtgggcttgacaaattagcaacgttctaaattaaaatattttctctcaatcgtcagaatgtgacgttgcgaaatgccagttctgtgatgtgggatacccgtggtggggtcattccccaggcggtgcccccgtgcggcttcgatggcaacggttgtaccgtatcggtgtttgagttgtacaaagtacgatatattaattactgtaacgttaacaattttatttgctattcaaaaggggtacttcataagcggaattgttctcttcgtgctaatcataggcagcagtttgcttatcatggtctatttaatacagtaagaaaaaaattgctgaagtattactgtagcctaaatgtttaaatttcagttcgaaaattgttgaaaaccgtaaaaccaacttactgtggcaaattccatttgcgatgatgaagcgagtgaagcaacgggtgagttttataattcatcccaaatcattttctaatttttatccccccccctatttaagcatggcgccgagcggagtcaccactccctccgttccaaccaaacgaacgtttccgcgctgacccattcgacgatggacagtttggcccagtccaaaaacttctctctgtacacttacaacggggacaagtgcattgtttgcacgtttgggtcaatgacagccgccgcgccattgtctgtcgctgaaatggccgagtgccgagcggtgattggcgagggggggggggggaaaggatactttggcaaagggcagggaccatccaagggggtaatggggtacgtatccccagcaaggataaagctcttaaaaaaaaacaaaaaatgccatttcaatttaaaattttaaataaaattttcaatgcccctattccaccacaaaaaaggacccggtttttggggctgattttggacgggcccaatgggttgggcggggggaactttt

SEQ ID NO: 40226 - DNA, 1250 bp, Heterodera glycines
gcagtccgttgcatgccaaaacggtgatctgtccaagtttgaataatggtaagcaaatgcctaattaggagcaaccgaatttaattaagggacgaaaaatttgcggatgagtcacacaaaagaggggctcgataaatgacaatttgtaagggatcgtccgtcattttcattaaagccggattatttggcaaaattctggcacaattaacttctcttaatgaccctcatttgataattctcagggaagtgatgtatgatcaaaacacaaattttgtttgtttacgatttaattaagtaaacagccaattgcttaaagtgttcggctccattggcactccgtgccaatcacccgccctttgtcccccggagatgtcggcttgtcgcccttttctcattgcccgccaaaacctaattaacctttttatactcattataaattgttgtaaaacacggagtgagcccaaaaaggtggtgttgtttatccccttctctgctctaatatcatttgctcatttgtccacctgtaatgccaaattggccggctcgtaagccatttgcagggacacgctgcccctggcgccgtccgggcccaactccaattcgggcacccccgtcgtgcccatcagtgcggcctctgctgctgcagtcgtgttgatgctgtgtcgtttacgctcgttgctgttcatcatcatcattttgttgttgtggttggcattatgccgttcttcgatgccctcgggcggtgcggcaccgtaagggatgaagttgagcgcggcgaacggactctgttgttgctgctgctgctgctgctgataccccgcggcgacggttccgtgcccataaggcgacatgggcgacaaggaatgtgccgatgcggccgacgacgagtaggaggaggacagcgagtagtcggagccgccgggcgacgagcacttgcgcagcgattggttggagcagcgcaagtactggcggggcgggcggcggtggaatcgcctgactcagccgcccgccggtgctgtgcccgccgtaggagcgcttgtgaataagcggcgagcggaaggagcccaccgagccgctgctgcggcgacgcttgcggtgctgaacggcggcgaacaacgccagaagcattatgaacatgcagaaacccgcgccgattgccaacatttggaagccttggaaattgtggcatttttaaagaccgatctaaataccctaatcaaaccgtggatggatgtcgagttcggtctgac

SEQ ID NO: 40227 - DNA, 1228 bp, Heterodera glycines
ataaatattttttagaacgtgctctgaaacgcaccaaatgttaattaaaagttaaataaggctctctgatgctttttctatcaaaagggagatgaataaaatttttaaaaatttttaattcctttttaaacaggccaaaaagtttaggcgtatattttaaaagtttcatcgaacctagcgcactaaaatcgatataatctctccaaattttgcaggccttctccattgtaaaggactaacttaacctgaaaaaatgccaacgcttgttgtttttaaaatttttcgaaattctgactttttcattaattatttattattttgcaaaattaattcataaatattttttagaacgtgctctgaaacgcaccaaatgttaattaaaagttaaataaggctctctgatgctttttctatcaaaagggagatgaataacatctttttaaaatattttccttatattttggttatttcgttctactttcggtggggtgcttggaaaattggaatcatgcgtacccgtccgatctgacaagttaagcaacgctggctgactagtcaaaaggatgggggccgtgatgaaacgaaaccagcactgcttaccccgcggcacccggcacggatccccgaaggaatggaattaattaaattctctccttcggggatttttttccattaggtcgaccgttagctttcgattggtctagtcaaatttttttatttaaaaaaaattaattaaggcactctgatgctttttctatcaaaagggagatgaataaatattttaaaaatgtttaattcctttttaaacaggccaaaaagtttaggcttatattttaaaaagtttcatcgaacttagcgcactaaaatcgatataactctccaaattttgcaggccttctccattgtaaaggactaacttaacctgaaaaaatgccaacgcttgttgtttttaaaatttttcgaaattctgactttttcatcaattatatattattttgcaaaattaattcataaatattctttagaacgtgctctgaaacgcaccaaatgttaattaaaagttaaataaggctctctgatgctttttctatcaaaagggagatgaataaaatttttaaaaatttttaattcctttttaaacaggccaaaaagtttaggcttatattttaaaaagtttcatcgaacttagcgcactaaaatcgatataatctcttcaaattttgcaggc

SEQ ID NO: 40228 - DNA, 941 bp, Heterodera glycines
  unsure (1)..(941): unsure at all n locations
aaaatctacnntttcttggcaaaaatttttaattaaaaaaatttttttaggtaattattttgggtttttggtcttacaaatcccagtcctactcatttgcaactgcaatcagtgaataaaaattattttggcttattttttggctgaaaattatgtcactatttcggactttttgtcactattttggcatttttactcactattttagttaactatttcgagatttttcgtcactaaaagttgcggccctagtaataaatgcattctctttttggtcatataacaaatgttgttgttccatttgtcatccatttttcgttggcaatttcccccatgtctcttcgtctcttcaactgatgcgtttcatcaatttcttggcccacatttggctgttgtgaaacattggcatatagcattggcacatggcactgaattggtcctcaatgtcgttgtaattggtcttccgcaaattggtcgtcacctccggcggcggctcgcacaaatttgtgtagcgtccccattcgctgaaagtgtcgccaaagcccctgcttaactcttcttaaatgggaaacaaaaacattaaatgatcatttttttgcatcgttcaccattacccatcaattcgtatgttttgtgcacttcgtggccacactggcgacatttgtacttcacctgcagcgcgctgtgtgtcaattcttaaaaattgtaaaaaatataagttatgttcagattcaccaagggtttttgacacttttagagttgcctcccgccctcctgaaaaatttcatttttttataaccacagagtgcaagccaaaagccccctcccccgtagttttttttaggagaccaaacgtaaagaatatccatttttttaatttgattcttctgaaaagttatgaagcatcaaagcagtatgaataaataatatgtgctttcgtg

SEQ ID NO: 40229 - DNA, 902 bp, Heterodera glycines
gcccaccacgaggccgcgaagaggccgagtgagtaccttcggtgcaggaaaattattaaattttaaaaattttttaattgctttttaaatatgccaaaaaatgtaggcttaacttttttagtgaaaattcgatcactcatattttttgctaattgagcagaagcgtaccaaactttgcagggatactccccggtaaaggactaacttacactgaaatgagcgccgagctagttgaaaaaaacgatttttttgttttcggggcagtccccccgaaccgatgcgcccagatttatggggagaccgaatccttccggaatagcttccctatagcctgtactttaattctgcgttggatttttgctccccataattgtttgagtaccccaaacggacacttgaaaaaatcgatttttttgttttcggggcagtccccccgaaccgatgcgcccagatttatggggagaccgaatccttcgggaatagcttccctatagcctgtactttaattctgcgttggatttttgctccccataattgtttgagtaccccaaacggacacttgaaaaaatcgatttttttgttttcggggcagtccccccgaaccgatgcgcccagatttatggggagaccgaatccttcgggaatagcttccctatagcctgtactttaattctgcgttggatttttgctccccataattgtttgagtaccccaaacggacacttgaaattcggggcagtccccccgaaccgatgcgcccagatttatggggagaccgaatccttccggaatagcttccctatagcctgcactttaattctgcgttggatttttgctccccataattgtttgagtacccccaaacggacacttgaaaaaaatcgattttttttgttttcggg

SEQ ID NO: 40230 - DNA, 581 bp, Heterodera glycines
ttgttaccatttttaatttcttcctcaaatggccatcgtccaattgcgacaatcttgatcgccggttcagtagtcctccttaacaggctgaaattgctaaggaaatgggcacaaacaagctgagtgagacagaccatggagaacagcgatttgcttcaaggaattggacgaaaaaagcaaacaacgaccacaatttgtgccgatgagcaaaaatggcattttcgaggtgccgaaatgttcgaaatttaatgcaaaaaaggcatgcgcttcctcatcaaagccaatgtaatgggagaaaaaaggtcgaatattcgtcgtcatcggaaattcttatttgtgcatttgattggaggatgattctgaaatctgaaagccgctttcattttaattccggctttcttggtccctgattttcggaaaaaacccgtttacgcgcaaaaaaaaattttgaaatttgcatattggcattatgtataatgctgctttttgaatggtgaaacattcaaatccatcgagaaaatgggtggcaagacgtttcgtcactgaaataatttttttttaaatgccaaatttccagggtc

SEQ ID NO: 40231 - DNA, 702 bp, Heterodera glycines
tcgttgtggccattcatgaaaatcgtctcaaaaatttaaattaattttaaaatataaatttaaatttcagttggatgagacagtggccgagagtttctacggcggtgtgctcgcattatattcaatttcgcaaataattgcttcaccgctgctcggctattggtcaaatcgtgttcaaagtcataaattacctctgtaagttgtcataattttaaattacaaataaataaaatataaaatattcacagtaattttaaatatttaattttcgcaaccgaaaatttgtctcaaataaataatacaaaataaatatgcacacacactgattaatgcaaaataacaccaaattcttttcaaaacttggagaccagtttacaggaaacgtacaaaaaaagcattgcttttttctttttaatatggtttttaacacgattatttccataaaaaggattttttgcaatttgatgctgctgttgagcaacattctgtacatggttttcgagctgttccccacccaaatttatcgtcgtttcgccctttgcacgtcgcgttttattgccggcattggctgggcccagctggggctgcttaagtcgtacgttgccgctgccagcctggtcgctgatcgttcccgggccaccgctttcatcaccggcggacgacgcccaacttgtttttttaagtttttattctaacatcctt

SEQ ID NO: 40232 - DNA, 1314 bp, Heterodera glycines
catggcaattcactgaattcggacaaagaggaggagcagggaattgggtcgggaccgaacagcggcggtgaacagtcggcgaccgccgtcgccaccgccccaaaaagcgcttcgctttcaatggatttcgatcactcaccgactttgttcagtgaaactggatcagaaacagaaaaaagtgaaggaaatgaagaaggcaccaaaagggagcagaaggagaaagacgcatcaacaaaacaaagtgagaggggaaaagcacaaaaagtaacgaacttaattggaaaggtgacgacgaggaagaggaggaggagacggacgagtcatcaacagcagaagagaaaggaggagaagcattgtcagaaagggaagaatgttggaagagaatggaagaagaggaggaggatggggaagaggagggtgaggaggaggaagaggaggagggggaaaaggaggaagttggaagagaaaagggacagagaggaagagggaaagaaaaaggaaacggaagagatggaagaataaagacagcagagaatggaagaggaggaggaggaaaaccaggaggggaaaacagaccaacgactgtccgttcaatgaaaaggaaatgcgccaacacttcggccggtggtcctctgttccaatatccttccgaggtcagtcgaagggccgaaaaacgaccgaccgaattcgattcacagatgtacgccgctggagaacaattttccagagaagtgaaaactaaaaatgaaaagagttacaacaaaattttaggaggaagacgcacagcaaaaaacacacggaaacaaacggagagggccacggacgacaatcagccaaaaacaggtgggggaggggagggcgagggaggagaagcgggcggacggacggacggacggacaattaagctggacattctgaaccgaatgttcgacaacacattcaaaccaacgaagcacgaaagggcccaattggcacaagactcgggactgagcatgagagtcattcaggtgaagcgaaatgggaaaagtgcgaaggaatgaacgcattgtttaggtgtggttccaaaacaggcggtcagttgaaaaggggggggcagaagaagaagcaaagaccaatcgcaggtcaaaggaacgacggcttaaacatttgtgcaattttctgcgccattacgaagaccaaaggcaaaggacagacggagaaaaaaaaagagaaaatgaggcgatttttgaaacaatggcacaatgaaaaaaggagaggagaagccatgggacaccaaagggggggggattttgtgctgtcgagtcaattaagtaa

SEQ ID NO: 40233 - DNA, 1130 bp, Heterodera glycines
  unsure (1)..(1130): unsure at all n locations
ccagcaactggaatttattatagtcgggaaacaaaccatttttttatgtattaaggctctcccaacagtcaagaactggttggttcatcaaaggaaaaagcaacaacaatttcccgcacaattagtggggcggcggcgaatgcacaaagcgcccgccccaaaccgccaacaatcactttactaaataagcagaacacatccccaaacgtgaggaggagcccaaatgagaaacccaaattctcgttcagcttgttctgcggttgatgctaatgagattgattagtggcaccggtgattaatttgtgccgtgccggcgccgcggaaattgcctttatttaagcttcaattttttgtgcatttcatcattatcattttccactcgggttgtggatataatgcaatttaaaaatataggagaagccgcgcgttacaccgttacaatatagtatataatgcctcgttaattaggtaatttgtaattattccgccttaatctaagtaaaactgaccgtgaataaataaaacgatcctgttttagacaacactataaacatgtcatagtctctctgccctcagagatttttgtcacaattgtggacacaataacacaactactaacgcaataatatcttttcatttccctattaaacgatttaataaaaaaataaaatatttttaccgtattgaagggagttggtgaaatagaggaaaagagggggcgggactatatagtagagaccggacaactcggttcggagggatcccgagtttttaattatttaataaaattgtcgaagatgatatataaataaataaataattattttttaaaaattaaatacatttaatgatagcaaataattttgagtaaaaaatttaaaaaacctttgtttattgttaaagaaatttttgccctggtttaacctaagccgtactgacgtgtttatcagtgtaaaaattaacattgttcgtccggccaatgtcaaccgactgttctgctcaacccatggtcgtgatgccattgacttcaaagacaagttccattccgtttccgattatgcacatttttgtgtggaccanatctgtggagcaatttgaggggtttaatttatttatttgaaaataaaaat

SEQ ID NO: 40234 - DNA, 1506 bp, Heterodera glycines
  unsure (1)..(1506): unsure at all n locations
ggcggtacatcatccgccaaagcaaatgttgacgagtggcgggccaatgtacgaattttgagtccggaaggcgacgggcgggcaccgacaatgttgtccgacaattggtccctccgagctgtngcaaaatggacaagggaatgtcgccgcagatccctggtgccccatcagtgccgaagtaaatttgaggtcggcacagaggagcctgaaaattacaattggcattcctgttatttttatttcacatttggactgaaatggtccgctagtcccggaaaaatgaacagatttttggggaattgggtggccaacattaccgatgaccatcgtaattttatcgttgcagccacctacctcatcgcctcccttatcgcccgccaacaccaacacaatttgggaggcaaattgctgctgcagtttcagatcgccttaatttatcaaaaaaaaatcactttgactgccattttcccaacgctgttcgtcccgcctgaacctgaagtcggcctcgagcatggcacgagcattgatgcaaacaagttcacacgtctgtccgtcccccatccgttgacagtccgcccacttacaagttcccaccttcagacgcttcaccgctctcgtcggtccccaaacgtcaagtccctggccggcgaacgaccgcttcacgggctttgaacaaaattccgtcgtccaaagtgatcatcaaatcgtttgccgtatccatcctgttgttctcctgccggttattggtcactcgaaaaggaacttgagctggtgacatgccgtaaccggtcgcacgaggttcgtcaaacggtcacggagggcctttagctgtcaccgcagaaagggacgttcgatcgtcgctgttgctgtagttcttcctcgagccaaatgtagctcgtcaacatatggaaggattaataatttaaaaaatcaaaattttaatggaattttttctcacaatcgtcgagaccgaagccaccggcgctttttgaagtcgatggcgtcaccatcaggtcgcagcgtgccgttgatattgacgacatggattcagtggtcgtcagcatgtgtcgaaagaatcagcacatcgatgtccacaatgtgaagtacgaagtacgccaaagtcagagaaattacaaagaaaaaaagaaacgacgagatagtagaaaaaaattccataaatgggcctttttcattcatctgtaaaatactattttctatacaatcttggaaatgtgcagttaaaatttcccaagcatgaaagcctaaagccacgcacttacttggcaattttgtttaaattatgttgtcccttcttaattttgtctaattgtctgttatgagttcttttttcatcgatatttgttactcgcttttccacaacagcagaaaatgttccccaatcgtatttggtcagtattttccacagactttcctgctttttgttgtgctgagtttaaatataagtgaattgtcccagtcattgaaaaaatttggacaacgaaaaaa

SEQ ID NO: 40235 - DNA, 1066 bp, Heterodera glycines
tttttccccccccccttttcccagggggtttttttttaaaatttttttttccccaaaaactttttcaaacccccattttttcccccgggaagttttttttttttaatttttgaaccgttttgagtagattagactagaaaaaaattgaaaattttgaaatcatgtttcccactcccttctcccaggggtattattttgtaaagtctttttttccccaataaacttgtcaaaccccatttttcgcaccgtgaatgttatttttattgaattctgacccgttttgagtagattagactagaaaaaattgaaaattttgaaatcatgtttcccactcccttctcccaggggtattattttgtaaagtctttttttcaaaataaacttttcaaaccccatttttcgcaccgtgaatgttatttttattgaattctgaaccggtttgagtagattagactagaaaaaattgaaaattttgaaatcatgtttcccactcccttctcccaggggtattattttgtaaagtctttttttccccaataaacttgtcaaaccccatttttcgcaccgtgaatgttatttttattgaattctgaaccgttttgagtagattagactataaaaaattgaaaattttgaaatcatgtttcccactcccttctcccaggggtattattttgtaaagtcttttttccccaataaacttgtcaaaccccatttttcgcaccgtgaatgttatttttattgaattctgaaccggtttgagtagattagactagaaaaaattgaaaattttgaaatcatgtttcccactcccttctcccaggggtattattttgtaaagtcttttttccccaataaacttgtcaaaccccatttttcgcaccgtgaatgttatttttattgaattctgaaccgttttgagtagattagactagaaaaaattgaaaattttgaaatcatgtttcccactcccttctcccaggggtattattttgtaaagtctttttttcccccaataaacttttcataccccatttttcgcaccgtgaatgttatttttattgaa

SEQ ID NO: 40236 - DNA, 1513 bp, Heterodera glycines
gaaacatgatttcaaaattttcaattttttctagtctaatctactcaaaacggttcagaattcgataaaaataacattcacggtgcgaaaaatggggtttgaaaagtttattggggaaaaaaagactttacaaaataatacccctgggagaagggagtgggaaacatgatttcaaaattttcaattttttctagtctaatctactcaaaacggttcagaattcaataaaaataacattcacggtgcgaaaaatggggtttgacaagtttattgggggaaaaaagactttacaaaataatacccctgggagaagggagtgggaaacatgatttcaaaattttcaattttttctagtctaatctactcaaaacggttcagaattcaataaaaataacattcacggtgcgaaaaatggggtttgacaagtttattggggaaaaaaagactacaaaataatacccctgggagaagggagtgggaaacatgacttcaaaattttcaattttttctagtctaatctactcaaaacggttcagaattcaataaaaataacattcacggtgcgaaaaaaggggtttgaaaagtttattttgaaaaaaaaactttacaaaataatacccctgggagaagggagtgggaaacatgatttcaaaaatttcaattttttctagtctaatctactcaaaacggttcagaattcaataaaaataacattcacggtgcgaaaaatggggtttgaaaagtttattttgaaaaaaagactttacaaaataatacccctgggagaagggagtgggaaacattgatttcaaaattttcaattttttatagtctaatctactcaaaacggttcaggaattcaataaaaataacattcacggtgcgaaaaatggggtttgtcaagtttattggggaaaaaaagactttacaaaataatacccctgggagaagggagtgggaaacatgatttcaaaatttttgttgaaatatttgtcgtgctctgaagggcgtgggagggggggggcgaaggcccaccacgagtccgcgaagaggccgagtgagtaccttcggtgcaggaaaattattaaattttaaaattttttaattgctttttaaatatgccaaaaaatgtaggcttaacttttttagtgaaaattcgatcactcatattttttgctaattgagcagaagcgtaccaaactatgcagggatactccccggtaaaggactaactttcactgagatgagcgccgagctagctggctcaaaaaaaattttcgaaaatctgagtctttcgtttttatttattttttgcaaaattaattcataaatattttttcagaaagggttctgaaacgcgccaaattttatttacaagttaataaggctctctgatgctttttctatcaataatggaggtgaataaaattttaaaaattttttaattgctttttaaatatgccacaaaaatataggcatatctttttagagaaagtctgatcactcttatttt

SEQ ID NO: 40237 - DNA, 1619 bp, Heterodera glycines
ctaaaatatcgattaaaaaaaaaatttgttttttttggatttcggtttgttttaggttctgaaggttactttaaaaaattaggggttgttttaaaccaaaattttgataacacacatctggaaatttggcttattcttttgaaaattttaaattttttcagttgctttgcaatttcccgagggcctcacaatgttcgcctgcgtaatcgtcgacattctcaagaagcactacttgcgctgattgtgagtttattgttaatattaaaaaaaatttcttgaataaattttaagtagagtgttgctgctccccaaaatttttaaaaaattaataaaaattaaaaaaacaccttgtcgtttaaaaattataaaaaatttatggctctcaaattttagcccgccgggtgtgcaatttgcgctgcgacgggtgccactatcgcatttggcttgcactgcgcatcggcttctccatcgcgttggccatctttggcattgtgattttggcacaggtgtcttcttttttaaaagatagtaggcgcagaaaacactgcattcttttctaaaattcgataaattttgccccagcacccacctatcgccaccgcaaatcccccaaaatcctgatttctctaaaaattggctcaaaatagctaaaacctgcttttttattgaaaactgttaacaattcagaacaaattttcaaaaaatgtttcttttttcattaaagcgcaacagattaaacactgctaaaaatcgaaaattttttatcgatttacaaggtcagacgccttcgcaaactttttgtttaccctaattatttatcatgtatgtaatccaaggcaaatataatgcattggatttgcataaattttgcttatatgggttgtaattaagagactttaccttttggttcctggcggtgtttgattttcttgcaccttctcagctcggtcttggtattgcactgatcagtcatcatcttggactagcaatttcaaaacgcagttggtgggttatgacgtgcacgaaagtgtctcaatcccccagtgcgatgaacccggtgacgcggacgtaccgcaccacccctccctctcagtgcgatgaacccggtgacgcggatgtaccgcaacacccctccctctcagtgcgatgaacccggtgacgcggacgtgccgcaccacccctccctctcagtgcgatgaacccggtgacgcggatgtaccgcaacacccctccctcagtgcgatgaacccggtgacgcggatgtaccgcaacacccctccctctcagtgcgatgaacccggtgacgcggatgtaccgcaacacccctccctctcagtgcgatgaacccgttgacgcggatgtaccgcaacaccctccctctcagtgcgattaacccggtgacgcggacgtaccgcaccacccctccctctcagtgcgatgaacccggtgacgcggatgtaccgcaacacccctccctctcagtgcgatgaacccggtgacgcggatgtgccgcacactacattcaaaagtaaaaaaaattcaattcatgtgttactcccaaaacagctcttttaaaaaatttagtttgaaaatgaatgttttcagttcattgaagggac

SEQ ID NO: 40238 - DNA, 692 bp, Heterodera glycines
  unsure (1)..(692): unsure at all n locations
ataaatatantttctgttaagtaactacgcatatatatgcgtgctgacgcgttttataaattccgccacccatgcgcgtttataaatccgccaaaatgggtttgcgcgttttataaatccgccaccatgcgcacccccaccatgcgcgttttacaaatccgccagcgcgttttataaatccgtcaatataaatcaatatgctttatataaatttattatttgttgtgaggacccttgtaagcaaaatatagcaattatttaccaactttaatactggataaatccttatataatattttatctgaataaagcatccgaaaatttttttaattgaatttgtacgacattagctatcacaaaaccttaataactatgataattaataaagtgttctatgtaattaatttaaaaaatttatatcaggtgatggtgcaaaaattttaggagatcagatctcaaaaaagaaataaataccctgaagagctgctggaaaaatttgataaaattggattgtaattaccctattgactttattttagacattttgtataaaatatagctgaaattattgcataaaattttaatattattaaagatatatgcaaaaaaatgtgctggcggatttataaaacgcgctggcggatttaaaaaacgcgcatgggtggcggaatttataaaacgcactagcacct

SEQ ID NO: 40239 - DNA, 1664 bp, Heterodera glycines
catcttcctttttgatactaaagcatcagagtgctaaaattaagttgtaaataaaattttggtgcactttagagcactttctgaaaaaaatatttatgaaacaaaaaaatcgattttttcaagtgtccgtttggggtacttaaacatttatggggagcaaaaatccaacgcagaattaaagtacaggctatagggaagctattcccgagggattcggtctccccataaatctgggcgcatcggttcggggggaatgccccgaaaacaaaaaaatcgattttttcaagtgtccgtttggggtactcaaacaattatggggagcaaaaatccaacgcagaattaaagtacaggctatagggaagctattcccgaaggattcggtctccccataaatctgggcgcatcggttcggggggactgaccgaaaacaaaaaaatcgattttttcaagtgtccgtttggggtactcaaacaattatggggagcaaaaatccaacgcagaattaaagtacaggctatagggaagctattcccgagggattcggtctccccataaatctgggcgcatcggttcggggggactgaccgaaaacaaaaaaatcgattttttcaagtgtccgtttggggtactcaaacaattatggggagcaaaaatccaaagcagaattaaagtacaggctatagggaagctattcccgaaggattcggcctccccataaatctgggcgcatcggttcggggggactgccccgaaaacaaaaaaatcgattttttcaagtgtccgtttggggtactcaaacaattattaaaaatttttagatttttattcatctccctttttgatagtgaaagcatctgagtgcctaaaaataacttgtaaataaaatttggtgcgtttcagagcagtttgtgaaaaaatatttatgaattaattttgctaaaaaaataaaatagtgaagctttaaaaattaataaaaaattttaaattcagaattactggagttagcatcatagcagtgcttttccttgtctttttgatgccctcgcaaaatctggttcgcttctgatcagtttataaaaaaaaagttaagcctaaaatttttcgcaaatttaaaaagcaattaaaaatttttagattttttattcatctccctttttgatagtgaaagcatcagagagccttatttaacttttaattaacatttggtgcgtttcagagcacgttctaaaaaatatttatgaattaattttgcaaaataataaataattaatgaaaaagtcagaatttcgaaaaattttaaaaacaacaagcgttggcattttttcaggttaagttagtcctttacaatggagaaggcctgcaaaatttggagagattatatcgattttagtgcgctaggttcgatgaaactttttaaaatataagcctaaactttttggcctgtttaaaaaggaattaaaaatttttaaaatatttattcatctccctttttgatagtgaaagcatcagagagccttatttaacttttaattaacatttggtgcgtttcagagcacgttctaaaaaatatttatgaattaattttgcaaaataataaataattaatgaaaaagtcagaatttcgaaaaagtttaaaaacaacaagcgtggcattttcaggttaa

SEQ ID NO: 40240 - DNA, 1055 bp, Heterodera glycines
  unsure (1)..(1055): unsure at all n locations
ccttttgagccaacctttttttatgaatgtgtcnccattttactttgtggtctgcggcctatggacgcttcagagccatntacgccttcttttcaatattcgtatgtaaaaacgactatctctttttttcggaacacttttttgaaaatttttttaggaaagagattttgtgacacgcaatataactaacattcgaggcttctgtcatttcctttttataatgcgtatataatttaggctatttgattttatcagcaaattccgaaattagcttgggaatgggcccttttgaggccaacctttttttatgaatgttgtcccattttactttgtggtctgcggcctatggacgcttcagagccatttacgccttcttttcaatattcgtatgtaaaaacgactatctctttttttcggaacacttttttgaaaattttttcaggaagagattttgtgacacgcaatataactaacattcgaggcttctgtcatttcctttttataatgcgtatataatttaggctatttgattttatcagcaaattccgaaattagcttgggaatgggcccttttgaggccaacctttttttatgaatgttgtcccattttacgttgtggtctccggcctatggacgcttcagagccatttacgccttcttttcaataatcgtatgtaaaaacgattcagcgctttttttcggaacacttttttgaaaattttttcaataatcgtatgtaaaaacgactataactatcattcgaggcttctgtcatttcctttttataatgcgtatataatttaggctatttgattttatcagcaaattccgaaattagcttgggaatgtgcccttttgaggccaacctttttttatgaatgttgtcccattttaacgtgtggccgccggcctatggacgcttcagagccatttacgccttcttttcaataatcctatgtaaaaacgattcaaaaccctttaccccttcttttccataaacgtatgtaaaaacgactatctccttttttccggaacattttttttaaaaagttttt

SEQ ID NO: 40241 - DNA, 568 bp, Heterodera glycines
  unsure (1)..(568): unsure at all n locations
atattttggataggaaaaaacaaatttagaagtgatacaaatcttttggtgattttaagctaattttaaagaaaataaaggatttttagcatccggcggtgccgataggctccggcggggtgaattaaatttttaaaaatgttttaagaaaggacaagaaatttggtttttgggagtattttttaatttttcaaaattttattctatcaaataaaataaaaattaaaaaatattaagtccaaaattattatgttaaaacgatattaaaatttattttgcaaatgtaaaaaacaaaaaacaattatttgcagggtgggggaattgaactntagaagaagaaaaaaaaaaattgaaggcatacccactgggcaatcgccgctcacattggctttacattctttgaaaatgatattgatatgtcaaaaaggaaaaacttcatatctcggccagaagcttcatttagcaaaaataaaaaaatttttataatacaaagggggggggtaatctacctaccctgtaagtttcattcggaagtcccaccgtcacttgggtacctctcctttgtgag

SEQ ID NO: 40242 - DNA, 1308 bp, Heterodera glycines
  unsure (1)..(1308): unsure at all n locations
tgacatacggagtggcaaggcggattggctcagactgaaccggtgctggtgccttaagcaaaaaaaaaaagatttttcagaccagtccattaacggctggtccattaacggcaaaagtgccagccggaccccactaatggaccagtccattaacggcaaagtgccagccgggccccactaatggaccagtccattagcggccggtccattacggcaaaagtgccagtcgagcccctctaatggaccagtccattagcggcaaaagtgccagccggacctcactaatggaccagtccattaacggctggtccattaacggcacaagtgccagccggaccccactaatggaccagtccattagcggccggttcattagtcagaagaccaaaaaaattcttcgcaacaaattccaaaatgatttagagctgctattctcagaccgaaatagcgagttcgaacaaaaggtctaaaagtcgaactttgttcgaactgctcccataatgttcaggagacaatttcagacaggagtttaccccaaaggggtaaaaatgcttgtatttttgttcaaaaatgacgttcagacccacttttcacagttcgaaaaattttcggccatcatttcggggccctagagtagccagaagaccaaaaaaattcttcgcagcaaattacaaaatgatttcaagccattctcagaccaaaatagcgagttcgaacaaaaggtctaaaagtcgaacatttttagaatttgtctaaaaatgtcaggagacaattttaggcaggaaaatagatcaagtgacctaaattttgataattaatatatgttttaatcccgactcagtactttaaacttttttagccttttttaattctattttgcttttggagccgttttcccgccaaaacattgacaaaataagcgacaaacttaggtgttttcaatttttgccttcatcaaatcaaaaagcggatgaatttcccgcacagcttaagtaattaagtgaaattctaaagttcaattctcccggtaccttctttgtacgcgcggtcgttgacaacattcaatactgtctttaccaagtgattatctctctctctctctctttctctctctttctttctctctcatttcaaccaaaacctaggcgtgtccaattaagaccggtggcctcgtttgtaaaaaaaactcaacgacgagctgtactgtgaatcatgtgatcaacacgctacncaaccacgagcaacctctacttacgcatcgacttgcgcgattgtcatgacattaagacgatncagcaaataactgcc

SEQ ID NO: 40243 - DNA, 980 bp, Heterodera glycines
cccagatttatgggggagaccgaatccttcgggagtagcttctctatagcctgtactttaattctgcgttggatttttgctccccataaatgtttgagtaccccaaacggacacttgaaaaaatcgatttttttgttttcggggcagtccccccgaaccgatgcgcccagatttatggggagaccgaatccttccggaatagcttccctatagcctgtaatttaattctgcgttggatttttgctccccataattgtttgagtaccccaaacggacacttgaaaaaatcgatttatttttgttttcggggcagtccccccgaaccgatgcgcccagatttatggggagaccgaatccttcgggaatagcttccctatagcctgtactttaattctgcgttggatttttgctccccataattgtttgagtaccccaaacggacacttgaaaaaatctatttatttttgttttcggggcagtccccccgaaccgatgcgcccagatttatggggagaccgaatccttccggaatagcttccctatagcctgtactttaattctgcgttggatttttgctccccataattgtttgagtaccccaaacggacacttgaaaaaatcgatttatttttgttttcggggcagtccccccgaaccgatgcgcccagatttatggggagaccgaatccttcgggaatagcttccctatagcctgtaatttaattctgcgttggatttttgctccccataattgtttgagtaccccaaacggacacttgaaaaaatcgatttatttttgttttcggggcagtccccccgaaccgatgcgcccagatttatggggagaccgaatccttcgggaatagcttccctatagcctgtactttaattctgcgttggatttttgctccccataattgtttgagtaccccaaacggacacttgaaaaatcgatttttttgttttcggggcagtccccc

SEQ ID NO: 40244 - DNA, 177 bp, Heterodera glycines
cgtcagtgatcacgtagttaatggtcacttctgccgcagtacctgctgtggtaggaattgccagaatcggtacactgggtttattggtcggggaaagcccttccaggctacgcacatcggcaaactccgggttgttgctgataatgccaatcgctttacaagtatcctgtggagaac

SEQ ID NO: 40245 - DNA, 1144 bp, Heterodera glycines
  unsure (1)..(1144): unsure at all n locations
ggtgggaacgctttcagtccgccaaaattacgatggcatataatgtaagagagagagagagagagagcatcagaataagaaagtgagtgagtgaatactttttgaatgagctgacggaagggagcactcattcccagcgaggttttttataaaatagaaatttgtttgaaaaatctaattttttgcagtttaggcgataaaaattgtcttttacacgtccaatcaatgggccatcctcggtttcttaagccataacatttttttcatatttggtcaaagcccaaattcatggtcttaaaagcgctttaagtctatagactttttggtataaataattttcgggctaaaagcaacaggaaaaaattaagaatggtcattgaatgtacgcctaaagtatgcaaagatccaaaaaactttcattttcttgtaagaaatttggtattctgtttaaaatgaacatttcccattaatcgcaggagtacatggactacaagcagcaaatgctgagctccgaatcggcataaccactggccgcgcactgacgacgaacgattgattgatttttatcaattttggttggggtcaaaaaaaagaattaaaaaatcatcatttttaaacaatattattgtaattaaatacaaatccaacaaagttctgcccccctccccctcattctgctgctgatgctggctttttttctatttttaatatatgtattatatgttcaaatttgtcatttttatggtgaaggaaaaataaacattttaattttggtaaattttgaaattaaaaattacatttattgtgcaatttcaaattgcctgtttacgccccaaaaaaagtaaactttgttggaagtgccgtagcaaaaacgacgcttgctgagagaaatttaaattatgccaaaaacattatgccatcaattttaaataattttaccgtactactgggtagagaccggaaatttcaaatttgcggatcccgctgcgggactggaactcaaaattttttgcgggacgggatcccgcgggattaatcccgcaaatcccgcatttaaaatttgcgggatcccgtgcgggattgcgggattttggaaattcgaaaaatttcaattnattcaaaaaattacaaaatcaaaatgcta

SEQ ID NO: 40246 - DNA, 977 bp, Heterodera glycines
attagatggccaagcctctccctcccccgtcgggatgggtgggggggggggggggataaagccaacgcatcagaaaaatccgtccaaaaattggtcggagatagctaacctccccccccccccctcggaatgggtgggggggggggataaagcctaaaacccagccaaatattgatcaagagatagccaagcgccgcccctccccctcggggcatgtggggataaaacctcagaaaaagcctggccaaaatcgcttgagagtgatcctatatgtcgtgaagagtgggtgcaaaactgagatgaaagttggtgggcatttcaccaacagaggtatatgcgattaaatttcatttttcataagtgtggaaagtcctaaggaataaaagtgccaaaattctcacattttttgaattaaaaaggataatcaactttactaaaatttttaaattttccaaatttcaatattttggcccacttaaaaaaatacgcgatgcaaattttttgcatagttaattttgttaaaatttcgaaattttgccctcctccaattggcccatgaatgctgtgaccttttgtttaattgattttctttaattgggccataaatgaattgtttgctttccccaataaaaaaactcgtgacaaagaatgtgaaggttgagagactttggccagcagttgttgcagggaaaaattttctgacaaaacaatggtaaataaaatttaaaaaattttttttggaatgaatcaatcctataacccttttgatataataaatatgccaagaaaaaagatttaaaaactaaattttaaaaaattctaaatcattggacttcctacattcggcaaaaaaattttcattaaaatatgtaaaaattaatttttaatttttaaattaaatttaccactacttttaaatccgggggccaaaacgcagaattttttcaaggaaactgatttttaatttttaaaaaaaa

SEQ ID NO: 40247 - DNA, 1409 bp, Heterodera glycines
aaataaaaaaatgggataaatattgaagtagtttgtcccccttagtcgccttcagcgcacatttgtagtgggattttgggcggacaatccaaaacttttgagccgcaaattgagggggcccgtcgattttggtgaatttgcttaaaagcgaaacttgataatgagccagtttttcattgtttcacctgctgattgtccaatattggtctcccttgcccttcctcttcaacaaatccgatagttttgttgaggactgagcgccaaaactcagatgaccgaaatgacttttggcgatttggttgttttctggacaaaagagcaacggcagaagcgacggaaatgccgaaaagcaacgattgaaaatggggaaaaggtggcggagaacggcaaatccatcggcgattttgggcctggcgaaaaagtgcttcggaggcctaagacagggtaaattttaaaaagaaaaagcggagtgaccaaattgagcagatacggcaccaaaatgccacggcgcgctttgctttcaatccaaacggacattgaacaggcggcgaaagcattgagcacggaaacggtgggccaagtggcgaagccgagcaaacgtataaaacggaatttaagttggaaaaaattggaaggaaaagcggaaccgaaagatgcacagccaaaccaagaacagaatctcggtggtagtcaaaaagaaggaggagcggagagtgttgaacagaacgcggagccaattgacgcgatggactcggccccgccggtccaccaacgctttgagctaatagggattaattggacaattaaaaagacgattaccaaaataagaggaatgcctcaccgcgtacaatgtgccataagtcctcagacagaacaaccacgcgggaaggaaagggtcgcggagagaccagaaacagtgggggtgccatgtgtggctgaactcgtggcattcggccgtcagaattcgcagcccaaaagtgttggcggcaagccgcgacaacacattggtcattatgaaaagcaattaagaaagagaggtcattccgaataaaaagaatggcactaattctgccgaaccattaaaactaaaatatatggaaaatcggaccaaatcgacagttatggcaaaaaaaaaagcattggggaagaataaaagcattttctttgagatcagcaaaaataatgaaatttttattatacatgcttcacacggaatgaagaagacacaaaggcgtattcactcattgttaatatgatagaaaaacaggccgaccgatcatttatttgcccaaaatcattcgaaccaataccaccaatcgaacaccttcagcaagcgcatccgtttgcgcagaatgtaaaaacagacgccgaagtaaaggagcaaacagagaacaatgagaatctgaaaa

SEQ ID NO: 40248 - DNA, 850 bp, Heterodera glycines
cgcatgcccattcgccaagccctcgggttccaactgagcacgggtgccacgcatgccctcgggttccaactgctcacaggtgccacgcatgcccattccaactgagcacgggtgccacgcatgcccattcgccaagccctcgctttccgactgctcacgggtgccacgcatacccattccaactgctcacgggtgccacgcatgcccattcgccaagccctcgggttccaactgttcacgggtgccacgcatgcccattcgccaagccctcgggttccaactgagcacgggtgccacgcatgcccattccaactgagcacgggtgccacgcatgcccattccaactgctcacgggtgccacgcatgcccataaaccaagccctcgggttccaactgctcacgggtgccacgcatgcccattccaactgagcacgggtgccacgcatgcccattcgccaagccctcgctttccgactgctcacgggtgccacgcatacccattccaactgctcacgggtgccacgcatgcccattcgccaagccctcgggttccaactgttcacgggtgcacgcatgcccattccaactgctcacgggtgccacgcatacccattccaactgctcacgggtgccacgcatgcccattcgccaagccctcgggttccaactgttcacgggtgccacgcatgcccattcgccaagcctcgggttccaactgttcacgggtgcacgcatgcccattccaactgctcacgggtgccacacatgcccattccaactgctcacgggtgccacgcatgcccattcgccaagccctcgcgttccaactgttcacgggtgccacgcatgc

SEQ ID NO: 40249 - DNA, 1049 bp, Heterodera glycines
aaatgttgtgatcagaaagagcatggacgacagcttgcccttctgtttgattttgcgctgcaaaatttgaatggtcagtccaatgggatggatgtggtcggcactattttgtaaattatgtcgtttgtgccaaaacccaaaattaatgggtgcaattaattaattaattaatttttggcttaaatttgcccatttaaatcctaattatttttttgctatacaaaaatcataaattattgtaaaaagtattttaaattaagaccaaaattcttatttgattttgatcaaaaaattacaataaaaaaaaactgaaaactaatgaagcttaattatttttagtaattaatatattaattagttaatttttaaataaaaatttattttttcagctccttcacgactaatacaggtaacactgttcaatttatttacccacattcttaattcgagccaatttcggatttttttttcttcagtcataattcaggataaaaaaatttgaaaaaaaaaattaaaatttcttccgattaaattaggaattaaattcttgaaaaatttaaatttttaaaattatgactaatttattccatcaatgtttgtcaaggatcgctgttatcgaatgggcgaacagcacttcacggtgtttgggtcgggcaacgaggcacagctgtgggacgatttgggcgagtcaatcagccaagcattggcaaaagtaattaaaaaaaccaatttaaaatcagtaaatggccgataaacaaagtgccaatggactaaaaatagagaatttaaaaattgaaaaattaattgctatgatgggaagtttttggctataaattttttctttgccaaccaactccaacaatcttggtatcattcgattgcatttcagtcgtgctggtgcatttcgtaaaaccgccacccatgcgcgtttcgtaaatccgccagcgcgtttcgtaaatccgccagcgcgtttcgtaaatccgtcagcgcgtttcgtaaatccgtcagcgcgtttcgtaaatccgccagcgcgtttcgtaaaaccgcca

SEQ ID NO: 40250 - DNA, 1096 bp, Heterodera glycines
  unsure (1)..(1096): unsure at all n locations
cgcgaaaagttgaaaaatttcaaaacggcagacaacagatgcattncaaacaattcaacaatataatataaaatntaggcaaaaatttttgttccttcctctttggaaatggtcttaaattttgcttgtaaatattcagataacaagttttttttactgaaaattttttacacactacaggatgaaacgcaataaataatgtttgtagacaaaagaaattggcgaaaaaaattgcctcaacaatcagtggtgaaactgaaagaaaaaaacttccccaaaaaatcggagcttttccgacggcatcagctgcatttccaacagttcaacagtataaataaatattaggcaaatgaaaaatttttttccttcctctttagaaagtgtctaaaaatttttgttgttaatattcagaaaacgtgttttttttactgacaatttttttcaagagaaggatatgaacaatcacttataaggctcatgcttggagataaaggaatcggaaaaaaaaattatctcaacaatcagtcgtgaaacagttcaataattcggaagcagtgccatattgggaaaagatgcacaagtagagtaggctcgaaataaaggcaactgccgaagattaacaaaaattcaaatttattggccccgttctgctttgacaggccatatctcgccagggagtggcggtagaccctttgttgatacatttgaaaatgtagagcgcgtctagctcattcgaataacatcaaactggtttatttttgtcacgaaacaacccgctgatggccacgtcgaagaaaagtcccaaaatttgacatccataaaactccattttttcatcggccagcgtgtttaaagcaaacccgaaactgataggaaatttaaattgatcataatagaagtttaatttttatttgtcccatgcattttctgggaaatcttttcgcgaaaagttgaaaaatttcaaaacggcagacaacagatgcatttcaaacaattcaacaatataatataaaatttaggcaaaaatttttgttccttcctctttggaaatggtcttaaattttgcttgtaaatattcagataacaagtttttttt

SEQ ID NO: 40251 - DNA, 1204 bp, Heterodera glycines
gcgctccagccctggtaaatattatatattttttattttttctgcattttttgaaatattttaaaaaagtgtccaagacagtacaggcagggcgcggcgcggcgtccattgataaatttatgccaagaaaaacacttacctatttctttatttatcattggctattgctcggcatttttttttgaatttgaatttttaacattatttaattttaggtaattaaatttttcaatttaaaaatatcaattttttttacatatcctttcggctctttttgctggccactcgcatgcttcgccgctttccaaatcttgacaaaaatgagcccaacaattgttgttgttgctttttgtcagcttcagaaatcaatgaatgatcaggggaaagcttccttttctttataccggcagtgggcgaagacattaaaaatgaaaatttaaataaattcacctaaaatttggaacaaaaaaattagccatcgccaaatttaataaaattaatatatgcacatattttgctcaaaaagtgccaatttgagagttttgttcgttcagatttatgagcagattttggggccggcagtgccaggaattttattaaagaatataaaattgtccatctttggcaaaaaggagattttttaaattttctatgacaaaaaacctaaaagttgacatgagattcgataagaaaagcagcagggcatttgggaagacactccgttaattatggagttaatgaacactataattggctaattaattaaagggcgaccaccactaaataataatgaaaaaaaaatcaattttttctgacccaacaaaaatgaaaatgagcgaatggagtgaaaaaagaaacagcagaagaagaaccatttttataaaacaaatttcttctcccaacgcacaaagtgcctatatctccaataaaatcatcggcgtcgtgcggtggggggggggggggggggacggacgatgggcggcgtacgttcgcggccaaaaattaaaacattcgaatttataggcttcctgtaccaataatactctcatgggcaatatgcccatgagggtaccatccatacaaatttagaattttatgattcctgtaccaaggttaccctcattggcaagatgccaatgaggatatcatccatacaaattttctaatgttatttttgttcgagtccgggtcaggagttcgaaat

SEQ ID NO: 40252 - DNA, 1258 bp, Heterodera glycines
ttctgttcaactcttccacttttaaactgagtgaattgtcaaataatgctgtaaaaacattcggttaattaattaattcattagttaattacccccccccccccgcccccctcttaccatttccattgttcgtcgatggttcgaaattgccttttgcctttggcgtcgcttcggtgccctccattatcatttgccgtcgctccaattccgctatttttgcgtcaagtgcttttcgctggccctgcaaccgatccaaatcattttcatcgtcggacagtgcaaaagagggccaaagatgatctgaaaagggagaaggatttttggaattgtatcgtatttagtgattttgaagaatattacattttaaattataactttcaaatttttgtgccttctttcaaatggcaaagcatttgaatggttttaaattaattatgtatatcccttttttaatttcaaaattcttttcctctctctatgaatggcaacttttgtaattttttaaattgtgatgccattttgccgttactttgatctgaagtgatgtcgccgaatgttgtgagtgatatgtttggtgtgcttgtgctcattttaatgcgctttgagacaataaaataaatgttaaatgaaaatcgaaatatataaaaaattacttttaattgaataattaattaatttattttttcactggtttaatgtccagcaccatcttcacatccctttagcaccgcctgagagtgacgccattgattttttcgataattttttttaaaaccaaaacattttcaaagggttatcaaaatcggtaatctgatattattttggcaattcaaaattttaattcaaaatttgttacttttttaaatttgtgttaaagaattgtataaaatggattattgttgaccatcgaccgaccgcaaatacatttcacaaacattttaggacacacattttgtcaaaagaaatcaataggctccattttttaccaacattttcctcaaaaacaaaaattctatgttgctaaaactgccaaaataattagtttttaggttataaaaaaccccaaaaataattgctaaaaatgggaaaatagttgctaaaaactcaaatttatttagtggtgcaaaatgacaaaatttattcaaaaaagtaaaaaaataggccaaaatcagtattgagctaaataatttttaaaacaaaaattcttgttaagaaaataaataaattattttggagatgaattttttgataaattttt

SEQ ID NO: 40253 - DNA, 257 bp, Heterodera glycines
aagcctaaactttttggcctgtttaaaaaggaattaaaaatttttaaaaattttattcatctccctttttgatagaaaaagcatcagagtgcctaaactaacatgtaaataaaatttggtgcgtttcagaaccctttctgaaaaaatatttatgaattaattatgcaaaaaacaaataaataatgaactcttccttaataattttcctgcaccgaaggtactcactcggccgcttcgcggcctcgtggtgggccttc

SEQ ID NO: 40254 - DNA, 1053 bp, Heterodera glycines
atgtaaactaagatttttttgttgatattttattggtaaataattgtcttgaattcttcataacaatacaatgggcagagacgacagaacgacttggaaagccaattatttcactcgcattattgtacattctttcataaatttctttatcaatttttaattttttaagtcgcttttcgaagaatacccaaaatgtcttttggtcggtgtcgacaatgttgggtcgaaacaaatgcaggaaattcgcggggcaatgcgaggtttataaattcaaatactgaatcattgactcccaataaaacaccgttagggcatggtgaaatattgatgggaaagaacacaatgattcgcaaagccatccgtggaaatcttcaaaaattcccgttgcttgagaagctgttgccttacattgtcggcaacgtcggattcgttttcaccaacgaggatttgggtgatgtgcgcaaaaaactgttggagaacaaacgagtaacttttaaaatttaatgttccttcgagtcaatggatcagggttctgccagagttccctgttcgtccgtttgaaaaaatgtcggactcagttttagacaaaataactttttttcccaaaagccgtgttttagtcctatttttaactgttccttttgttggaaagtcagagagttccagccatagcattcctggttccgaaatttacaaaatcctttccaaattttacaaaaaaaagttaaataaagacaactaaatgtagggcgcgcctgcaaaggctggtgccattgcgccatgtgacgtgcgattgccgcctcaaaacagtggaatgggtccagagaagacgtccttcttccaagccttgcaaattccgaccaaaatttcgcgtggtaccatcgaaattctcaacgaggtccatctgatcaagactggggagaaagtcggcgcttccgagtcagccttgcttaacatgttgggcattcaaccgttttcctacggactggtcgttgagcaggttattttatcaacaatatttttacatttaatttattatattatgtacatgag

SEQ ID NO: 40255 - DNA, 317 bp, Heterodera glycines
tatcagtctctttctcattaaccccccccccccgccctctctctctcttttttcgtttttagcatttccaaaattttctttggcattattgtttggcttcagcgtttttcgccaatggcacttttccttagggcattattttcatttataataatttccggggggacacaaggggaagagaacacccacattattcttcctttccttctcacttgtaataattaccagtagcatcattgctgtatcaaattgttctatcttattgcccccggggggcacaaaacgacgggcggtggagggggggggggggggggaca

SEQ ID NO: 40256 - DNA, 1099 bp, Heterodera glycines
  unsure (1)..(1099): unsure at all n locations
cgggctctagtgcactttatgagtccaatcgacttttatgagtccaatcaattgaaaatactcgngtttttatacaatacacggcgagtcaattttagggctccaagtacaaataagtttattatttatttagtaatcagaacgccaaaactttgcaaaacttaaaattttccggagattttcccttgcaaaaaaagaagagccgatctcgagttaaaaactagacagctaaaaaataaactgtgattcgatagaggaggtcaaaatatgggcctatgcaaaattttaagaaaattggtcaataggaaattttttttttcaaggacaacaaaatcaaatttattataaatttaaggcacaacccctgtcgccacgggatttggacgaattggaaacgtcaattgatcaatttcgaacattcctcaacgatcagccgcggatgcgcactttgctagccttaaaaccaaaggtccacttgctgttgaaccattttgtgccgttcgccagacaacaccaatttttggcacttttagacgagcagggtcaaaaagcattttgaaatttaagccctggattttctaggtgatgaagcattgcattcggtgtggaggcgattggaacagctgtggaagacaatgcctgatgaagaacaaatgcgacaattgttggaacaccattttgtgtcaaattggcttctcgacacaggaaaaatcgacgaaatgaagcgggtcagtttggtgaaaatttggttccaaaacaaattccatggttgaccgtgaagaacaaaaacaagaaattggtgaccgacgtgagacggacgaagaaagcgatggagaagaacaattcgattttgaataaacacagttggatatgaggttcttctttgtttttacaggaaataaaattttaaaaaatttttgagcttctttaaaaactgtgttaccatttcacatatatttatttgcttcaaaaacctcaaaatacagttatagcctgcatgngactcgaacctgagactccccttttggtgactaacaaacagaccactaagacgaaaaacccaactaattgtacttggagcccaaattgactcgccgtg

SEQ ID NO: 40257 - DNA, 935 bp, Heterodera glycines
ttttgacgcctaaaagttgattaaatgttaaagttcatagaataggtgcaccgtcccacgcctcattttccaaaattcagagcaatattaaacaataaatttgtcactgacaaatgccataacttcaaccaaacccagccatcgtttttctcactgccattggcattttacctttgtgtatgagtttcattgtgccattttcgtaaccggtctccgcacaaattcgctctctcaattcccccaaatttgttggcatttgctgcttcgcttcgcttggcttcgccgcttcacaatcagtgccattctcttcgttttttcctccgccctccatttcttccttttctgcaacctttgtctgtttttcgtcggcatttttttgttcctctactttttcctctcctccctcattcgactgtttttgttggtcaccgtccgtttcgccgccaatatcaacctcaattttgcactccttggcaccatatctgattgtcaaccacattttgataaatctctaaaaaagaatgtgtcaaaaaagtggggataagacttgccggaaccagaaaaacctgaccgggacttttattggttcctggattttcaaaaactgggacctggaccttggaaaaccgtgattcccgggttcgatcccggtcaagttttaccttataataaaaaagactaaaataaataagtcaaaaagtaaagataaaattttaaaaaagcgccaaaaagccatagaaataagcgccgaaatcaaaaaatgagaaccaattatttattgcttttttttttcttaagcttaggctcaatttatttctgtacaaaaaatgatcaaaagttgcccgaatgcataactaacatttaatttttcaaaaaaaaatgtgaatattttaatttgctttcttaagcgaaactacgctgttttcttacatatt

SEQ ID NO: 40258 - DNA, 591 bp, Heterodera glycines
ggatgggagtttaagtcacaaaaaatctcaaaaaagtcgacttaaaaagtcataaaaaaatgccaaaaaaaaagtcatgaaaaaataaccaaaaagtcacataaaaaatgccaaaaaagcactaaataaacccaaaaaaagtcctgaaaaattagacaaatgtaattaaatccaaaaaccatttttaaacattcttcgaagaaagtaatttaaaaacgactaattttaatggcaaaaaaatattcaaaattgttacaccgccaaatttttattttattttttatttttcagccccgtcatttgagtccttatggtataagaaatttaagttccgtcccgaagattggtttatttttcggaattttcatcacaaaaagtcaaattttgccttaaaaagtcatgaaaaaagtcaaaaaaacgcaaaaaagtcataaaaatcccaaaaagtgtaaaaaagtcaaaaaaaagtcacaaaaaatgtatgttagaagcttcaaacaaagtgtagaacatttttgaactcattttaaggtcatttagagtcagcaaacaaaaagtcatttgacttaaattcccatccctagtcatcat

SEQ ID NO: 40259 - DNA, 1238 bp, Heterodera glycines
ggggaactgacaccaaaaatgtcccttaaaaattctaaaattcttcaaaaaaaacataaaattgactagtattagtaccctgacttccgaattccaatgctcatccagcaaatcccggtttttgttcaaaattccccattccgtgcaactctaatagaatatcttcatcactttttaggcattctcaacaaatgactgctcactcatcattctttgtcttttttattgtcattctttggctttgcttcgattgtttgaatggaaatgagccaaaaaacaatggcaagtcttctcaaaatttacgtaaaataatattttcttataaatttttggtatttctccagcagagagagagtttcacaaacaaattttaacaaattttcaaattcattaaaattttgtggagcgaaacacacacatacttaagtagcaaaatatgaagtagacaaatatattaaatgttttcccatttttaattaaaatttctttgtgcttaagctaatgttggacatctctcaaagtcacaaaatgatcagaaggaaattatggcggacagaaatagtgaattagagaaacaaaaaaaggtgaaaaaagggaaagattttaatattaattttatggaataaaaagaatattcaaaaacttaaaatgattttattaaaaataaattaaaagatgaattattttaggtgcttttagacttccgacaaaattcttgggatgctaaagcatgtcacgaggacctcgaaatttctagtgacaattctttgactgtcaaacgaaagggaactaatttgggtacttattgggaattaatttaattacttattaaatctgtcttattaaacatctaatttatttattatttattttcttcaacagctcagtatcgttccgtctttgctaatcatccaatttcgctgagcattcgtttccccgacattttttactttaaaatttcaatcaaacaaatgaaacggtaaaattaaatttgcagtagaaagttgaataataataaaatattgtatttctatttttaattattattttcttcacttttaagtcatttgtttctcggatttgccgacaaacagcagaaaaaattggatgaaaatattttcgagcaaaagggcacttatgccattggaaatgttggcgcgatttgtattaacggatcattttcgtttctttgtttgacatggacgaccaaattgaggccagctttgaggccacttgaa

SEQ ID NO: 40260 - DNA, 1025 bp, Heterodera glycines
ttttctgttgttgcgtcattgtttttttgaaggcatccatgacaaaaccattcggcaagtgctcttcttcaagcagctcagctggcgattgctcaaaattgaggcgagtgcccacccgaagtgcggcgccgacgagcaaagggaaccgttgagaagcaaaacaaattcaccccttcgtttgctcaccgtcgacggaaaatgtcgcatttctatcaaaaaaagcagtcaaagtgcgttgcttttttgcgattgtattacgttgtgttctatagattgttctcttttggccggtaaaatcgaactgattctgaaggagatccattggctggcgacgatgctccacctgaggatggccatcgactttcacaaacacttggtggacctggccaactgtcagaagaaagcagattccgtcacaccttttttgggacaacgacagaacccgttcacggtagctgatttggcaaactgtttatggtcatggttagcaaatagaaaagccccctccactggtgatcgaaatgatatccgtcattccctccaccccccccccccaaggacgcctcttcgatgggttcgtctaccaactcggcagtgccttgtgctgcgttccgtcgcttcaacattccccactcttcgtaccatttgttcatttccaaagttgacctgcttctactcgatgactccgaatccaacagttcgcccatccctttttccattgcctttccatttaccctttagtgcttccgtctgactgggaattgaagcagggtgccatgcaggcatttctccaccggcttcgaattgacttttaccccgaacatcgcgtgttcgattctgctggagaaatgtctcaccgccaccattggacattttaccagtgcccgaactcctttacagatctgaccaaattgcagttggaccaattctttcgggtgaccagcacgaaattgggtaacgatttggctgaacagatcagtaattatggtgacactttcagcttcaagcaaaagggaacgatttag

SEQ ID NO: 40261 - DNA, 1066 bp, Heterodera glycines
  unsure (1)..(1066): unsure at all n locations
tttttatatttagaggttatcccnagaaaaatggctatctctttttttgataaatttatacacatacaaatgctctcgagcatgatagggagggcggtgcgcaatagaccttttatttttgagggaatttttaaatttatactctatcccagaaaaatgtctatctctttttttgagaaattttatacctcacaaaagcgcttgcgtagagacggagggctgtgcacaatcgccattttatttcacagaggatttttatatttagaggttatcccagaaaaatggctatctctttttttgataaattttatacacatacaaatgctctcgagcatgatagggagggcggtgcgcaatagaccttttatttttgagggaatttttaaatttatactctttcccagaaaaatggctatctctttttttgataaattttatacacatacaaatgctctcgagcatgatagggagggcggtgcgcaatagaccttttatttttgagggaatttttaaatttatactctatcccagaaaaatggctatctctttttttgagaaattttatacctcacaaaagcgcttgcgtatgagacggagggctgtgcacaatcgccattttatttcacagaggatttttatatttagaggttatcccagaaaaatggctatctctttttttgataaattttatacacatacaaatgctctcgagcatgatagggagggcggtgcgcaatagaccttttatttttgagggaatttttaaatttatactctatcccagaaaaatgtctatctctttttttgagaaattttatacctcacaaaagcgcttgcgtatgagacggagggctgtgcacaatcgccattttatttcacagaggatttttatatttagaggttatcccagaaaaatggctatctctttttttgataaattttatacacatacaaatgctctcgagcatgatagggagggcggtgcgcaatagaccttttatttttgagggaatttttaaatttgttcggtgtcccagaaaaatggctatctctttttttgataaat

SEQ ID NO: 40262 - DNA, 803 bp, Heterodera glycines
  unsure (1)..(803): unsure at all n locations
ttttttgggagacgttcggcagctttgcggcttcaggacgagcgcttcgcgcccgttttttaattttttgggggacattcggcgcttcgcggcctcagactggcgcttcgcgcccgttttttaattttgtgggagggatccggccgcttcgcggcctcaggacgggcgcttcgcgcccgttttgtaatttttttgggtgacattcggccgcttcgcggcctcaggacgggcgcttcgcgcccgttttttaattttgtaggagggatccggccgcttcgcggcctcagactggcgcttcgcgcccgttttttaattttttggcggatattcggccgcttcgcggcctcaggacgggcgctcccactcctcagaatcccaaatcacacagggattctgaggtcttaaccatgctaaagtaaaaactgattacatattcgtgatcagcggcccaaataaccctaaaaatcatatttttggaagatttttggtgaaaaaaattttccactcagaaatcatggtcacacccctttggtcccgaatgccaaaatcacttttatttctataacttttttcaaaaaagtgataaaaagctaaaataaaatttataaaatagagcaaaaaattgcggatttttttgagtatattatttttataaaatactttttcagaagggagttctgaatttttttctgaaaaatcgaatttttccagaaattctggaataacttttttattttggaagatagaaattctaaataaatgccataaaattctccccaatttttctctnatttttaaagctt

SEQ ID NO: 40263 - DNA, 1559 bp, Heterodera glycines
  unsure (1)..(1559): unsure at all n locations
ttagaatgttttcaaataagcacaaatgttctttcaatcccgattgggaaaagcaatatccggaaagggaatgctttttttattgtacattttgccaaattcccaagtttttcccggcggcgcctatcggcaaagtgcatatgcggtggaatgagcaaaattaccaacagaaacaaaaaatattggtaaaaatttcattccggcgtaaaataaaaaccatttggataaaatttattaattttcattgtataaataaaaattttaaatgtccttgaatttcatgaattttccccattatgtccttgcaaatcggcatacccgtccttggaagccgtctttgggcgataccaaccctgttttaattttatatgcccatagcaaaatccacctagttaagttgtctcaaaaatcgtaagtgcctgagggccttattttcagctttattatccattttaaatgattttcccaactttgttcaatttattgtttttttcatattttcactaaaaagaaaaattaataattctttttttttaatcaaaagttggctttttcagctgtttttttttcttatgtaacgatataaagttatgttgggtttgaacccagacacccaaaattaaccaaattattaccgttccattttcaagcaggaaaaagattgcagcgttaccatcagattgcgaccagttttgtgcattaattttcacacattgtttcccgttgtatgtttgaacagcacgtgtatcataattacgcttaaagacatgccccaaataagctttagctgtgaacggttcaccatatccgaagcacactgtcactttaggagcagcatgaacaaattggagaaaatgtgccagaaaaatgcaggaaaatgaaatcagaaagatgatgatggtattcatatctgtaaaaatgagacagacattaagtgtccaggcctggctgctggagctggatattttggaaatttattttataaagcaaacaaattcctaaaaatttaaaataaaccgacctggacctgaatttatccagaaattttatgcttagacctggagttcaagattaacctggacctggataaaaatccataaaaatcaacgtccaggaaaaacctaggtagccgaaaaatggcctgggcgattttgactcaggaaaaacccaggcctgtatcaacttccaagtcgaactctattagttatcttgctggttcagaacagaaaccaaaattttaattaataataaattcattagttattaggataattttttgaatgccttttgcctaagagtttatttttgtaatttcataaatacacaaaccggcgcaggatcccgcaaattttaatatggaatttgcgggaaaaaaaggattctgcggaattaatcccgaaaacaaatttccgtctctagttgaaattttggaaatgtcaaaaaaaagagggatgtttcggaaaagaaattcanatttttgatatggcatttataataaaaaaaagcaataatatttttttaaattttgtatattgctctttgactggttatcactattt

SEQ ID NO: 40264 - DNA, 1100 bp, Heterodera glycines
ataaaaaaaaagttaagcctaaaatttttcgcatatttaaaaagcaattaaaaatttttagatttttattcatctccctttttatagtgaaagcatctgagtgcctaaaataacttgtaaataaaatttggtgcgtttcagagcagtttgtgaaaaaatatttatgaattaattttgctaaaaaaataaaatagtgaagctttaaaaattaataaaaaattttaaattcagaattactggagttagcatcatagcagtgcttttctttgtctttttgatgccctcgcaaaatctggttcgcttctgatcagtttataaaaaaaaagttaagcctaaaatttttcgcatatttaaaaagcaattaaaaatttttagattttttattcatctccctttttgatagtgaaagcatctgagtgcctaaaataacttgtaaataaaatttggtgcgtttcagagcagtttgtgaaaattccaaatccctcgcccaccttcgctccccccccccaatcgccccatttacaaacgctgcaattcacaattcatttgacccctaaaagcgttctttccccgcgtttcttccaaatttcgtcgattccaacgatcagcagcagtttcgctggagagacttttcacattttacactttgaacaaatcgaaattgcatctgttcatctccgcccccccccaatttgtcgatatttgcttcgaaattaataattaattaattaattagtggaagaatgggcgtaagagcttagctatgaaaagtcattactttgctttaagcacttttatcgtaaaaactttcctttctctccgatcgatcgcttttatttttcccattactaaactttacataaaaaatgtcactttctcccaatcattttttatgttcaaaaaatctttaaccaccaataattggaatgttttctgtgtaaaatttaagagaatttggggactgttggatgaatgaatgaataaatgggcgacggatgagtcacaacgaatgtcatgggaattgagcgaacatttggcccctatttaaaatttaaatggtaaaattttaggaatttttattttgccgtctgtcaaaaaat

SEQ ID NO: 40265 - DNA, 615 bp, Heterodera glycines
aaaaaacgatagcaaaacaatcattccaattttgttttttttattttcaaaaccaaaaataagcacgaaataagcacgtaatgctgaaataagcacaaaatcttagaaataagtacacttgggagccctcttgtaagcagtatactcagggtagccagatgaaaattttcaaaagcctcattttgagtcaaaaagcctcatttttacaaatttattcaaaacacatttaaaatgttcaaatgttatatttttgattgtccaagtccatgatcaatttgagcattttttttagggttgcaaccccgacgtcggggttggaaaattcggggttcggggttggaagtgtcggggttcggggtcggggttgccaaatcgttcggggttcggggtcggggtcggggtttttcaatttttgccttatgccaaatagtcaaaatttttttaatattttttcggaaataatatttattaatttccataataatatttgtattgtttttatatttttttatttctttttatcagaaattttgtatagaattaatttttttttcttgaaattctaaaatttttattacttttttgatttccaaaacatcttttttcacataactc

SEQ ID NO: 40266 - DNA, 807 bp, Heterodera glycines
caatcgctggaactcaacccaccaacatttcaatctctgggactcaaatctccgacattccaaacactgggactcaacccaccaactttcaatgcccttccaatctctgggactcaacccaccaactttcaatggccttccaatctctgggactcaacccaccagcatttcaatctctgggactcaacccaccagcatttcaatctcggtgactcaaatctccggcattccagacactgggactcaacccaccagcatttcaatctctgggactcaattctcaggctttccaatcactggaactcaaatctctggcattccaaacaatgggactcaaatctccggcattccaaaacactgggactcaaatctgcggcattctaaacattgggactcaacccaccaactttcaatgacattccaatcactgaaactcaacccaccagcattccaatactgggactcaattctccggcattctaatctctgggactaaaatctccggcattccaaacactgggactcaacccaccaactttcaatgacattccaatcactgaaaatcaggccaccagcattccaatactgggactcaattctccggcattccaatctctgggactaaaatctccggcattccaaacaatgggagtcaacccaccaactttcaatgacattccaatctctgggactcaacccaccagcatttcaatctctgagactcaattctcaggctttccaatcgctgggactcaacccaccagcatttcaatctctgggactcaaatctctggcattccaaacact

SEQ ID NO: 40267 - DNA, 998 bp, Heterodera glycines
aattagggcaaaaggaatgactgaccagggtgtctgtcgatgaactgctccaccttgaagaaggacagaagagataatgttgaaggaccaatcagagagaccaatcaaatcacctcagtgggataaacgttctctccccctcggacgatcatatctttggaacggccaacaattgagacggtgccggaggaatgcatcagcccaatgtcactggagagggaaggcaatgccaaagaaagtgtgctctcatcaaaagacccacggacaaaagacacaaaattaaattaaaaatatataaagggtttttcgggaaaaaccataaaaatttctgctcaccccgtcctataccaacggtcctttgttacttcggacgagccgtgcgtgaccgagtcccaatagccgtacattaccgaatagcctctgacaaacactcaaacaaagggaaaagtaatgccaaaatgggcaaaatggggggggggtgggattggcacgtacagtcgcctctttgcccgcggggggtcactcgtccttctttgtctacaattaccgcctgaaaagggaatgggcaaaagggggaggggtcaaagcgagagtttgagcctaatcacctctaaatggtccataatatggccaacattgcgaattctctgctccggcggatcctccctaattgacataaacgaaacgggcgaagtttcggtggtcccatagcacacttgaagatccttcatgcccaactcattgaccaatcttgaatttacaaataaaagtcaaagaaaacaattcggaggaggtcattttattgcctggagcagagagtgacggggcacggcgcgcctaaggaaaagccaattaattagccaattaaaaccagcagattgttggtggcgttagcacgtgtcgtcctatgtcctccctcacctgctacaatccctgaacggatggatgagtagtcgaacgaagggtactcagcatgactcatcatgtcgatgtactga

SEQ ID NO: 40268 - DNA, 736 bp, Heterodera glycines
  unsure (1)..(736): unsure at all n locations
ggaatggtggtgggttgagtcccagtgattgaaatgttggtgggttgagtcccagtgattgaaatcctggtgggttgagtcccggcgattggaatgttggtgggttgagtcccagtgacttgaatgtggtggattgagtcccagtgattggaatgctggtggattgagtcccgttgattggaatgttggtggattgagtcccagtgattgaaatgttggtgggttgagtcccagtgattggaatgctggtgggttgagtcccagtgattgaaatactggtgggttgagtcccggcgattggaatgttggtgggttgagtcccagtgattgaatgctggtggattgagtcccgttgattggaatgttggtggattgagtcccagtgattgaaatgttggtgggttgagtcccagtgattggaatgctggtgggttgagtcccagtgattgaaatactggtgggttgagtcccggcgattggaatgttggtgggttgagtcccagtgattgaatgctggtggattgagtcccgttgattggaatgttggtggattgagtcccagtgattgaaatgttggtgggttgagtcccagtgattgaaatactggtggattgagtcccagtgattgcaatactggtgngttgagtcccagtgattggaatgctggtgngttgagtcccagtgattgaaatactggtgngttgagtccccgccgattggaatgttggtgggttga

SEQ ID NO: 40269 - DNA, 1674 bp, Heterodera glycines
  unsure (1)..(1674): unsure at all n locations
aaaacagggatggtatccgtccttggatgccaaggacgtccttggaaattgactcttttccttggaaataaaaaatgtcctcggatgccaaggacgtccttggaaaccagcatttggaaaaaatttaataaatcaacgaaatttgagaaatttttgaaaaaaatcaaagaaatttgagaaatcttttgtattttttaacaatactttgattaattatggcattatgtcaataaaaatgtaaatttttttctcatgtttgagaatttttgaaatttatgacacaaagttactaatttttcttaaaaaattagcctaaaatcgtaaatgtggaagcgcttcgcaaaaaaaacatttttaaagcagaaaaaaagtcgtcgcaaatgaggaaaatgatcagtgaaaacaaaaaactattggaaaaaatccattctgacgaaaaatataaggcatataataaaaattttaaatgtccttggatttcatgtgttttccccactatgtccttgcaaatcggcatgcccgtagttggaagccgactttggacgataccaactttggcgtaaaagaataaaaaattagaaaaaaaaatattttaaatttttcgcattaaaagtaaaataaatttaaataatgaaaatttactaggttaataaaattgcggatattaataataaaatgaacatttataacttaaattcgcactaatgaaaaggacgtcattagtttcgaatggatgaataatcgaaattcttaaagaaaaatgtagattaaaataaatataagaataagattaataaaataaaattcatttaacaaattttatggattgaattcctcttgcacacctcaaatagttacaaaactggaaataaattacaaaaaagctacagaaagtctgttctttacaaacatagacaacaaaattaacataatatccactaaaaagatagaataattatactttgaaaaaataattaaaaaatacattaaaagataaaaaccactaataagcatttatttattataatcatatccataggataaaaatgttaataaacatcaaattttgtctttactaccttaaaacataataattgaattaagaaagaattgcatcttttaagtcgcaagattggtacaccgtaaaatgcatgtttaggctaaaatctgtaaattatgtaaaggcttggtcatttccgcgaatcagaagacgattaaaagaattaaaaccataaagaaatgttctaacttatttcgttatacattagttaaacaaaaaaaaaaaccaaaattgtatgaaattagagatttatggccaaaagtacgtgaatatataatgatatattagattaatatgaaatatattgtttaactttaattttatatcttaaatttacattaaaaagacattgaaaaaattctgaacgaattttaattaattgtaataactaatatgattaaaattccttttctttgatccgatcattacaataaaattactcaaagattttgattttatttagttaaaaaaattttanattaagtttaaattgaatactaaatttgtaaatatttgaaaaataaaataaatgatataatgacaatactttataatctattgtttaagatttttgttttaattaatttcgtaaattgtatatatgcgcatatact

SEQ ID NO: 40270 - DNA, 1046 bp, Heterodera glycines
  unsure (1)..(1046): unsure at all n locations
ggcaaaaatttngttccctcctctttggaaatggtcagaaattttgcttgtnaatattcagatacaaagtttttttactgaaaattttttacacactacaggatgaacgcaaataaataatgtttgtagacaaaagaaaattggcgaaaaaaattgcctcaacaatcagtggtgaaactgaaagaaaaaaacttccccaaaaaaatcggagcttttccgacggcatcagctgcatttccaacagttcaacagtataaataaatattaggcaaatgaaaaatttttttccttcctctttagaaagtgtctaaaaatttttgttgttaatattcagaaaacgtgttttttttactgacaatttttttcaagagaaggatatgaacaatcacttataaggctcatgcttggagataaaggaatcggaaaaaaaaattatctcaacaatcagtcgtgaaacagttcaataattcggaagcagtgccatattgggaaaagatgcacaagtagagtaggctcgaaataaaggcaactgccgaagattaacaaaaattcaaatttattggccccgttctgctttgacaggccatatctcgccagggagtggcggtagaccctttgttgatacatttgaaaatgtagagcgcgtctagctcattcgaataacatcaaactggtttgtttttgtcacgaaacaacccgctgatggccacgtcgaagaaaagtcccaaaatttgacatccataaaactccattttttcataggccagcgtgtttaaagcaaacccgaaactgataggaaatttaaattgatcataatagaagtttaatttttatttgtcccatgcattttctgggaaatcttttcgcgaaaagttgaaaaatttcaaaacggcagacaacagatgcatttcaaacaattcaacaatataatataaaatttaggcaaaaatttttgttccttcctctttggaaatggtcagaaattttgcttgtaaatattcagataacaagttttttttactgaaaattttttacacactacagga

SEQ ID NO: 40271 - DNA, 948 bp, Heterodera glycines
  unsure (1)..(948): unsure at all n locations
aacttaacaagacaaattttttttgaatatttattgaaatttcattacccgaaaaattcgtattttacgatggcatttaaaaaaaaaaaattttagcatttgaagcagaaaaccaagttatgataaaaaaaatttacaaataattttggtcaactttttcttttctgcaccaaaatggtcaatttgggcaattaaaaatggaattaaaaagcatacctattagggacaatttcattttcttagaattctattttgtctaaaattactcaaaaattttcaactatttactctaattatgaccaaatataaaaaatatggttttttcaaattgattttaatccaaaataaattcatttttcattgatagttttaaaaattttgaattatttactgtcttagtagaataatttatagagaattgtttagcataattttattctttttacaccaaaaatgctaaataactcatcaagacattaagaaaatctcatgaagtttgaagtatttaaagaagaaattgtatatttatatgtttcattcattaataattacaaaatataattatatatattatcatacatttagccctatttatgctaaatgatttttaattatttggtaaaaaattgtcaatccgagttggcgattgattttgattgttcattttcattatcatcggctgcaaaggttgtacagttgttgcaaaaattgtgtttgacggttgaagcccgacgaacaaagcacgtaatcgtgcccattcttttgtaaaagcattgtgatattcagtgctaaaaattggcattttaatattataattaataaaataaagtaattaaataaattaataaggccttttaatttttttagttgattattttaatttanaactaattattgttntaagaaaattattaataacatttctgtctatcatcaatttttaattaa

SEQ ID NO: 40272 - DNA, 913 bp, Heterodera glycines
tattcaaaacgagacaaacaattaatttaatgcaaaatgattgagagtcagcgactccatctcccactccgtcctatccaattccgtccctgctaactccgtcccataaattattaattattttgtcatattttttgatttttacaaatcgtttaaatttttagtgaaattatataaaaaattaacattataattaatcttggcggtgcttatcttttcggaggacaaaatattttttctataaaaaaatttaaattcactcaaaataactcccaatttacacaaataaatagagccgtcggggaccggatcccaccggggtttttcttggggtcccgatcctggactttttttagaaaaaagccgggacaggtcacggcaatcttatcccgcccgattccaatcccgagtcccaaacctgcgaattgagttcgggattcaaaaaaatttccgggcggtgcctaaggcaaaatgcctaaaattatttctcattattttgattgatagtgagtctaataataatttttattaaatccaatttaagttcaaaacatttttagaaatttttccattgatgactcttatcggcactttttgctttgcaaaataatattagataaaatattgtattactatgttggtaaccatttttagaaaatttacttaaattttttcaattttttgaaaatcgagaagcccggctgggatcccggcccaaaatgacgctcgggatcaggacccgacaaaagcagatgtaaatccccccggggtttggtccttacaaaaatcttttcaaagtctgaaattcaagccttgatatgtctgaaaatcaggagacattggattggccagctcttcttactagggttcggacccagtgggcgggggtggcttttcgcgggggcgggggttg

SEQ ID NO: 40273 - DNA, 1332 bp, Heterodera glycines
tttctttttccatctgatcagtgttgctctttcaattcccaatttctttgcaattattctgtcgctgattgttggatttctttctttaattttgaaatattgcttcatctttcgtagtttttcatctttggaatatttcttatgtgcttaaaataaaattaattaaaaaattataaaatttcacttacttttatgaggcaccaattcttttttccatctccaaaatgttttttcagaaatgcccaattccttcacaaattctttctgtttgcgttggccatataaacttttaaattcatcaaatcgttcaatgaattctttctttttttgttcataaaaactcttttccatccttttaattttatttaaatttaattcttttttccatttttgtattttgtcgcgatttgtgcctaataattgtccaatttttgtctcaattttaactctgtttttccattgttattttccgttttccttcagcttttctttaattcgttcaaatttttgaattgtttcaattttttcatttggactttttaaattttctccatccatttgatcaacaaaatgaatattttctattttgactttattcaaatttaattcttttttacgacttgcacctaaaacacttccaattttgaattcaattttggttctgtgtttgttttggtattttccttttgctctcaaattttctttaattgcttcaaattttttattatttctcttttttgttgatcatttggatagtttcccatttcttcacccatttgatcaactgttgctgagttttcattttgctctttttggtcaatttgttccgtttttacgactatttcttctctttcattttgtcccattcttcgccaaatatttcctcaaaatttgattgcattttgccggtttcaatttttttatcgtcaatttagaaaaaatatttaggcattttttaaagttttatatgcatatttaacatttcttagtctatttagcgcatatatttttattccctaaaaaattttgtcagatttaatttcaaaagaattctttaaataagttcccgcttttttctctaaaactctttttcattttctttttattcaaattcaattctttttccattttatttattgtgactttatttacttaagtgaattgctaatttaaattaagctttttaaaaaattaatttttcgttatttaaatttatctcgtttttcaggaaaatttttgtacaaaaatttcaatttttggaaacaaaaaataaaattagcaaacaaaatttcatgttttcttgcaattaaattcattttttctattttattt

SEQ ID NO: 40274 - DNA, 1431 bp, Heterodera glycines
ttttaattgcatttttaattgtgctaattgaaattggagcagaaaagaaaaaattggaacaatcatttgaagaaatatttaggagaaaaatgggaagaaaaagaagaagaaaatttagaagaagaaaataaccaaaatgaaaatgatcagaaaaaacgagaaattattgagaaattttacaaaattaaagaaaaaattaaacaaaacgaaaaaatatataccagaaaagaatggaataaaattgaacagaaaatagggaaaaaattggggacaaatcgccaatacatttacaaatggatcaaagaattgggaatatataaatggcacaacaaatcaaaaacggatgaacaaaaaattgaaattattcaaaaatttaattcaatgaaaaatgagtattaacaaaaaggaagaaaatattcaaaaaaagaatggaagaaaaatttgcagaaatttataagaaaattggaattaacgaaagaagaattaacaaatggaagaaacaatttggaatgaaaggaaaaataacggaaaagaaaagatagaaaaaataaaaatttattggcaaatgaaaaatgaaaatccaaaatgagtgatggaaaaattgcaaaaatattgaaaattaatcgaaagaacattttcgaatgggaagaaacattttagagaagaaaatgttcaagcataaaaatgggatgaattgagtttttcaagaaccaatgacccaaaattcaattattttacagagaactctttttttatgtttgatgtataaactgttttaatgactgcacatttaaattgtttacgtaggctctttttttaattgattcattaaaaaaaaattttttatgacatatgaaaattgacagtgtcaaaatttaccgaatttttcatgaaaaaaagaatttttttgcgaggcagtacatcaccctttcgccgcccacctggtactgatgcagttggtgttccgcacttgggccaacatgtgttggaagtccaccgggcggccgtccttcgcctccatgtacgccgggtcgaggccgtcgtcgccaaacgtgaactggaccacctcgttggtggaggtgcgcaccgtgttgtcatagttgacagccaaatcctggcacaattgaagcgagcagaaataataatacgataggctaattgtaactgatttttaatgttagaaaataattttttgggaaaaaaaattttggtttaaaattcaaacaaatttttttattatcccctccaaaaaagccataaaaaaaatccgctcaacccaggggcagaaaattttttctctggaaaccggaaattccgaccacataaattttggaattccggtcgaaaaagaatttgaagaattcctgaatcggagtctgtgtcccatccgctgaggcattaaatttaaaaaaaaattgcgaaaaaaacgca

SEQ ID NO: 40275 - DNA, 1265 bp, Heterodera glycines
  unsure (1)..(1265): unsure at all n locations
gggtggtaaaaaaatntttgaaaaatcaataatttttgcctcttgaaaattcaacctaaattttaaaaattcataactcgcctcaaaattgtccaattcagctcatttaaagcattaaaaatcgagaaaaatagggagaattttatgagatttatttgaaatttataccacaaaaacaaaaaaagttattccagaaattctggaaattttctatttttcagaaaaaaatttatatctcggttctgaaaagtcattagagaagagtaaaatactataaaaatccgcaattttttgctctattatataaattttatttgacctttttatcatcttttaaaataaagatacaaaaataaaagtgattttggcattcgagaccaaagggggtggacaggatttttgagtaataaatttttttcaacaaaaatcttccaaaaacatgtgtttatgggttatttgggccgttgatcacgaatacgtaatcagattttacttttgacattgttaagacctcagaatccctgtgtgattggggattctgaggcatcattttgagggggcggggggcaagttcggatccggacggtgtacattatttttctatttatttttacgttattttcaatgattttaattaatttaaaatattttgctgagttaataaataaaaaatgatatttaaattaatttttttttgatgaataaattttataagttaaaattaattattttttttaattgatagaatttcatgtattttttaattaaatttgttaaaaaatattttcattttaatttaatgaatttactaatcactgttgtatcaatttatatttaaagattttttgtaaattaataataaaagaatttatgtaaaaaataataattatctttaaataaagaatttcatattttttttaattgaatttataaaaattaatttcatattaatttaaatattcaattcttgtacatttcaaaattctctttttaattaataaaaggaatgactaatttattttttaaaatttataataaattgcattcaatttttgtactacttttaatcactgttgtacctcttttaatcattttggtacctcttttaatcactgttgtacttcttttaatcactttggtacctcttctaatcactgttacacctcttctatcacttttgtacctcttttatcactgttgtaccacttctaatcactgttgaacctcttctaatcactcttctaatcgctgttgtacctcttcta

SEQ ID NO: 40276 - DNA, 1187 bp, Heterodera glycines
taagaacgttcagtcacactatcatactttatgattatatgtagtcacattatgtattttggtctactttttttgatactgcaaatttccaaaattctaattgctttttttatttgagtgatatatgactttttagtcaatattaaaaataatactttataaaaagaaaattatatattgctttttaatttataaattatatattgtttttaatttaatctttttttaaatttgcatatgtacatatatgagtaatcgattaatacatatgataaaatttagcttaataataaaattatatttgttacgtaatacgtattaatttaaccataaatcattatgaattggtagtaccctatttaaattataaattatcattttatgaattatttatttttataattgtacaaaagccaaattaaaggcagtgttaatattgtaatgccttttcaagacaaaaatataagaaaatgccgaaacatttggctttcaaacatgacactcataaatatttttgttgcaaaacgctaaattagaggtcctattttttatgttttctcgattttttggcggcattattttttgagatataattttattaaaaaagactaacaattttttcatttagatatgccattaaatattatcactaatttattgtgtatttgcctcttttttggattggctcaacaaatttatgggacaaatccaaaagcattttgctgacaacggtaactgcgaactttttcgaattgcttaaatattttaattcaaataataaaaaattaatttttaccaatctgttaaataattattgtacaatgttgttataatttgaaaataatttttagaaagaaataagcaaaatgtttcttcatcttcaaacagcgtagtaaaaagtcaggaagaaaatattaaaagtcttatcaaggtaaatgcgaagaaagcaaaataatttttaaatcattataaatttaggcaattttaactaaaacattttctccaaaaatgctgaatattttgaaagggaaaggtaaagaaaaagtgcccgatgagtgcgttaaatgcccaatttgctatgaattagtaatgattgatcagctctgtttctgtgatcatttaattggtgatgcaatttttggtagcagttcaaacaatgcacaaaaaggcatagcaattaaaacgaa

SEQ ID NO: 40277 - DNA, 556 bp, Heterodera glycines
ttcgttcacctgtacaaatcgagatggagttggaagttgggtctactttttctagatacggaaaggtccaagcttttcttggccaatttggagcagcgtaaaaggagcgcaatgctacaatttaatttcactgatggagaagcgaagaaaacaaatgataatttaaatccataattttggagaaattttaatggaaattcaaatgaatgaaatttaaaaatcatttttttaaacttcagttaaaattttctcagcctttttatttcttcaattttccgaaggcttggctcaaattttgaagaaatcaagaaaattaaactaataaatgttaacgattgatcataatgatatttttctaattaatttttccttgtcttaatcaacaaacaaccctgcccctacccatggttgcagacctaaccaccaacttttaaaaatctgccaaaattcagagaaacaagataaaaatcccaaataagattcataaaatagagaaaagtcttagctttcgaaaaagtaaaattattattaaattttacttttaatataaaaaaaa

SEQ ID NO: 40278 - DNA, 233 bp, Heterodera glycines
  unsure (1)..(233): unsure at all n locations
cataatttagacgataaatctcaaaatcaaaaaattcgaactttcgactttttgttcgaaatcgggctcgggatccggaattggtcgaaatgaatatcggatcgtgatcagcgaccccgaaaaccctttgcagcatgtttttaaaagggtgaacacaaaaaaaacattttcaaaaaagccctctaaagggatngtaactattacccttattttccaccgtccaattttgacct

SEQ ID NO: 40279 - DNA, 974 bp, Heterodera glycines
tttccgggagcgggaatcccgtaaaactcccgctcccgtacaaatcccgtccatttttaacgggagtgccgggcgggagcgggagtaattcgaaaatttaattaaataatcacaaaaatatttttaatgcacaaatttgaaggacaatccttttattaaagaaaaaacatacagaaaaatttagtatgcataaattgaaataaaaaatctttttttctgtcgaaaatcagaaatttttttcaaattgctccaaataaattattttttataatttattcgaacaaaaaatttattaactttatcttttcgacttcatttataaattgtcagattttgtcaaaaatgaccaatttttggaattttagccagttttttaagaaaattttccgggagcgggagcgggaatcccgcaaaactcccgctcccgtaaaaatcccgttgggcaaaaaagtgcgggagtcgggagcgggactcccgtaaactcccgcgggagtcccgattcgccggtctctacttatattaaacaaaaataaaataaaatgtaattggaaaaacaaccgcttttttgggtggtaggcgtaaatccggcatttctctcggaacgttttgactctgtaaggcgctttgacaaaaactgcttttcttttgcttttgttttggcaataagtcggtcaacatttggaaattggtctagaattttttcggcaattctgtcaagcccatgcgccagacatgtgacattcaacaaattgggataaaagacattaaattttaatttcgtaatttcaataagggaatgaaacctttaaatctgtcgacattttcaacatatatgaggcggcatctgtgcttatcaacaaagcattttaacatttaattgtcaaaattgaaattggagcagaaaagaaaaaagtgcaacaaaaaacatttgacgaaatattggagaaaaatgggaagaaaaagaaaagaacaga

SEQ ID NO: 40280 - DNA, 1036 bp, Heterodera glycines
gcctatgtccaaaatcgggttcaaacttaaaatttttcactaactgatagcctaaaaagcattaaaattaagaaaacagagtcttttaatttatttggagcagtaattctgttgtttgaaaattgttatttttaaaaaatttgctgacaatcaaattatcagaaacaatcactttctatgacttatgtatatacataatgctgtttaagctattagtaaaattattacttaaaaattcagagccaattttagaaaaatgtaaaattagaaattaactgttgtgtacgaacaacagttaaaaaggaaaagtttgagttaggattacaaccaaacaaatgcacaagttagtaatgagaggtcaaatgagaattaattgtcagagaaattaaaaatgacaaatgaatggagagaagagcgaggaaagggaaaacattcccattttatgggcaatcggcgcaacgcctgatcactgatctgtagggtcgcaaatttcatgtatttttttctagattctcgatacaggctggttttagatcgtgtccagacgtttgcgaacatttgcgcctcgggcattttcgccccagacatttgcgcctatgtcccaaattaggttcaaacttatattttcaatcttagatgtcttaaatattattaaatttaagaaaatgttatttttagtttattaggagcagtaattctgttgtttgaaagattaattttttttttaaatttgctgacgatcaaatgttcggatacaataactttcaatcacctatttaaagctgtttagccaaaaagtgttgtgtccatacccaaactctggacttttcccggttacttttcagcaagtatcttttaagcacaatttattaaaatgaaaaagcaaaagtggacatgcaaaattaaatgaaagaataatcgctttttaaatagtaagaaaaacaaagcaaaatgttaagttagttgtatcgctttaggcagggaacctgagtcaaagaatgggtgagtgaactcctgaggataagtgaataagcaa

SEQ ID NO: 40281 - DNA, 890 bp, Heterodera glycines
tggccttttggaacataaaaacatatcgtacacatttcgggttttggcacatattttgcacatattttggcatttttgagaaaaatttgtaataaaaaatacaagaaaattgaaaaatacaccccctaaaaatcaactttcttgcttgccatttcctaaagtttttcaaaaattatctatttatttcgaatgcgaaaatagccaaatcgagttcttaattgtgtcattagatttcgaagttctctactgggaacttttaatttataaaaataatttatcagaaaaagaccaatattaccccaaacacttcgaaatgtatttgattttcaattgtgcggacgaaaatgataaaaatgagattttttggaatttttatgtaaaaatacacttgatttttccaatttttaacacatattttagcacatatttcaggatttttagcacataaaaatccgggctctagtgattatccttttatttattatttttcatgacgattgttttgcattattttccccatttgaacattttgttgttgtcatttattattaatagggttataagttgtatgcactaaaaaatgccaaatatgcgcataaaatatgcactaaaaatcccccaaatatgccctaaaaacccgaaaaatgcccaaatatgcactaaaatatgtcttaaaaaactgccaaattgcttttagccctcaaaaaatgccaaaaattgtgtataaattaagaattgacttttaaaacaccaaaacaagggctaaggagcattttttagacaattgcaaaaatattgaaatttccaaatttataaatttgattatattatatgataaaacaaaattacatttttatatacataaatttttttccaaaaattcttttttt

SEQ ID NO: 40282 - DNA, 809 bp, Heterodera glycines
attccattcgaaagaggtcgagagtggggagaaggcaaacggaggcgggggggggggggggcgtaatcatcgtaatactgggcaaacaccgccgaagaaagttgaaatgaaatgagagacggagcggaggacggtattttaaaaaataaattgcgcaccaactcacccgcgggggcggggggaaacgccgaaattttagcccggaatttcggcgaaatttcaaattgtaattttgtttaaagtcaccgtaatttacatacaatcggttgtgtcaaagggccgaatgtttttgggttacgaaatttgaaaatcttccgtcggatgtttttaatgtgtggcctcatgtttttccggctgagatgtgaagtttggtcaaattttgtctcacaaattttgtggcctcgtgactccctcccagcggtggcagggcaatgattcgggtcaaagtttttcctttccccgtgattttcatggaattagaaaattggtatctcatctacaccctcctaccctctcgttttggtggtaactctattcattctcctcttgaagatgtatcaaattgtgcatatacatcgggtatttgtaccatgagtgatacaatccaacttatttggaaaccgaaatcagggagcccgtgacaatttcggatctttggagtatttaatggtcgaatggtgaacaatacctggttagcagacgaaactcagcttgcgctaacagactcgcgggtaaaacctatggtaaagagctgtaacataacacttcgattaactgaacaaaatttagcttatcaaatcattaagaat

SEQ ID NO: 40283 - DNA, 1350 bp, Heterodera glycines
ttattgctgtttaactgttgtttggtctgaaacttgttttatcgagttgattttgattatttgcgtgtgttctgaggatttctctgctcgtaattgctctgtctcttattttcctgtttttttgtttatttatcctctcgatctgttttatttaaattccaaatgatgtaaatatgttggttttcccttttccttaaatgtgattttaaaataatgttacctcgttcttaactatgcataatttcaagtaaatttaggatgttaaaagcttaccgccgttgctgaaaaaagcacgcgcttccacggcctggaaatttgttttggctggcgcatccgccgacacgaactgttcccttttcctggacgaattcgcaaaattattggaccaactgccagaggtaaataaacttcaattattaaaatgggatgggaatgtttatgctgagccgaatgaatggatgatttgcggaatatttacaaaagaacgtttaggacgatcgccatgccggcgttgttggaaatgtggcagctgggccaggccaagccgcgggatacgatcccgattctcgtttgctgttggtgctggcgacgaaaaatcttttggaaatggaaggaagcaaaaagacggccagcggaggtggcactcttggcagcggcgtgccgccggaattcatctctgttggcatcatcataagacaatttcaaattaataattttcagggtttcatgcggcttgttgggttttatcaacaaattgttgtgtccgagtctgctgaagtgtggcggtgtgtgtcaaacacttaccacgacgactgcaaaaagttttttgcggaattgggcgctgtcttgcgcttagccaatgtaagttgtttaatgcgaattttcaaaaattagaggggtgaaaaattcggaaaaagcgggggattcccggtggttttcacctgcttttttgattttcatgattaatgttagttaatttagttttagtatgctggtggttctttgagtgttaaaggcactttgtttggactctcccgccaaaacgtttgccaaatcaacgtttacggttcgagcatcgccatgtgttccgttcatttatatgttttcagtttacggtgatatctccaatggctccgtcggtactcctttcgcagctgacgaacagaaggttttgttgggcgagaatgctgggaggggtggggttttgtctccgccgttccgccgcgagcccaactctggactatatttttttctttgtcatctaaatttaataatcttggtatcattccaaatctcttcacatgctccgttagccttacaaaaaacagacaagagctgctcgttgagttg

SEQ ID NO: 40284 - DNA, 194 bp, Heterodera glycines
cggtgtcattatgttactagatcggggatcgatccccgagcggcgcgtagcgggggaggtgggtggcggaagaagaaaagggtggggggagtatgagtatgatggtcaatatggagaaaaagaaagagtaattaccaattttttttcaattcaaaaatgtagatgtccgcagcgttattatagacctgccaggc

SEQ ID NO: 40285 - DNA, 814 bp, Heterodera glycines
atctccgctccctttggttggctaaccggacttgcccctgtcgtcgccactggtggtgcttctcccgtcccccttggcgccccatggccctcgtctcttcccccgtgccgttttccctccccgtcctgcgacactttcgtccttccgtaatcattcttcctcagcagcagaatctgcttattcgttcccccgttttcctcattttcctcctttgctccctcttcctctgcttctctgccgttttcattctgttcacagtctctcatcaccggcaaaatgcaatcgaatccgagcagtgatgtgaagtctttgaccagcccgaaatcgccgttgacatcgccaattgtgctgagagcccccggctggtgatgttcagcatggacggagttggccatgctcggaatggccccttcgctcccggacgaacactgctgtggccgatagggcggaggaggggggaggaaggagcaagagccgcacagggaggagccaatggccgagtcggactgttggacgaggaaggccaagtgggggcgcgaggagggcgacgaagtgcttctgaaagtgagtcccttggcactctccgccgaccatttgatttttgagcttttccaaatttacatttttattttttcaatttcccccatttttcattttaattttttttcttcccccaacgtttgcttctgctttttctgctgttatccatcctcaaaattccacctttatttttatctttggaatttgcggaatttctccgtttttgtcaacaaaaaaaaaagggggcttttcgttttattgcaaaagcgtaaag

SEQ ID NO: 40286 - DNA, 1165 bp, Heterodera glycines
caacggtgtagaaaaaaagagatagccattttctgagaatatctattcttttgagaaagcattttcaaaccggacattttgtagggctcaacggcagatagtaatgcgtttttggggaaaccccacatgtacaacggtgtagaaaaaaagagatagccatttttctgagaatatctattcttctgagacagcaattttcaaaccgaccttttgtagggctcaaccgcagatagtaatgcgtttttggggaaaccccacatgtacaacggtgtagaaaaaaagagatagccattttctgagaatatctattcttctgagacagcaattttcaaaccgaccttttgtagggctcaaccgcagatagtaatgcgtttttggggaaaacccacatgtacaacggtgtagaaaaaaagagatagccattttctgagaatatctattcttctgagaaagcaattttcaaaccgaccttttgtagggctcaaccgcagatagtaatgcgtttttggggaaaccccacatgtacaacggtgtagaaaaaaagagatagccatttttctgagaatatctattcttctgagacagcaattttcaaaccgaccttttgtagggctcaaccgcagatagtaatgcgtttttggggaaaccccacatgtacaacggtgtagaaaaaaagagatagccattttctgagaatatctattcttctgagacagcaattttcaaaccgaccttttgtagggctcaaccgcagatagtaatgcgtttttggggaaaacccacatgtacaacggtgtagaaaaaaagagatagccattttctgagaatatctattcttctgagaaagcaattttcaaaccgaccttttgtagggctcaaccgcagatagtaatgcgtttttggggaaaccccacatgtacaacggtgtagaaaaaaagagatagccatttttctgagaatatctattcttctgagacagcaattttcaaaccgaccttttgtagggctcaaccgcagatagtaatgcgtttttggggaaaacccacatgtacaacggtgtagaaaaaaagagatagccattttctgagaatatctattcttctgagacagcaattttcaaaccgacccttttgtagggctcaaccgcagatagtaatgcgttttt

SEQ ID NO: 40287 - DNA, 790 bp, Heterodera glycines
  unsure (1)..(790): unsure at all n locations
tgaaagtggcacaaagcataactaattattaaaggcagtgagtcatatcactcacaacgaatccctgccattttttgcacgtttttgaaaggttcgcaagatctttaagtttggctttgaagacgccagcgtcggaagggtcgataaccgctctcattgtgatagggcacacgatgtcgaagaatttgcaattgggaatagattcagggcacggtcctcctccgtcattctgaaatgaaacaagttaaaacatctctttattagtcgatgcaaaatgcgagtctcaccggtttcttctcacaactgttatcaacggtgaattggacattcttgtcgaaggcatctttgcactcctcttccacagccatccgaatgctgagttttccttcgtttttctgctggaaataatacaacgatgcatccgggggaactccttctgagtccatgacactgaaaagttggaaagcaattaatccgtggcttcattggatattgtaactcacatcatcccgtccttctgagtgatgaagccgtgtttcgtgtccttctttgcacagacgaagttttccatgttcagcggcccgtcatcaccagcagccggtggctccgtcggcggcgggtctccctcggcgtgacagccccgacagatgatgagaagaataacggcaagatggaaatagcgnatcattgagattcggaaattaagagaatttctctcaaaagaaaaaagccctgttataagggcatgtgaatgggaagggtcgactccgtcgagcagagaccggcagcc

SEQ ID NO: 40288 - DNA, 1044 bp, Heterodera glycines
  unsure (1)..(1044): unsure at all n locations
gggcgaaggcccaccacgaggccgcgaagaggccgagtgagtaccttcggtgcaggaaaattattaaatttaaaaaattttttaattgctttttaaatatgccaaaaaatgtaggcttaacttttttagtgaaaattcgatcactcatattttttgctaattgagcagaagcgtaccaaactttgcagggatactcacgcggtaaaggactaacttacactgaaatgagcgccgagctagctgactcaaaaaaattttcgaaaatctgagtctttcgtttttatttgttttttgcataattaattcataaatatttttttcacaaaatgctctgaaacgcaccaaattttatttacatgctagtttaggcactctgatgctttttctatcaaaaagggagatgaataaatttttaaaaatttttaattcctttttaaacaggccaaaaagtttaggcttatcttttttttcagaaacttatcagaagcgccccaaactttgcagggatactgaaaggaagagaaataacctattttaaatattatctagtcagttcatttaaataatttttatccaaaaaatttttttttgggttttcggggcagtccccctgaaccgatgcgcccagatttatggggagaccgaatccttccggaatagcttcactatagcctgtactttaattctgcgttggatttttgctccccataattgtttgagtaccccaaacggacacttgaaaaaatcgatttatttttgttttcggggcagtccccccgaaccgatgcgcccagatttatggggagaccgaatccttcgggaatagcttccctacagcctgtactttaattctgcgttggatttttgctcccctataattgtttgagtaccccaaacggacacttgaaaaaatcgatttttttgttttcggggcggtccccccgaaccgatgcgcccagatttatggggagaccgaatccttcgggaatagcttcctctatagctctgtactattaattactgctgttggantttttgctcccc

SEQ ID NO: 40289 - DNA, 725 bp, Heterodera glycines
ttttggggagaaaaggggaaaatgggtgggggagggaccaactcaactcaactcaatcagtgattgcgatcagttgtgagtgtgttgcccgctgatcagtcggtgtttgttgtgtcacagcaacgacacaattgccgacaaagggagggaggacaaacattatcagaagaaaacaaattggagggaataaattgaaaattcaccgaacgatttgctttgagctgctctctcccccccccccccgccgtttctgtcatttgttttcgcctcgccccgctaattgccgttaattaccctttaagcaattaattaattaatcatcaaattttccacacatttccctccatttgcaatttctgtcccattgttttgtcggctttttgcttgttctgtctctgttcagaaagtgtgttcaattggacgaacgaaataaactttttcggggtcggcttcagtggcgtttcattttttcgtctttttcccctttttaaattatttttgctgcaatttgctgcttttccttttgcggcttattaattggaaaaaaacaaaaggagcctaaaatgggtaaaagaagtgatcaatcgttcaaaaaaccgctgcccgcccatttgaacgatgcgccgcgcgaagcgatgacaaatcgaatggacaggcgaaaaacgaagggatgggtggacaaagagtgagtgatcagtcggacgggacggggaaggggggggggg

SEQ ID NO: 40290 - DNA, 830 bp, Heterodera glycines
caccccccgttgaagcaacaaactgaaaaatgctgaagaatgtacgctgaggcaaaattggcttgggaaaatatgatggggtgtaaattgaggtagagaagtcagagaaaagtgtaatatttcttctttacttagcgacccaccgtggggcgggccggagctagttcctcctataggcgacccacccccaaaagggagaatcccaccccgtgggtcgcctggcgacccaccccccgttgaagcaacaaactgtgctgaagaatgtacgctgaggaaaaattggcttgggaaaatatgatggggtgtaaattgaggtagagtctgttacagggggtgagtcgttggacgactcttggagtgagtcgttagacgactcaaggagtgagtcgttagacgactaatggatgtttagggacagaaacgacccaccccgtgggttgggtccgagcaagttccggtttttgacgacccacggggtgggtcgttgacgactcatggggtgagtcgtataaggggcaagttgttgtcaaaagggggtgcatcgtaaaaagactcaccccgtaggtcagatcggagaaagttccttctattgacgacccatctttttaccgccgaagaatcataggaagcagctatctgcaaaatgctgaggaatgaacactgatccaaaatggctgctcttttatattcgggccatcagcatcgtggatttgccttaaggaaaaggggtggatcgtttaacacttatgtatttaacaaaaaatatttcattgtaaatatacataaaagtaaaaatagttaaataaaattctaatgcgcaagaaatttat

SEQ ID NO: 40291 - DNA, 843 bp, Heterodera glycines
ccggcgatacccggatccggtattttcccatactcgtacccgtaatcctaatttaatatacgattttgattgtttcgtttttgaataggagcctggcaatacttgtatttggactattataatttttaatattatgccttctattgttgctgtgccctctatttatgcacctccataagcgatcattatttggcaattatttatgtaataatcagagttagacagaagtgtatgcattccgtgattcattttgagggttgaattttcggtgatctaatggaaacaattctcacttttttcgattgaaaatttataaaattgtgaaggaaagtactgatagaataatttttcttttttttatgaagattatgaatttctagaaaaatttaagaattttaatgaatttgctaataatttttacaacattttcgattaaggtttttattattttttgtctttagtccccaaaaaatatggacatagatttcaaccgagaggcaagagcgtgaaaccgaatgaaatgtgatttttttcatttcaatgaaaaattaaataagtattttttcgaataaagccaaattttaaatcaaaatttttattaagaaaaaaactatatttatgaatcttttttgcgaatcttttttaggtatttttctaaaattcccatcccctatttattaataattaattttttattatttaaaatattttttgcattaaatttggttattttttgtaaaaattcttgttacttaaaataattcttattttacataaaagtatttcttttttcgttaaattatttagtttaggagaatttattactgctatgccggccgatgg

SEQ ID NO: 40292 - DNA, 953 bp, Heterodera glycines
  unsure (1)..(953): unsure at all n locations
catgattatccgaattgagtgcttttgctttcgacggncccgaggtattctcaatttccagtgcaaaattttattaattttaaaagattatgaacaaaaatgtttggaaaaccagtttataatacaacgaaatttttgaaatttcagtaaaataaatattttatgatatttaaattataaagccaaaaactgagctcgggccccaggtgaccaagtactgcctgtaggcgccgtctgggaaaaacgaaagttactaaaaaagctatttttttacatgacatttacaattggatttttgggaaattacaattgattaaaaataccaaggcttttaataaacatttcttattttcttgcataaaggttttctcaatgctttttaaatttatcatcttaaggacacacacattacgtgatgcaattggtgataaatccaaaagacaacaataccctttgccactgcatctctggacaaaacaatcaaagtttggcagttcggaagctcagtgcccaattttacgcttgagggtcgatgaaaaaggggtcagtccatggatctcactatcattcgaacttagggtaatggtttatcgaaataggtcaattgcgtcgattattatcacggaggtgagaagccctacttaatttcgggtgcggacgaccgactaatcaaaatttgggactaccaaaacaaaacttgtgttgtcacgttggatggtcagtcccacatggtgtcgcgacagtgctgtcttccgcctacgggatccgcatattcgtcggcggcttcgggtgacatggtcgtccgcagtggccacagtcggcaccagcggcgttacgccgtacgcgcagttgctgcccatgggtggtggcggtactggtgccatggttgactcggctacggctgcaaccaatacgcttatggcacaacagcaggcggccgctgccgcggcaat

SEQ ID NO: 40293 - DNA, 1139 bp, Heterodera glycines
tttttttttttttttttccccaaacccggttcaaaattaaaaaaaaaaacccttccccgggggaaaaaaaggggtttaaaaagttttttgggaaaaaaaaacctttcaaaaataaacccgggggaaaagggagggggaaacaagatttcaaaatttttcatttttttttagtttaatctctcaaaagcggtcaaaattccaaaaaaaatacccttcgcggtgcgaaaaagggggtataaaaagtttatggggaaaaaaagactttacaaaataatccccctgggagaaggggagtgggaaacatgattccaaaattttcaattttttttagtctaatctactcaaaacggttcagaattcaataaaaataccattcccggtgcgaaaaaaggggtatgacaagtttattggggaaaaaaagactttacaaaataatacccctgggagaagggagtgggaaacatgatttcaaaattttcaattttttctagtctaatctactcaaaccggttcagaattcaataaaaataccattcacggtgcgaaaaatggggtttgacaagtttattggggaaaaaagactttacaaaataatacccctgggagaagggagtgggaaacatgatttcaaaattttcaattttttatagtctaatctactcaaaacggttcagaattcaataaaaataacattcacggtgcgaaaaatggggtttgacaagtttattggggaaaaaagactttacaaaataatacccctgggagaagggagtgggaaacatgatttcaaaattttcaattttttctagtctaatctactcaaaccggttcagaattcaataaaaataacattcacggtgcgaaaaatggggtttgaaaagtttattggggaaaaaagactttacaaaataatacccctgggagaagggagtgggaaacatgatttcaaaattttcaattttttctagtctaatctactcaaaacggttcagaattcgataaaaataacattcacggtgcgaaaaatggggtttgacaagtttattggggaaaaaaagactacaaaataatacccctgggagaagggagtgggataaatgatttcaaaattttcaattttttctagtctaatctactca

SEQ ID NO: 40294 - DNA, 865 bp, Heterodera glycines
tgagcagttggaacccgagggcttggcttatgggcatgtttggcacccgtgagcagttggaatgggcatgcgtggcacccgtgctcagttggaacccgagggcttggcgaatgggcatgcgtggcacccgtgagcagttggaatgggcatgcgtggcacccgtgagcagttggaacccgagggcttggcttatgggcatgcgtggcacccgtgagcagttggaatgggcatgcgtggcacccgtgctcagttggaatgggcatgcgtggcacccgtgagcagttggaatgggcatgcgtgcacccgtgaacagttggaacccgagggcttggcgaatgggcatgcgtggcacccgtgaacagttggaacccgaggcttgcgaatgggcatgcgtggcacccgtgaacagttggaacccgagggcttggcgaatgggcatgcgtggcacccgtgagcagttggaatgggtatgcgtggcacccgtgagcagtcggaaagcgagggcttggcgaatgggcatgcgtggcacccgtgctcagttggaatgggcatgcgtggcacccgtgttcagttggaacccgagggcttggcgaatgggcatgcgtggcgcccgtgagcagttggaacccgagggcttggcgaatgggcaagcgtggcacccgtgagcagttggaatgggcatgcgtggcacccgtgagcagttggaacccgagggcttggcttatgggcatgcgtggcacccgtgagcagttggaatgggcatgcgtggcacccgtgctcagttggaatgagcatgcgtgcacccgtgaacagttggaacccgagggcttggcgaatgggcatgcgtggcacccgtgaacagttg

SEQ ID NO: 40295 - DNA, 465 bp, Heterodera glycines
ggaccgggatttttgacaaaaaccgggaccgggacttaccgggactagaaaagtctggaccgggaccgggacctcgattttcgtccgggaccgggaccgcaagaaaagccgggaccgggacctcgattttcgcccgggaccgggaccgcaagaaaagccgggaccgggaccaaccgggaattttcccaagagaaaaattttttgaaaaaattttgaaaatttgagtgcactttgttacgaaaatttcctaaattaaaaaatgtgccaagaaaattaattttcttttgggggaggaattcgaagaattttctattattctctggaaaatttttaaaaattttgatttcagggggggggtcttggaattttctgggtcccaaaattctggattttttaataaattaacaatttcttaaattttttgcttttaaatcgctgtttttgtggcgctgtttccctaagaaa

SEQ ID NO: 40296 - DNA, 731 bp, Heterodera glycines
atcggggttacgagatagaaaattgtcctaaaaagagatagccatttttctgagaattaattcacaatttccgcagctcttagggtaatggaaaaaattttgaagaggctctccggaacggattagcatcggggttacgagatagaaaattgtcttaaaaagagatagtcatttttctgagaattaattcacaatttctgcagctcttacggtaatggaaaaaattttgaagaggctctcaggaacggattagcatcggggttacgagatagaaaattgtcctaaaaagagataaccatttagcatcggggttacgagatagaaaattgtcttaaaaagagatagccatttttctgagaattaattcacaatttccgcagctcttacggtaatggaaaaaattttgaagaggctctcaggaacggattagcatcggggttacgagatagaaaattgtcctaaaaagagatagccatttttctgagaattaattcacaatttctgcagctcttagggtaatggaaaaaattttgaagaggctctccggaacggattagcatcggggttacgagatagaaaattgtcctaaaaagagataaccatttttctgagaattaattcacaatttcgcagctcttagggtaatggaaaaaattttgaagaggctctccggaacagattagcatcggggttacgagatagaaaattgtcttaaaaagagataaccattt

SEQ ID NO: 40297 - DNA, 739 bp, Heterodera glycines
agttaaagaacaaattatatctgcaaaaattaacttaaccacgacacgaaatccaaaataaaatgccaaatgtaagaaaaaaaactcaaaaagaattgaaataaataaataaattatttgatacaaataaacacttcatgccataaattccacatacactcgagcatctaatatttatggggagcatgatgaaaaagccaaattggacgtgaaattttaatattcaattattttactatttaattattccaaaaaagtaaattttagcaaattattcaataaaaaataaaaccggtaaaataaagaatgaaaatttataaacatatcggcataaataaaataatacttaaaacaaaatgacttaactttatttcaaaaataagaaagcagaaaattaacgttaaaaacagataattgaattaaacattcatttttatatgagactgcgatttttaaaacatttgaaaaagtattaaaatattcaaaagaaattaaatataatactatcgataagaattatgataaagatataaaaaaatccaattaattcttaataaaacaatgagaaagataaccgtggaatttgaattaaggagccgatgaacatcctcgaaagcttatcatgtaaaaacataaaaaataaagtaataatgaataattcaaattcaattaaaaaattaatgaattattttagtgttgaatataatatttttgctggctttgtatgcgaagcgtaaac

SEQ ID NO: 40298 - DNA, 1196 bp, Heterodera glycines
  unsure (1)..(1196): unsure at all n locations
ggagcgcaacggggccgtcttcatgaaatgcgtgattttttccgacctcatntaaaatacatgaagaagctagtcaagcagggcgaccctctctctgccggtgccatcaaatatttggtttttccttttcttccctattgttctcgattaataacattagttaaggtgaaactcggcaattacataactcagtatgtcatcaatctcatccaaacgtgagttgtccatttggttttgcggtaaattttttctttttctccagaaaagagcctgtcgccgtacagaagcaggtcagtttatttcatgtattcaaatagggagggactgccttttgcatttcgaaaaatattttcatcgattgccaataattaacgaaatacactaatatgattactgcaatagctttaattgatcaatttcgccccgtatttaataatttattttaagtggcacaactacctgtggatattcctctcacagtttctcaaaacacaccatgaccccgaattgttgttgagcacctacaaaacccacgcaaagcggcatcaccacgaaaacgcagaaagaaagtcggatgcccagcaaggggccggtgccgcggacgatgcgacgaggaatatggccaggaaaccgcaacattttgttaacgacagaaattcccaatagctttttataggattgaataggattgtcagatccagagaatttctgtctgaaattatactcatcaacaaacccttttttcgtaccggtcatgcatatttggatcttgcaatcccattgatcagacctttataacgttgttcgaattcgtggtacaccttttgtctattcatttttatatcctaagcgtaaaaaagaataaatccttttttagcagttagcatttaaaatagaaaataatttacataacgataatatctcttgtggtggagttggtggtttggctttttgtttgttaattgtcttctgcatatttacgattacgatttccctttccgcttgcggcgctcttctgtctcaattaccgattttccacctatccgccaccctttttcgtccacccaatcccttttacaatgtgcaatcgtcgattttcaagatggagatgtttgatttgtattttattcaatctttttggctttttccgctatttatggcccaatggcgtaggtccacttttgacctgccaggcc

SEQ ID NO: 40299 - DNA, 677 bp, Heterodera glycines
gacccttagaaattttttcaaaaaattaaaaccctaaagttcgtcatttttcagtttttttttgagttttcgaacatcccagaacggtaccatccgaaatgggctctgaaattcacccggatatttgaaaacagaacaatttaactattttcactaaaactgcaattattaataaatgtattaggaattttttttgtttgttatgggaggaaggaaaggctttactgccaatggctttattatacatatttcaaaaattggcatcttttctcactcatttttttgcctatcatggcttttcctcattttcccatttgccacagcagttgtaaggcattcgtggcaactgatatagctgaattatgaaataatttggcaaaaaaagtggcttcgagatggattgccaaaaatgcagagcatatattcatcgatttataattttttacaagaaaaaccaaaatttatttggcataaattcaaaaaatagtaaaaaagaagctttacgttatggttttggaatgcggtttttatgactagggttataagttatatgcactaaaaaaatgccaaatatgcgcataaaatatgcactaaaaatccctcaaatatgcactaaaaacccgaaaaatgcccaaatatgcactaaaatatgccttaaaaattacccaaaatgactt

SEQ ID NO: 40300 - DNA, 383 bp, Heterodera glycines
  unsure (1)..(383): unsure at all n locations
ttttttttttttttattttgggggggggggggggggggggggggtnttcccccgcgggggggggggggggggggggtttttatcttttttttttttgtgtttgtgtgtgtgggggggggggggggggggggggggggggggggggttttttttttttttttttttctttgggggggggggggggggggggtgttttaaaaaaaaaaggggtttttttttgttttttttattttttttttatttccccccccgggggggcgcggggcgggggggggcgttttttttttttttttttttttttttttggtgggggggagggggggagggggggttaaaataaaaaaaaaagattttttttttttttttttttttttttttttttt

SEQ ID NO: 40301 - DNA, 1496 bp, Heterodera glycines
cccgcccccccgggacgggaaggggccggccgggacccgagggggcgcccggggcagacggacaacctgggccttgcggggcctcctgggaccccccggcaccatccggagaaaagggaatctcccccaaatactgcgccatcgacggaggagtgtcttcgaggacggcacccggcggtaagatggcagtgtggcccgatcaacgatcagacgaccccagaaacatccggcgggtcgaatggggcggaggtggcggcgatgggagaggcggagaaatgtccatccgattttgggatcgattcgattttggcattcgattcttttttccgtccgtccttctccgattgtcccttcccttcccatttcatctcttttctttgtccctttgttgtcccttttcgctttcccctcaattaggcactcttttccttctccgttcgctcagtgtcctctaatgatgacacaccaaattaattgtgcaacacaactgaataaaattgctaataattaattcttaaattttggcatttgaaatcgcttaggagacgcacaatggcatttaaaaaggtacttttcggttgtgcggccacacctccacatttaaaaaaagtgtttgattcatatttgtgcgaattccttaggcgcgaagactgcaaagggcataacgatgatcatttcgatgacattttggctcaaattacgacttttgttccccctaaacaattgttatgctctatcacgggcgctttttttctcttttttagtatctttaaaaatgccaaagaaaatccgaaaaaaaaataaaatgaaagtgtgaacatttatttgattggtatcattaaacaaactttacataacgctaataattaatcttatcaattaaataaatgacacctttttctttcgacaaattcactttttttgtaatttaatgccttttgtttttttccataaaaatgccaaagcgaagaattccatcacaagaggaggtcaaaaagcgaagatataaccaattgagcaaagaagcgaagccgccaattgaaaatcattgacaaaaaagaacaactgataagccatcaattggccaaaccttcgccggtggtcaaaggcacccgccaaaaatttaaagttcgatagtttttggcaaaaaagaaacactgacggacggacccgcgggcgacagacagcgaacgcacagaacagcagaagcaaaaggggggggggtgaggctggggacgggctggagatgggtttgctacttaaccggtccgcgatcgagacagtgctggagggcatgagagagcagaaagaacgagttgatcggttgctgatcactcactccaggcgaagaatagccgaaattcacgcggacgatttgtccgacaaataatcactttatgcacttataacgggataatggatcacgctgatcagctgaagcacaaaagggaattataagggccaaaaaagggcaggggaaataatgggaaaatcaa

SEQ ID NO: 40302 - DNA, 940 bp, Heterodera glycines
cggaatttcttaaaaaagctaaaatttttgctcgtatttgatttatagttattaagttttttaaaatcttatttttgccacataaatatacataatctaaaggttgcactttttcttacttcgcgtagacgttttgaaattttcttgaattttgataaatattaaattatttaatttatagcaggaggtaaagtaaatttcaattaaaataattaaatttattatgtgcctaaagcataattcaaaaagttgttcaacaacgccattccaaggttgagaaaaacgctgtcagttttgctcatggttcgtacattggatgaattggcatatggtagtttatccgtattttgaacaatttttgggaaccgaatttgttagtatgattttgtggcgtttgtccatttttcttgcattcgatgagctaaatttactaatgaaaaattcttccatgaaaatgtaaaatttgggcggttgttctccatttttgtcattcgaattaaaacctaaaaggagctattaattaaaaacacattatattttggtctcatttctgatcattcgaattgggaataatattaataaaaataatttttttttttatttaattaaatattatcatttaagaagaattactatttttaattataattctcgaaaaatattccattttgttgacaaatttggtttttattttatttatttcgtttttttgtataaacttggtttttataaagaaaatatattcaaatgagagaaatagtataaaaaaattgtataagcagccaatggcggataaagcaaaaatgaaattttaaaaattttcgagctaggccctctaagaaattttctgaaattgttcaaaaattcgaattttagaaaagcattcagaaattgggctctgatctgatgccagaaggaacggagtatggaggactctaga

SEQ ID NO: 40303 - DNA, 1456 bp, Heterodera glycines
tttaatgccaaattatccgacctgaacttcaaatgattcaccgaacaatctgatcaattcctccattgtgctagtttgcatgttcgatcagtacatacactattccaactcagcttcaatggagtcctgtgtcggataataacaatggattattgagagattcgtggtcagtctctgtattttttgcgtgatgagtgatcgatataaacggataaagcggtcataacgatataataaacaatcataccgcacttggaaggtctgcatgaaccggcgcagttccacttgaatgcgcgggaagatggactgcatcgtctgctccataacccgggtcgactttatcctgagaccgccgtacacaatgtgcggtctgttgggcatcctaacgtcgttcgaaaagggagctaatatggactcggtgcatgtattagtcgtagtttgtgacccagcactcgaataaaagtaggaattttgaatttttcaaattatgattttttgttcaaatttagattaggaaatcggaattgatcaaaataattgaaggattcgtgatcggggaccccaaaaaccccagagaataaatttttatgactatcacaaaaaaaattttgcaaaacaaaagggtccccccttttgaaaaaattttcaaaacggccacttttagactagcgccgcaattttcatgtttttcatgtataacttttttggtaattgtctaatcgcgaagtgatacatagaattagattcgaaacatgttaagctttcgaatgataccaacaatcttggatttggatgtcaaagaaaaaagttatagcgaaaaacataaaattttttgaaaatctgcccacagatcccacacaagtacccatttatttatattttcaggaaaagtcattaatgctaaagaggtcgaaggaacaacaagtcttgctaactgtacgaccattaaaaacagcacaaatttttaaacaataaaaatgaccgatttggatgcgtttttcgcgaagaaggctagcaaaggaaaaaagaaaggagtgatcaaattggaggaaataagtgtgcaattggagcggagagcgatggtattttttaaaccctttattttgaaattatgcaaaataagagaaggtataaaataaacgatttcgaagaggctttttattggtttttgtttttgccaacaaaatggaacatttttgaattcacctgaagagagttcttaactctgaatcgtgattgcattttttgttttaaaaattaaaaattttaatattcatttaggtcgaatatgccttgatgtttaatttttaattgttccaggaacaaagagatgagactgatgataatgaaaataaatcgtcagttgaggacattagcaaaagccgacccgcgaatgagcacaacgaagactctgaaatggtggcatttgacgacaagccgaacgtacctgtggtga

SEQ ID NO: 40304 - DNA, 1336 bp, Heterodera glycines
  unsure (1)..(1336): unsure at all n locations
catatgaccagtgatcgctttaatcggtggcccgggagcgccgtcgcaaatgcctcggaggaagcgaacacccaaaggggcaccgaaatgccatccacttccaattcgccgattgtgccgcggaagtgatttatggccaaatccaattgctgagtcagtcgcgcatcggaagagccgagagaaagaagtgtttggccgggaattgtgttgaaaatctaagaaaaaggagacagaattgggagaagaagaaaagagagagagagagagaaaagaggagagagagagagaaagggagagagagagagagaggaagagaaagagagagacgagggataaaaaacagactaatgagagagaagagagagagaaacacacagacagaccacgtctgaagaaacgtccgggtcgccgactgccacacggtcaatcgcgtcgacgtcgcgcgactcctccgagccaaggctctgccgaagcacaacgctcgccttcattgtgtttgcaattctaaagactagcttttattcattctttctcgaccccaaaaaatgaaagttcgggcgtcccgagagcatttagcaccttttcacttcgatttggtaccaactgtaacggtcggatgccgggatgtacacaatgttccggttgataatttgagcctgacaaaaaattgatcagaaaagcctcatccatctggttagccgcttggaattgtttcattagtgatcaaatggtaattccaatgttttaatcattggcttttcataagaaacttcacgaggaaccgatccaagagaaaacagccaaaaacgcggaagggaaccactcggccatcgaacacattgaaaacgccttcaattttctcccatctattttcctttttcttccctttttcatcttaaatacctcgtttttgttttctctttctttctttttacctaattcctttttctctctttctcttaaccccttttctcattatgtctctttgttctctctttcttatccctatgctcttctctctctctctctcgctctctccattttcactcgcctctctacgtccccctccgatgtcccatttcacgtggattttcttctgcttcagttcaattgccataaattcgctgctctgagtgcgtgtgccctgcacttgggtgaacagaatgagtgagtcgggagtgtccaaagcggggcgatatttaatggcgattgaattggaagaggagggacgcctggggaaagaaacganatgccaaagagaaatggcaaaagagcaaacattggggagagatagtggcgaacacagccactgccctggtcagaacggactccgact

SEQ ID NO: 40305 - DNA, 1100 bp, Heterodera glycines
  unsure (1)..(1100): unsure at all n locations
gcggatttttagaggcgaaaaaatacaaaaatagatacctaataagggcaaaaaatcgcaaaaataggggtgtaataaaataatgaaaaataaaacaaaagaaataaatcaaaaattaaaaaatcttagccgcaaaaaaataagtgagacaaaatccgccnncctaatacaaaaataaccaaaataatgcatcacttttcgatgcatttaagcttcaataattgctgaagagttacggcctttttcttacagatgagaaaatgaagggcttacaatcaaaatggaatgcctgaaaatggcgacgcatgttaacctttgatgagaactttgtcttgcagtgtccgcatttgttgccaacaagttctttcaggaattatcttcagtgatgctgtcatcagcttcacgattgtcttcttcagtgattgtatcttcaccgagacggccatgttgagggatactgtcgtcaactccgcgattttccatcattgttggatggctcattccgagacggccatgtacagtgatactgtcgtcaactccgcgatttcccatcattgttgaatcaattccgcgattatcattgttgactcaattcctatgtcctgtagactcgcattatcataaagctcgtccggatttttgtcgaaagttggtaatccttcaaatgcgtcttctgggaggatttgccgaaagttggcacctgcttttatgtattggatcacacgggaccctagctccaaaatctggacaaccgtttgccagcaaagatacgttctaacttccgtttcaacgtcatcttcgttttcttttcgggcaggcatttggtcagttataaacggcacattatgtgcggccatgtatttttcggtatcagtgcctccgagttctttctcagaatcaatttgcgagcgttttccaatttcttcataagattatatggtaattccaaaaatgtctcaatttccgtttcaacgtcatcttcatctttttgggcatgcatttggtcaatgcggccatgtggttttcggttcagtgtctccggttctttcgatcacgattgtatcttcagtgtcagtgatgtctctcaccgtctggaaatg

SEQ ID NO: 40306 - DNA, 1134 bp, Heterodera glycines
tatttatttttatatatataaattttacataataccaaatattttcgcgttcatattcttacagataaaatcgcgtcttattctggagtttgtcacagttgagacagaaaaatgaattatttatgtataattttcattttcaaattgttttaaatcagttttttatattaatgtttatttattgtttttattgtattaggatgagtttgaaacaaaataaatattatttatttaattactaatttggtaattctatctttaaacatttattttatgtaattattaaatgatcttttaagtgttaaattcctttttttaaaacatttttttttttttttgtaaatggtttgcggtacactagaaattttattttatttctttttgtattagtacattagttcaattttgttaatttcttttaaatcattaaattatatttttattttatttgaaaattttatttcaacttttttttaggagattatattattttttaaattcaagatcaaattttataaatattttattttattcacgcgcttctgcgacaatttcccgagttgagattgagttaatgtaaaatatttttaataattataattataatatgtataatagataatttccttcaatatgttcaacatcgaaggcccaccgcgagaccgagaagcggccgagtgagtaccttcggtgcaggaaaattattaaggaagagagttcattatttatttattttttgcataattaattcataaatatctttttcagaaagggttctgaaacgcacctaattttatttacatgttagtttaggcactcttatgctttttctatcaaaaagggagatgaataaaatttttaaaaatttttaattcctttataatcaggccaaaaagtttaggcttaactttttagtgaaaattcaatcactcatttttcgagtagtgatcagaagcgagccagatcttgcaggggcctaaaaaggtcaaggaaaggcgtctttgcgttgatttagcagtagtacctatgaatttaaattttctatgaatttctaaagtcttttgaaatttttttaagtgcaataagtggtggtgtctgcaaaaaattatcaaccgggttaaaaaatctcggaaa

SEQ ID NO: 40307 - DNA, 906 bp, Heterodera glycines
  unsure (1)..(906): unsure at all n locations
accatttcaactccttatcctctaaatataaactgaatcagtgtttgcggaggaccgagctgataagtcccaataatctccaatttacaattttcatgatcacttttgtgatattctcaatatttcaatttcttatatccaaatgtaatctgtataagtttacagtaggaaattgtaatttgggggttattggcgatttcaaatcgatccttccggaacactgatgctgtttatatttagagcgtaatgagctgaaaatggcagaattcaaaaagtggggtcgcgaaaatagtaaatctgaggttattggcgcttatcaacctgatccgtctgcaacacttaaacagtttatatttaaagcctaattagcagaatgtgaaattctctcatttgttactttatgatcatttttgtctaattcgcaaaattacagctcattcttcgcgaaatataaactgaatcagtgttttgcggaatgaccgagctgataatcgccaataatcttcgattacaattttcttggtcacctttttggaattccaccatttcaactccttatcctctaaatataaactgaatcagtgtttgcggaggaccgagctgataagtcccaataatctccaatttacaattttcatgatcacttttgtgatattctcaatatttcaatttcttatatcctaatgtaatctgtataagtttacagtaggaaattgtaatttgggggttattggcgatttcaaatcgatccttccggaacactgatgctgtttatatttagagcgtaatgagctgaaaatgtcagaattcaaaaagtggggtcgcgaaaatagtanatctgnaggtattggcgctttatcacctgatccgtctgcaacactttaacagtttatatttaaagcctaa

SEQ ID NO: 40308 - DNA, 757 bp, Heterodera glycines
  unsure (1)..(757): unsure at all n locations
ctccggctcttccatcgaattgccataaacgcgttccgtccactgcgcaatgtccgcccaattgtacatttcggccacctgtcgatgcttcttcaccgggcacggcaattcgccattctcacgccgacggatggcatccaaaagaccaactgcaattgctgtataaagtatttggattataaatgagtcaaataatgatcgaagaaccaaaaattattgttaaattcaatgggaacaacctaatttaaatttggctacggtaaacatgaaccaatctacaatagtatttgatactgtgtaatttcataaaaaattggacaataccttttggatttgggtcgaccaaagagatgaattccggcggcaaaacttcgggaattcctccaacgcgagtagacaccacatgaagacttaacacaaaagtaaatttagaatgaaaaagcaccagaaaaatttgatcagagagaattggggaattgtgcccaacgttttgacgcgttcgtgcaaccgacaccgttctcgcatttcctcaatgtccactcgttttggaccatcgccaccgatcagaaattggactgaaatgncaaggacggagataaagcattattgaaagtattcttggaatcccgatttccgataanattttgggtctcgaaatgccattcctgatatccgttatcgaatggttccatcgaaaataaaaatattgtttgattntaattatttttgcaaataacaaataatattttctaaaaat

SEQ ID NO: 40309 - DNA, 1651 bp, Heterodera glycines
  unsure (1)..(1651): unsure at all n locations
tcctggtggtgcccttccgtcaattcctttaagtttcagctttgcaaccatacttcccccggaaccggaagactttcgtttccgggaagctccccaccagggcgaataaatccgccggcggatcgctagttggcatcgtttacggtcagaactagggcggtatctgatcgccttcgaacctctgactttcgttcttgattaatgaagacattcttgccaaatgctttcgctgtagtccgtcttgctacggtccaagaatttcacctctcacgtagcaatacgaatggccccgtttgtctctgttaaccattatctcggtcagcaaaaccaataaaatcggaccgaaatcctcttctattattccatgcacgaacattcaagcgaaacgcctgtttgaagcactctgatttgttcaaagtaaactcgccagcccaccgacgccgaccggtaaaggccaacgccggggaaagaccggcagaaaagccaaccaaaccagtaacacacaaagtgtgcaccggacggctagcacagatccaactacgagctttttaaccgcagcaataattctatgcattttgagagctggaattaccgcggctgctggcaccagacttgccctctcatagatactcgttnaagggtttaaattgtacccattccgatgaccggcctcataagagatcggtctcgttatttctcgtcactacctcctcgcgttgagagtgggtatttgcgcgcctgctgccatccttagacgtagtggccatttctcaggccccttctccggagtcgaacccttatcctccgttacccgtcatcaccatggtagtcagatacactaccatcgaaagttgataaggcagacacttgaaagacacgtcgccgggtcaagaccgtgcgatcagcttagttgttctgagtcaacactggacgcccggagggcgcttggttttgtggcgaacaaatgcgctccgctctggggagattggagctttggtgcatgtattagctctagaattaccacagttatccaagtaagaagtcaaggtcaagtaaattatagctggtgtaatgagccgtacgcagtttccctgtctggcaggttaaacttacacatgcatggcttaatctttgaaatgaacacatcagttcaggcaggatcaaccagatagctgctagcgagcgttgccaagcgccgctattacagccgtcttgtaaagacggatagtttcagcagaaacaactccgttcagcgcaagcgtgcgcatgggcggcgaaggcgaccgagcaagtggtaatgacacagcgctggccaggcatccgagcttcccggacttgggaagaaccatctcgccgctggacacagctccgagggcagtgcacaggcactcacacgagcactccggatttcccggttaggacacttcctcaggccaaaggccttcgggcgcttatgtctcgtgttttttcgaatgcaagcacactggtccccaggcaaggagttccgatccacgaactcatagggcttgtcaaccatggcaatacgccactcactcgtataccaacaccaccaccaactttaggttcagcatccccagtgctgagttccaacagagcatttgtgccttaggcaacatttacacaagtcaat

SEQ ID NO: 40310 - DNA, 311 bp, Heterodera glycines
tagacagacagtcagacagtgcactatttcttctttctctccagtggctatgcggaagaaaagaaggaaataaaaaaaagtgaaaaaaaaattcaaaatgtaacgcttttaaagtagcgccaatatttttttcttggaaaaagcacctggagggctctaaagcaaagcttgaaacaccttcatgggactaaccctgaattgttggaaacaaatatttgtaccagtacgcatttcgtcgttaccactcaaacacaaaaatatttcaaaatattttagagcaaacgcgtcacaattatcctgtttgaaaatat

SEQ ID NO: 40311 - DNA, 440 bp, Heterodera glycines
  unsure (1)..(440): unsure at all n locations
cggtaaaggactaacttacactgaaatgagcgccgagctagcntggctcaaaaaaattttcgaaaatctgagtctttcgtttttatttgttttttgcataattaattcataaatatttttttcagaaaatgctctgaaacgcaccaaattttatttacatgctagtttaggcactctgatgctttttctatcaaaaagggagatgaataaatttttaaaaatttttaattcctttttaaacaggccaaaaagtttaggcttatctttttttcagaaacttatcagaagcgccccaaactttgcagggatactgaaaggaaaagaattaacctgttttatcacattagcttgtcatcagtttttataaaaaattttcaaaattctgagtctcctattattttatttatttttcaaaattttgaagggcggggggggggggg

SEQ ID NO: 40312 - DNA, 1022 bp, Heterodera glycines
ggagaacaccccaccccccaacaaccccccgaaggggtgggtgggcgaaatttggggggaggggggagaaatgcattcatttggaagagtggcgcgagtggtggtggcaccaaaaaagacggcgcgttcggatggtcaacagtcatcagtgagccaaaacatctttttttgattggttaatgagcagtaatcggcaaaaaaccattcaaaaaatcatttgttcatctctaaatgatgtgctgccgattgggtgccctctcggaaaagagcatcagtttatgagcagcagaaggacaattttgttgggtcttttgtgtcatgcgaacgaaattcagcagtttaagggcaataaaattggaaacctttaatgaaatttaatgaccctgttcaaatttgcgcgtggcctgggtcaattcggcgcgaatttttccgtgtcggcctcagagaatgcttcttaccaaaatttttcaaaaaaatacaagcttataaaggaaaaattcttattcaaccgggaaaaagcttagcattttcgtagagattagaatgtttactaagaaatgaatgttgtcccatcccatcagggaaatgagattttttgcatcagtattttcatccagataatataattaagtaaatgatagtaaaaaaaagccgatttcttgctcttaaaagggatacataaggattaaccaaggaatgaatgttaaacttttcattagtccatctccgccgggggggggcgggcgtacttttgggcgtcagttttattaaccaagcaataaacatgatgaaaatgatggtgataatgatgaatgtgttatgcgtttgaaccaatcacagctggatggatggatggatggatggatggtcgctgcgcgggaacaaaccgaagaatgtgcggagagatcagagacgaatcgccgagggtggcgccaatccaaccaaatttgccgattttgccaccattcttgaccccacccatgtcattagccagtaaagacagatagcagcagcacttcaac

SEQ ID NO: 40313 - DNA, 1279 bp, Heterodera glycines
  unsure (1)..(1279): unsure at all n locations
aaatttgacgaaattttatagagcagatagattatcaaaggattatttnatntatttttnaatagggtcacattttctttcctgttcattaatgatgggctccttttttaaatattcgaattttcgttcggtcgtgagggggcattcttcgcagttcgcttcccccccccccccactttttgtgtttacgaagcgattgacgtgatcggtcggtccctnntcgcgtgatccatggccctntccgtcgttcttgagacgctttntgagaggggcaaaacgaattcggagaaaataaaatcaagcgaaagaaattgggcaaacaaaggctcaagaacggaattgagcgttggcaaggacaagctcaactttcaatggttgggttgggtcgggtgaagatcattccgctgcgaatttcgactttcaaaagttgggcacctttcgaaacaatttggcagacaatgacgcattggcatttgttctcaactcttttgatcgctgatcaaaaaagggaaccccgcggcggtgataaattttcattccctttaaatgtcagacattcgaagcatttgttgctgcaaaagattgatcgacacggcttaactgctgctgctgttggtattcccattgttcaaagtgttccgtttttagaatttgtccaataattaaagcggcggccaatctttgaacctttggcgagtgaatgaatgcttcatccgaattagcactgatcacacactctttgctcaatcagtcgccagtcccttagagccaatttccaattcaagtaaggcaaattaggcttcgttcttccttttgttcagcctcattttttcggcttaatttccaatttgttcttctcttctcacaaatattccaccgttttctgtctgatcagtgatcaagtgatcattcactgacttcccaaattctttgatcataaacattcctccaaaagaccaatgcattaattatgtctctcatgtttgggaggatgaatcactttgtgtcctttctctgttccccggggccattggtccaaaaggcgacggctaacatcatcacatcatcatcatcgtcctcgtcttcagccattctccggacgaacagcaaaatgaatgtccgtgacataacacaacgccaatctcttccctgtgggaaacagagaaagaggaaatgagagagaaagggaaaaagagagagaaacggcgagaaagagaggagagagagagaggagctaaagagtggccaggggcgcataaattaacgcccggcgggtgaa

SEQ ID NO: 40314 - DNA, 1642 bp, Heterodera glycines
ttttgtgcgatgctctacatcagcaaacgctatgcaattcctcattggtctcaagggaacgcctccacagaaaggacctttcgtacttttcacaacatattgtcaaagtacatctcaaaagaccaaccggactttgatgaacacttagaagcggcaaccttctgttataacactgctgttcatcaatcaacgggagaaacacctttctttctgatgtatggtagggacccaatattttgcgttgatcaaattttagacccaaggacagcagacccagttgcttttactgatttaacagaattcaaatatcgtctaatcaattctttaagaatggcatgggcggccactgctgaggaaatccgggagtcccaaatgagggctaaggcccaatatgataaacaaaaccgagttctggatatccaagtgggtgacagagttcttttgaagaattatatctctaaagtaggcacatcaaagaaattccacctaccatggagaggaatttttagagtagtgaacattgatggtgtaaaggtaacaataacaagctgtaatgccccgcaagcaaaccctagggttgtgcatatcaaccaattaaagaaatccttcgatggattaggtcctgcctgtactgttcccgaactcactgagaatgaaaaagatgcccttctcggtgcacaagctgaagaactccaaaatcagcctggctattctcacactcccaattctaatcctgattttgcctcatctgaaaacccacaaatgccaagtgatttcaatattgcccctgaaacctcagaaaatgcgacaaatccccaaccctcttacggactgcgaaatcgcatgtcccttcgtcgtcctcataaatttgattaaattttattctattgctaggctcaatacttttgaaggttctaaatcatttcttattttaagctaaatcgcattaaagctattattctgtgccttcaaatggagagcgtctctctcgaccctggtgaggagttccaggaggaattgacggaagaattagaagaggagttgttaggaaaagaagagaagtgggtcacggcccaaaattctgagaatgaggtggaaggagaggaaaagcagaaggatgagggtgaagaagttgagttaaatgaggacgctgagaagaagaaaaaggagtgggctacggcccagaactctacgaacaatgaaaaggaggttgagaagtgtggagagaaagaggttgaaaagagtaaaaagaaaatgaagtgggttacggcccaaaatcattctgaaggcttcggaaacggtggttttggagaacaaaccaaaaaagttgttgaagtgcttcttttggatctagagacatcggcgcagataagagaatatgtggtctgccaactccaaagcaaaggagttgtgttggtatacccaaatccttcggaaaaaaacaactttccgtacttcatctttcttccggatgtgtttgatggcaaatttgaacgtccattgttgcctggtgaccgtgtctttgttgaagattacgcttgggtggaaggaaaagagcatttggacaagtcaagatggatttatgccgaacaaattcgctgaaaagggacggtcacaaaaatgacaacgtcatttatgccaa

SEQ ID NO: 40315 - DNA, 1313 bp, Heterodera glycines
taattggaaattaataactttttgatttttaaatatttaaaatacatttagctactactgaaattggcattgaacgccgcacttcggcaacaaaaattgtgcaaaaaacgccacgatttttcttctggacattgagccaaaggtggtcaaaaaaacgaagtcttttaattattaattaatgaattaattataagacctaattagtaaaattataaaaatgcaaataattttaaataaaaattaagtgaaaagaagaaaagtgccaattctgtggattcatctccacgaacgcccgactcttcgcgcagtgtcagttttgaggttgaaaatttattatttttttattgaaatttaataaataattaaaattttagggagccgaagcttggccatggattgacgacgttgtggaagaagtggaatgtgaatgctttgaagaatgaatgagcttatgtgggttctctgtggataatggaagtaatccttgtacctaataatgcaacaatccgagtaaaatcttttttggaataaatgaatttggcaaaaaataaatttttgaagaatttctgcaatttgaatattttcaattgtgagggtgctcttttaggcttaaagcaattaaaattttttaaatataattattagggatgggaattttatgtaatacatatttttcctgattctccaaatgctctgaatagtaggaaaaacacacacattcttttttgtgtttgcgtataaaaattgggacttttatttatatatttttatatatttcggggtttttctacatatattacatacgtacatatttttatacatattttcgaatttttcgcatttttcgtacatattttgcgatatcaaaaattaatttttcaaacactaaaaagtgctttctaagcaagcctatttaggtaatttttattccattttgtgcctatttcacccttcacgaggaatttttttttccaaaaaataactatttaaaaaatttgatattacatatttcatacatatttcagcatttttttatacatattttatttacatatttcgcaatctttcttaaaaaaaaattcccatccctagtgattataaatcatattttcgtccaattaacaaacacacacattagcaagcagatgcctatttttacatttacttcgtacataatgacaggaattaattaaatatgaggcgggctatgattttgtattaataagcgttaatgtttccggtctctaataagcagtgtatctatcaatgtacaaacaaatcagagggtttatggagaaggggggggggggggg

SEQ ID NO: 40316 - DNA, 1098 bp, Heterodera glycines
tttaagaaaaaattcaacttttattttaaatttttgaaaatctaaaatttttcttcaattcaaaacatttatttttttcctcaaataatatttgaaaattcttgagaaattcccgatttttttttataaattaaaaataaaaattttgtatgaaatgtcgattatacgattttcctcggcatcggcactgaaattttccccttttgaaataggccagtgaagtgttacggtcggccgagatgaaagagcaccggcgcctggacggcatcgaaatgcaaacgcgcgtacgcggcacaacaccttcggacgcctattactaccacaacaagaaaaactttagctcaaaggcaagctaatttgtggagaatttatatgtcaacaaggatttcgaagaaccgattttcggactaaaaatccgggaataagccacaaattaaccagatttgattgcgaaatttattccaataaaatcctggcatggtttagtgtcatggatggtcggttgggtaaagtcattcccggcactgaccaatggtcaaagatagttcagggtttcatggaaaagaaaaaaaacacatttgtccaattacaaaataaaaattgtccaaaacaagaaatttaagaaaaattctggtctaaacttcaaaccataaaaatattttttttcacatttctaagcctgcccaaaaattacaaaatccgctccaatttattaaattatttatgagttaaaaaaaactaaaattttgcaaccaattataatcttgatcaaattcaatctaaaatgttcaagttgcggcctataaatttaaaaatgtttaattagtgaattaattattcccccatcaaatattttagctctccttcattcgaaaagcatttttcattgagaacactttgctctgcgtggacgcttcgctgtttctggtgctgctcattctcttacactgacactatttttcattttttggaatttaaaataaaataaatatccaattaaaaatattgcttgatttataattatatagtttaatttcgctaaaaggaatttattagcctttttcatgtctacataattttctacctaagaatgaataa

SEQ ID NO: 40317 - DNA, 1170 bp, Heterodera glycines
ccccccccccctttcccccaccgtcccccaatttttgggcttattcctccgccccgggggaaaggtttgtttatataggctcatcaaccgcagaaacccttccgactcactcaatcctttgggaaaggttaaggggacaaaatgccaacggaagaaaaggcattttaaaagtgtttgcggaagtgcacaaaatataatgggaaattgaatgcttttaatgggaaaattcaaagaaggtaaaagaagctgtgcagttttttaatgggaggaatgacaaattcaaaaaatgaatttgtaaaatgtgagagtgagtgatcctcactgatcagtagggaagcaacttttagtgaaaaaactttttttttgctcaattgttttgaagaaaggagctcaaaaaacgcatttctgcgtccaattttcccaattcaaatgtcaaaacggcgattgtcaacagtactctgcgatctgtctttacaaaacaaaataaaataatccagcacaatttctctccaaaattaatcagtgctgatcgactatgaaaattttggagaccaaaaactaaaacattggtactcgagatggagaagactttttcccgagagtcgaaaccgaaacaataaaaatgcctgagtttttcacgagacgaaacttaaacaccaatttacatatacggattgctcttaacatccgtggtctagcgggggcgccccccttttcccatttgcaaacccagtacaaatgataaaccttcaacttttttaagttcaaaaatgtaagggacggggaaggcaaattgatggggcacctttcaacaaattgcattttaccggcttaaaaatcattttaaattctttcattttttggggggggggtaagcccccccttaacatccccccctcacttaatttccccgttccaactgcagcggacggcttatgccattgtttgtgtgctgtgaccaccgcttcgccgccgggcacaaaacgcggcaaatgtcctttattctttgcatgttttaagctccccccccccctcgagaatggcttcttttcattcattcgtttttccgtcctcccctgggggatggtttttttgttgagtaaacttccttctttgccctccctccgctttgattttcatatgagtcgacccccgggggggggggggggg

SEQ ID NO: 40318 - DNA, 912 bp, Heterodera glycines
  unsure (1)..(912): unsure at all n locations
tcgacagcaactggaggagcagtacaattcgtttatgcaattactgatgaacgcgatgaacaatggtggtgctgctgcatctgctgctgatgagaatcagcaggacgacgacgacaatgnatgaggaagataacgataacgacagtgatgaagatgatgacgacattaatgatgatgattagtgatcgtaatgatgatattgtgataatgatgattagtgatcatgaacattaaatgaaacattcttggtattggtagaaagttggttgggaaacaaactcttgcattttagttttttggatggtgtataaaaaaaaagtggttttgaaaagcaaaaaatagttaaatttatgttccattaacagatttgattccagatcctctttttaccgtctgatacattcgaaaattctcagtcgcccccttttaatgcatcccgctatcccctaaaaatttcttttttaaaatatcattattttcttttttttggaaattttttggaatttaattgaaattttttcaaaattttcaaaatcccgcaatcccgcgcgggatcccgcaaattttaaatgcgggatttgcgggattaatcccgcgggatcccgtcccgcaaaaaattttggattccaatcccgcagcgggatccgcaaatttgaaatttccggtctctaattttagccaatatatttacaaaatttctaccaaaaatgttcaaagtttcaaaatttcctatgaggatattgtaaaaaaattaagaaattcccttttgttgattttttaaattcccgcgcaggattgtgggattttggaaattccgaaaaaatttagaattaaatcctctaaaaaactaaatatctgaccaatttggaaaagaaattttcagggatagcgaaaaacatgaaaaagaggggt

SEQ ID NO: 40319 - DNA, 1061 bp, Heterodera glycines
  unsure (1)..(1061): unsure at all n locations
tttttacattgaagcatttggatggcttgctgtttacagttggctaagtcttctttgcaagaagtagcacaacttttgtttgggccaacgaccccaaaccattcgaatagcaatcgattgggctgactagactgcatatttgcaggaatagcaatggcaggtctatcttaaaggcctgacgagttatgtttcgacaaacatcctgtacaccataaatcgatttgcaaatttagtcgaactatataaatttttcaaaaaatgattcatcttttttatggttagcgcatatgtctctagctttatagaaacggtccccgaatctgcgaggaactacttttttgataatttctatagattattattttgcatgaatccttcgcttaaattcccatttatcttataaagtcagattaaattaattaccccgatttgttttagaattggtccaaacacgtttgctaatagcttttcttttcgaaaagagaggcgaggaaaaataaaggttgcatccaaatgtaatttttttttacattgaagcatttggatggcttgctgtttacagttggctaagtcttctttgcaagaagcagcacaacttttgtttgggccaacgaccccaaaccattcgaatagcaatcgattgggctgactagactgcatatttgcaggaatagcaatggcaggtctatcttaaaggcctgacgagttatgtttcgacaaacatcctgtacaccataaatcgatttgcaaatttagtcgaactatataaatttttcaaaaaatgattcatcttttttatggttagcgcatatgtctctagctttatagaaacggtccccgaatctgcgaggaactacttttttgagaatttctatagattattattctgcatgaatccttcgcttaaattcccatttatcttataaagtcagattaaattaattactccgatttgttttagaattggtccaaatacgcttgctaatagcttttcttttcgaaaagagaggcgaggaanaatanagggtgcatcccaatgtaatttttttttacattgaagc

SEQ ID NO: 40320 - DNA, 1088 bp, Heterodera glycines
  unsure (1)..(1088): unsure at all n locations
tgtctattctgataagtaagaaattgaaatattcgtattactttgcctcccttaaagctttataatgaaagcgtcgttgtctattttggatttgccgttgcaattctgtaattccactttggaatccaaaggaatttgattcgcttttacaaattagacagtgccgaaatttgtagatcggctaaaccttaactgaaacataccatatcagcgagacgccatgctgatttgttgtaatcataataaaaaggcccttattgtttaattcggcctttcctataagcacaatgtgtttgatgggctctacaaaatattgcttgtgcaaagcaattattttattggaggctgtaattttctgtagtcatttgatatgcatctgctatttttctagtcacaaacaccaatatttttcggcccgaattttataggcgtgaaaagtactgatttccaacttctttctattcggagacacccaaaatttgaaaaacgtctgtaatttagcttcttttaaatcttaattttttgaaacccgaattgagaaaatatgaatgtatttctgcgacgccttctatacttaattcgtccataatgggccaaaaattcataagttaagaccaaaagagggattttagtttcagccggaatttctataaaaatgttcgtgtgtaacctatctttgtctattctgataagtaagaaattgaaatattcgtattactttggctcccttaaagctttataatgaaagcgtcgttgtctattttgtatttgccgttgcaattctgtaattccactttggaatccaaaggaatttgattcgcttttacaaaatagacagtgccgaaatttgtagatcggctaaaccttaactgaaacataccatatcagcgagacgccatgctgatttgttgtaatcataataaaaaggcccttattgtttaattcggnctttcctataagcacaatgtgtttgatgggctctacaaaatattgcttgtgcaaagcaattattttncttggaggctgtaattntctgtagtcatttgatatgcatctgctatttttctagtcacaaacaccaatatttt

SEQ ID NO: 40321 - DNA, 949 bp, Heterodera glycines
  unsure (1)..(949): unsure at all n locations
tttgagggttcaaatcttacaaatttgaaatgtccttatttgtaagatttgtccttatttaagctctttgtccttattttcatcttattttttggattcagggagaaatttagatttacaatgataatttttgaaagaaatgtttttttgaagcgaattaatatgcaaaatcttaacaagattcagttaaatattcaaattttctctcggcggtttcttattctcttaaaaaaattagctcaaaatcgtaattggaaatagcattaaaaattacaaaaatttttccggcggcgcctattagagcaggggtgtatctgttcttatttctaagaaatgttctgatttgaggtagtgtcttattttcatttaaaagagaaatttctgaaaaatttggctaattcctaacaaaattcattaaaaattcttaaaattttcccccagcggcgcctatcggcaccgccggccccccaaaactcctatttttctaaaaattagcccaagatcgcaaattttggtcattttttagacagaacttgttaacaaattgcattaaatttttaaaaaatttccctcggaggcgcctatcggcaccgccgaactctcttctctcgcccatacccaaaaatttttcggaaaaatgcgccgaaaaaattgttaaaaatctgttttttgattctaaatgcactgaaatttaccaattgcttatgtttcgacaaaattgttaaaatcttataattgattttcggaaatgtataaatttctcatttctaagccgaaattgctcagaaaatagttggcggtgagtaatgcttgattttgttgaataaaaaagcgattcaaagttttggaagcgtgttttaaaaaatgtccttatttttgacccgaaaatcttatttttgnccagccgattaaacggatttcggaaattttcaagggtaaccctggtata

SEQ ID NO: 40322 - DNA, 597 bp, Heterodera glycines
tatgcataagtggtcaagtggctaaaccttctgattttattatttctcgcttgggttcaattcaccactgggatagaatattcttcatattttctttaccattattttaattgaaattttaattaaaaaaaatattccaactttttttctttcattttaagcatcctaaaaacccaaaaattaatcaattgctcttttttttacaaattctgttaacaaatcgcattaaaaaatacaaaatttttcccggcggcgcctatcggcaccgccggccctccttgttccccaaaagtcttgagaaaaacgtgccgcgaaaaaagcggtgttgaaagcaaaaaaggtcattgatttacattaatttacatggccggagaccccttcgcaaaattggaaaattggccgctgatcccttgttttgcaataatctgaattttgaggtctacatctgaattttagtgttctttatcctgaatttgaaaaaaaacttggtcaccctcaatatacatatacttctgaacaattctaatgctaaaaaacaggcactcgcgcgaaaactgaataaaaattttgtatttgaaaaattttggccataaattt

SEQ ID NO: 40323 - DNA, 775 bp, Heterodera glycines
atcacatacatattttagtgaatttacgtcaagcaaatatctcctattggcaatcacggacattggcaatgcttcttcttccaatccgtcgaattctgtgccattggcacaaattgtccgttggatttgggaggaaaatggggcacaacggatcaaagaagtaaaaataaaataaataaattttaaatatgattaaaaattttaatccattttaatacactgttaacaaaatttagaccaatacgcttaacaagggcagtagacgtagttacagcaagaatattgccagtggttgttcttcatttgtaatccgaattctcaaaaagcgggagacaaaaaagtaaatatgtgattaatactaattaaaagtggccgacattttatcagtaaaaaatgctctaataatgcagttttttttacgtgataagaaattttaaacaaaaattggcagacaaaaaacaatgccaactttctctaatttagaatttccatatattttcaaaaactaaatgtgactgacgcgttttctactgaagcattttcgggagatgagtcttggttctcccgatcactgattaatttcattttccgtttgtttttttgatattttcccccatttttaagtgcgttcccggcaccttccagcagcttaactgatcacgacgttttgacggtgaaaattggtgaaaaacaggtgaagcatcaccatcaaacagcaacattaagcataaacggttttttcacggttccatacaaaaaattttgaaaacaattt

SEQ ID NO: 40324 - DNA, 788 bp, Heterodera glycines
agtaactcggctcagagtgaagattaggggatgcaaaagagacgattaaaagcgatcgaaaattctatcgactgatataataacgatgcagtcgcggcgttgacaactgagatggaaccaaaagttccatatatctttccataaggttggaaaggcagaatttgaatggccagtctatatttacactgagcacccgttgaagcgggtgatgcgaagcaatagcaaactgtatttttaaattctggccgcaattctaccaaaaacgtgtttagaccgcagtaactcggctcagagtgaagattaagggacgcaaaagagacgatttaaaagcgattcgaaaattctatcgactgatataataacgatgcagtcgcggcgttgacaactgagatggaaccaaaagttccataatatctttccataaggctggaaaggcagaatttgaatggccaatcgatatttacactgagcacccgttgaagcgggtgatgcgaagccatagcaaactgtatttttaaattctggccgcaattctaccaaaaacgtgtttagaccgcagtaactcggctcagagtgaagattaagggacgcaaaagagacgatttaaaagcgattcgaaaattctatcgactgatataataacgatgcagtcgcggcgttgacaactgagatggaaccaaaagttccataatatctttccataaggctggaaaggcagaatttgaatggccagtcgatatttacactgagcacccgttgaagcgggtgatgcgaagccatagcaaact

SEQ ID NO: 40325 - DNA, 963 bp, Heterodera glycines
ctccattaaagtgcagttttcgtatcttggtactcatttggctgcatatctgtagtacggaaaaaatattaatatccttttttaatatcaaaaaaataatttttattgtatttttaataattcccccagaaaaaatttaatcaaatttcgcagaattttattatgatacaacaaaattcagtggtaattttcagtggttttatcgacaaaaataagcccttaaagtgcagttttcgtatcttggtactcatttggctgcatatctgtagtacggaaaaaatattaatattcctttttaatatcaaaaaaataatttttattgtattttaataattcccccagaaaaaatttaatcaaatttcttagaattttattatgatacaacaaaattcagtggtaattttcagtggttttatcgacaaaaataagcccattaaagtgcagttttcgtatcttggtactcatttggctgcatatctgtagtacggaaaaaatattaatatttcttttttaatatcaaaaaaataatttttattgtatttttaataattcccccagaaaaaatttaatcaaatttcgcagaattttattatgatacaacaaaattcagtggtaattttcagtggttttatcgacaaaaataagcacattaaagtgcagttttcgtatcttggtactcatttggctgcatatctgtagtacggaaaaatattaatattccttttttaatatcaaaaaaataatttttattgtatttttaataattcccccagaaaaaatttaatcaaatttcgcagaattttattatgatacaacaaaattcagtggtaattttcagtggttttatcgacaaaaataactccattaaagtgcagttttcgtatcttggtactcatttgactgcatatctgtagtacggaaaaaatattaatattctttttttaatatcaaaaaataattttt

SEQ ID NO: 40326 - DNA, 1037 bp, Heterodera glycines
  unsure (1)..(1037): unsure at all n locations
ccgctcgctcaggcaaaaattgaatattttttggtttttttttttacaaaaatttgacaaaatcgtatgatgaaaatatctcaccattttttttctcctcttttatgtaatattttcattttttttaaattgaatgactacaaattaaagaaaatattttctctaataatcaaaaaattgctaaatattcaacaaaatatgcttatgaaccacataatcaatatatcatcataccaacgatattaggttgaccaattattgtcaaaaaaaaggatatttaattgaacaaaatattttctgaattttttgaaaaaaattgttgattttcaagagaaatttctttgaaaaaagcaaataatgaacagaatcatttgaataatattttttttatttaataattaattcaatatattttattatgtttgaaaaaagtatatattattttctaaaatgttttctaaatttttgaaaaattttgttgatgtgtcaagagaaagatttttttttttacttttcactggcatttcttttaacgcaacccaattaaatttttcacattttaagcaaaaaatttttttctaattgaggccagtaattgaggaaacaatcttccactgtacagaatgtttttttaatgaactttaatttttgataaaatttattttaataaataaaaaaattaactcccaggccgggaatcgaacccgggtctcgcacgtgacaggcgcggatactaaccactatactacctgggaaacgaaattaacttaattttaaaattacattctcctaaaatttttgaacttttttttttaattttttcacaacaagacataataatttatttaatcctaaaaaatctataaactaaattaaaattatgcctaaattttttgtttacactacaaattacatgtttatattaaataataaaaaatgtaaaagaaacaaggcattttttaataaaatattgttaaaaataaatttattgataattgatatgaattnaaggaatggaagtgacatatttatttatt

SEQ ID NO: 40327 - DNA, 930 bp, Heterodera glycines
acaaaattgaggcgaaaattggaaaatttttaggcacaaatcgccaaaaaatatacaaatggaaaaaagaaatgaatttaaataaaattaaaaagatggaaaataatttttatgaaaagaaaaagaaagaatttattcaacgaattgatgaatttaaaaaattatatgcccaaggcaaacagaaagaatttgtgaagaaattgggcatttcgaatgaaacatttagaagatggaaaaaagaaatggtgccaaaatattagaaaagtaagagaattttactcagacgtttaaatgaattttcactttcagcaccgtatttcaatgatgaaaaattaataaagatgaagcaatatttcatagttaaagaaagaaacccaataattagtgacaaaataattgctaagcaattaggaattggaagtcgaacactgatcagattgaaaaaggaattttcatcattatcgaaaatgtgatttgtgattttgttgatacaattataaactgtttttcgggtgtgattttttgtgcctattccaatccccgacccacggtttgccaaccttcgtcatcccctattcacaacagtgagagttcaatcggacattgcccaaatcaccgacattttgtgatgcctttctctgtccctgcacaatgccagagactcaaaaaatcggtgacaagccatgctttcttggcattattctactgtttctaatatttggttacctatgtaaacattttacttttcgtctatttgtataaatgtcttttgtagttttctttggtttttttaaatcaaattaaatcgcaatttttttaaatttttttttaattataaaaaatttccaaaatgattaaatacggttgtcgcacaacaggtagaacaactttacgaaaaagtctgagaggacacagcgaagcggtggcctg

SEQ ID NO: 40328 - DNA, 328 bp, Heterodera glycines
gtggggtgggggggaaagaggggtctgatggaattccatataaagacagaaaagagtgatcgcagtttgtgttggtctgatcagtgatcacctcattaagttgagaaatgaatggctgggaattgagcagcagaaggaagggaaccgcaacagaagagaagcgagaaaagaacaataacatccaaaatttgcaagaaaaacttctgctagtgaaacctgagaaaaaaaattggaaaaattggaaatggggggagaaaacccaataatcaaaaagaggacaaaatttaaacaaatgaaaatcccttgggacaaaagagagagtaaatga

SEQ ID NO: 40329 - DNA, 840 bp, Heterodera glycines
gaaaataattgttatttttcttttaaccggtctacatcgccaaattggataactttttttggactaaatctattaagaattaaccgtaaaattttcgaaatttcaggcgtttccatgaaaaaaactgtaaaaaacaaaaatacacgccgaaaaataaatttaaattttttaaaaaataagtttgcatatattaatatgaacaaatcttaattagaataacaaaaagaaaatgaagagataaaaaatgcaataatcacatttaactttaaataattttaaacaaacaacaaaatgaatgatcgaataatcatatcgcaaaaagaaactgtttgttttttgcaattttgactcgaacagcatttttagtttaaaggtaattactagagaccgaccttttgatgcatatgcctttttatctgcgcactagtttcgatatattaagcataaattacacattttccacttggtatgaggcttctacgttgagctttattatgccttttttttgcctttttcggggttttcgtgccttaaatgccttttttggcattttgccgttggttccttttttggcgtattttccgaaaaattcattaaaaatgcaataaaatcgctaaaatacacccctaagaaatgattgaacaaaaattcagaaaaatacatccctaacaatcgacaaaaaatttttaggcttaaaaattttccttattcgaaaaacattataaagtatttcaaaatcatttaaaagaccaaaattaagttttttggttaatttttacgtgttttgctccctaaaaatccttaataaaaattttttaaatgccttttttcatgcctttt

SEQ ID NO: 40330 - DNA, 1646 bp, Heterodera glycines
  unsure (1)..(1646): unsure at all n locations
gagcaggaagagacgcagttggacccgaaagcgttggaggatgaacagaacgaacagcagcagcaaacagaggagcgggacacccagcaacaggacagcaatgagaccggggaccatgaaaaaggttggggagtacagcagcagcaacaacagagcatggacaatggtgatgatggtgcatgtgcggacaacgacttgcgcaacgatgttaatcatcaacaacagcggttggacaaatcacaagtcgatggggcggatgaagcggactggacagctggccaagatgagggggacaaggcaaaaccaacggcggtagatgaacgtgctgaagaacatggtgatgcggagggtgatgaccaacaacagagcatggaagacgaaggcgctgctgctggtggtcatcaacggcaattgcagcagcaagaaatgggcgaggtgagtggcagtggcttttctaggcgctatcccgtcatggattatgaatcaataggcttaccaatgtgtaccgttcagttgtcagcacatggctctgcatcgcttgaacaggcgcgtcagacgcgtgcactattccattcccatttgcgtcgacttcgtcagcaacaacaacagcagcagcagttggatcaatcacaacttgaagaggctgaccaagctgcggatgaccaaatggctgaccaagatgaagcggctgccgccgtagaggaggaaggcatggatgaaagcgcgggtttcaattttggcgacctgctcaatggaacggaagtgatgcgttttgacccaaaattgtggcaaaatgatgagcagaacggcggacagcagcagcagcaaaaggaggaggcaatggaagaagaagaaagggaaggcaccagccgtgatgatggtgatgatcaacaacaacaactgcagcaccgtctacaactgaaatgggcactgatcacggacagtgtggcgccactcgctgctgagctggccgagtcactgcgtgccatcattgagccaaccatcgcgtcacgactcgagtaagcgcgcgaggggaattaatttgttgcgcagatccctccctggcggccaggcccatagccaaaaaaaaaaaaaaattcggaggggagcccgaaaaaattttcgttgggctaaaaatttcaagaaattttctctgttattttaaaattttggtcccattgaaaaaaggagatatttgtagcttattcgccaaaaaatgacttgttttgccatctcctctttttagggttttctaaaaatttgtgtgtcaattttcagaggcgattatcggacaggcaagcggctgaacatgcgccgtctgattccctacattgccagtgactatcggaaggatcggatttggatgcgccggacgcgtaaagcacgtcgaaactatcagatttgcattgcggttgacaactcgcagagcatgcagcacaaccacatgactgaggttggtgtgagaaagattattttatttattttttcatttatccaataaatttgaagaatggggtgactgacttatttgaaaatttaatatatttttttctataaatttgtcctaaaatgtggcactggcgttttnntggcgacagtctggtaaanaataatcagtttatctccttcctcatttctttttatct

SEQ ID NO: 40331 - DNA, 837 bp, Heterodera glycines
agaaacggctgagacaaaaggcgcggaagaaaggagccaagaggaagaaggtgaactgaacggaatggaaggggcaaaaaggaaacgaaaattaagggaggaggtgactcatcgtccaattcatcggaaggagaggaggaggaggcgaacgaagaagaagaagagaagggacaaagtcgggagggagacgaatgatcgtgttggtttatgggactgcattttactcagtttattaaactcattatttatgagcaaatatatttttgtcactaatttgtctaaattacctaattttgagttttttccccatatatctatatttttttctgtggtcttttattcatttaaatttcgtcggacttatttgttaggaaaatgccaaatttgctccaagttctgttcggaccggttgtttaccgcccatatcaacccaacctattggaatcgggcggtaacaagctgttcagcatcggtgctggtgcctacaacacttgtgttgtgctgtcgcccattctcgtgccgtacattgccttttcttggacccactcccatcacttttcttttgtcggtttgcatgtttccaattcagtcctctcacttttgtccctttttcagttgcgcttcgttttggtgttttatgccattgccttttccttccgtacgattggtcggctgacaaagtgagccaaccaaaattctcactgattgctcattttcgttgactgttcctcacttttgtccgtatttcagtgttgactacgtccgttttatcaaattgctcggaaccgtgcgcaaatctccgcagaatgtcactttgctcgacacactcaaagacta

SEQ ID NO: 40332 - DNA, 937 bp, Heterodera glycines
ctgttgcgccgaaggactgaaaatccgttggtcaatggaaattgctgctgattttgttgctgttgttgaaccctcaaaagggacaatgtaaacaaatttaatgccgcatttcttaaaggggtcaccaacttttgccgaattttacgctgtgccccggaagggctccgatggaggaacacttggagaggagaaggggaggaggagggggaagaggaagaggagggacaatgctgcaattgttgcgggtggtccgaggaatggagagacatcgccgcttggaaatgagtgaactaaaaggaaaacaatgccgaaataagcacagataatggcaattgagaacaaatgagtgataacaagcaaaattaggtgcaaagcacaaaaaaacaaactgagaaatgagaaatgaggacagaaaataaggaagaaaaaggaaaaaaggaaagagcggagagggaagaaaggagaaggaacgacgaattgagaagagatgaggaaaatgttggcttgagtttggtggaggggaggcgaagcggggggagagacgaggaaggatgagtcagcgggaaatggaagcgaaggagggagggaggaggaagaggggacgaagagaaggggtgggggagaaccgggagaatcgggggaggacggggaggggggagaggaggaatgcacccccgcccatctcacgggggaggacagaagaggaggagaaagaaaagcggaggggaagggaaggaggggagcgaggagagagggggagaaggaagagatcaatacgcagttgcgccgccggggaggccgaatattatggtaatgggggggggaaggacgaattcgtaagaggaagaagacgacggagggggaggagaaaggtgaaattggaagaggcaaatgggaaacagcagcagcaaaagatcaaatgggaaaggaacagaaa

SEQ ID NO: 40333 - DNA, 1006 bp, Heterodera glycines
ctgaattttacttttattttaaatccaaccattttgtgatcggaagttgaaaaattttctagaactgtcaattcattaattaattctaattcactagtaattactaaatctaaaattgctttttctctggttggttccttaacatgctgtatcaattgtctttggtgcataaactcaattagagaattagacgccggatcatttattttttttactttattttcatcccataatatatttgggatattaaaatcaacagaatatggtattttcagaatcgctctggtcagaaatgaatttgagtagttttttagtattctgaactgtacaatttggtggacgatatacatttataatttgaataggttttttaaaaagtaattttatgtgaataatttcgctttggaattttgtcccagagaaaagtgtctgataagggatgtttgattttaataaaattgccgatcctccgccctttttatcatttcggcttgcaaagattatttgatattgattatttattgtaaattctgattctactgtgtttctggagtttaagcaggtctcatttattatgattataaaaggatcgtatttttgggttatatgttctaagtcagctattttatttgttatcgatcgggcgtttattaataggcaataaatccaaggatttttctttcccgtattcccaatgtttttgttttatttgctcgcgtatccctagcgagttctgagcgggcgggggtttttcagagatctgatctccaagtcaaccacaaaatacttatactcacctgcggcaatattggcctgaaaagcttgttgcccaaaggagtataaaatttgaactcacttttgggtcatatcccttcggactttgatattgtggggcacattgggcaatttttttccaagcattacggaaaattaaagaaaaattttgtcacgtgaaaattttttccaaaaccggaatttttaaaatccaatccttttttacccctcc

SEQ ID NO: 40334 - DNA, 1585 bp, Heterodera glycines
  unsure (1)..(1585): unsure at all n locations
tttcctcgtaaatttcaattggaatcgctattcatttaattatacngggttaaaatattaattaattttttttttttgtaaataagtttgaatttaataatcagagaaatgattttttcaattataaatataagtttacaaaataattatattttccaatatatctttttactttttgtacaaattaaaatttattaaaaatttaataattaatattattttcaaattttacatacattaaattaagattgttaaattttttataaatacattgcgtgttaataaactatttttttaattgaaatttaatataaataatttatttttcttttaaatatttgttaaattgattgcaatcgctcttttcataagaaaattaattccaattgtcccggcttgacgttagtcaatccaatgctgttttccactatataaatatgtttaaattattaattttaattaatattgaaaataatttgtattattttgtatattgtgttaatgagcatattggctaattaaattattactctcattttccgtactatattaaggacatgctgggtcgtttgctatgtttttggcatggtcatgcatatcaggggtgggataactctcgcctctcgccacaaaataattctctttctctgcttcctctagtcatttttggtgaaaatctaatagtaaatctcattaaaatttgcaaaaattttcccggcagcgcctaccggcacagccggaccccctccctgttcccaaaatttttttgcaaaaagtaaatattatttaagcctcaatttaattaattttaaagaaaaagaaaatatacaccattattttgtaattttcgccttttcggtacatttctatattttcttaaattataaatctaaccaaaattaaaaattgacaaaattctaatagatgaaaaaaatcctaattaaaaatttaaaaattattatagatcactaattataaaaatttatatatgtatataagaagacagaaacaaacttatacatattagtttcacttaaagcataagcaagcaaaaaattaattaacagaaccaattcatttatatatgtaaattaattttaataaaaaaagatattcaatatttaacaaaagctgtcaaaaaataaaataagtaataaattgaaaattaaaattataaataatgaagcaaatgttaaagtgattaagataaaatttaaaatttttttttgaaaactaaacaaaatataatcttcataaatttaattcttaagtcatttactaaattatactttctctcattatcaaattatcaatgagatttaaaagaatttactcacgcaaatttgatcaaatttaaataaacttgaatttaattattaaataaattaatttaaaaaaattagcaatgaataaatactttcggctaaataaaataaataatattttttggaaaagcaagaatatttaaagacatttaagtgagaaaaattattagaattataaaagttcataaaaacgagaattatttttaaattaacaatttcttaataaaataaataataaggaaactaaataataataatta

SEQ ID NO: 40335 - DNA, 1032 bp, Heterodera glycines
  unsure (1)..(1032): unsure at all n locations
accccgatgctatccgtccggagagctcttcaaaatttttccataccctaagagctgcggaaatgtgaattattctcagaaaaatggtatctcttttaggacattttctatctcgtaaccccgatgctattcgttccggagagcctcttcaaaattttttccattaccctaagagctgcagaaattgtgaattaattctcagaaaaatggctatctctttttaggacaattttctatctcgtaaccccgatgctaatccgttccggagagcctcttcaaaattttttccattaccctaagagctgcagaaattgtgaattaattctcagaaaaatggttatctctttttaggacaattttctatctcgtaaccccgatgctaatccgttccggagagcctcttcaaaattttttccattaccctaagagctgcagaaattgtgaattaattctcagaaaaatggctatctctttttaggacaattttctatctcgtaaccccgatgctaatccgttccggagagcctcttcaaaattttttccattaccctaagagctgcagaaattgtgaattaattctcagaaaaatggctatctctttttaggacaattttctatctcgtaaccccgatgctaatccgttccggagagcctcttcaaaattttttccattaccctaagagctgcagaaattgtgaattaattctcagaaaaatggctatctctttttaggacaattttctttctcgtaaccccgatgctaatccgttccggagagcctcttcaaaattttttccattaccctaagagctgcggaaattgtgaattaattctcagaaaaatggctatctctttttaggacaattttctatctcgtaaccccgatgctaatccgttccggagagcctcttcaaaattttttccattaccctaagagctgcagaaattgtgaattaattctcagaaaaatggctatctctttttaggacaaatgtctatctcgtaaccccngatgctaatccgttccggaga

SEQ ID NO: 40336 - DNA, 1178 bp, Heterodera glycines
ttttcagtttcatcgaccaaaatgtcatcgcttttcttcaccgttttcgtccaattttcgtttcatgtccaattaatttgtccatcagcaccgaccaaaatgtcatcgcttttcttcaccgttttcgtccaattttcgtttcatgtccaattaatttgtccatcagcacgaccaatgaacgcatttcggagttcatttttcacatttggccaatgctcggaaaaaactgtcccgtgatggaattgcccgctccaattttccaccgtttgcgacatttcgtgccgtcaattctcaaagattgtatatcgcttcgcgttatcaacacctattcctatggtttcttcatcgaatttccatgcgatgacagtgccgcggcatcggatggacaagcggtggccaaatggcttttcactccacgtccggacaatgtgccaaaggtgttcaaatgctacttggacaaggatgatgcgaatttgacgtccaaagttgaagcattcaaaacggtgctttcttttattatttcatatttctttaatcaatttttcccgtattttaggcttttgccaatgcttcatctcccgccaatttcattgtctccatttggtttcgttattttgctgacttcgttgtgccatttgaccaaatcaacgaattgactcgggaacaattgacactgaaaagaactgactttcactactgttttctgttggtccgttgtccaattgcgcgagacgaaagcaaatggacaaaatgggaagaggaagcgattgactggcaaagttatggtcaatggaatcgaattagcatttgtcctatttttgtggatgacatcggcgatgggtcagcgaatattttttcaataaatccaaatttatttatgtttcacttttttaggcttctcgacgaaattcccggcccaagtgatcaacagcagaagtgaatgaatgaatcaattgttgagaactgatcgatctaattgaattgcggaattggagaacgaatttgagcccatattattgtaatgatcaacttttattttgtttgtgttatacaataattatgtctttaggataaatttgttgagaagtgatcgatcaatttgaatcatgaaatttgaaattgatgcgctcgtaaaaatgttttatttattgttgaaatgatcaacatggttttttttt

SEQ ID NO: 40337 - DNA, 1071 bp, Heterodera glycines
tgattgaaatgctggtgggttgagtcccagtgattgaaatgttggtgggttgagtcccagtgattgaaatgctggtgggttgagtcccagtgattgaaatgctggtgggttgagtcccagtgattgaaatgttggtgggttgagtgccagtgattgaaatgcaggagaattgagtgccagtgattgaaatgctggtgggttgagtcccagtgattgcaatgctggtgggttgagtcccagtgattgaaatgctgttgggttgagtcccagtgattgaaatgttggtgggttgagtgccagtgattgaaatgcaggagaattgagtcccagtgattgaaatgctggtgggttgagtgccagtgattggaattctggtgggttgagtcccagtgattgaaatgctggtgggttgagtccaagtgattagaatgctgttgggttgagtcccagtgattgaaatgttggtgggttgtcccagtgattgaaatgtaggagaattgagtgccagtgattggaatgctggttggttgagtcccacagattgaaatgctggtgggttgagtcccagtgattggaaagcctgagaattgagtcccagcgattggaaagcctgagaattgagtctcagagattgaaatgttggtggattgagtagagattggaatgtcattgaaagttggtgggttgagtcccagtgtttggaatgccggagatttgagtcccagagattgaaatgctggtgggttgagtcccagcgattggaaagcctgagaattgagtctcagagattgaaatgctggtgggttgagtcccagagattggaatgtcattgaaagttggtgggttgagtcccagtgtttggaatgccggagatttgagtctcagagattgaaatactgatgggttgagtcccacgattggaaagcctgagaattgagtctcagagattggaatgctggtggcttgattttcagtgattggaatgtcagtgaaagttggtgggttgagtccccagtgtttagaatgccaagagatttgagtccccattgtttggaatgccggagatttgag

SEQ ID NO: 40338 - DNA, 1214 bp, Heterodera glycines
tctctctttctctcttttctgctaagtctctctccctcctttcatctattccctcctcattctctctcctctaatctctcctctcctcactctctctctatcgtttcctctccactctctcttattttatcgtttactctattctcttctctcctctctctctctctcatcttatcctttcctctttctttcatctcctcactctctctctctccctccttttgggtccgtatcgttttggcgccgacgttttggcgccaagctataataaaaaaaagaaaacacccaaatttaaaaattttgtaaaacaacaaaaaaacgtatttttcgcgaaggtaatactgccgatggttggttgccccccttttttgaagaaaatttttttgttttcaaaagtcatgaaaacatgcttccaatggttttcagggtcgctgctcacgaaccaggcatccatttcgaccaattcggaacccggagccgaaattcgaacaaaaaatcgaaaataaaaaattctctttttgtttctaaaatagattaaaacaaccaaaacgttttggcgccgacgatttggcgccatgtagggaggaggtagaaatgatgaaatcgttataatttttctgacgaagtctatcaaagagccggatttaattcttcatttactctttttcgctttggcttatgttctcttaattttgtatttagataatgaatcgtcaaattgatacgaaaaaacaaaagcctaaaataacgcatgaaggccagcttcggccggtggctgatcgaatgaaagaatgtttcggagacggcacattctcattggcacctccaatgttctaccaaataaattgtttccatttcttcattttgttaaatttattatatttaacgaaaaatttcattttttataatttttacaatttcttcctgcctttttttcatttttggcttggcgccaaaacgtcggcgccaaaacgacctggtccctgcagaacaacggcaatataatttcctgcgctgataatcataattaggagaaaattttaaaattttggattttcgatttttttgttcaaatccgggttcggggttcgaaatggatatcagattcgcattctacgacaccgataacctatagaaacaatttttataaatttcaaataaatttaacaacaaaatttttttgttgacacaaaacccacaagtaccaaagaaat

SEQ ID NO: 40339 - DNA, 1169 bp, Heterodera glycines
ttttcttgaaaaatttctaagtttgaaaatttaaaaaaaatttattcccggctgaattatgtctcggctgagtttcggcggctgagttttgtcctgctccgataagagctgattgtgagaattggttccaaaacgccttgaattttttggtgttttttttattattgtctaggacgtgttacttttacgtactttccaggacttggtgctggcttcgattcgtactttgagtatttgctgaaggcgcacattttgttcggtgaggtgcgcgagttggagatgtacgagacccatcaatattattgctatattaatcacacaatttaattatgacaaaaaaatacgatttgttttcccataggttcactgaattacgacaccgtattgaggcaaacatgcgtcgtggaagaccaaaatgcagatttggtcagttttaaagcgcctattttggggaaattttgtcatgaaaagtggatgtaatacccctatttgtaaacaatatgcaattttctgtcgcttaataattataaatttttagtccacatctattttttagctgtacaacgcttacacacaccctcctccccccgtagcgttttcctccgaaaaaaatttattaaaaaaataaattcttaaaaaaattttgaaaatatttttttaatacaaaaattttgaaaaattcttatcatttttaaaaaaattatgatgattgcttttttttcttcaatttttttttataaagaaatttttgatcatcacattaatttttgaaaatttttttaggcgacggtgaaccgccaaactatttgaatgtggacattaaggacggctttgtgctgaacacatggcttgacgcacttcaggtggctattgtgatccttccgatcgtcaaaaatcaaaatttaaacgattttttaaattttttttaggccagctttgctggtgtccaagtgttggccggcgatttggacgacgccatctgttcccatgccttttattacgcaatttggcgcaaatatgaattgttgccggaacgtttcaattggcattcaaaggcaccggatgtgcacttttatcccctcaggcaatttgtttttcaacaaaaaaaaatacttttttttggttttgttttcttagaaaaaaaattcttttaaaatcaaaaactaaaa

SEQ ID NO: 40340 - DNA, 1580 bp, Heterodera glycines
aaaaatgagtgattgaatttttcactaaaaaagttaagcctaaacttttttggcctgtttaaaaaggaattaaaaatttttaaaaattttattcatctccctttttgatagaaaaagcatcagagtgcctaaactaacatgtaaataaaatttggtgcgtttcagaaccctttctgaaaaaaatatttatgaattaattatgcaaaaaacaaataaataatgaactctcttccttaataattttcctgcaccgaaggtactcactcggccgcttcgcggcctcgtggtgggccttcccccccgcccttcagagcacgacaaatatttcaacaaaaattttgaaaaattgactagagcaatcgaacgctaacggacgacctaatggaaaaaaatccccgaaggagagaatttaattaaatccattccttcgggggaccgtgccgggtgccgcggggtaagcagtgctggttcgtttcatcacggcaccgaaccttttggctagtcagcaatcgttgcttaacttgccagatcggacgggtgcgcatgattccactgttccaagcaccccaccaaaagcaaaacgatataaccaaaatataaggaaaaatttttaaaaaaatttttctccatctccctttttgatagaaaaagcatcagagtgcctaaactaacatgtaaataaaatttggtgcgctttagagcactttctgaaaaaatatttatgaaataaaaaaatcgatttttcaagtgtccgtttggggtactcaaacaattatggggagcaaaaatccaacgcagaattaaagtacaggctatagggaagctattcccgaaggattcggtctccccataaatctgggcgcatcggttcggggggactgccccgaaaacaaaaaaatcgattttttcaagtgtccgtttggggtactcaaacaattatggggagcaaaaatccaacgcagaattaaagtacaggctatagggaagctattcccgaaggattcggtctccccataaatctgggcgcatcggttcggggggactgccccgaaaacaaaaataaatcgattttttcaagtgtccgtttggggtactcaaacaattatggggagcaaaaatccaacgcagaattaaagtacaggctatagggaagctattccggaaggattcggtctccccataaatctgggcgcatcggttcggggggactgccccgaaaacaaaaaaatcgattttttcaagtgtccgtttggggtactcaaacaattatggggagcaaaactccaacgcagaattaaagtacagactatagggaagctattcccgaaggattcggtctccccataaatctgggcgcatcggttcagggggactgccccgaaaacccaaaaaaaaattttttggataaaaattatttaaatgaactgactagataatatttaaaataggttatttctcttcctttcagtatccctgcaaagtttggtgcgcttctgataagtttctgaaaaaaaagttaagcctaaactttttggccaatgtaaaaaggaattaaaaatttttaaaaattttattcatct

SEQ ID NO: 40341 - DNA, 905 bp, Heterodera glycines
tgttcaggcagtgatggcactggatgggacgggacgaagtgcgtgccgagattggacgagcagtacacgctcaaaattccggtgggagacaatcacggcgactaggaaaaaactgggaccgttgaaaaagcgcttcaaaagcggcacaaggggggcagggtgcgcaatttttaaaaattttacgaaatttccaaaaaaactttctaccccctccaggccttcccgacggtgctgaaacggtttctgtcctcctccatcgaccgttacgtgcgggtcattgcgcatccgatcaccgcttcgttggtgttcattgcttggcttgcgtttctcgcattttccgccattgtgagaagctattaagaattttttttttttgaaaaatacctctaaagcagggggtgcatttatttgtttaatttttaggttttttgctgaaattttttaaatttaaattttcaattttcactgatggttggcgcctgcatttttgatcaaattaattgccttgaagcaatgaaataaaaaaattaaaaaattaaacttggcatgctacccgatttgttttatttttaaaaatttttttttttttttttggaaaattcctaagagatttttttgttttcaaaaggcaataaaaatttctgcgaaaaaattaataatacccacaaatttgctgtcagggaatttcgcgctttgaagtcaacttaagcacgaaaaagatgttctccgcagattcaccacttcttgaggcatcgatttaaaaaataaattaattaatataaattttttaaattgaattacctaataattaaatggtcattaaaggaaaattcaaaaaagggcaaaagctgcatatatcatagacgtaaacacacaaataaaaatttcgataaaattcttttcct

SEQ ID NO: 40342 - DNA, 1591 bp, Heterodera glycines
  unsure (1)..(1591): unsure at all n locations
gtccnntcgaggaaattgtgtctaaataaaatcattgcaaaacatcattaattttttctaaaacttggcactttatggcactgattaaaacaaaaaaatattctatgtaatactgaataattaaaaataacaaacattttgaattaatccttaactaaaatatatttcttctacttttatttaaattatggtcgttttcccaatcccataaagggaacaaatagtttatgtagactgaatgaatgcttcccaactattaagcggtggagtaagcgttgaagcgcctcggcttttcctcggcgtcggtttttcctcagcgtttcgaagagatttatctcagtgaaccgaactaagaaaattcaaacggtttttcgccagtgtattcctaacttcactcttgacaatccaatttttatttcctatcaagttttttgttataattttctctttaatcatttatattaaacattcaaaactacgattactttacgatttaatttatccattcgatttgcattcgtacaatttagctgaattgttaatgagtttttttttgcccatttccgatcaactctgggaaattgtgttagcgtttagcaatcagtggagatgggcaaaacggtgaatcacaccgtacatttagcactgggaaagagaaaagcgaacaaaaatgggcatttggggatggaaaatgagaaatgaatcatctgaaaacagaaagctaagccgatttggatggattccattctgtggtcttggctttttcttcagttacgctcattaactccgccccttaccaaatcgtttctgaagccgattgggtgcataaatagccggatcaggccattgaaaaatcagttattgggttgggacgggatggcttccaataatatcactctattgggttcagtagttttttggcttaggaaaggacggactgctttaagattaggatagcaagaaaaatttttgttttagtaaatttaataaaaataaatgtaaaataattttacaggaataactgcaaaaaatttgcttacacccgctgagaaaaagttgaaaaatatggggaattagggttatatttttgaatcatttccatattttatgcgtcccaactcatcgaagtctgccgggaaagatgcaaatgcggatggggaagctgcttcccgttagatggcatgaaaacacggatcggcgattgctgtgtgaagggctacgcgtgggtgtgctacaaaaaggttgagtttaagcggaaaagaaattaaatatatttatgtatataattattttataattaaatgcttgatttagcctgcatctgagctgaagggttgccaaaaaacgcaaagcgaatgcccgaaaaactgcacctggggagcgtgccatcatcctcaagaaagcaactgcggagacgaatgctgcaaagccgaatggccacaagaaaaaaagtgcgaccgtggctccggagaatgcttcccggccaatggaacaaagtgccaaatgttacgctgcagaccatgagtttctgtgggcccaggaagtaatttttttttaatttggaaatttgattaatgaatttctttaagat

SEQ ID NO: 40343 - DNA, 677 bp, Heterodera glycines
ttcgacaaaatagagtggtggatggagcaacaaaattttgtgaggtgagaattcaaagacagcgtcaacaaatgtaaaggccgtctttggacggacctaaacaatcacttcattcgtctttcaacgccacacacttgtcccgcaaatgcttcgaatgttgaggctcaacaagtcaaaactacaatcaaactccgtgccatcactaccttggaaccgccatctgtcattcgttcagaagcattgcagaacgtgccatcaccagccgcaattttggtgacaaaaagggctgcgaatgacgtacgagaatttttttaacaaattaaaaactaacaagcaaactaaatttagttaatcaaaagggcgcgccacgaaatcaatgcaccaccagcagtcccgaccaatctgaattttgagatcaaccaagcatacaggacctacacgtcgacggaaggcgttgaggagctgtttctgttgggcgactccggtgtttattttgaaaatggaaacgaaaacccgcaacggtaatttagaaaaaaaatgcgaaattcttttttctcagaattttgttgtttggtcgcgattcattcgggcgttttgcggacagaatgaatgagtgttttggcgacggaactttctcattggcaccagcccaattttctcagatttatacgatcttg

SEQ ID NO: 40344 - DNA, 798 bp, Heterodera glycines
cctccgacggagtccgagtcgagcagttcgggagacgacgacgaagtgccggccaaaaaaccggcccagaaggcacagccggccaaagtgcctccgaaggcaccgatttttcttttttttttttaattttttaatttgtgtttttatttagaccattcctgtgaccaaggccaaaccaccggtggagtccgagtcgagcagttcgggagacgacgacgaagtgccggccaaaaaaccggcccagaaggcacagccggccaaagtgcctccgaaggcaccgatttttcttttttttttttaattttttaatttgtgtttttatttagaccattcctgtgaccaaggccaaaccaccggtggagtccgagtcgagcagttcgggagacgacgacgaagtgccggccaaaaaaccggcccagaaggcacagccggccaaagtgcctccgaaggcaccgatttttcttttttttaatttgtgtttttctttagaccattcctgtgaccaaggccaaaccaccggcggagtccgagtcgagcagttcgggagacgacgacgaagtgccggccaaaaaaccggcccagaaggcacagccggccaaagtgcctccgaaggcaccgaattttcttttaaatttttttaatttgtgtttttctttagaccattcctgtgaccaaggccaaaccaccggtggagtccgagtcgagcagttcgggagacgacgacgaagtgccggccaaaaaaccggcccagaaggcacagccggccaaagtgcctccgaaggcaccgatttttctttt

SEQ ID NO: 40345 - DNA, 1160 bp, Heterodera glycines
atgatgttgttggtgggatgttaattgtggcacaataatgccagcaggagcaggaaaattaattttgacaggcggtgaaaccatcggctgatcagtgaggcaatttgatcggaatcgtcgctgatggcattttttgtcggcatttgattgatcagcggtctcagaatacaaccaatcggccttctgagcggcatcagcttccagatcactgatcagaatttaaattgagcattttttgtataaacttccatattttaatttttttggcgtttaaatgtttttgttgttcaaaagagattaaaatttatagtcatttattgttaatgatcataaatattgcattttcccttggtttaaagggacttttagtatgaaatgatgtggccgctaatggcagggccgggtcccaatttttttccaaaatttgctcctaaaatggcaaaaatttggcaaaaattgcttcaatttcctattttttcccaccgttccgaatccgaaaatttagaaaaaattatgctagacaaaactttaattccaaatcgtaattaaaaaatattaatcaatgcccctcaccaccacacctcaacacttggaaaacggcctcaatgatcacttggttttgttgctgattgttgctcccatgtttgtcctcctgtttttgctggtgatttgttcctgtttggttgtggcatagcccgaacacggcatgcacccggaggggttgtgaagacggcattttgccatcattatcattaacagtttggcattggctgctaattgctgaagtggcggaagggatcagctccagcagcactggcttctgctgcttcggctgatcagcaacagcacaagcagaagcttcatcacaattcgatctgctgatcggatgatattgatgatgtcgattatggttgagcactgttgatcaatttaattagctaattaccactaatgaaggccaggcagggagggagagatgttatggcaaaactcaaaaaccgaccgggggcacaaattcaaaagtcgggcaaaaagccggccttttttgcccccgaagccaagagtatggctacgcccttgaaaaatacccagtttttccaaaaatataaattaatcattgaattttacccatgacttttaggtacttgtaggttttgtca

SEQ ID NO: 40346 - DNA, 1179 bp, Heterodera glycines
ccccaaaacaaaaattcacaattccaatgcgggcgtcctttttcggattcggaaggccccatcggcgatgactgtggcttaaacagaggaaatgacaggcaaattgtggggagagaagtggcaaacgattcgctctcactttgaatggttcaattttctgcggtttcgaaagcattgaaggaggcacaatctgaaacaattaaggaaaaattgagaaaataaaggaaaaaatgcaaatccgaaaaaactcactttggtcacagtgtttttcttttccatggaggggaagcgagaaagaggagggacagcctaaacggaagagaaaaagaaagagacagaaattgggcaaagtgtctcactttgagtggctcctttttcgtgaacggtgacggaaaacgaggcgaaagagtcttaaaagagacgaattcatcataacaagaacaaatgatgattaacgaacggtaaaaacccaacccgtactgttttttgacaaaaaagtcgtcctaactttttgttaaagtcgaccaaataaacattcttggcatcattcaatagcccttaaattctctatcaatataccaagcttcaaaaaatttgattaaaatttagctaagataccaagaatgtttaatttggtcgactttgacaaaagttatgacgcctttttttgtcgaaaaacagtacgagttcggtgtcgtcctgaacgaactcactttggctttgacgaatggtttcttacccgaaggcggaggacgacgcggcggaggaacgacctttttaaaaacgaattttgaatggaaacaaaaacaacaaataaaataaatagccaattaggtaaacgcactttgcctttatctgttttcttggccggtggcggtggaggacgagagacagccttaaagaaaagttgcggattcggaaacaacaacgacaaaaagaatcgtcagtgaaactcgctttggtttttgcatccgtttttttgcccgacgacggcggcggaggacgagaaacagccttaattaagggaagcgaatgtgaagacgagacgaagaaacggaggacaaaaagacaaaaacaacgcactttccctttgcctgtttttgcacaatcaattgggtccgctgaacacagagaagttggaacatcctgaacaaattgacaataagaattgagaaaagg

SEQ ID NO: 40347 - DNA, 940 bp, Heterodera glycines
  unsure (1)..(940): unsure at all n locations
tctattcttagttatggagccattttccaaccgaccatttgtagggctcaaccgtatatagtaatgcgttttcggggaaaacctcatgttgaaggctgtaggcaaaagagatagccatttttctgagaatatctattcttagttatggagccattttccaaccgaccatttgtagggctcaaccgtatatagtaatgcgttttcggggaaaacctcatgttgaaggctgtaggaaaaagagatagccatttttctgagaatatctattcttagttatggagccattttccaaccgaccatttgtagggctcaaccgtatatagtaatgcgttttcggggaaaacctcatgttgaaggctgtaggaaaaagagatagccatttttctgagaatatctattcttagttatggagccattttccaaccgaccatttgtagggctcaaccgtatatagtaatgcgttttcggggaaaacctcatgctgaaggctgtaggaaaaagagatagccatttttctgagaacatctattcttagttatggagccattttccaaccgaccatttgtagggctcaaccgtatatagtaatgcgttttcggggaaaacctcatgttgaaggctgtagaaaaaagagatagccatttttctgagaatatctattcttagttatggagccattttccaaccgaccatttgtagggctcaaccgtatatagtaatgcgttttcggggaaaacctcatgttgaaggctgtaggaaaaagagatagccatttttctgagaatatctattcttagttatggagccattttccaaccgaccatttgtagggctcaaccgtatatagtaatgcgttttcgggngaaaacctcatggtgaaggctgtaggaaaaagagatagccattttttctgagaatatctattcttagttatggagcc

SEQ ID NO: 40348 - DNA, 68 bp, Heterodera glycines
cgcgaagcttgacgcggcgtcggaccggagagcgtgccgagcaagctcggcacctaccaatgcgaagg

SEQ ID NO: 40349 - DNA, 1566 bp, Heterodera glycines
  unsure (1)..(1566): unsure at all n locations
tgccgcatttttattgccattttccttttgttttttatttatttttttttccctttccaatttttttccccccttaaatttttaagttttatattctcacaaattcgacgagccccttttttttttcagctctttttggcactgaaatatgcgagcgaaggtatttttgggccattttcccctgctgctgttgggttgtaggggcgagcccagcgggactggccgagttgggacgcaatgcgataaaatccatccgtatttggaaataaattccggattaatcccacgcaaaatccctgcaatttcagtggcgtaagaagcgaatgcgtcggctaaagcgcaagcggagacaggcgaagaaatgagcggacggacggagagaaaactcagccgaacgcggaaacggaggcacaaaatgttgttgctgtttttttgttattgttgtcaaccgcccctttactcagataaaatttgttgcaaaatattgggatattcaatcaaattaatttttagcaaaaatccatttgttaagcattgctttggcaaaagatttggatggcacagtttgccgaaagacctagttcgagcatgattcgtttaaccgactcaaattctcattcccaaaaaatactatgtgatttttctggtggtctatttcataaaatgttatgcattgattatgatttttgtgttttgtgatcagttaaaagtcacatatggtagaatttttcccattgtcgggttcgatttacacgaaatcctgggactgtccctgttctttgacttcgtttgctccaaaataaactcgaaaccatgtgccatcgtgtgctgttcggccaccgtcgccgaagctgttgctgatgtcaaccgctgcgaaaacattggtgcaatgacatggaaaacggacgaaacaaacattttaaggaaaaatcccccgaattttctcaacgcggcaaaagtccagaaattttttggaattttacttcaatctgtttgttttaaattctaagagtgccggggttttcacgggaacggaaaaaaagacggaaaattttttaccggactctaattaaaatagtctttaataaatttatttcgttgaaattcaacattttgacgaatattaaatatttaattatagaattttgagggacaattagtaggtcagaatggtgcgaagaggggccaggccaattaaaataaaatacaaattgaaaaacaaaaggaagtaatcacctaaagccaaatggcgatgcgaagcctactcgagattctgcttctcgagtcgaaaaattcccggatttatgtcaattctcggtctcagtcttagcaaatttgaactcaagagtagctctaaaaaggtactttttcggcttaacagatcaaatttttcgtatgaaaagttgacattttctgtatttctgattgtgtgctaatcactctgactattttaatattcattcgttttgcccttggaaagtcgcgtttcacattaatgggacgcattactcgtcttattataatttaaagaagtgaccanctntatgctgcaccncggaatggttt

SEQ ID NO: 40350 - DNA, 518 bp, Heterodera glycines
ctcgacaacggaaaaaattatcaaaatacgctgacttctatcgatcaatttcacgttcacgaaatgaaaaaagtgctcgtaatagattgcaacaagggagtggtgttgctctcggcgctattcttatccctattctttcagttcttgcgcaacaattaatcgaaaaagttgtataaatatgaaatatacaaaaaagatggttatggtgccggagaatgaatatttagcgctgatcaatgctttaaaaaaaggtaggcatggaggaggaggaggagatgattcattgcaaagtgagaaaacaacaatagactcaaaaataatcaacaatctaacagatccaaaaacaagcacagatgttaaaatgaaacgccactcatggctttacaaacaaagaaaacagctcaaacatatgatagaaaataaaccgcaaaaagtgataatagaaaatccacaagctatctcgaatatagctccatacatgaggattcaacagaaaaactcaaatatgagtaaaacag

SEQ ID NO: 40351 - DNA, 1164 bp, Heterodera glycines
aggaaagacaaacaagaactgatcactaagttgtcagtttgagaatggcacaagaaaagggcacaaagggaggacataaaaagtgtcctataagcatcaaaaaccaagctaaaaaagcatttttgtgcgtattatgccatcctaaaattggcagaaagaatgacatttgtgtcaaattgccaggccaactgatcagagcttaagttgggccaaacagacagatcaaaacctcaacacaatgttccatgctttttcaatcactcaccggacacaaacaaatcaatgcctccggcggcggcgattgaacgcctaaaatagtgaaaaggcgtcaatttattgaacagcaaatcgtgtcgcctttcttactcgtagtttgcgcattccgcggtcagatcggcggcgtttccattcggaatatgcaccttttgaggggaggggggggcacaaaattagtggcggagggacaaaaaccaaacattggacggatcgatgtcaatgtgcctaaagggaaaattgggggcgatcagtgaataattgatcagaggcaaataaggtaattcttcaactttggcactttttagaaggatttttcatccatttttcccttcaaaatgtttctatcctttcaaaatatgtactcaccggaagaaattggagaacatgaatgtgtggtaactgtgcggatggttgcgcggaatgccaacatatcttaggataagcaaaaaagacattttctatcaattcatgactaaagaattcatttaaaatcggttaatatatttcaactgttggaaagtgccggatttggactctgatcaaaaaatcaaatggcgcctcgtaaaaccgatcagcagatttaactgctgctgctggttcggtttgaattagatcacgcaaagtggcactaataaatgcgcccgtttttccctactcgtccatgttgaaggtgacaacattggcaaacgacacttggccagccttgtgcatctctgtcagcttacagtacaagcccagaggggtgccacctgaaaaatgatcggaaaaactgatcagaaagagtagcaattcgtgtgacggtttagtcgaaaagacgacaaaaacgaaatggcaaaaatcggtcaacaatggcacaagaccgacaaataatcagagatgatttctatt

SEQ ID NO: 40352 - DNA, 1064 bp, Heterodera glycines
attaaatttataaaagggccctttaccagtgtcgctcgcgttgttcaatttgccgttcattttgctgcccattcagtcattttcgtttttagttttcccgccgaagcttccattttttgacataattaggcaaattcgaccaaggtcagtttgtcatattttgttaaccaataaatattcctaaaataataataataattattattaaattatttttaattaaataattacaataatattcatactaaaatttttggcggattttttattttcaaatcagaatataatatgttaatttttagtcagtaaaattagtagtcaatttggagtccatccgtctcatccatttgaatttgatttgttatttgcagttaattaatcctttcaaaatctgtgcacttttcccttccttctcagaatccgctgtttcttcttcttcccttatgcttcttcttctcattgccctcctttctctgctcgtttcgctgtctttcgcaatttcttttgcgctttttcttcgctttctttggcacaaaacacaaaaaaatgagccgacggaaggccaatcggcggccgattgttccgccggggagcagacgcaggcgacgttcgttccggcatttttgaaacaaaaatgtccatttatgggcactttctttaggacaaatgacggcagtttggccgagtcgtcactgttcgtgtcgttcattcattcactggtaatgagtttcgtttcgcaatccgtttagggtcacggaggagcaggcgatttcgtcgaccatcggagaaaatgcgcagcgaacgtaaggcaaaggaaagggcaattaattgattagttaattaattggacgaaaccctagtcaatttaggagagcaatcagaaagaatagtctatttaaacataaaaaaatcgacgatattttttataattaattttcatgttccaattgggttaatatgattataattggatagagcagaatttttagtaccatttaaacacagttctgatcagacttgaaaaaataatgacctgtaaatcggcaaaaaaaaagctcaataca

SEQ ID NO: 40353 - DNA, 841 bp, Heterodera glycines
ttttgtgaatatgagcattttttagtttctgatcaatgggtttttgatcttttctatcgatccaaagtgaccgggatcactaattcctcgttgaagagtttccccactcactcagttgggcccagtccgatcgcttgatcaccgcaaaatcaccgcaatgattcagtcggaccgattggttttgctgttggcgattcgtacgactgatcatttgctgctgcttcgcattaccatttttattgttgttattattgctgtgctgttttaaggaatcggcacaattaattggcattaaattgacttattttggcatttaattggtccatttatcgctttattttgtcgccaccttctgctgtttatgttccttctgctgctgtgccgctttgcatagatcggacggcaccgaccgcgtcggagagacagcgcaccgatgagacggaaattgcggaaattttggcggaagaagcgaattggtgccgaagggaggaggaggaggggaaggcggaggagaaacgtgatccagaataatgagttgctagtgactgatgttacatatagtgcatgacaatcttcttctgaaacttcccacacatgtttccagaaaatcccaccaattcgctgcatttcctatcataaagtgaattgatctgacgtttgaatccgctgggcttcgcaacatcaatcaatctggccaattccaggccaaacgagaacaattcgtggataaaatggaccgattcgttttgccacattttttggttattaaaatattttatttgcaaattccatggtgccgaagtctcattctccataatgttgtttataagtaatttaagtt

SEQ ID NO: 40354 - DNA, 1206 bp, Heterodera glycines
  unsure (1)..(1206): unsure at all n locations
attttaattgtttatcaactttgtagaaaaataataaaataaacgatgctcttggcaaaaaaatataaataaaatttcagaattattatcaagttccaaacattatataaaccgatgccggtatgaatagaaacaatctaatgcattcaattaccaaaaataagtaatctgaaaattttaacagctttacttcaaaatttctaacctactttaaataatagtacgataaaaactaaaataattttaaaaaacacatattgtgttattatttaaattagtgctaaattgtttggcgttttgactatttattgatatttgttttattcattctcatttcattcacttctccactcttaaagttttgctgttctccgtagttcgtcgtgtgcggtggactcagaaatattacgtggcgctcctgacgttttgggtaagctcactgcagtttttcttgggttttgaattttgggagatcaaatcggctttggtttttcgactacgactttcacaatccggcgttgttcgagcccgaagaccgggataaacactacaaacggcattgcaaattgctcagagactgagaaattgcttaaaacttgctcaaaaacagaaatttgccgaaaatttttgaattgttgaaaatttgttaaagcttactcaacgactgatgcttcttactctccttttaccgccagttttaagactgagaagaattgccaaaaattgattgatatcgaaccaagacggttaaagaaaaatggcgaatatgagaacgccaccgctaacgcggcaacgcgcccttaaccttggaattgaattggacaatgtgggaaaccaaatttctgcacaatttaacaccaacataagagtaagcgagtcttttagtcctgaattgngccaccgccaaatggttggaaatggagttttagaaggtggcgaaaattttggcggcgaacagcacctgagaaaccgaacaatgaacagcaacaactcagtggtgattatgatggatgaaatcgcaccaaacgcgacgaacgcaccgatggtgaactccggaactttacgcgtanatacccganatatgagagaaaatggtttgggagaattaagtgaaagatttttgtcaaatcgtttggaaaacggattgggagtaagcaatttgaacactngcgggattagtgcctatctatcccccccgtccatgaa

SEQ ID NO: 40355 - DNA, 750 bp, Heterodera glycines
atgtcgccgcgtcgaaatgtcgccgcgtcgaaatgtcgcccaagctaaaatgagtcaaaatgtcgccaagccgaaaattagtgaaaaagtcggaaaattacatttttaaggctgcacaacacataattcactaactatttatcagaatagcataattaaataactaagataataaaatttgttggaaaaaataggtatttcaaaaagtgaataaaaaaatattgggatgaacaattctaagcgatattcatgattgaatcttccgggttttcgtagtcattcaattttcctgcgtattcttcgacctgcagaccaagagccgtcataaaatcatgaatttcggcataattgttgtatgttgcatccgtcaaaattctcatcagaatgatgacaaagacccttataaaattgaatttttctgggggtttcataagtgaaaaaatacagagaaatggaggtgcgttgcttcgagtcaattgttggtcctcgcgagcgcagaaacgcatgcgagtgcacgttcaaatatgggattgggaatagtgccgacagatgtccggttgttctcaagggcgggctcaaaattttgaataaattttttgaattcttgtattacctgtatgaacctggaccgtctcgccacgcattgattctccattcattttttttaatccctcattttgctctttacaaatggaacatgcagcaaatgatgtttgtggcggagaaaattgctgtcacggcattcattca

SEQ ID NO: 40356 - DNA, 899 bp, Heterodera glycines
tttttgtccatttattccaatcgcctattgctttaaggttttgtctttgactttgcttttttgtccatttattccaatcgcctagtgctttaactgacttgggtataggggcgaaagactaatcgaaccatctagtagctggttccctccgaagtttcccccaggatagctggagctcgttaagcagttatactcggtaaagcgaatgattagaggacttggggacgaaatgtccttaacctattctcaaactctaaatgggtatgaagccagggttgcttgactctgaacccaggcgttgaatgtttgagctccaagtgggccatttttggtaagcagaactggcgatgtgggatgaaccaaacgtggagttaaggtgccaaagtgcccgctcattagaccccataaaaggtgttggttgatatagacagcaggacggtggccatggaagtcggaatccgctaaggagtgtgtaacaactcacctgccgaatcaactagccctgaaaatggatggcgctggagcgggccacctatactccaccgtcattggcttgtacacgtgcttgtcgcgtagtctggccatgacgtgtaggagggtcgtggtggttgcgttgaaggctttgggcgtgggcccggccggagcttccaccagtgcagatcttggtggtagtagcaaatattcaagtgagatccttgaagactgaagtggagaagggttccacgtgaacagcagttgaatgtgggtcagccgatcctaaggcaccggctaacgccgtaacacactacggatgacgacttttctgtgcttgcgcagttggtccatccggttgccgaaagggaagtgggttaacattcccacgccaggctagggaaatgacggttcgcaagagctgtttt

SEQ ID NO: 40357 - DNA, 1055 bp, Heterodera glycines
tgtaaaggactaacttaacctgaaaaaatgccaacgcttgttgtttttaaaatttttcgaaattctgactttttcattacttatttattattttgcaaaattaattcataaatattttttagaacgtgctctgaaacgcaccaaatgttaattaaaagttaaataaggctctctgatgctttttctatcaaaagggagatgaataaatattttaaaaatttttaattcctttttaaacaggccaaaaagtttaggcttatattttaaaaagtttcatcgaacctagcgcactaaaatcgatataatctctccaaattttgcaggccttctccattgtaaaggactaacttaacctgaaaaaatgccaacgcttgttgtttttaaaatttttcgaaattctgactttttcattaattatttattattttgcaaaattaattcataaatattttttagaacgtgctctgaaacgcaccaaatgttaattaaaagttaaataaggctctctgatgctttcactatcaaaaagggagatgaataaaaaatctaaaaatttttaattgctttttaaatttgcgaaagattttaggcttatattttaaaaagtttcatcgaacctagcgcactaaaatcgatataatctctccaaattttgcaggccttctccattgtaaaggactaacttaacctgaaaaaatgccaacgcttgttgtttttaaaatttttcgaaattctgactttttcattaattatttattattttgcaaaattaattcataaatattttttagaacgtgctctgaaacgcaccaaatgttaattaaaagttaaataaggctctctgatgctttcactatcaaaaagggagatgaataaaaaatctaaaaatttttaaattgctttttaaattttgcgaaaaattttaaggcttaacttttttttttataaaactgatcccaaaccgaaccagattttgcggagggcatccaaaaaacaaggaaaaagcacctgctatgaatggtaaatcccctaaattctgaaatttaaaaattttt

SEQ ID NO: 40358 - DNA, 1244 bp, Heterodera glycines
tgattgaattttcctaatttgcaatgccgtagttcgttggtgcccccccccccggaaatgccgaccaaccagaagcctcatccgccgtttcctcctcgtcctcctcctcaagcccggccctgttcagtgtggcgcgtgccaacatcggcggctcaccaaactgttgttcatccgcattttcttctgcgtcatcgccaatggcattctcagcggtgcctttctcaccatcgtctgctgctttgtttggacagaaaatgatgattttttcctgaattaatcatgagaaataaaaaagaaattatattttttaacaaaatattccaacctctcccgcataaatcggttcggcgtatggctaaaattgagaaatatacaaaataaataatttttaaagagacaaattaccttttgttttttcttttcagcacttttttgtgccgatgaacgccggggacgcggcaaatagccatgggcacggctgaaaaggaggaagaaaaattgaaagagcataataaaaattgaataaaatgcataaatatggataaatgggtgtatcccaaaatttcgtcggtgaaatttctttaaaaaattttgaaatttttagcaattttttgaaaaaattttcgaaaaaacttaacggctctaatgcactttatgagtccaatctacctttatgagtcctctcaattgacgatcccaggattttatacaataactttgttcatgtactaacaaatcctatctttatgccatgcttggaatgaactgagctcgaataccgttttcatgcccacaatgaacacaatactcttcatcattgacagtgacaagcacacatacaaaagtgtgatgatggagaaagaaaccgtcgtgtaatccaccaaacggtaagctttgacacgcccttcgaagtcggccattttttttttttgcaaagctttctacctgaaggggggtaggaaattgttaattggttgggacaatgcttaatagtgagcggtgcggcaaaaaaaaggtagggaaaattaatgagattttcttgaggacttttgggatgatttaggaaatataatttgattatgctaataattgcttcttgaggggccggctgatttttctgttcgaattcaagaaagctcaattttcggggtccgttatgaaaggaatgtggccgggtgtctttttgggagtaattgaaccatttctcatgagtgagacggtatgaattcctgatgaaaagactg

SEQ ID NO: 40359 - DNA, 1177 bp, Heterodera glycines
tttgtccttatttttcttttgatgacttcggagttaggaaagtcggaaatttactcctgaaaattttccctgcgctacactaacatttgcctccacgatgtcaatatggtatcaatttaatgatatgtctgctctccttatttttctttggatgacttttgtccttatttttcttttgatgacttcgaagttaggaaagtcggaaatttactcctgaaaattttccctgcgctacattaacatttgcctccacgatgtcaaaatggtatcaatttaatcatatgtctgctctccttatttttctttggatgacttttgtccttatttttcttttgatgacttcgaagttaggaaagtcggaaatttactcctgaaaattttccctgcgctacactaacatttgcctccacgatgtcaatatggtatcaatttaatgatatgtctgctctccttatttttctttggatgacttttgtccttatttttcttttgatgacttcgaagttaggaaagtcggaaatttactcctgaaaattttccctgcgctacattaacatttgcctccacgatgtcaaaatggtatcaatttaatgatatgtctgctctccttatttttctttggatgacttttgtccttatttttcttttgatgacttcgaagttaggaaagtcggaaatttactcctgaaaatttcccctgcgctacattaacatttgcctccacgatgtcaaaatggtatcaatttaatgatatgtctgctctccttatttttctttggatgacttttgtccttatttttcttttgatgacttcgaagttaggaaagtcggaaatttactcctgaaaattttccctgcgctacattaacatttgcctcccacgatgtcaaaatggtatccaatttaatgatatgaaccccccggaatttccattttttcaaaaaaagtagctcaaaatcgcaaaaattggccatttttttgtgcaaatctgttaacaaagcacccccaaaattttccccggcggcgcctatcggcaccgccggcccccgttccctaaaattttttggaaaaagcgcgccgaaaaaacgatttttgaaaagcaaaaaaaagaaaggtcatcgggcggccgaaacctttcgcaaaattgtttccgactacccccctttttaatgtatga

SEQ ID NO: 40360 - DNA, 885 bp, Heterodera glycines
agtgccgactgggatcggcccaactccagcaacagttgatcaatgcgtttctgctgttgcaacaggcattgctcgtgccgttggagctgtaattcctgtactgaaaagtcagcgttgactcggcactttcgctctgcgcctgcgctgttagcgccggcattttcagtcctggccacccgcgcgctgttgcttctcttttccggcatatcggtgccgccgttcgttatctcacgttttgtgcaagaaggtgatgaagccgccgccgccgttgcatgtgtttttggctccacttttacgctcggatatgccgatgccattgtgtggtgccgtcgactgttgttgttggtgatcaccatgtttgcctcattttcgtggttggcaaaactgatcggatgaggattaagcggatgctgatggatgaaaggcaataaaagggataaagcgaaaggacaacaacaagcacctggaaattggacaatttaaaaatgccgtcctgactatttagtgagagtgattagaaagtagagccgggaattttgaaataacggatctcgcttcggcaacttgacccggaccagtttttagaatgcaaatctgcctgggatgatcatgacccgggctaactttcaaaaatagccgaagcaagatctggcttcacgggaaaatcctgttataatctggtcctgtccccggctttaatgatcagcataataaagggtgtgcggacgtttcgcctactggacatctcgcctactgacacttcgcctactgacatttcgcctactaagccaaattcggacgttttgcctactaagcaaaaatcggacgttttgcctactaagcccaaatcgggacgtttttgcctattcaccctaaaatctgaca

SEQ ID NO: 40361 - DNA, 878 bp, Heterodera glycines
gcaaaatggcatggactgatgggtgggggcaaggggaggagggcatctcaattaaaaaaatatatcctcaccagcagcacataatttatgtttcgattgtttctttcttttttacatttctttgtgtgtgtaatgccatgaaagttggcacgcgaatgaatcggaaaaggacaattaaatgcccagatgaggcaaaagcggaggaaaagcataacaaattcaaaaaactaaatgagacgagagcaatggagttgtaataaatgctaatgaaaagaagggaacaaatgaataagggcagaagaatgggggaagttttggcatgacttcaatttattttaataaaaaaaggaaaataaaaaaattatgcacttttaagggggacagagagaattcggcttaacaaaacaaattttatgggaataattcaaaatgaaaaagtgaaatggcaaagccaatcgttttgaatttcgcttcccagtcaatggatctggctgcattaggcccaattctgatcaaaaaggtttggcccaatttttgatttttaaaatgttttttaggtccgacgcggtgccaataagtgccaccgttggggaaaatcactttccctggcatggactgaaattttcatataattaactactcaaatttgggttaataatgccaatttgggaagcaaggccaatgtgaacgcattttagtaacaaaagattgtcagaaatttttgtgagacgcgccaaaaaaaaggtattttattgagcaaattatgtacaacaaaatccgccgcaacgaaaggggcggcaggagaaaacgatgaccaaacgccgccgccaccgccaatgccgatgatacggacggatgagaggagagggggggggggg

SEQ ID NO: 40362 - DNA, 785 bp, Heterodera glycines
  unsure (1)..(785): unsure at all n locations
ctttgccaacgcatagaaggcaattntggaattttcaagatttaattctccaacgaattgtgccttcgcattatgcgaaagtcttcggtgtcggcccaactgacgcggacagcgcgacgattcagcacggtcagcggggaaacggggccagtgtgctagttcagtctcggcttttccattcagttttttagtatttttgcaccgaattgccaaaaacagtgcaatcggtgccaaatcattctctggccggccctttctcctcaattggtccaatttgatgacctctttctttggcaggtcatcgcccctcaactgaccaaactcgaccccgtgcccgtcctgcaaaagcaccaaacactgctcatccgaatcgctgacatctccaaactccaggaggccatcaaacagtacgtgcttcacaacgggcgactttttgacccggtcgaattcgaaattcgggcggacgacgacgcgggggttgggctaccactgctgacagcccaattctatgcagaagaggtcgaatttgggaggaacggatgggcacaaatgagaaaacgccaatgacggcaaatatgcccaaagtgaccccttttgtcccatcggatgccattttcgttttgagttcgatgtcaaaacatttccatgggttgccgtggaaactgtcaattgggaagtctattagccttcccatccaccgacagattgtccttttcgagggcacaaagcgactgttgagcatttcgctcagcgacccctcagagcaagacattatgcagcgtttc

SEQ ID NO: 40363 - DNA, 1132 bp, Heterodera glycines
  unsure (1)..(1132): unsure at all n locations
tttccatcaaaattttttttttcctttaaaaattttcgggtgtattcggggaaataaactcttggacgagacaatattaaagccttttatttttaatactagtaaaatttaantagcattggacattcaaaatatctatattttcctcttttaacaaatatttgttcggtatagagaacccaacataattttgggtgctttgggtgagtaaagaattttagacgaagaacaataacgaagtaataagtgttattacaaataataagcattaaattagcgaattttccatttggaaaaagaaaggatatctggtattaaaaaagcgttgaaatgcaaaaaggtcgtcgcccagtgcgacaaatcaggggaccgtctcccagataattgtggccatttagctccacccaacttgccatgtgtatttgattgctttcctctcgagaaccctttcgacagttttccaactgaacctgaccaacgacggatagccaaagatgggatccaccatagtgcgaatgaagtgtttagttattgggtctaaagtggcagtcattttcacgttattaagtaaatattcacctgacggatatcctgaccccaatcctcgttcaggcgcaataaagccaatttcgtcaaagacccattcggccaatttgtcatccctcgtcactttggcaacaatggaagcagcgccaacaatgcgaaaaattgcatcagcttttttggaaacggtgattttgagtgtaggaaaacgctcattgagaaaggtttgatacacttcttctttgttgcctactaaatccacgaaaacctgcaaaaaaataaaaacgcaattaaaagtaatgcaataagatatcaaataaccaaatgattcattcattgacagtttgcttcctctgacctcgctaatgcaaatcccattctgaattgctttctcgatgagtgaaattgcacaaagatggcttatttcgttgagtgactgtttaacgcgccgttgcatttgcgcactgattgtgcggggatgaacaatgcgaagagaatatgtgagaatttgctgaatcggatggagacagataagtgaccaanntgataagcacttttgcgtcacagacgcaattagttcctgcatttt

SEQ ID NO: 40364 - DNA, 1231 bp, Heterodera glycines
tattttccggttattgtttctccgggtccaagtgttatagtcgaaatttcctggtagaattaccttcggttagtactttcctgatcaaaaagttatagttaaaatgcaattgtgtttccaagtgagaaaacgacagacaaaaggacaaacagcagaattgaaaaatgatttattgtattttttggggaaaattgaataattttattttacaattaaatgcttattaatttggattctatcacctttttatgtataaaggttttttaagacagattcggttgcttttttgtaaaacatcattaatttccacagaaatcggaaactaatttattaatttttccaaaatattacttcatcatcccaatattgccgcaaaatatttgccaacattaaaccatgttttacatccatatttttcattttcactaaaaaaacttcaaaatatattctaaaagacttcattttttgtaaaaatacattaattaaaaacgattttttgcctaaattaaaaaaaattgtctttaatgatgccgaaaaataaatctaagtctgaatgatttaacgagtggataaaaagaattaatgaaacttttttattagccctaacttttgaccaattgatcagtgtttttctatttgatccgtgaattggccaaagccatgataaaaccactcacagtttaggtggcattagtcagtccaaaatcttttttgttatttgtctaaaccaaaattttatctggaaaagcaaaaataacatatttgaaaaatctgagaatttcaaaatttaaatgcgcctctaatttcaaccaaaatgctaaatttattaatttatattgattctaaaagtctaaagtaattttgggtacttatatagtttaaagaccagaaaaaaaattttttaaaccatataaaatttccgtgcttgcgcgttttataaatccgtcaatgtaaacaaaatattgtacatatacgtgattatcaattttttatataatttaaaaatagtaaaaatgcgaatttttattgctctttaaaactctctccaaaaatatgaactgacaagcataacaaatcctaaacataataaatctttaaaaatataaaaaactagcaaacttttgttagaaagcaatcagtagttttataaagataaatgcaaaagttaatatcacaatcataacgtttttgccatttattatgtaacacacatcgtgttgatagcaacatc

SEQ ID NO: 40365 - DNA, 756 bp, Heterodera glycines
ttatggcttgatttaataatcattaaaaaattatggggctattttatatcaaatacattaaataaaacgaaaagattattaatcagtttaaaattgaaaaccattaaattcatatttgaataagagttaaagaaaataaaatttcatttagaaaacttaattgtaattcattaataaaatagataaatttttgtttaatatttatcatttttaaatgtctatattatttatttgctaccaaaatgtataattaatttgtcaatattttaaagcgattaaaaaaattttaatatctatctccacttatttatatatatttttagaattttgacattaatgcatatattgggatattttattgccggaattcaatatattaaatatgtaagtttaaattctcgacgtaacaatttatatgattatattattttttcaaatattcatttatttaataaaataagattttcaatttacgttaattatccttgttatttctcatggcctgtctttccattctgacattaatttttaaattgttataaaatttatctaatttatttcataaatcatttaaatttaaattttaaatactaatttgggcttttatattttttcgtttttaaatgttttaagcttggcttaaaaatttgtggccatatttcttgtgttataaaattggcgaaatgtataaatataatttaaatttaaaagaagtgatcaaaataatgtcaaaagggtccagcgctccgtatgacg

SEQ ID NO: 40366 - DNA, 847 bp, Heterodera glycines
ggagataaatggacgaattaacggacaaaatgagcaatgaatcaccaagcgggtgcattttattaggaaaagaaatttcaagaaacgtttttttttttttgaaaaactaagtaattttcattataaaatttgaaaaagcgctagaaaattttttgttgtggttttcttatacaaaatttttggcggcaattttttattgttgccagaaaatcacgcactttttcagacgttcacttatggtacacaacaacatccaaaagaataaattctagaggagagcgaattgcttccatttactcaatcaactccgtttaacacagattacccccacccaattcggcattttttccaattaatttgcccccccccaccaaggacaatcctttggcattttgttttcaattaatttctcccctcagggctttacgccactctgctgaccggcggtttgacctccgccctgtccggttcgttgggcattccgttgtcaatgctggccgactcgtactttcgcaatcagccgcccagcgcgtggcaagtgctttcatcaattccgattatggtgagcattggcacttttctttggtgaaaaaaacaaacgacacggtcaattagaaaattaattgcctaattaaaaccggctagcttttaattgctccatttttgcaacttcttacatttgaattttttcaatttattgcccattttgcccctccgcaattcggctttaacaagtacgtattattcccgctgatcagatctccttcctcggtgcttcgctgatcacaaatgccgcgcaccatcgcacatcctcgtcccatcactaccaccatcatcagcatcaaaa

SEQ ID NO: 40367 - DNA, 1559 bp, Heterodera glycines
  unsure (1)..(1559): unsure at all n locations
aaaaattgccattttttangcatcatttttagtttggattaaaaaaatgctttttgaattttacttccctttttttggtgttgaaaattttttaaaaaatttcgaaaactgtatatttttactattttatgcctctaaattaaaagtaaattaaacaatttttcattcattttaaaattaaaaatattttatttattcgagagttaataaaaattaatttgatttcatttttttatatttatttcttaattcataaatttttcatataaaatataatttaaattaaaaattaaaaataaaatttatttattaaaaagttaattttatattttttttatatgtaaaattaaattcttattttttaaattttattatttatagattcattatttgaattttttaaataaaaaatgtaaaaaaaggtttttaatttaattttattacaaaaaataaataaaataaaatttaattattgaaaataacatatgttgaccttaattttattatacatataatgtaaaattttttgtacttccttcaattaaataatttaaacaattatttatttatttttccatttaattcaattaaatttttaaaattaacaaattttagtcataattgttaattatatttttattccctccaaaatggggaacggaaacagtcaccaccaaaccgcaacacattatttggatccggcaataatccatgaacctccaccagctccgtacccggacatgaacatgatcttcaaatccattccaaaaatgatgcaggtacagaagggatccaaaaaacaacaattaatttaaatggattaaaaaataattaatttttaattattttttgaggcaattttcttttaaattttatttattttttttgcttttaatttaatttttatgaattaaaaaataagttaatagtaagtgttatttttggctatttgctttttacataaattttaatttttgctttttaatgaattttattgaattaaaaataattttaaatttactgattattttatacaatttgttttaaatttaaattattttccttttttatttctattttttttctgtgatatttatttaatctgaattaattcaaaggttctcatcattattatatttgttaaaattaattttagattgatttttttatattccattggttttgttatttttaaattaataatttttaaaattatttcaattaatttaaactcttcattaaatgtttcatttaaggtggccgatgacatgcacaggatgagcaattatgtaagcccttttccaaacatttatcaaaattaagccgaaaaattggaaaatgcaaaaattaaaataaaattcatgagacaaaaaaaaaatttttgatagaggcaaatttttcaaaatttacccaattttttaataaaataaaaacctattttgtgagtcagaagtaataagaaaaattgttcagataatggacctcaggaatatgatgttcgcctgttcggtgaaattttaaaatttctaaattaaattaaattttcattttttttttgc

SEQ ID NO: 40368 - DNA, 301 bp, Heterodera glycines
acatttcgaaatttcaggatttaaaggtcgattcttaggggtgtattttttgaaaatttttaggtcgtttcttaggtgtgtttataaataaattgactcaaaatcacaaaaatattatttttagtaaaaatgccttaacaaatcacacccaaagtttcaaacttaatgaaatgcgcaaaaaaatgcataaaattaaatttaaattaagataatttataaattaaaaaaagaagaggaaaagaaagttgaaatataaaataaataaccaaaacttgaattaaataaaaagacctgcaggaat

SEQ ID NO: 40369 - DNA, 964 bp, Heterodera glycines
  unsure (1)..(964): unsure at all n locations
tccttctaaattgtatagttaaagaaagaaaaaatctaagaaaacattttccctcctcatcttcagccattttcaggcctatgaattggagcctcgcgcacaaattcagtcgccgtcgcttggcacaggcggacaaacgcaaggtgagcagaaaagtcactaattactggctttttattctcaaattgacaccgattcattttccacttaactttcatccgttggcactttttgccattttccccattttttttttcttttggcattttccctcaacactcatttgcgtattttcccctttcttttgcacacattttcccctctgttcttgtccctcattaacccatgcttcccaacagccagcctaatgggccgtttgcgtcggttggcctccgtcgaaaagtgttacggcctcggcaccgcctcagtcggtggcatcgacgactttccgctgacaggcggtggtggcggcggcgcttttggtggcgttgacccgtacaactacaaccacaacaatcactaccagcagcagcagcggttcggcttcacctccccctcctcccaccactgtccgccgcgtcgttacggcggctccagcgaccatttggcgtcgtccggcggcgcggcgatgatgccaccctcgtaccagcagcaacaaagtgtgccgccgatgggccattacagcggcggcggcacgtactttcatcacagttcgttggacgcggccggtgagtcacttccgcacaatataatatgtttgcccaacccttcaaaaatgacacacgttgatttggcagcgagtactgctccaacttgatggaccaaacaaacactcccccaccgcattttttaactgttaaagcaccaaattaacgaaacaaatgcaaaatatgtgtccaatcaaccgccaatcgtaaaaataatcatttaaaaaacttaaagcattttttagatcaaantttat

SEQ ID NO: 40370 - DNA, 895 bp, Heterodera glycines
  unsure (1)..(895): unsure at all n locations
atcttttctaaatnttgtcacaaaataaacaatttcgatttattcttaagattaaattcctttttgtttaagtttttgggcagtgattccgatttttaaatcaatgatttcggctgcttccctgggaaattgtttttgtaccgattgcgatgaatcaaataagaaatgatgatgaacacaatgaccacgggaactgtaaaatgaccaaaagtgattagcggtgggacaaatggcctttggctgttattattttcgggttttgccattaatttgtgccgtccgtccgttcactcacccaacattcccgtcgtaatgtaagcggcaaaagtgtagccaattgaattgaatttgacgaaaaaaatgacaccgatttccaacagaaagagaagaaggccaatgcacgtggaaaacagccaggaaagttcgatgtaaaagcgcagttttatgtgaggggagtcctgagtgcatccgttggcctctgaaagtgccaattttggcaatgccatcgaagcgcccaatgaaaggcaccgatgtacggcaacagacaggtggacatcatcagagcgagcaggtggacggagacgagcagagaagtgaccacgccgagcatgatcagcaacggcttgggggtcgactcttggtactgcagctcgacgagagcgatctgagaatgggcatcaaaaggaagcggtaggccaaacggaccatggcgaagccggcaagcagagcggaagtccgcgaagaagccttcagctgggcacggctgagatcgtaccgatacttctcgtggatggacaattccccacgatgtctggaaggaaaaacatttttaaagtgctgaaccacagctttggtcgagacttgtgcatgggntcaagctgctggtgggaaaacc

SEQ ID NO: 40371 - DNA, 1490 bp, Heterodera glycines
tgcctttaacatatttgaaatatgttcagatgaaagggagcgagaggagcacttccattgtatgtacagaacaacaaccaacaaataaattatcaaataaatgtatgtataatttgatttaaaatgataattgataacatgttaaacaaattttaacagagtcaatagaaatcgatagaaaatcatctgtgatttgagcagcggtaaaacaatcagcagaacaaatggaagacggtattttgtgaagggcagcaatgagaaaaagatgatgatggccggttgatttgtgtgattattggcggggggggggggagattccgagagggcggagggggtaaatggatatatatttacagaaatgggaagtcacaaatatgcagcataaacaaggcacttagcatctcgctctctctgttttttatccacggttaattgctcgaagttatgatgcccggggagtaaacggcggcgatgtttcggatcagaaggaggtcggaacaatcgcagtcgagaacagccgagacacgctccaggggaagcgtagaacagtggccatctgctgagggggcgaacgaaactcagaaccaaacaaaaacctcccaacctcaaaactacgcaaaatttcttaagaatcaatttgaaaggaatggaaacgatgagaaaaatgcaaaattaagggcgcactgaatgtttttaatgtaaaaaattcggactgaagtgtcctttttcaacagggacccagttaccaatcatacataaaaaaggtgggtgggtcggaaaaaatttttgcgaaggggggtcggccgctgatgacctttttttttgcttttcaaaaagcgttttttcggcgcgctttttccaaaaaatttcgggaatagggagaccggcggtgccgataggcgccgccggggaaaattttttaaattttgggtgtgctttgttaacagattttcaccaaaaatggccaatttttgcgattttgggccaatttttaaagaaaaattgggatttggggtccggtggtgccgataggcgccgccggggaaatttggcaccgaattacggcactaattatagccaacaatccttcgaccatcctccggttgcttttatggcttggtgttatcagttttaagcgtaataaaaattacaggcaatcattttgccgttcgtccaccgatttccgcatcttctgttcctgcacagcatttggcaccgaattgcagcaataattatgaccagcgacccttggtccatccctctggtcctttaccacacttgattttttattgatgactatacaaatttcaggcaattattttgtcggacgtccaacgacttcagcagcttctgctcctggaacccattattctcggtttatctgtgctaatgataattgcaaagtgcagccacttttcatccttaccgcccgccgtagtgatcaccgttctgtcgtcatccggcaaatgataactggcgaaaaactgcag

SEQ ID NO: 40372 - DNA, 842 bp, Heterodera glycines
aaatttcgttaagcttcagaaaagtaatggccaaaaattttcggaaaacccagtttgtctatgttttttggctatatttttctgaaacttaacgaaattttttgaaaattggcatgctaatagaaaacacatagggctatcgaagctactaaattcattcaattcagacaactatgaaaagaaccgggctggcgcccagtcgacccccaccgtccgggaaggcataagtttgatcagctaatctccccgggattcattcgatttggcaaatggcatcgattggatctgtcccatatttgtccacatcccatcccatttcccttgtgctttcgagtgccgttccttttccccttagcatttccacgattgggccggccgttgttcgtcttggtgcgaatgcaaatcgaacgggtcattgctctgccatcagcttggctgcctttcggatgcgcaatgcgaagcattgcataccaccattggtatggccaaaaagcacagaaaacgcgaaattgttgaacggaaaagacacggaaataaatgtaaaaatgctgaaaccattttaaacaatggcatttagggtttggccaacgtttgtacttggaggaccgcggggcgtgccaatgccatgacggagtgagctacttgttaactattttgagcattgagattgactgggattttttgacaaaatcttactgatcctctaatttgaacaattcatcctcaaaagggccgcttcatctgcgacacttctgaactgatgcccgatctgccgcccggactgtacatcaccatgggttattcccaagctggtaaggtacagtaagtcccgaaatcagggg

SEQ ID NO: 40373 - DNA, 945 bp, Heterodera glycines
tttgtgatcaagaccccgcgaattgatcagggctaattaatttcttattgtcgaccatttgtccttgaaaatgattaggtagaaaaactactgttataacgcattttcaagagcagtaaaccaaattttcaagtacagttctttgctattcaaggacgagatgatgccaattattaagcccaagtcagtggagaaacaaaaaagaaattaacatcattttcaccacaatgccaaaagggcatattttgaattcaaattgattacaaaaacccaaataatatttggaccaaagactgaaataaatttacggcagctaaattaaacggcacttttctatgtgccgaacagttttgacaattgaacaaaaaaactgaccaaaacatttgctctgattggtggcacgatcgacaaacacctgaacagcggacacagaatgaaataggcgataaattgtcataaatgctaattgttgcataataaatgagaattattacgcatttatcaaattagaaggctaattgatttgcataattaaatgacgaattgtcacacgcatcttgccaaattagtgggctaattgatattgccgaattagactgctaattcatattgctaattagtgggttaattgatgttgcctaattagagggctaattgatgtttctgatattgcctaattagaggtgtaatttctcctattgtttatcgcaacaaattctttggcattcaaattacctttgcgctgagcacttggccaaacggtatgaacatttgggccagtttggcatcgtcaaactcttgtggcaaatggtagatgaacaggttgcacccatccgggcccagcagtgagtattcttgaaaagggaaaaattgttgaaatttgaaaaccttaacttttatcactgctgaggctgccgaatttttaatgactttatatatatatat

SEQ ID NO: 40374 - DNA, 1448 bp, Heterodera glycines
  unsure (1)..(1448): unsure at all n locations
ttccgtaaattttttgaaattntaagcaatttagttaacaaaatagcattaaagagttaaaaattttcccggctgcgcatatcggcaccggcgaacccccatttcaccatatttttgaaaaattgaggccaaaatggcaaaaatagtaattttttggcgaaaaaggcagaaaaaatttgtattgcttttattttggcgcaagactgctaccaattcctgctttttgcactgataaatcttacactacttcaactacttaattctaagcattagtcatagcttagtcttaaaagctttggcttgcttagacctaggcataccatttttatccctatttttttcatttctataattttgcttcattatttcattttggttgatttggaattgaacttttcataaatatttaaaaattcaaattagacagcccagtaattttatataacattatttaaatttaattatttattattcggaatacaaaaacaaaacgatattgataaaaatcataggaaagttaaaattttgccctttttttgtgaatcgcccaaattttcttgtgtatcgactataattaactattttaattttatattaaatatcaatttaataatatgtgaagctgacatacaaaaaattataaataggtaattgaattcttttggtaataataaattaattttataatcattaattgatattaaaataattatttttaatgtcacctcccccgctggtttccaaagtatgttcccttcggtggccaagaaattgaatacaacgctatgaaaattacttgaaattttattatttaaatataattttggagattttgggtaatattccatgagcgataatgacaacctatatctcgacggtcctcccccccccccccccggtggcgcttgtcggaaccgccatgcccatccatcttctaccagaaagttttacggaaaaacaccatcccgccctaagtccccactttcatcgtttcctgaaaataaaaaaacccaactgtccaatgttttcacggcactttccatcgctcgctttaatgaccatttgctgaaggtggacaaaagcattcgtttaattataattagagttgagaaaattgtcgagagacggaaaatgggaattcaagaaaggatggaatttaattattatcaattatttttttaggattttgttcaacgatgtttgttgtacattgatacaaatgtggaaactctgatcaaatctgattcatttttgcaaattgaccaaaaattgttgtgcgaaattttggaacgtgaagaattgcaaatccatgaagaaatttcaatttggaacgcagtaattttcattatatcctcattaattaatttgattatccccagattaattttaaatgttttttcggcactccgttgggccgatgaaaagtgccgtgaaaatggcattgaatg

SEQ ID NO: 40375 - DNA, 1315 bp, Heterodera glycines
agatgatgatgatgctaatttgtgtgataatgtgttgtggctaaacgatgtaattagtggtgcttaatgagagtgtatgaaagattcaattaattaatgggggggattttaaatgcaatgtaaatgcttttccattaaatcaagcatttaaaaagattgtttgccaataaagcaatttaaagaattcatagtttgttgatttatttaattttttataaataataattgataaaaataagtggttagcatattcttcactgattaaaacaaaattatatgagatatgtcttttagaaataataattaattataataagaaaattaattaaggcatttgtaattttagtataatttatttggaaaattaatacattgttgaggaaatgcaacaattcaacctggcgttcactattaattagttcaaaatcatttttaaaaataggaaaaataaataaaatagaatatgtcattaattccaataaaatattctgaaagaataatcagaaccaatttagcatcttctcaattgcacaaattctttaaaaaaaataaaaaatgttaataaaattcattttaatcaaaattcagagaaattgattttcccaataaaacaccccataaaatgtgttggcgttccgttccattccccgattaagacgagtgcacataattaatgggatacattcaaattgtcccaccgatcgggggctggcactctaagctcatccatctcattttcatccattttaccctgcgcatcatcatcacttccttcactttttgagagggacagaaaaatttcggtttttttgcccgagggcaaaaaaagtaattaattaaatttgtgaccaatggacaaggaaagagccaccgtaaaattgtccagcgaaatgctgctggttgctcgtcagctgcagccccgccggaggggtaataaattaagccatttcagaggtggcgggcggtgaaagaccaaaaatttttggaatttgaattttccgccaccacaaattggagcgcgggcagggcccgcccgttaattgagcatgctgataatgatgatgataatcattagcaggaggctgataataatgatcatgactgctaattagtatgctaatgagtattgtgcaaaaaatgagagcccgcaaattaaagctcagaatcgggatttcggtattgagtcgagattttcgcactaattcaaaaaatgttgaaggaattttttttgataaatctcaaaaaacccgcaaatttttccgttcatggtcttacaatttgtttcgaaggaaacgccggcggggcaacaggatgc

SEQ ID NO: 40376 - DNA, 939 bp, Heterodera glycines
gggatggtaccaggattttggaggggggtggggtgattagctttccgggatgaaggccttttttcataccatttttgaaggtgttctcgaaattgttgttttggtattttttaaattaaccctattttattttaagttttaaaaaataaaatccaaaatccagaccgtattttttcaaaaattttcattaaattatgtcttggggctgaatatctttgttactgtgaccatccctgaacaaagtgaaaaaaccaacaaatcatgttttcctcattgcacagtccaaatccgccatctatagctatgatcgagcttggtgcgaaagtctaggcaagaaaaaagaaaaagatcgacaagaagaagaagcagaagaacaaggggaagaagaagaagaagaagaacaccgaccagaacaagagcgacaagaacaagagcggccagaagaagagcgaccagaacaagagcgacaagaacaagagcggccagaagaagaacgaccagaacaagagcgacaagaacaagagcggccagaagaagagcgaccagaacaagagcgacaagaacaagagcggccagaagaagagcgaccagaacaagagcgaccagaaggagagcgaccagaacaagagcgacaagaacaagagcggccagaagaagagcgaccagaacaagagcgaccagaaggagagcgaccagaaggagaagatcgaccagaaggagagctaccagaaggagagcgacccgaaggagagcgacaagaaaaacagagacaagaggatggggaagaagaagacggggacgatgatgatgatgatgatgatgataatgaggatggcgccgtccagtgcaaagtgattttgcgaagaggaggcgaaggagacgatgatgacagtgctggagggaattcgggagggaatggtgcaaaggatggtggagggg

SEQ ID NO: 40377 - DNA, 545 bp, Heterodera glycines
aggttgcattgctgttgccacgggagcagggttttgttgacgttttcggaagcgcgcttcatattcttccttgagttgttctttggtcagcgctgggcggacgaacaggcggttcaggttttgtagagaacggagtcgagcacgctcgcgcttccatcctccgagtgccatgtgttggtgtgtggttgttggcatgaccaccttgagcgggcgtggtgttgttcgttgcgggtcgtaccgtccgagtcgaaagacggcggttggttgggcctcaacttcaagatggtccaggatttttgtggcggcttccctgtcttcctgaacacgttccgatgggcgaatggcattgctttccgggaggccaatgaacaccaaagtgcgttgtcgttcttgctctgcgagtgcaacagtgtttgggtccaggtccagtgcaggtgccattgaacgttttgcgcgaggcggagtgatgtttgatgcgttggttcgcttcatgacgaataattagcaagaaataattgttttttgtgatctgaattgtacaattt

SEQ ID NO: 40378 - DNA, 933 bp, Heterodera glycines
  unsure (1)..(933): unsure at all n locations
ctgccattgctattcctgcaatatgcagtctagtcacccctatcgattgctattcgaatggtttaggggtcgtatggcccacacaaaagttgtagctacttcttgcaaagaagacttaaccaactggaaacagcaagccatccaaatgcttcaatgtaaaaaaaaattacatttggatgcaacctttatttttcctcgcctctncttttcgaaaagaaaagctattagcaagcgagattggaccaattctaaaacaaatcagagtaattaatttaatctgactttataagataaatgggaatttaagcgaaggattcatgcaaaataataatctatagaaattctcaaaaaagtagttcctcgcagattcgggcaccgtttctataaagctagagacatatgcgctaaccataaaaaagatgaatcattttttgaaaaatttatatagttcgactaaatttgcaaatcgatttatggtgtacaggatgtttgtcgaaacataactcgtcaggcctttaagatagacctgccattgctattcctgcaaatatgcagtctagtcagcccaatcgattgctattcgaatggtttggggtcgttggcccaaacaaaagttgtgctgcttcttgcaaagaagaattagccaactgtaaacagcaagccatccaaatgcttcaatgtaaaaaaaaattacatttggatgcaacctttatttttcctcgcctctcttttcgaaaagaaaagctattagcaagcgtatttggaccaattctaaaacaaatcggggtaattaatttaatctgactttataagataaatgggaatttaagcgaacgattcatgcaatataataatctatagaaattctctataaagtagttcctcgcagattcggngaccgtttctataaagctagagacatatgcgctaacc

SEQ ID NO: 40379 - DNA, 807 bp, Heterodera glycines
ccattagggcgggaataattggactttgtttggtttgaccaccgacactcctcccccgcccgtaatgatgtccagcaatgggaatgccatcgtacaggttcgacgtgaccccgagacgcagtaccacatgtcgcgcgttgcccgcgaggggtttcggcgtgagggacgcggttcagtgaacattcggctgatgtaggaccggggaaagggtccgtccggcccgactccgatgcgcttctcccctgcagatcggcctattccgcgcagctttacctcgagcaggggtggcgcgtgttcgcccagcacgaccccaaccaactgttgttctactatccaatccaaacactggtggaccagcgcaaggagtcaagcctaatccaactgtgccggaaatacaacccgaagtgaggggagttttactgctccaaattgggggcacggaacagccaagagaaccaaatttcagcgagaagttcattctcagcgtcagtatcattgcggacatcgaacagtgcccggagacgccaccgcccgccgagccgatgagcggcggcgcggcggcaccacccgccacggcaaacaacgcattgccaacgacccccgtttatggcacgacagcggtgccaacaaatgtgtgagatgaatgcagtggcgatggcacaatattaggcgtaagatcagaaaccgaattcactgcccctccccctctcctccgccttatttttgtgactttttcctctccattcattcgttcatttttcactttttaaaacagctctttcactgttccaaccccaattgtcaagt

SEQ ID NO: 40380 - DNA, 1272 bp, Heterodera glycines
  unsure (1)..(1272): unsure at all n locations
cccaactctaaaggcatttcccattggtggaaaatgaaagtattggcatttccttgagtttcctttatgcctttcccccgccgaagggtctcgaattctgatcggttcgtgcagtcgttctcgaatgttgcgggcgctaaactctcaaattggaacgagggaacgtttatgggaagcgcagaaacggaggatgaacaaaggccaagtgcaagtgaaaaaagaaaaacggagaaggaagtcaatggcatacgaaaagggggcagacgaaatagtggagggaagagaagcagaggaaaacggaaaagcgcaacactttggcattcgacggtaaattatggcaatgctaaagcaattaatacaaatgccaaaacattgacaatggcattttgattaatacggaacccaaattgttgtgaaaacctaagctaaactcggacaaaaacaccgcggagaaatgacgacaaaagagcaattaatggggacaaatgggcacacattaagtgtataaaaatgaattcggccaaatccctcaaaaggttttcttttgtgccgccttcgcttgccaattccgacaaatcatttggcggaaactttgcggacggaccgaatcgcacggcaacggtaaggcgatcaaagaccattccggcatcgattaactccgcgggcagtagcttcaatcatttggatgtgtacgcgacagtcggaggtgagtaacgagctcaacatttggccagaaaactatgacattggattggcatctgaaaatgccaaaactcacccttttcaaaatgccaaggaatgatcaccactttgagtcggctaagcgcacgactccgaagcaacggattcgggcatgagcaggaggaagttgatttgtacggagaagaaagggcacaatgggaacgaaaacagctggcggccaaagtgaacttcgacttgatcggaatcgacccggtccgttggggaagggaagcgattggtactgacaatgagccgattgatcatctcttccgatcagtcatttagcgaatttgattttgattggccaattaatcacttcctctgatcactcaattcgcaattccgtctctgatcgcttttccccccgtaggcgcccttccaattggtcgagcacacttccctggtcaaagtgcactcgctgttttccctgctcagtctaaaccgtgcctatgtgactcgccgtgngcgtttgatttggcgtgtcgcacttcgcgatgtgagcaaaacaaaacaaaaaaatgaaaaaataat

SEQ ID NO: 40381 - DNA, 227 bp, Heterodera glycines
ggcggcggcggggacgggggcacgataattccgcccccgcggaggcgggggtttgatttgaattaactccaaaaaattttacaaaaaattatttttttatgaatgatgtgatggctccacattcctttagtcaatgtatcgcttcaattcaattccttttgcataaattacacagattttgtctaaagaattaccaaattttagagatttttggctaattttttaag

SEQ ID NO: 40382 - DNA, 1225 bp, Heterodera glycines
gttgatgtcgttgtgaagagcataaagggacgaagcgcaaattatcggatgagtaaaagtcatcatattgggtaattattcattgaattatcaaaattgtgttcattttaacattctttcactcccgagattcatttcatcaacaatttttactctcaggttccctgtctcttgtgaagatatcagattattatccaccatttttgttttgatttttgattattaaatgatctacatttcatttgtttttcaatcgatttaaatttaacaggattttccgctagaagaagacgaatcggggagggggggggggggggtcggggcacgtttcgggaccaaaaatttttatgattgattgctcatttgatcgaaatttcaaaaaaatttgatttttgttcatgatatactgaaaaatcaaatctcgtatcattcattcatagtcctaaagattctctataaacatgcaatttcaaaaaattaaatcaaacttggaaaaattatggacgaaaatttttaggtttttgatctttgcagtaaaaatcatcaaaagccatttgagaatgattgttgatcatttttttactgcattgaatttaattgtcaaagtaaaacaacacacatttattatacaattttccttaaaacattcgttcattcgtcccattcttcgccactggacgactcaaatgcgtgggcagtgtctttgtttcggcggtaccttcgttctttttaaattaaatttggtttaatgtacacaccgtttcaaaaaactagatgtgtgccaataaatagagagtgcagagaaaaaaacatctctcatttttggcgtactattttttttatctctgttaattagagtgccacgggaccgggaatttttgccaaaaccaggaccgggacttgccgggacctgagaagccgggaccgggaccgggacctcgatttttttccgggaccgggaccgcaagaaaaaccgggaaccgggaccaaccgggaaattttaaaaattcaaaaaaattttaaaaattaaaaaaaaaattcaatcaagtgaaaataatacaaaattatttggttttttatttaataaattaaattaatgaaaattttcaaacaaattttcttcaattatttcaaacaattaatcatttttggactaaatcatcgaatattaatagaaattcagatttgattttcacatcactttttttcggagcgctttttcaaa

SEQ ID NO: 40383 - DNA, 1081 bp, Heterodera glycines
  unsure (1)..(1081): unsure at all n locations
gtcaggtggccatttatttaattaattttatgccaattaattagcaatttgtancgtgatcacttantccgacacttcccgtggctttcgaantgggttcgaagcaatgaaaaagtttcttcaatttgtacttcgaccacaacaatcattgtccagccgaagaatggcaccccaaacggtgccaatcgcttttacaatgaaaaattggcatctgattgaactcaaaaaagcgactcaaattttttgattgattttgtaaaaatgatttaaatagtttgtttttctgatcaatataaagctgtatttggtggatctttatttaaatattttacatattattttgtttttattcattttatgtaaatttgggtaaatattttttattttttgagaataaagataaggaattgcgatgacattttgtcacttatcatcaatttataggagaaatgaacatcaatcacagtttttataagagttttctgctcaattgatgatacaaatttagtcatatttttgatttattttaccccaaattcttaaaatttttttccaatttttaaaatgtcccaaagaacttcctcaacaataaattttcgtgacatcgctttatgccaacagcagccacccggcacaataatttgctttcggcactgtcgtctttttcaaaacggcactttcgtcgctgattcgggtgggtgtttttacttgttgtaaattaagctcgttatttctcgcttattattacagtaatacagagatttacattttatgcgtcccatgaaatttatgcgtaacataattattttatgagtctcatgaccaggggatggatttatatgtttttacatatttttttgcgcatatgctatcgtatgagcacaaaaatagcatttttacctgttttaataacaatctgagcgattttttagcacttaaaaaaacaaattttgaactttttgctcataaaaacatattttggtgatttttaaccttcacatattttngagggtttttttggctcatataaatccgttccctgntcatgacattttatgtgtccaactgaattatttttttt

SEQ ID NO: 40384 - DNA, 1269 bp, Heterodera glycines
taaaattctttcattaaatcaaattgatgaatatttttcaaattgattcagattaatccaatgttgcagcacatgtaagaagcaatttcttctcatatttcaaaatatttaaaatattaattagtctttaataattaattaaaataatttagcaaataatttttcaagcattttaaataaagtaatttttggttttttggcaatcacttcaaacggtccattccgtacgaccgaattgcgcagtcgctggtccgaatgaattgtgacgaccgttatggcgcatcgttttgcaaaaagtaggcacgcaaaaatccaaagtcaaaaacacaacgccatgaattttcggcgcaaatttttactttttctcacaaagatatgtcagcgatttggacgtgtgggtaagttttgtccgccttttacagtatgccattgctgtaatttttcttccctctcccgactgattttgagacgtataagcagtggtcgtgcagtggctacaggtgtccaattaatgaattaattgagctacaagtgtacaattaattaaataattgattgaataataattagcacaattattttgcattgttttaaattatcataacaaggtattaatttttttatgatttactgaaaccttaactgtgtacttttattttaagttttttattttactacgatataacgttttattattgaattttaaatattgttttaagagtttagtaatttaaatattttattatttcattttttattaactttttaaattacatttttaaatttaatcagttaaagttaaatttttttttcttcaattcatctttcatcattttattgctatgttttttctttttactttatataaataatttttatgacgtttcattttttatttttgaataattatattaataattttatgtagaattatttgaatattttttatgccttcattttccaagttttttattttatgcgatatattagcattttttgttttaatttcatttttgttaatattgaaatttattgttaagcccttatatggcattccgcgcgtgccgcaaaacatgcggctttttgcgactttgacaaagtgcactacaatctgcgaaatgccaccgatgcatgcagaagcatagcggacgagaaggagcggcgccgatgaaagtgatacatcgagcaaattgatcacctaatcaagcgatcagtcgatgattgatcaacaaaatgaacagaagaacagcactgcaggagtgatcgaaa

SEQ ID NO: 40385 - DNA, 673 bp, Heterodera glycines
ttctgctcaagtaacaaaaaatatgagtgatcgaattatcactaaaaaggtaagcctacattttttggcatatttcaaaagcaataaataatttttaaaatttaatgattttcctgcaagaaataatcattggtccttttaagcggccttgtggtgggccttcccccccccccctcccacgcccttcagaacacgacaaatatttcaacaaaaattttgaaaaattgactagagcaatcgaacgctaacggacgacctaatggaaaaaatcccgaaggagagaatttaattaaatccattccttcgggggaccgtgccgggtgccgcggggtaagcagtgctggttcgtttcatcacggcaccgaaccttttggctagtcagcaatcgttgcttaacttgccagatcggacgggtgcgcatgattccactgttccaagcaccccaccaaaagcaaaacgatataaccaaaatataaggaaaaattttttaaaacattttttctccatcttcctttttgatactaaagcatcagagtgctaaaattaagttgtaaataaaatttggtgcgctttagagcactttctgaaaaaaatatttatgaaacaaaaaaatcgattttttcaagtgtccgtttggggtactcaaacaattatggggagcaaaaatccaacg

SEQ ID NO: 40386 - DNA, 1492 bp, Heterodera glycines
tagggttgagcggtaccggtaccggtactggccggtaattccgggttttttttggtaccggtaccggtacccggtaccggttttttcaaaaatgaaattaccgttaccggtttgtctagtaccggtaccgccggtaaaaatttgcactggtaagaatgggggtctggtcgagaaaagagtaggaatttgtgaagaaggagaaatttttgagaaaaaattaaattttatttcatttagtcatgggagtacacacatgcacatgtggtgtagtggttaaactttctacctttcataattttttgcctgggttcaattccccacttggatagaatattcctcacattttctttaccatcattttaattaaaattttaattttaaaaaatatttcaacttttttctttcatgttaagcatcctaaaaacccaaaacttaatcaattggtcatttttttacaaattctgttaacaaatcgcattaaaaaatacaaaatttttcccggcggcgcctatcggcaccgccggccctccttgtcccccaaaagtcttggaaaaaacgtgccgcgtaaaaagcggtgttgaaagcaaaaaaaggtcattgatttacattaatttacatggccggagaccccttcgcaaaattggaaaattggccgctgattattcaaaaaaccgcatgtctctatgacttatagcggctgaggtatgggcacttcaattttgacgtagtgtaaaatgcactattttcttaagaaatacagtactttttataggcaccgaaataaaagtcgacgtatctcagcgggcctaaatcgtagacccactattccaaaggcaattcggtagcaaattttgtgctctataaaatgggcctactcaaaatttccagaaaaattttcccaaccccctagaaattttttttgaaatttacccctcgttcccagccaaaatgggctgatcagatcaccatgaaggagtgatctgatcaacttggtgttgctaccttttttgatcagcatccaaagttatgcttacctgaatttttttagatttttttaatactgatccagagaagcaatattttaaaaatgaaatgggacaacacttttgaccacctatattttgatcaaattgtgaatatggtaaaataaatcaaataaatgtttatgtcacaaatgcaaatatggtatcattggaaagcccataaaaaatgctatccaatggtatgctacttatctgttgaaattggaaaatgacaattttatacgcaattatttttttcaaagcatgatgggacaacacttatgaccatgactgtatgtcctgaatttgaaaaaaaaaaacttggtcaacctgaatatacatatacttctgaacaattctaatgctaaaaaacaggaactcacgcgaaaattgaataaaaattttgtatttgaaaaattttgtccaaaaattttttttgtctaaaatttccggttttttaccggtaccgg

SEQ ID NO: 40387 - DNA, 822 bp, Heterodera glycines
acttcctgttccttttccactttctcttaaactttctattccttttccactttctcttaaactttctattccttttccactttctcttaaactttctattccttttccactttctcttaaactttctattccttttccactttctcttaaactttctattccttttccactttctcttccactttctgtctcttccattttctcttccacttcctgttccttttccactttctcttaaactttctattccttttccactttctcttccactttctgtctcttccattttctcttccactttctgtctcttccattttctcttccacttcctgttccttttccactttctcttaaactttctattccttttccactttctcttaaactttctattcctttttcactttctcttaaactttctattccttttccactttctcttaaactttctattccttttccactttctcttccactttctgtctcttccattttctcttccactttctgtctcttccattttctcttccacttcctgttccttttccactttctcttaaactttctattccttttccactttctcttaaactttctattccttttccactttctcttaaactttctattccttttccactttctcttaaactttctattccttttccacttcctgttccttttccactttctcttaaactttctattccttttccactttctcttaaactttctattctccactttctcttaaattttctattccttttccactttctcttaaaactttctattccttttccactttctctttcactttct

SEQ ID NO: 40388 - DNA, 463 bp, Heterodera glycines
aaaaagatttccaaatttatgaaaaaattcaacaaattttcttaataaatttcattaaaactctaaatttttcctcagcttcgccaagtacaaaaggctaaattttttctgaaaaagttagctaaaaatcgtaaaatttggtcattttttggtgtaaatctgttaacaaatcacacacaaattttcaaaattttccccgacggtgcctatcggcaccgccggaccccccttgtcccccaaatttttttgaaaaatgcgccgtaaaaagggttttgaaaagtaaaaaaggtcgatttacaggcttgatataattctaagctaaaataaagattataaaatttttttcgaatttttaatcaaaatttcaaaaattttgaaaaagtcccggcccaaaaactgggaccgggagtcccggttcattttccaagtcccggtcacggccatttcaaaattccgggctcta

SEQ ID NO: 40389 - DNA, 1008 bp, Heterodera glycines
cttctaatcactcttgtacctcttctaatcactgctgtacctctcctaatcactgttgtacctctcctaatcactgttgtacctcttctatcactgtgtacctcttttaatcaccgttgtacctcttctaatcacagttgtacctcttataatcactgttcttcctcttttaatcactattgtacctcttttaatcacttttatacctcttctcatcactgttgtacctcttctcatcacttttgtacctcttctcacactgttgtacctcttctcatcactgttgtacctcttctcatcactgttgtacctcttctaatcactgttttacctcttttaatcactgttgtacatcttctaatcactcttgtacctcttctgatcactgttgaacctcttctaatcatcatcgtacctcttctaatcactgttgtacctcttttaatcacagttgtacctcttctaatcacttttctattactttttcactgtcgtacctcttcaaatcactgttgcacctcttctattcactgttgcacctcttctaatcacttttctatcactttttcactgttgcacctcttctattcactgttgcacctcttctaatcacttttctatcactttttcactgtcgtacctcttctaatcactgttgtacctcttcaaatcactgttgtgcctttcccttccgtggttgcacttgtacctcttctcatctctgttgtacctcttctaatcacagttctacctcttctaatcacttttgtatctgttctaaaatttaaaaaacggcgcgaagcggccgttcgaggccgcaaatcggcctaaaaaggccacaaaaagggtgcgaatcgcccgtctgagtcatcaatttttaataacgggcgcgaagcgcccgtccgactcacacaatttaaaaaacggccgcgaagcggccgaaaacacaacaaaatttaaaaacgggcgcgaaccgcccgtctgagtccatcaaattttaataacggg

SEQ ID NO: 40390 - DNA, 1383 bp, Heterodera glycines
  unsure (1)..(1383): unsure at all n locations
atttttccagagatacntatgttctgaagttagcaaattaataatttatgggcaccgaatcaaaagctttttcaaatnctataaaaattatatcgatattttgaccattttctattggtttatagaaanaatccagagaaaccaacaactgtgtgttggtcgacctggatttcaaaaatccaaattgttcatctgttaaaatcttatttttntcaagatgtntaacaatattccatttccccataatctaagattattcgaaagagttcacttatgataggtgccaataaatctgcgcattgcttaatcaatatatattaggtaacccgtctggagatgtcgagtttctgttgggtaatttccttagtgcattccagaccaaggcagcatttaattcgatatcggttaggctaactattttgtcattaattggataattcatattacaatttttttgcataaaattttgttgaaatattttaccaaaaagcaaacatttctgcctatcctcaatgtaaattctgccttggtcatcgaaatgcaatcttatttctcagtcagaattaaatttgttgccgatgtatttaaaaatagccaaattgcctttattaacaaattggctttctttcttatcattaatattttttaattcccttttcagattcctacttaaaattttgtactttattttatattgtccgtgatcagggcattctctaataataacttttagctaattttatcgcgacaaatatttcatttattattctatttttattcttatgtttatactaatatatatttattataattactgttttatttttattgatttaaaaggtattgtttgtttactttaggtcgtttttcatttaactatatttataattttaaaatttattgttaatccaacttgtcttctttctcttctttctttacaattttcatcaattttaagttatttgtactaaattattgtataaggtctctttttaaaacacgaataacttttttcaaagaaaccataaaaaccctgaaaagggaaagtttactattattggagagtcgatccagcggagaatcgtcgtaaaacttccatctaaaagtgatattttctttcaaacaaaaaagattaacaaagttaattttgctaaacaaggcatcttcgggtaaaaattgataaaaaatttttactacattttctatttttctgtacatcttaatttttatgggggaaatgttcatgataaaatttctgctgtatgggcctatgcgtagtaagtgaagtgagtaaaaaaatcttgaccttataattttgcaatggagcataatacttccagttggtaggttttaagaaccaaacttattttctcctataatatg

SEQ ID NO: 40391 - DNA, 1070 bp, Heterodera glycines
  unsure (1)..(1070): unsure at all n locations
ttataaancaactttttgataatttacttgataaaaaccttttacaaaaaaaagaacctacacgcaggggaaccgaacctggtgtttaaaaaacggtgactggcgcactaccactacaccacttgacactatgatgaagtgcaaataaatatttattttatttattcactaaaaaactttggcacggaataactcggcactcgggctcattccgcaaaaaataaaatcacttttcttaagaacccatgggtgctctatccactaaccaaatttcattctgaaatcccacggacaccctaggaccttcctttgtaaatgaaattttaattttctaatgatttggcctttatttaatcctttctcatttccggatcaacttgtattcttttacttatattattttttaaaaatttcgaatggtatttcattttattgtttcttttgaactccttaatacaatcttcggataggtttatctttgtacttttccatatttaaactttagtcacaaaatatttataatttgttaaaattagagttgttaattaattttttatgaaaatcaaaaagttttcgtgttaaaattttcgtatataaaatgtggctatttgtttatataaaaaattatctatatatattttgattatttaacagtagtgaatttttttctttaactatttaatagctaaataaatatttaaattaattactagctttaatatattagaaaccataaaaatttaaaaaataagaattatttttgtctggtttgagtttttaaaaattaatttaacttgtcaaaaaatggtgatctgaagatgtacaatggacaatttgtgttctgttgtgagtaaacaccgatcgacaaaagttctaatttttctcccggcagcgccaatggcaccgtccattctttccccaaaaaaaaactcacattttttcttaacaaattgacccaaaatcgcaaaaatgttgtcatgtttggtgaaaatctgttaacaaatcacaatcgaattttcaaaatttttcccggcggcgcctaaagtcaccgccggacaccccccccctcc

SEQ ID NO: 40392 - DNA, 1408 bp, Heterodera glycines
aattttttaaaatgtactaacttagaaattttaaaatcttgcagtttttctcatagagaaattagaagaaaaaaaattcgaaaattttatgttgttttttttcaaaaaaattatcgaagctgaaaaattgttcgaatttttcctataaaaataactttctagcagatttcttcacgaaaaatttctaaattagtataaaaaaaatttgttttttttcattttctcggaggaaacgagctgcttgctccgcacagagattgccaattaacgccatttctgtgtgctgccccaacgaccaaccaaatattcgttgtttacgcggtcgccaatgaacgtgcgcagcgtgtgcagtgcttggtttgtgttcagcgattgcatgtggcaatggtaggcgcgagtggcgagtgccaactgtcgcttcagctcaatgtcttctgactaaaaagtgacaaatttgcataaaaatataatatttgaatataaaagaaaagcttcagcaaattttatggaaaactcactaataaaaatttgattaattaatggtcttattaaatgcacatttactgattcttcgaatgatttcccttacctcaaaggtcatctccgctaaatcgtgcgccatcgtttgttcagcgttttccgcccatggatgggaaatgaaaaaaaacaacaacaatgtttaatgtgcaaattgtgaaagaagcaacacatggcttctaattaacattttattgatacaatttttcatattaattaattagtgattaattaatgatttaatttggcatttttgtttgtttatttaccatccatgcgcagctttgaagacgcgttgcgtgaatttgcacaagttccacacgcggttacagaaattgcgcgcctcagtgagcggcaatgtgaaatccacgcgtatcaccgccttggtcaggtcgtgctgaagcagtgagaaacggaacgcgtccaccccattgtgacgcattccgcgcggaaagcgtttgcgcaagtccgcctcagcaaccgctttaaataggaatagagaccaaacaattaatttgaaaatgctattgggagagggtacgccccaaaaggtcgtcgccgaaaaaacttcgccgggttatatataacgtcaacgcaaaaaaaaaaaaaaattgttttaacttttttttgttgttgaaattggtgtttgtgtgccttaattcaatcccacctttctcttcagatggtaaattggaggagttgatccgctcgaccatctcttcaatgccggtccctctgataatgtcgagtgggtcgaccacctaacaaataacaatccattagcaatgaataaagagcaagctttccctcccccctcctcacattgcccaacgatttgctcatctttctttcccggttgtccctgaccatt

SEQ ID NO: 40393 - DNA, 1280 bp, Heterodera glycines
aattggatgaggactacgacggcgcgccggtgaatcgcgaaatggcggctcgtaaggaacccattcatggcgctgccgccggtaatgagcaatgttcatctctcccacgccggatttgggggcagagtccgcccccccccccgttctcctccgtcgcattcttccattcccaacaacgacaccattcacttcttctcatcgggccaaagggccgtcccactggatcaatggaaacgccactcaaagggggcggttgcgttcggtgattgtggtaccgaacgccgccggcaacgggcaaaagctcggggaaacgtcagccagaacggccgggccgccggccaactcaggggaacgttcccctcgtccatcaaccagcagttcttcggcccaaccgccgaagagcccggcaacaacagcaccagagctgcgagcgagaccgacggagcaattggcaaaagtggcggagctgcttgggcaggtcggcgaggaaatggccaaaatcctggaggccgaggagaagagcacggacgggaaggaagaccttctttccctcccttcggacggggaggaggtggtgccggaaacgccgccgccgcccgccgcaatgtcgcgaaaccgcgacgagagttggggtgaaggatcgggtcaattgtcctttacccggggctcgggcgggcactacaatgcccgtaaaatcgatgaggaggaggagaaccgatgggccaccccaggcgcatggtttactgcacccccacgagtctcgggcccgaagaagaagaagccgtggtaccattgatgatcgggaacattcccgttggtcggtcggtcggagcagaagatcggagagatcacgaaacccccgccaatctggcttttcccttccttttcgtccccttctttttttctccctattattaaatcatcattttccatttcatttctcattatccaatttgtctaccatttcacatctgcattttctccatcttttcttcgccccatttgcatttttcacattcattcacattttcaaattccttttgttcggcccgattgggcatccttttctcaaaatgtttaccattatctttttgcccgccatcccctcttttcatccattttctgtactctgattccccccaacatattcagcgatgcctttttccctttgtctctcaaaaatgcccacttttctccttattcacgtgtttttacatattctgctcgggggctatttaaacagggcgcccccctcctttttttttcctctccttctcttt

SEQ ID NO: 40394 - DNA, 572 bp, Heterodera glycines
ttagtcttccctcaacaaatggtcactaatttctttgcccatttttgcctgaaattggaaatgtccaaaaaacgaatccctgccgaattgctttttgaaatttgccattacctcccttttcgccttcgatgggccaccgaccgcgtggcattggcatttgaccatttcgttttaaaaattcaatgtgtttggatgaagacagaatttgagcgccaaataaaaattgcacagaaagtacggattagtgattatgcccgaggggtatttaaaaaatgccattaaatttcagaaacatttgctgacaaaagccaagagggaattgtcaaaagtgaccaagaaattgttggatgacgaattaacgctcatatttgatcgcattgaatttgaatttcgattcgatttcgaattcgatgttgatgggaaggattcgcgcgacataagatttctagtcgatttggacttcggtgttgcggagatggaattgcgcggcatgacatccctcgaaatattcaacaaaaaaacggaaaaagtacttgccgaacgtgtcgattacgacgacccaaattccattg

SEQ ID NO: 40395 - DNA, 997 bp, Heterodera glycines
  unsure (1)..(997): unsure at all n locations
aacttggcagtttttaagaaacgcccatggtggcactttttaagaaacgacctagcaccattagcgggtaggatgaatgttttgctttagaggaatcttttttttttgatagcattgctttgttggtgccaattttggcttgttgtataaactattttaaagatctttttgagttatttttgctatttataaggttaggaaaaaattgccggaatttgttgaaactcgacttttactaacatttttttccttaatcagtgagctaaattagttgcctaaaatgtgcatgaaaaaatcattgaacttcaaaattttgtaaattgcaatatgattttttataaattttttaaaatgttgaccatttatattcaaagtaaaaaattacgagtgcggcttcgcatcttaatctgcgatcttttaaacttttattataaaattttcaatgagaaactcgggaaatttttgttctaatgtctaaaccccgaaccaaattttaattgggctccattataaacaattttggcgcaatttaaatataggctgaggcataaaaggatgagaaagatgcaaattaatggcacgttgactaattctaaattcctaatcgatctttaacaaaaaaccgaaatttggacaatttgaattttcgagtttttctcgagttcgggattggaattggtcaaaagtgatgaacgatcccgaaaaccctaagagcaagtttcacgatttcatgtcaatgtaaaagttaccaaaacatgcaatcaacgtcgttttttaaaaattcgagaaggaaagcaaaggagttataagtattttgacgctttaaaaaaatttcgaagaaattaaaaattcttgaatttatcggatgtgttgagtttttttatgatccgtcatatgtttaaaaccnaataatttactttaattgctgcctcaaggattttgccatcgcagaaattgaaggtgaaaattcgttgacataatttgcgcccaattaccc

SEQ ID NO: 40396 - DNA, 1048 bp, Heterodera glycines
gattgatcattagtaggatatccaaatctattttttacttaatttaatttgtttattatattaaataatgatgcaatatttaaaaattgggattgatcattagtaggattatccaaatctattttttacttaatataatttgtttattatattaaattatgtggaaatatttacaaaattgggattgatcattagtaggattatccaaatctattttttacttaatataatttgtttattatattaaataatgatgcaatatttaaaaattgggattgatcattagtaggattatccaaatctattttttacttaatataatttgtttattatattaaataatgatgcaatatttaaaaattgggattgatcataagtaggattatccatatctattttttacttaatataatttgtttattatattaaataatgatgcaatatttaaaaattgggattgatcattagtaggattatccaaatctattttttacttaatataatttgtttattatattaaataatgatgcaatatttaaaaattcggattgaccataagtaggattaaccaaatctattttttacttaataaaattatatatatatattattatgtaattattatgcaattatttataatagtgattgatcatcaacaaccctaaatgttttggttttaatttgtcatctgtcactttgacccccccccctacctttggtcaactatcgcatcaaattaacgatgacaagccaagctcccggaagagggtttaaatattaagaaaataagccggcatttgattccaagtgaggttctctctgattttaatatcaaaatgataaaaagtcaggacaaatcgtaaaaatcaggaccttttctatttttgagattgcccacctccaactcaggattgaactgaaattttcaaaaatgctaaaactaatatttttcaaaaaactggaaaatatggttctttctcaaataccaattaaatgaaaagaaaaagaaagaaataatcagaaaaacaatggaattaaatgattttaa

SEQ ID NO: 40397 - DNA, 1595 bp, Heterodera glycines
ctattcccggtttttaacatataattatttgtcaatgcttttccttcaataaattcctctctcttaaaatggtaatttgaaatggcttgaagccttaaacccggggacacaacagcagtgacgtgggtaaaatattttaaaggtgttctccgaaatcgacatcaaagtcgctgacccggtggtgtccttctgcgaaactgtcgtcgaaacttcgtccctgaaatgttttgctcaaacacccaaccaaaagttttactacaaattattccaaaaatacaaaaattcttttaggaacaaaataacgatgattgccgaacccctcgagaagggattggcggaggatatcgaaggcgaaattgtgaagatcagttggaataggtcggtttacagaaatgtttgctttcatataagattgaatataataaacacattaaatgattagctagagttttaaaaagttagtcaccgcttgggaaaagttaaattcttgcgcaaattaacgtttattatttgctatgctaacactaaaaatgtttaatgagttatggccttattttatgcctccgctggggaaaaaatctttcatttcgttggatttcccttcagaaaacaacttggtgactttttccaaaccaaatacgaatgggatttgctcgctgcgcgttccatttgggcatttggtcccgagacaaatggtccgaacatttttctggacgacactcttccgtcagaggtggacaaagagttgctgaagacagttcgcgagtccgtcatccaaggctttcaatgggccaccagagaagggcccctctgtgaagaacgttcgtccttcgctaattttaaggctatcaaaacaaatttcgcttgcttcagcgattcgcaatgtcaagttcaaaatgttggatgctcagatagccaaggagccgctctacagaggcgggggacaaattatcccaacttcccgccgttgcgcatattccgcctttttggtgagttctttccccatgcaattttcgtttctgatttttctttcgatcagatggcaacgcctcgtctgatggagccgtattatttcgtggaagtgatcgcccccgccgattgtgtgacagccatttacactgtgctgtcaaaacgacgtggtcacgtcacgaccgatgcgccgatccccggctcaccgctgtacacaatcaaagcgttcattccggtgatcgattcgttcggtttcgagacggacttgcggacgcacacccaaggacaggcattttgcatgtgtgtgttcagccattggcaggtaattaattgccctggaattctctgatgacttgccatcattgcctttttcagattgtgcccggtgatccgctcgacaaaagcattgccattcgtccactcgaattgcaaccggccccccatttggcacgcgagtttatgatcaaaacaaggcgaagaaagggcctctccgaggacgtctctgtgaacaaattcttcgatgacccaatgttggtcgaactcgcgaagcagcaagacttattcagtgggttcggcgtatgatttacgagcgatggatctctccgccattttaattgtttatttgg

SEQ ID NO: 40398 - DNA, 1031 bp, Heterodera glycines
gtcccttaaatgaccgccaatttcattaccgaccaaaaagttttggcaaagtgtccacgggatgaggtcaccggccgcccgcttttcgccttcgtctcgcacatttgtcacactttgtttgaagagttgcttcatttcctcaccctccgggtacatgtccaagagcaagtatttcctgggctaatgtcccttctcgttttgagccaaactcaacccccgagggtgagtgggattggaggaaaagtggtagagaaggttgcgcaactcataaatgcggattgagtaagatgatacaaaatagtcgagggcatcaggggggattttgagtagggagaaggtgaaaatgatactttcgcttttccgacgatttggcacttcggttttttcagaagtggaggaaaagcgggaaaactgttgctttttttaaattgggctggggagtatgggtacttccgaggtttgctaccccttttttctaataattttttctaggctttcagcacaacgtgttttacgtgagttaaatcatatacattgtttaatttataagccttttccttggtgcttaccgtaatccataccaataaccatggtatgtttggcaggattttgatatttttgaataaaagtttgttattttacacccctaaatttcaaacattttagcaactgttttccctttttacatcttttcagatatcagccaaaataggctttgatggccacttttccccgttgtgcccctcctccagcccacttttctgcccgtttgcacaaaaatattggattttcccaatttttttttattaaagtcacacataaaattaaaatgctaatagattgttggcaaaatgaacattgttaataattaatagagctcgcattttggggcatatgccttttttctgcgcactagcttttttggcattttgccgttttggtgcctttttttttgcgttttgccggaaaattccattaaatttcaataaaaaggggaaaatacacccctaagaatttaaaaattttctcaa

SEQ ID NO: 40399 - DNA, 683 bp, Heterodera glycines
tttttgttttttttctcaagaaaaatttttcaaaaattctcaaaatattttaaaaaatgaaaatatgtacgaaaaaaagtttaaatacattattattaagcaatatttattgtttaattaataataaatacttttaggtatttttacgttattttattaattaaaaaggttttttattaaaaaaaaattaaaaaatacaggtacaggcctggatccaggcctcgaggctttttacaaaataccgacctctactaaactccccacctgaattaatggttggattgacacgcggacaggggcctttggtgtcacaatgtgaatccttacatggaaaataaatgaaataaaacgactcaaaagccaagaaaatgcctaccgcattaattgtgcggtcattctcggttcctttttgcacggacatggcatccaaattgccaagtcattgtccatcaacggtgccgcatcggtttttagtgtcccggacattcgccgatgtcggagcacttttcccggctccacaaccataaaacgatgtccccgtgggcattcgtaatcaaaaccaatgaaaagctaaaatatgaaagaaaaactacttataaatctgaatgggtgcacaatgccttgactttctccttgctcgtcataattgcagcgcgttcaaattcccgtgctgctgctgctgc

SEQ ID NO: 40400 - DNA, 793 bp, Heterodera glycines
tcatcttccgtgcgtacaagaagaccaagcagcagaagtccgcttcattcatcaccagcagttcaagccaagccgaagaaagccgtgtcggtccgtgaaggcaaatgacagaaagtgccgccccaatgatggacgataatgaagatagagaatatgcttgtttttatgatataaatatatatttgtggaataatcattatattgtctgtctgtgctgttgtatatttatatgcgtattggttgtaaatattgtatttgttgccgcatactgtaatttgctctaaatgtactgtcgataatattattaaaagaaaattggcactttcctccttttattctctggctcattacattctttttataggatccacccaaagagatgaaagggggcgtccctttttgattttttttttttgcaataaaattttatgcctaaaaatgagtaacccatgtatccagcagggatcttggggtcgtcacgaataatttgggattatgacataaatttagaacaaaacttgaatttttgtttgaattcgggtaccgaattatgaattggcataaataaacatcacattcatgattgatctgcaccctcggaaaccccggatttgtttttttatggatttttaaacaaaaaacttttatcaaaaatcaaagtgttaatcgcccccccccccctagtttttcggcctatgctacagtatatatggcaaattaatttattcaaaagctgtcgcattttccaagtccaaattcaaaacaacaaaaaaaggatggaaaaaaccgatgg

SEQ ID NO: 40401 - DNA, 278 bp, Heterodera glycines
caggtgtttgatgataaccagagaaaaagagggaagagatatagtacgggtgtagaagagggtgtcaaacaaaacatctgccaccccgcacatctgcctccatgccctactaccaattaattaattagtaccaattagtcatcactaattaccacccaacccccatctgtcggcaggttcaaagggctgcacccctcccataggcttgggtttgaccaattagcacccccaattacaccacctgtcacttctaattagcgtcaacctccaacggtccc

SEQ ID NO: 40402 - DNA, 1400 bp, Heterodera glycines
  unsure (1)..(1400): unsure at all n locations
tgttgacgaattgagcgaaaaagagcccgaaaagctcgcagaanattttggaggcaaaattggacaaagaggtggtcgtcaaagtgcaaatcaaggtcggttgagtgtgtgccgctaaatttgtttttaaactttgtgtttaatcaggagtccaaaggccatttcgaaggccaggatttcgattggataatcatgtccatgtgcgcggacaacaaagatgtcgaaaaagaggaagaagagaaggccaagaaaaaggtggagaaagaggatggagaactgaaggaagagtcggaggatgacgatggagatgaaattcagctggttggggagacgaaatcgaccagcaccgaggccgtgaaaaaggcaaaaaagaattgacaagagtgctgagtaatgatgaacctatcttaaatgatattgatgttgcatttagcatagaaaaaaacaattgttaaagaaatgtttgcacttgtaacagcctacaaaaaaaaaggcatagagaaattgccaaattatttgaaacactctgaaaaaaatttttgtttttcaccttaaataacagcacaatgaaaaggcgctgggactttcgttcaatgagcttttttgagcagcccagcccacctgaacagtcgtcggctttgtcaacaccacaacagcaactaacagatgacgataatgatgatgaacaccagcagggcgagggacgcgggactagagcggaaggcggcagccaatcgaccggaaacgacctttttcaacaggtctcacactcagtgcacagactggagcgcttttcggtgtcacgacacatcacagagtttgtgctgaatgccaacgttgaggaaccggacgaagtcttgcgcggtgcattccaaatccttatggaacgggcaatccaaaatgcaaagcagaaaagtggccggaaagttctcaaaattggtgttacgctacagggaagaggtttgattggtcggctggtagcccttttattccttatctattaaataggcttacatgacccaatcgtattgccgcttcgaccgccagaacaaaacagctgtgacacgctgatggctgagctggacaagcttggccaaagtgatggtgaagacggaggagttggtgttggagagaatagtggtgaatcgctcgacaaacgatcattgctactcagcgaaccggtgcaaatcactttgacctgtttaactccacctaccggggcgggacgaccgcgcttctacccatatcaacattggggctacaatgaggcgcatcgcataaggatcagagattgggaagacaattattgtatgttccacgcgcttattggtgctcgagcgtaccacgaccctgtgctgttcaacgagtggatgttagctgatcaacagccacaacagcag

SEQ ID NO: 40403 - DNA, 882 bp, Heterodera glycines
cttttcgtgaaaaaaacttttaaaatatataataatttcttttacaattgaaaatttttgtgtgttttgctacctaaaccgtgttagaaaaaatttttatttgcctatttgaggatttttgtgtctatttagtgcctattttgcgatttttgtgcctaaaaatggagtccctaacaatgagtcatgttctttacaataccattggttaatgttcatcaaatataacttttatatgaaagtccaaagcattccaaaaagaatttatggaaaaaggatgataaataggtctcgctacgaaaaatctttttcggtggtggacacccgttccacaacgtaaaggggtccagctggctttgccatttttgggtcacattttcaaaaaataatagtttaccaaaggtttttccggatgcgcctaatggcaccgccggattccattgtacaattattattttttgaaaatttgaccctggcataaattttttaatttttggcgcaaaactgctacaaattcctggtccagtgatgaaaatcttgcaaaaaattgagaaaacattttttggcccaaagagcaaaaaagtttaaggtttcctcctccgaaatttcttctggctacgggtctgtggcaggccaaaatatactcattctgacttacaatcttgaaaataatggttctttcaaatttgaaaactttaattaattctttttttgtctgcttgcagccgaaacgactccgtcccaaaaccccctatcccggaaaattgacattgctaattttaaatgcttgtcagagatttccacgacagtaaacccacctcagccaattgtttctgcggtgcttctcttttctcatcattattttgagctttgtaggaaatgttg

SEQ ID NO: 40404 - DNA, 996 bp, Heterodera glycines
tcatttcacttcccaattgctccttctcgagttcttttttttcattctctccccctttttgtgccgagtcgacgcctttgcgcttaaagttcgtctccaaaagggccaattgtgcgcgtcagtttttcttttttcttttggcaatttgccatactttgggtttcagtgccaattttattttgtcgtttttggcactgattttccctcttcttctgatgccattcttctccttcctcttctccagggatgacgtgttggaagtgctcgactttctcttccgccaccctttccgcctgtctctcttcttggccaatgtcatttaccgcgtcggctccgttttcagttgcgtccaatttatgacgtcatgcgacgctttgctaaaaagcgcggaggaaagcggcgatgaattgtcactggctcaatcggtgggcgattttacgtaatcagcagactttctgtttgatcaccccctccatcggtccgtttgcccccccccccctaatccatccattccacgatcatttccaatttttgtttgatccggttccttcctctccctaccatttgtcgattaaatttacttttttgatcaccttcggtcatttgccctcccccactttaattttgtttggtccatttcaattttagtcctatcaatttttgtgcttttgttcagcttttggtactgatttgcctcgtccttttgttttacctccatctgacgacaattctcaacattttttatgtttttgatcaccttcaatatgctcttttaagctttctttggtttctatttacggtaaatattgttaagggtcgaataatttcaaataaaagagaaattaattaattaaaaagatatttggtaattaagaacgaccgtaagggccggagaatattcgcctttctcaaattggacggcatcactttgctcagagtgattggatttgacgaattgctacaaactgacaatgagcatgtgaaaataaagcgaaa

SEQ ID NO: 40405 - DNA, 847 bp, Heterodera glycines
gtattttttgtgttagaatttgaggacgctttcataagttaagtcccgtattttttttagtttttgtgcatttttgtcaattgtgacaacccaaaattagtgtaaaaattatttaaaattaaatcttttattaatatttaaatttattttgcatcttggccctaataatattaattttttaattattagaatgtgaaattttcggctgcaattattgattttttgccgatcaagtcaatcgacttgggcggccaatccaaaaggtttaggctttgtccaaaccaattttgggcggatgttgtgacttgctggggtaaaacctttgggctattttttggtgcggttaaaaaagtacagaaaaaaggatgatacccttcactatttatctttatttatttattttttataatttcattacaattctcttcaaattccatactatttcttccataatatttttgttgaaaaatagtaataaaatttaaacgatttgattcgaaatttcagcgatcaaaatttcagcgattatatttttcggcgtttttttggcgggggcgagaggaaaatgttgctaaagcaatgtctccaagcagctgatcaccgattggaacggggaaggggcagcattgtaggtacaaaaaatggtcatttatttgatcgccaatttttggaggggcggggggggggggcgagagcaatgctgcaaaagcaaatggtcacaaagcagctgatcaccgattggaacggagaagggcggaattgctaaaaaatgttccttaatttgtttcgtaaattctatttattagatttttcggcgttttttggcctgaggctctttgcagcaaat

SEQ ID NO: 40406 - DNA, 738 bp, Heterodera glycines
ccaaaaaatttcggaaatcggaattccgaccccaaaaacgtcggaaatcgaaaatcggaagtcggaaaatttcaaaaaacataaaatataataaaaattttctaaatattttaataggttaaattttttaattcttaactattaaaaggtgattttaaaaatgtttatggtatattcgcatgaaaaaattaatcaaagaatttcataaaaaccttttcatgtcattttacattgtttttttgtggcgcgcttttttcaaagaactttggtgaacaggggggggggggcagacgtccggcggtgacgataggcgccgccgggaaaattctgtaatttttaatacgatttgttaagaaattttgtccaaatgaataaatttagcgattttgagcaaatttttcaagaaattaaagtttttagagtacagcggtgccgataggtgccgccggaaaaatttttgaaaatttcagtgcaatttattaacagaaattgtacaaaaatttagtaattttttgaaaaaaaaaattcaaaaaaaatttccgaaaatttccgactttttatcaaaaatttcggaaatcggaattccgacgaccaaaattttttcggaaatcggaattccgaccccaaaaatgtcgaaaatcggaattccgtgccatccctgatgtgtatattggaggaattttcgcagcagcagtgacaaaacattttgaaaggctccaccaacccatctaatatccc

SEQ ID NO: 40407 - DNA, 947 bp, Heterodera glycines
ttgcagattatcagattgcaccggctgacggcattaacgggtctcatgaaacgagaaaggccaaatacattcgtcaagaccaaaacttggaagcacttgtgcaggattttttcaatcgtgatccgatccaatttcttcgcgcttgcgcttatcatctgcacttttaaacatttataggattttagcattgtcgttttacacaattttgtcgttattttcgatatcaatttgaagttttcaaatgttagaattggcaaagttaaaattttgttcattgtcgaaatcggtcactgtcgtaatcagccactgtcggaaatgtcggaaaacagtaaaataaatgaaaatagttcactgtcgaaatcggtcactgtcgaaatcagccactgtcgaaatccactgtcgaaatcggtcactgtcgaaatcagccactgtcgaaatgttacagcaccttatggaaagatattatggaacttttggttccatctcagttgtcaacgccgcgactgcatcgttattatatcagtcgatagaattttcgaatcgcttttaaatagtctcttttgcgtcccttaatcttcactctgagccgagttactgcggtctaaacacgtttttggtagaattgcggccagaatttaaaaatacagtttgctatggcttcgcatcacccgcttcaacgggtgctcagtgtaaatatcgactggccattcaaattctgcctttccagccttatggaaagatattatggaacttttggttccatctcagttgtcaacgccgcgactgcatcgttattatatcagtcgatagaattttcgaatcgcttttaaatcgtctcttttgcgtcccttaatcttcactctgagccgagttactgcggtctaacacgattttggtagaattgcgccagaatttaaaaatacagtttgctatggcttcgcatcacc

SEQ ID NO: 40408 - DNA, 1418 bp, Heterodera glycines
atgtggactaaaaacccataataattttttaaaaattcaaaaaaaaatctccaaccaattcgattaatttgaatcacttcacagcctaggtagcgaagctccgaaagcgcgaagcgctttttcccagctaaatagccgacggttcacgcacccgctagttaatatatacgttatattgacaaggagtttcgtttgcaaaaacaaaatctcccggccgaaggccgggagcgccctgaaaatagtggaagggtcttacaactttttgaggcgcatctgggaaaactatagaaaaaaattcagcgcggacgactgagtcccggggaccgatttctcactttttcttgcgtttgaaggcccctaactttttttctaaaacccgaatcaaaaaatgtctgctgtgagggggctaagttgaagtgttttttaaaaaacaaaaaaaattccaagcctctatctgcaattggaaaggctgtaggttcgtggactttttcagtaccaactttgtccagttcagtcccggttgaataactcattagggtttgatctgggcggggagttaccagcagacttattgtagagttttgaaagcccgatttttccaaatttaaaaaattcgaaaattttcaaaatttttcgagttaggcctaaaaaacggttttcgggttttttaattttatgattttttaacgaattttcccagaaaaacggagaccacttccaaaacatagtttttcaagctctatcgactggtatttttttcggaaaaatttcgattttttcccggaaatagaaaaaaattttggcctgagcgggacatttgagtcccgggctcataactcgttaggggttggttttagccaaaaatggcctaagagcaaaattgtagagctttttaagctctatcggatgatgtgcaacatgttcggaaattttcaaaaattttcgagctaggccccctagaaattttcgaaaattttttttgggttgaaaattggggtcaaaaatatttttctggggtattttgatgtgctgagcacgaatatgaagttcatttttcgtttcagaatttttggaattttttaaaaattctttattttttggcaattttttggccctcgggattttggcctaatatttgaaaattcataactaacctcagggtaagtcaattttcatacaacaaagctttaaaaatagcaaaaaatcaggagaattttatggcttttatttagattctctatcatgaatataaaaaaagttattccagaagttctggaaaaattcgaattttcagaaaaaaattctgaacacggttctgaaaagttattttggaaaagtaaaataatacaaaaatccgcaattttttgctctattttataaattttattttagctttttatcactttttgaaaaaagtt

SEQ ID NO: 40409 - DNA, 81 bp, Heterodera glycines
cgcgcgttgccgatgcggcgcgcggctacgcgctgtcgatgaccctggtcgggctgcgcctgcaggaactggaaatgggtg

SEQ ID NO: 40410 - DNA, 416 bp, Heterodera glycines
acaacttcaacaggacaagtggggcaattgacaaataaatttgcacctaaatgcttgtccatttcatagactaggaacactttggcctttcacacttacaattaacgcgtcattagtattcttgacattaatttgattcctcattttcggaactgtgatttttcctgtccattcagagaagaaagagcgaaacgaaccaccggagggacagtccaagcggaacctgagagcaaagcgcccgaaatggtggagccaattagggccccgatgaataggttcgtcgttttctgattgaagttcgagtcgtcatttttcttagatggttatctgttttatccctctttcagtgaacagtgtcgtatccaatgcaaatttcctgatggcagcactttgaccgatgttttcccgtccgattc

SEQ ID NO: 40411 - DNA, 497 bp, Heterodera glycines
  unsure (1)..(497): unsure at all n locations
cctccgtcctctcagcaggttcttctgatgagtgctctcctttcaaacggacgaattttatttgaaagngaacggncattgactttcgacgccttttagaatcagcctttggtcctccccgtctcttccgtccccactttccaattcgtccaacaacacatgttcccgtccatgtctcagcagcagcctctcatgcccattcgtcttcagccttcgtccatgcttcaccatcagattaaccagcaagcggagcattcgcagcaggacgggacagtcagcgactctcccgacagcggacatgtgagaaaaacggggggggggggggggagaaaaaacaatgaattatttttgaaaacgttttcagcgattttttcgaaatcatgatgaactaataagttttttcaaaaaaaatttttcaagaaattttcttactaatatcctaggaatttttttggtgaaaatttctaggtttgaaaaaattttaaaattttccgggg

SEQ ID NO: 40412 - DNA, 1212 bp, Heterodera glycines
  unsure (1)..(1212): unsure at all n locations
ttatttttatggtggagggaaatgacgtcaatattgaccatatacattcattcaactgacccgcccagncgagaaaatacttggagcaaccatcagctgcagtaaaaagaccaagaatggccttcactcgaaacagtccctttttgttcggtcctgtcttctttggtctctgacgcgccgtcgatttgacaaacattcctgtgcccgttgatttgttgctgttttttcgtcgtcttttttgcgcttctttagtctgggacagttcctcaaatagaattttttaatttacaagtgtgtgtgtgtgtgtgtgaaatgattattgacaaattttaaaagattaaaaaaaaaggaaccaagcgaaattggtataaaaaaatttttttttggttttccgtttacccgacagcttgttgaccccgtcccccgttgtccaaatattttttttacaggcacggttgatgatgccaaagtgccaccgctgcccccgtcgctttcatttccattgttcgtcgggtccttttgttaaattaaattaaattaattaatgtttggtaagcccaaaaccacccattaccatcattttaactgccgcccgctttcccaattgtttttttggtgccaaagtgtcgcctccgttgcctccatcgctttcttcttcattgttctggtcctgtttatgttaaattaaattgataccgtttggcaaacccaaaaccacccattaccatcattttaaatgctgaccgcttttccagttgtttttttggtgccaaagtgtcgcctccgttgcctccgtcgctttcttctccattgttcgggcccagttgctgttaaattaaattgaggcgcttgtcaagcccaaaaccatccattaccatcattttggctgccgcccgcttttccagttgtttttttccaggcgcggttgatgatgacaaagtgccgccgctgccatcctcagtttccgattccttttgaatttaacaatttttaattgtactttgcaaaccccccccccccctcctcaccgtcattttggccgcacgttttccagaccgcaaaaaccaaagccattttaaaaacaattacgaaatggctaaaaaaatgtagcgaatttaaatgagcaaatgaaattcggaacattttttccaatggaatgacccccccgcccccctcacatttttccaacataaaaatggcgtccttttctcc

SEQ ID NO: 40413 - DNA, 151 bp, Heterodera glycines
ctttctcgcgcaggtgctccattgctggcgtgtgaagtggttccttcacaggaggaaaccctggcgcaaactgcgcactggattacagaacggcgggccaaccattttgccgggctggcactggctgtttcgggtttcgagaacgagcatc

SEQ ID NO: 40414 - DNA, 941 bp, Heterodera glycines
ctattattccgaaatgtggttggaattcatttgagtgttgagcagaaaaagagatagacgttttttcaaaattttcagagccaaactcgcccagaaagaaaatccataaaaattagggtcgtcgctattattccgaaaatgtggttggagttcatttgagtgttgagcagaaaaagagatagacgttttttcaaaattttcagagccaaactcgcccagaaagaaaatccagaaaaattagggtcgtcgctattattccgaaaatgtggttggagttcatgtgagtgttgaccagaaaaagagatagacgttttttcaaaattttcagagccaaactcgcccagaaagaaaatccagaaaaattagggtcgtcgctattattccgaaaatgtggttggagttcatttgagcgttgagcagaaaaagagatagacgttttttcaaaattttcagagccaaactcgcccagaaagaaaatccagaaaaattagggtcgtcgctattattccgaaaatgtggttggagttcatttgagtgttgagcagaaaaagagatagacgttttttcaaaattttcagagccaaactcgcccagaaagaaaatccagaaaaattagggtcgtcgctactattccgaaaatgtggttggaattcatttgagtgttgagcagaaaaagagatagacgttttttcaaaattttcagagccaaactcgcccagaaagaaaatccataaaaattagggtcgtcgctattattccgaaaatgtggttggagttcatttgagtgttgagcagaaaaagagatagacgttttttcaaaattttcagagccaaactcgcccagaaagaaatccagaaaaatagggtcgtcgctattattccgaaatgtggttggagttcatgtgagtgttgagcagaaaaagagatagacgttttttcaa

SEQ ID NO: 40415 - DNA, 1048 bp, Heterodera glycines
  unsure (1)..(1048): unsure at all n locations
tagtaaagcaaaaggcntcgggatggttggaggaaaattgctattggtattggatgatctaatgattggaattggccaaaattttttggacacaattttcacacgaggctcacacaattggggggtcagcgttgtgttggtgactcagcacatgttcacgaaggagttgcgtatcgccaggaataattcgcactacctagtgttaatgcgtaatccagcaggagctttacaggtacgtaccttagccacccaattattccctggacgtgctgagcattttatggaggcatacagggacgcgactgggaaacagtttggctatcttgttgttgatatgcatccagaaagtgaggatttgttacgactgaaaaccaatatatacggagaaaatatgggcggagcatccacaatttatatggcaaaatgagaaagggcagcagcagcagctcaaataacagtggcgttcctatacaaataggcccgctaatacacaaaaatattgattttctaagcaaatttaacgcaaaatcacgtgcttttcagacacaacgacgaatgttacagggggcgacaaacgaacaattattatgttttgttgagatatgtctgaacatattgaaaggaaaacttccaataaggcgaaagtcgcatttgcgtaaattgggcgcaataaagcattggttaagaggtctgtcacgcactagatgcgcgaaaagcgcaagaagaatattgttaaatgctccgtcacaagtcgggtctggagctcctgctattgcgggactattagcaagtattttggtgccaatgttaatagaaaacataataaataaataaacgattaattgaaataagaatgagtaattaataataataataataataataatgcggcacacaatgcgtatgttcctcgtccctgaggatttgtttaattcagtgataaattctttcacggcaccggcagatggaacagcacttggtcttgtcccgcagcgtctgcaccaaattgagcgaaacagaaatatggatgagaatgaacgcttagcga

SEQ ID NO: 40416 - DNA, 903 bp, Heterodera glycines
  unsure (1)..(903): unsure at all n locations
ttttactgttttcaacaggcgggttgtttaaaaaatttgttattgatgctcgaaatctgtgaattttgatttataaagtattttatcaattaatttattattcactttttcaagttggtgatttctatttcgaaataaaagatgcccgaagcacagttcgggatcgaatagttagcgaacacagagcaatatgctaaacaaacaataaaactcatcattaattaattaattgataattaatgcaattaaaaatgtcttgaatagtttaccttttccatttccaatgtaatggatcgtcaagcatttgtcgtcaacgattttgaggtcactgtgacacgaattggcatcccaacagaattgttgagggattgaaaacttctgaaattaataatatatattattaattttcaatgagaattcttttacttcacaaattttcacacgatatgtcggatgattagcgtttaacagctctaaaatttggggttccataagagagtaatcccgaattgtttccggaatctcggctttttggctccattccaatctcggtttttcaaaacacaatcccatctaagtttaagtttttcgaaaattcaaatcacatcctgtatctgtttttcctcgagtcagggttccaaataagcacagataaaaatggggttatgaaatttggcaacattatcaatcttatagatcattttttattttgtaaaaagcttttttaataaaaaaaaaggttcaaaagccttttttaacaaaatttaggaaaatatgcttttaggtcccaaactcaaaattgctcaaaaagggtcagaatcgatgtaaataggtcagaaatgtgtaggaaaaatagaattagggcgcgcttgccctttttcaggctngaagagtgccggaatt

SEQ ID NO: 40417 - DNA, 1193 bp, Heterodera glycines
  unsure (1)..(1193): unsure at all n locations
aaatgctccgcttcaatgacattggcttaacaaatcaacggtctccgatgaaaaaaaatattgctgaatgtgaaaagtaagaggcaaattcagtgcctaaatgttcccaccgcttcacccgcgtcgtcctgcagaggatcgagcaattccaaaggcttcttccattcgctgtatggtccgctcagtttatgatcatgtttttcactgccaaaataatttgcacagcatttgcaccaccaaacaatttttgcgcccgatttgaccaaattttcataccttagaaataggttttattaaatttggatatatttgctgagggtaaatcaaaaatcaaaatccggcggcgtacccttttctcgcttttccatactcttcaatgggtaatgattcaattgcttcctcagctttatatggctgaaggacaccattctgatggatagttacggaaaacgcacaccgtttcctggaccgaaaaacggaacaagcaaaccacttttttgtaccgtcttcatttgaaaataaaagacagggcccttaatttatagtcatcttcaaatgtaccaaccagcaaaactaccatgtttgcattcaggcaaccttgaagatcctgagttttggtgcgtgtcaattagtctcaaatttaagcgttctcttttgcaagttttctttattataatttgattgtcagactttctaatatttctctgtcttttgcgcttctttacagaaggtgcttttttcatcttcacctgtaaatacaaaattttaaaaatgtttagaatataatccaatttttttagttcaaaagccaggttaaaaagaaaaaaacaatttgaaatggcttttagtaatttaacacgtacaaaatgccaaataaaaatattttcttcattcgattgatttacactgtttcgttagttggttgtgaaatcttaggcttaagttcacatagtcttgcttacatagacacatagttaccttcattattctttgttcatgataaggtctaaaatggtcaatcaaattcttctgcttaaccaaaaatcttttgcatcgcttctcaactggacagtcattcgatatgttccaagaggtttggttctcagagtgcagactttgtttatgcgagtgaccaacatcgtcctcatcccgngcggcgtccctcttggcgatcaacttacgcattacgtgca

SEQ ID NO: 40418 - DNA, 969 bp, Heterodera glycines
tgtagatatagctgtgcagcctatgtagctatagacgatatatctaaatttacatatgtatgtaatctcgcattttttggaaactgcgggatttgcgggagcaatcccgctgaatcccgtcccacaaaaaataaaaatttactaactataaaaaacaaagcaaaaagcaatacttgatcatttcaaaaaaaaaatttgagttccaatcccgcagcgggatccgcaaatttgaaatttcctgtctctacttggatgccaagtgcgcactcggattggggttttatgcttagacattttaactgtacttatttccaatattgtaattgaaaaccggaattttggaatatgagcttaaaaatgttgtcaatttatgggaaaaaatttaaattttttggcgctctcacgaatttttgttttttaattttaaatctgttagtagtgttttggcaaataatacaaataatgtatttttgtttagcacattgctaatgttaaacaaacgaaaaaaaaaattcttttattcctaaatgggaaaaacaatttaattttatcaaacgaagtcggtaagaaacagctttttttattgcgtttcttgtcaaaaagacatcaaggtcgaatcgatgggattttcggcaataggtctatgttgaaaatttccaattttttcctccagggcgcctatctgcgccgctggacccccaaaacccttatttttctttaaaaattggcacaaagtcgcaaacaatttcttttttgcttagactcattttttgctttaaaaaattaaatggatccaaaatgttgactacacataaagtccagaattgatactaaaacgaattatgctgaaaggaatcgacctcaaaatttccaatctttttcgagttgaaggtggtagcgagacaggtgaacatgttcaatccgtaatagccaagagccttggcagtgtctgtattttcgaagcctaaa

SEQ ID NO: 40419 - DNA, 1064 bp, Heterodera glycines
  unsure (1)..(1064): unsure at all n locations
ttaaagctatccattgcctgccggttctcgggcacagcaaagcactaatacggtgtttgactcacttcaaaaaataattcattacccaaaagttatttacacccacatattgccaatctaatttcttgcagatttgaaagccatccattgcctgccggtctcggcacagcaaagcactaatagggtgtttgactcacttcaaaaaataattccatacccaaaagttttttacaaccacatattgccaatctaatttcttgcagatttaaagccatccattgcctgccggttctcggcacagcaaagcactaatagggtgtttgactcacttcaaaaaataattcattacccaaaagttttttacaaccacttattgccaatctaatttcttgcagatttaaagctatccattgcctgccggttctcggcacagcaaagcactaatagggtgtttgactcacttcaaaaaataattcattacccaaaagttttttacaaccacatattgccaatctaatttcttgcagattgaaagccatccattgcctgccggttctcggcacagcaaagcactaatagggtgtttgactcacttcaaaaaataattcattacccaaaagttttttacaaccacttattgccaatctaatttcttgcagatttaaagctatccattgcctgccggttctcggcacagcaaagcactaatagggtgtttgactcacttcaaaaaataattcattacccaaaagttttttacaaccacatattgccaatctaatttcttgcagatttaaagccatccattgcctgccggttctcggcacagcaaagcactaatagggtgtttgactcacttcaaaaaataattccttacacaaaagttttttacaaccacatattgccaatctaatttcttgcagatttaaagctatccattgcctgccggttctcggcacagcaaagcactaataagggtgtttgactcacttcaaaaaataattccatagccaaaagttttttacaccacatattgnncatctaatttcttgcagatttgaagc

SEQ ID NO: 40420 - DNA, 1279 bp, Heterodera glycines
ataaaaaattgcaacagaaaacatttgatgaaatatttcggagaaaaatgggaagaaaaagaagaagaaaagcgaaatgagaagaaaaaaagagaaattgcaaaatattataaaataaaagagaaaataaagcattaaggaagaacattttcaaaaaaagaatggggaaaaattgaaacaaaaattgccaaaaaattggggacaaatcgaaattagattcaaaaatggattaaggaattgggcttgaataagcaaaaaagttttgaggatttagttgcgatttattaaaaattttatgcgaaaaatgactaaattttaagtgttttggatgaaaaaataatcttcgaaatatttgtgaattaataattaggtcaagcatttatcattgaaaaatataaaatttgttgattttaagctttacgatttttcgattgaaacaccgtagaatttgaatttcaattaattgaagatttattaaatcattattttaccaaatgacaattatttttgtcaataggaataaaattattaattaaattttttatttttgcttctttgcaattaagtaagattttctttttttccattaaatcaatagagttgtgcttttctgactgtttttaatcagaaaaaatacaaaatattttactttacggaagtcagaagaaaatttccatgttttatagtttgttttaatatgaaattgtttttttttgtggcattttacttcatgtataaataaatgatcataaataagaaaaagttaataattttgcaatttctttaaaaaattcgatttgagaatattgaagaaaatgaaattttcattttattagttttaattatatttttgatcgtccaaattaatcaaatgggaacagtgaagaaaaagctggaagaaaagttatttgatgaaatatttggagaaaaatgggaagaaaaagaagaagaaaagcgaaatgaactcaaaaaaagagaaataattgcaaaatattatagaataaaagaaaaaatcaagcaaaaaggaagaaaattctcaaaaaaagaatggaataaaattgaagaaaaaataacgaaaaaattggggacaaatcgaatgaaaatttataaatggatcaaggaattggggcttaatcaaaaatttaatctgtcaaaattaaaaacggatgaacaaaaattttgaaattgtacaaatattctttgaaatgacaaatgaatataaacaaaaaaggaaatattcatccaaagaatggtaccaaaattatgccgaaatttgtaa

SEQ ID NO: 40421 - DNA, 1401 bp, Heterodera glycines
  unsure (1)..(1401): unsure at all n locations
ccgtctgagtggaaaaggacgcatcnggtgagaacgccctactgaaagaacgacggaattaggcgagacgggaaaaggaagtaagcgtttgctgacgtcgaattgtttgacgaaatcctccgacagattttccacagacaatgcacagttcacagtgtcgttgagctccgccaatttgtcgaagcaaactttggcacggttcgttcccacgtcgctttccttggcgtagaaatgcgccgacaaatctctgaacgccaacgcttttgtgtcgtgaagagtcaccgagcgaacaccgcctgaaaagcggcgattgtttagtcatgcaaagtaaaatcaaagaatggcggcaccaaggatcagattcttcgccacctccacgcccacggagccgaggccactgacgagaaccgacgccttgcgcaagtgttccatggcggaatgtccaagcgcataactaaacaggaaaaaccacaataagcaattatatcaaaggcatttgtcgcggcttacatctgccgagagtacaaattggtgtcgatggccgccatttgttctccgttactctttggtgcctaaacggaaaagagtcagcaagaaaatgagcaaccaatagaacaaaaagtgacgttttctgatgcctcggagttcggcagttcacagatgatttttgcctttttcgttgctggttcctcaataataaggtcagatgactgcataaaccactggaaatggaaaaaacgaatctaattttcagtggccaattgcatccgagcaattattgggtcaaaaatcatcaaaataactccgaatgttattcaatcaaacggctaatattcgactctaattgtaaggcaattgaccactgccaataaatgcgaataaaaattcaacggggcaaactaaaagaaagaattggaatgtgagcaaaaaccacttgattgtgttctttttattacaaaatcagtcaacgaaaaattttggctaggtaatttcattcacattctcagaaaaaccaatcataacgccaaagaatctatatttaaaacttgtatcccaaatatgtaagcaatctgtatttaactcgaacagtaaaaggctgcaaaacagtagcttcaaattaattgttaaacgctttatgcaatataaaatggtaaggaaaaacgaaaagtcgcatcattcctccgaactctcttccgactcattctcttctatcgtttcgcccgcttcttcagccattggcaatgtttttgcctccacttcttcagcaccttcgtcgttttggtcgtccagttcattttcgtcgcctttcttcgcttttgtcgcatcacgggccctcattttggcaagaatttctgaatttatttcccattctttttcatgcgctaatcaaagaaaaaaaaa

SEQ ID NO: 40422 - DNA, 1012 bp, Heterodera glycines
  unsure (1)..(1012): unsure at all n locations
ttcttaattaaataaaaatttagcaatatgaaattgaaaaatggagatatcagtttggttgtttgacctggcaatttgatcagttagtcgtcgttgttgggctgtgtttggcattcttccccgtttcgtcattttcagtccccctcttccgtcgttgtcccctccggcagtgtctctttttgctcttcctcctccgttgtccgttttctccgcttctccaaaagtgcgtttcgcgcgtctcccatttgtttgatgtgcacgtcgcccactcgcatcgtcgctaatgcattttccatctcttcctatttttatgaatttatattgctggtaatttttgttagtttcttcgatgaggcaaaagattagattttaaatttctccaaaatttgcaccgggggaagtcggcaaaatcgacattttcctgctttcgggtcgccaaaatttaaaaaaatcaacaaacaggcgcgctaattcacacaattcacattctcaagttgatccattcgacgtgcttttgtcagcaattgtttgcggaaaaagaaaaaaaaacaccgaaaagtcggaccagtcgacctctctttcatttaacactttttgggtggccaacgcagtcgccggatttttgttggtagtgagtgatccatttgtgctgcattagttgagtgatcgtcgccctttcgtccgggtcggtgaccaaacaacgtctgatcaagtccttcgctgagaataaaacaaaaaatggcaaaaaggcaagggattggcggaaggaacctgcttctgacacgcggtcccattcggggcccgaaaaattgtattggccagctcggattcggctaagcaaaacgaaagcatcattcattcattctaaagattgctttctcttgtgaaaacccaccttttcatgcccgggngaaattggaaggncatgngtggagaaaaagggtgggtaaccgcacaatctgaaaaggggcgttgaaatgagcaaaatcaagcaaaaatatttatcacaaaa

SEQ ID NO: 40423 - DNA, 1269 bp, Heterodera glycines
tgttctgatttctcagattcctcctgaattggagaaagccatttttaaagccattaacatgtactgatttttcagatttgtcatgaattgaaatggtgatttggaaataagaaaaaagtaataaatgacaataaaataaaatatttgtataatataacaaatacctaatttttcttaaccattcggggaacggacttttattgaattagatcaagttataaacatataaaaacttttaaaatcttaaaggaattaggtccagtatgctgaaatcattatgggaatttaaaaaattaagctttttaatgctatgtatttgtaaatgtgttttgaattaattaaattttctttttttctcatcaattttcttttaaattcacaattttctactgctaaagaattctggtccccgtttcttgggaaattttagtcttgagagggggggggggaagtctgggcaccatattaaagagttaaaaaataattaaatgtataaaaaatgtaatcgtttaatttaaaagcatagtaaattttaatcaagttcggaaaccgaaagttttttaaacaaattatccattcaattaaccatgcttattttaactcattacaattctttagatttcaatgtcatacctatctatttattggtaacatttcaaggctcagactgttaaagaagacgattattttatatgtttaaatagaattagaagagtcttgactttttctggcccatttaagtcgggtattcgggcctaaacccaaaaagaaaactaaatacgttaaacccttcatttaaacagcgtaaaaatgaataaataataagaagagaacgaaaaaaggcaccaaaaatcgggaaaaaggcacaataatattcaccaaaaattgcaaaaaaggcatgaaggcacttaaaattttttattaagcttttttagtgtgcaaaacacgtaaactgaaacaaaactccataccaacaaagattagaacaccttcaactaccaacacttgaaagcaggagaaagctttctgatctgttcatggctcttaaaataatttatggccgaacagatctgaatccctttgaaatattcaaaccttctgttgaacgctttaacattcccttttatagacttaatcaaaatataaacttggcaaaaaatttataccttttgcagggcgggtaactaaaaatgggaaccaactcgataaaaggcccattgaaataaactttatagatcaattggaaataaaattaaaactttctctatt

SEQ ID NO: 40424 - DNA, 1114 bp, Heterodera glycines
  unsure (1)..(1114): unsure at all n locations
ggaatttgtcatttcctgcaataaatgttttcatataaaggtttaaaaaattcgatcgggttagggacatttcancaaatgcatagataaattttttgaatattatacaatcgtgctttttgctctctatcaatttattataaaaaaattcacttcccttcgaaattgaaggcagaatgctcatttgaagctacgcaaatataaattaatatttgctataagaactgactatttagtcaacagaaaacaaataaatcataaaattagaacaaaaaatgattttattttagaatgcacactgaagatgcataataagctaatatattcgaatttattttgaaataactgttcaacagattattagttgtttctaagaaataatgataggaagcttatctgaaatgtgtgctcacccaggttggaatttgtcatttcctgcaataaatgttttcatataaaggtttaaaaaatttgatcgggtttagaaacgttcaacaaatgtatagataaatttttgaatattatacaattgtgcattttgctctctatcaatttattataaaaaattcacttcccttcgaaattcaaggcagaatgctcatttgaagctacgcaaatataaattaatatttgctataagaactgacaatttagtcaacagaaaacaaataaatcataaaattagaacaaaaaatgattttattttagaatgcacactgaagatgcataataagctaatatattcgaatttattttgaaataactgttcaacagattattagttgtttctaagaaataatgataggaagcttatctgaaatgtgtgctcacccaggttggaatttgtcatttcctgcaataaatgttttcatataaaggattaaaaaatttgatcgggtctaggaacattcaacaaatgcatagataaattttgtgaatattatacaattggggtttttgctctctatctatttattataaaaaaactaacttcccttcgaaattgaaggcaaattggtcatctgaagctacgcaaatatagattaaaatttgcctataagacctggctattttagccaaacaaaaacaaattaatcctaaaataagaacaaaa

SEQ ID NO: 40425 - DNA, 1200 bp, Heterodera glycines
  unsure (1)..(1200): unsure at all n locations
ttgatttccaatgatttgncatatcaaagtgaaatttcgcttaaaaagaactttctttttcttgtaattaaattaattatggtaattacagtgcagcgaattgagtgacatcactgaatttgatctcactgttaccgcctcgattataaccaaatgtgagtaaaatatcggtgaatgatttttcgttgacaataacaaattcttcaaatgtgtccatagcaatagtaattcttataatagaggaggagaatttattctttaaagactagaaaattaaatataattaagcaaaaataaacatgtatttttgtttaaaaattgactttttatagaataaagcaaaacaaaaatattacataataattgtttattaaaattatttgtgcaaatagattttattgttgccgacccatcaaacctccggatttaaggctttagattatttggaattacccctttctaggagaaggacttattataagaaaacgaatggaaaaaataaaacgcagcataaaccgtgggaatgattggatcaatattataacaaacaatctcagagcattttggatgggtcagtgaaattattattgggaagggaattgcaagggcataaaacagtggcacttacaaatgagcagaatgacccaaattgagtgggatatatattgagattttgggtacgaaagtaatggcaattctcctcaaaaaactaattttaaaaaagtgttgatttgccttcctccaaggagagagtaatgacgcaaaaggggattttgttggaggaatgaaagtgcttttagaaaaagaggcgaatgagattgaaatggcatggtaatatttgagataaaagaacacaatgatgaatggcacgggattaaatgaatggacagcagagagattaatatagtgaattgattgggagaaagtatgacaatttacattcggaaaaggtaagaaaaatttgaatcccgcggttacagcaaaggtatttttatccaacagggtttccatgggaaaaactcgctttgtagttttcaccggaatgaattttttccaatttttttttaaatttctgctaagcaatttacgcatttttcaaaaataactctcagctanatttttgaaaatttgagtgaatttgttaacatattttcaccaaacaatgacaaatatgcggttttggctcaatttgtaaaaaaa

SEQ ID NO: 40426 - DNA, 980 bp, Heterodera glycines
aagaaattaaattcggcaataagtgggttgtaaaaaacttgtgtaagaaattattttttgaagtgaatcaaacaccctattagtgctttgctgtgccgagaaccggcaggcaatggatggctttcaatctgcaagaaattagattggcaataagtggttgtaaaaaacttttgggtaatgaattattttttgaagtgagtcaaacaccctattagtgctttgctgtgccgagaccggcaggcaatggatagctttaaatctgcaagaaattatattggcaataagtggttgtaaaaaaacttttgggtaatgaattattttttgaattgagtcaaacaccgtattagtgctttgctgtgccgagaaccggcaggcaatggatggctttaaatctgcaagaaattaaattggcaataagtggttgtaaaaaactttgtgtaagaaattattttttgaagtgaatcaaacaccctattagtgctttgctgtgccgagaaccggcaggcaatggatggctttcaatctgcaagaaattagattggcaatatgtggttgtaaaaaacttttgggtaatgaattattttttgaagtgagtcaaacaccgtattagtgctttgctgtgccgagaccggcaggcaatggatagctttaaatctgcaagaaattatattggcaataagtggttgtaaaaaaacttttgggtaatgaattattttttgaattgagtcaaacaccgtattagtgctttgctgtgccgagaaccggcaggcaatggatagctttaaatctgcaagaaaatagattggcaataagtggttgtaaaaaacttttgggtaatgattattttttaagtgagtcaacaccctattagtgctttgctgtgccgagaaccggcaggcaatggatggctttcaatctgcaagaaattagattggcaataatgtggttgtaaaaaactttttgggaatgaaatatttttt

SEQ ID NO: 40427 - DNA, 1478 bp, Heterodera glycines
  unsure (1)..(1478): unsure at all n locations
tgttttctaaagttttttctataagtattaattagggatgtaaaaaatatgtactaaaagtggccaaaaaggtacataaataagtaagaaaatgtacaaaaaaccaaaatatgtatgtataaaatatttaaaatagtgaatttttgtgtcaaaattttaggataagcaaaaaaattccataaaaaggaccttaacaatcttaaaataaggttttcggtgcttaataatttttgaaattcctttaaaaaaatggatttttagtggcacgttttaaccccgaaatatgtaaaaatatgtatttacataaaattgagatccctagtgatagttattatttatttcttcaaaaagccctctctgcttttttgccactctttgttagccattccttcgcttttccttttaattatataaattttctgggccatcgaacctcgtccaattcggtcgttttcttccattcatccgttatacctccaatatacacaattttattgctgatgggccgagcaaattccaaaaatttgtttgaattgaggaaaaacagcgaaatatttttggccaattgtttcaatgggggaaagtcggctccaaatgcttgtcggaccaatggcgcctaaaatgaattactaattgattagcactttggcttctttttggtaataattgaaaatgtgcggaaagataaaaggacagacaaacaaaataattataaatgataagaagggaccggatttatatggacgaaaaaattgcaaaatatggacgaaatatggacaaaaacgctgaaatatggacaaaaaataccaaaatatggataaaaaatctctgaaaaattagtttgaatttttgaaaaaaaaattcataaacccataaattttccggtcaagaaagaaaaaaatcattttaatacatgatgttagaatttgataattgtggcctccttattctttactaaaaaaattgaatttacttagaaaaaagcaaaacttagtaaatttttacaaaaaattaatttttacacaacctttgttgatgaaaaattttttgcacaatttttgaaaattttcccaaaatttttcgatttagggcgtattttccaaaaattttccatctttaggggtgtatttttcgacagggcctgtatcgggaccttaaaattttgtcattttacacccccctaaattggaaactttttaggaactattttcccattttcagtaactattttttggttgttcttgttgttggttgtccatgaatccaattcctgctgactgtttggggaacctttttttaaaagccccaatcggttaagaaaacattcaggcaattttttttattttcaaaaattttgcgaatttaaaattgataacaaataaaaagtcgaaaaagcgacgatnatttccggatttgagacttttttttttctatgcaaagttttcttcttcatgcncaccattacccacggacattca

SEQ ID NO: 40428 - DNA, 846 bp, Heterodera glycines
aaaaaatacagaatttatcagcgttcacctccacggctcccttccccacctcgcacgaaaccaaaaccaccaccatgtcaaccgaccacaaagagagagcaacacaagccaaaaaagttggaattaaaaccaccaaaaatagagcaaaatttgaacccgattcacgaccatcgacatcaaaagtcgcgcctcggtcgaaaaaagagcctgagttccagcttgacccacggccatccacatccaggcaagccggatacattcctcctccggcacccaaaattgtaccaaaacatgagccgacaaagagacccgtgccataccgtatcccgaaaagagaacccaaaattgttgaagaaacgccacagaggcaacagcaacctcctgctgctgctgtcgtcgaagaaatgtttcttgttcctccgcctaggagggggaccaaacgccgctaccctgtaatcggtgagaatgatgctgaggtgcgcataagaaaacgcgtgaggcaagcgaggagggtgcgagtacagtactcacccgagccgggtccatcaacatctgcacaaagtgatgaacaacaacatcgagaactgtttgccatcccgtcaaatcagctgaccatgaatcagcgggttgaacgactgtacatcaaatgcaaccgttatgcggatcgtatgggtgtccgtggcaatacaattaacaccgcaaacggcaagccgttggcgcatagcaatttgcgaatggccatcaggtatataattgacaggagagcgggccgccctaccattagcccactggagcgggcatatttgaagaagggttaggcaagatccattttgtattcatggacgg

SEQ ID NO: 40429 - DNA, 1316 bp, Heterodera glycines
ataaaatacatgcataatgcccaaatatggaaataaaacgcgaatttggaaaaatatgaaaaaagatggattacaaataattgacagccatattaatcactatttgtgtaaattcaatatatttttgttataataataaggtaagtttttggtctttttaataaattctttttttctataaataatccttttattgcgcacatcattaaattgagtaaatccaacactaatcaaatgcgagtgttgatattattattatttttatagaatcctactgagggttaaatttatttaaaaatgaaattttattctttatttttatttaaaattgtttcacaattttgtgtgttcgactatggtaaagaaggtacctcaataatcatttaaaaacacattaacattgttttattatttttctataaatatttataaatattcttttagtcttttgccaacaaatgccaaatttgaactgcgtggagttcgacgacacttgcgcatggcacaattgccaaacgcccgctgaccagctgatgtggtttcgcacttcggcaaacataagcagtgatcagatgatgaccacgacgggcactggagtgatgccaagttgggatttcgctatctcaaaaatcagattttttttcatttttttattggtgtccaaagaaaacaaaaagtttcgacgaattttccatgaaaatatattaaaccttctttttaaacgaccatttgctatgaaaatcacggaaaaagcattaatttaaataaaaaatttttttttcatgttttggtaaaacccttaaaaatgtttgaaggtccaaggtttttcataaaaaggacggataatttacgatgatccaacaataagcggacggggaataatgccaaatgcaagtcaagaatcactttttaaaattcgaatctccaatatttttaatagacggaagttatgccatcgcgtcaagcaacagtgttaatcagtcacttcacgcttgtctaattagtgatgttgtgccttcactaccaagcaatggttccttaatgttcaggtaaaaattggaaataacggaatcaaataaactaatataacattgatcacttttattttactattaaaaggcgcatttttcatcatttgagtttttttaatccaaaattaattgcaacaatacttaaaaaaacgagggtaattaaaatttcattcacaataataataataattgtaatttactttaagaaagaatttacaaaataaatatctcgtcttgccaaaataaagacacaagaaaagcaatatgccctggtaaaaggctgat

SEQ ID NO: 40430 - DNA, 521 bp, Heterodera glycines
  unsure (1)..(521): unsure at all n locations
aaaggaggaaaaggaaaattgaaaaatgtgtttgtttttaattttaagagttattaaagattttatataggataatttnatgtttaaattttaagttgttaaaataaaataatatataagattattttgataatttgttaaaattgtttagataaatttgaaaagtatgtatatagagttattttgtgaaagatttggtaaaatgaaggtttatgttgaatatgaattgaaggaagttatggagttgtgaaaggttagaaagtttattagaaaggtataaatggtcataataaattgttataaataaatattggtgtgagaaatttttggtggagaattaagaagttgagtaaaaataaatggtaaattttaagaattaaaaggagtaggatgagtagttgaaaggagtgtatgaaaaatttattataatttttaaagagaatttggggatggaaattgaagagatatattgaaaaaatgtggaatagggatggtaagagatgaagagttggttggattag

SEQ ID NO: 40431 - DNA, 88 bp, Heterodera glycines
cgcttccggaaattttgaactcctgatccggctctcgtaatttattttttaccggttctctattttagttcgactctattttatcccc

SEQ ID NO: 40432 - DNA, 735 bp, Heterodera glycines
gcacctcacgcatgtgaacggaatccaagtaacgtcgttgcgcaaaaagtaacgactgccatcaaaaggcgtgctgttgagacgatggaagctccctctgtaatccgtgccgtttctcttcaaagcattagttcgcctgcactttcagaagtgccgtcaaaaaaatgctgacatcgattgcttttgttccaattggcggtctcacagaagcagtcaatgcattggacgttgagtttcgaaatctgccagaaatgcaaccgatgctggaatggtttgtttttttgctatcataaacatgccaatatttacatttcctgcgtacaggttgatgaataattacacggtcgtccacgcgctgatggttcgcgaacggaaccgcgtttcaaagccgaagcttggaatgtctaggaaagaacgctaagcaatgatgacagaacgaacaattttcagaagctgcccacaaaagactccagtgtcatttcaattgtcgtcaccctactctttggaacttcattgacgttattcgaaaagtccaaaaagtgatttaactcacttaacatcccatttaagactacagatgccgattactcaaaattatcaaaggaattgagccgcctcaaaaaaagaaaaaataccgtgaagccgatgcccgaattcttgcaaaagttcaaaactattacgccgaccttcccaacaacgaagatcacaattatgttaaccgacatccccgtaaca

SEQ ID NO: 40433 - DNA, 931 bp, Heterodera glycines
gacgatcgcgaattctttgacttgctggatggagacaagtgcccacaggcttaaagataaaccgaaattggtaattttggattttaaatgaatttaaaattttattaatcgaacaaaacaaaatttttacacatgtaatttatttaggtgtttgtctttttttataaaatttacaataatataatttcgaaatactatttgcaataaccaatggataacaattctgctgatggcaagtcaaaattttaaaatttatatttcatgaaaaacttaaaaattgaagaaataaaaatattatttgaaaataaatttatttttttttatcagcgagtgaccttattaattaggcaataaaaaaattaaacaaatgagaattttatattttattttctaacagacaaattatatcataattgacaaattaaacgattttaaattaattttacgactttttgggaaaaatcattaaattttttggatattctggtggaattggaatttgttttttgaaaatagctgatgtttctgtttttgatcatgagaattgttcagatattgtacagttgtcacttgattaaagaagcaaatctgcttgcgaaaagcctgtcgatagacgtcactaatttgaaaattaatttttaaaatttaaaatttaaaacaaaaaatgccttattaaaaaaagcacaggtgccgaacttgcatatgcgaacacaaacaatgcaacaatacaaattggcaaaatcagagtttcacttatgtaaatgtccgcaccgattttgggcaacaacgaggcgagaaaaaaaagcaacagtctgaaaactatatggtaaaagtaggaatcatagcaagttcttaaaaatgtcggaaatcggaaataatttttcccaaataaattcccaaaaaatttttcttgggtttcataaaaaaaaaa

SEQ ID NO: 40434 - DNA, 1108 bp, Heterodera glycines
cagtttatattaaagcctaattagcagaatgtgaaattctctcatttgttactttatgatcatttttgtctaattcgcaaaattacagctcattcttcgcgaaatataaactgaatcagtgtttgcggaatgaccgagctgataatcgccaataatcttcgattacaattttcttggtcacctttttgtctaattcgcaaaatttcaactccttcttctctaaatataaactgaatcagtgtttgcggaatgaccgagctgataatcgccaataatcttcgattacaattttcttggtcacctttttggaattccaccatttcaactccttatcctctaaatataaactgaatcagtgtttgcggaggaccgagctgataagtcccaataatctcaaatttacaattttcatgatcacttttgtgatattctcaatatttcaatttcttatatccaaatgtaatctgtataagtttacagtaggaaattgtaatttgggggttattggcgatttcaaatcgatccttccggaacactgatgctgtttatatttagagcgtaatgagctgaaaatgtcagaattcaaaaagtggggtcgcgaaaatagtaaatctgaggttattgacgcttatcaacctgatccgtctgcaacacttaaaaagtttatatttaaagcctaattagcagaatgtgaaattctctcatttgttactttatgatcatttttgtctaattcgcaaaattacagctcattcttcgcaaatataaactgaatcagtgtttgcggaatgaccgagctgataatcgccaataatcttcgattacaattttcttggtcacctttttggaattccaccatttcaactccttatcctctaaatataaactgaatcagtgtttgcggaggaccgagctgataagtcccaataatctccaatttacaattttcatgatcacttttgtgatattctcaatatttcaatttcttatatccaaatgtaatctgtataagtttacagtaggaaattgtaatttgggggttattggcgatttcaaatcgaatcctccggaacactgatgctgtttatatttagagcgtaatgagctg

SEQ ID NO: 40435 - DNA, 345 bp, Heterodera glycines
cgtttcacataaattttttcggcgcgctttttccaaaaaacttttggagaagaaaggggtccggcggtgccgataggcgccgccggggaaaattttgaaaatttgagtgtaatttattaacagattttcaacaaaaaatgataaaaatgtgttaattttaaaaaaaaactatgaggaatcatattttgtcgataggaaagccgagtatacaaaaaaaaataaaatattttaattactgtagaggaattgaacaatgggaaagaagaagagaaagtcaaggagactagccagtaagccatttgcacaactggcagtgttacttttaaagaatattaattattattt

SEQ ID NO: 40436 - DNA, 1505 bp, Heterodera glycines
gctccgtatcattaatctgatcatttagtaaaaataatgaaatgctaattagatacgatcaattggtacttttaatttcgcctcccttttttaattgtttttgcatattttttgtagtttaaaatgtcatgaaaccatgctgtttacgctgctacacaatagtacattttaattattttgtacaaattttggcatttgttcgccgttcgcgcactaattaattcacatttttcctgtgccattcatttaaaaaaaattttttttggtgaatgttggcactactgacaaaattcgataatatttttaaaagtattcattttttaggttttaggatttacggaaaaatcctcaacataaatgcaataaaacgtataggtaatacatctcgaagaattgaaaaatttactaaaaattgattttaaaaatataatttttttttcttgataaaaatttttgttttaaaaattgcccttattcaaaaaattttattaaaatacatttataattgaaatatacctaaccaaaattatggtttttgattaagtttttatgtgtttctctacctaaaaaacgttaataatatttgcctatttgtgtgcctaattaatgccaattatgcgatcgtttgtgcctaaaaacgaagccctaattatcatctattttaatgtaaagaggaaaacgatgaattccacggtttcggcaaatgatgattattcaaatgtcgaacaatttgctttaatttttctgaatgtgttcgaatttgtctcccatatatttttttttcattttcaccacttcaattttgcatttgaatttaaaattcattttattatgtcaaagcggctgtatttgcatcagaggaattggtaatcaaactcaataattagtaaacatgagaattttatgtacattttttgagaatatataaaaattttcttgttaaaaattaaaaaaaattttttttttttgaaaatgcacccttaaaaaattggtttttgtcaaaaaacgatattcaaaaattaattttaaaaatatagttgattctaagcctatttaggtaatttttatggcattttgtgcctctttcaccctaaggaagaatttttttccaaaattaaaaattttatttacatattttgtaaataattatggatttttgtttatgtttcatacatatttgaggttatttttttatatttatttacatgttttgcaaattttcttacataaaattcccatccctaataattaattagttaattaatcccattttcatcggttaagttcgcgttgaaattttgttggaagactttttggcgggtcaaattgtgacgacagatggcggtgattggcaaaagcgtgccatgttggctcccacatattttcgcaattaccttgcccatgttttggtcattgaacgtttaatggccactttatgggctaaaaattatgaaaaatcggcgcggttgggcatttcagtgccatttggtttagcattgtggtaa

SEQ ID NO: 40437 - DNA, 1589 bp, Heterodera glycines
cgggaatagcttccctatagtctgtactttaattctgcgttggagttttgctccccataattgtttgagtaccccaaacggacacttgaaaaaatcgatttttttgttttcggggcagtccccccgaaccgatgcgcccagatttatggggagaccgaatccttcgggaatagcttccctatagtctgtactttaattctgcgttggatttttgctccccataattgtttgagtaccccaaacggacacttgaaaaaatcgatttttttatttcataaatattttttcagaaaatgctctgaaacgcaccaaattttatttacatgttagtttaggcactctgatgctttttctatcaaaaagggagatgaataaaatttttaaaaatttttaattcctttttaaacaggccaaaaagtttaggcttaacttttttttcagaaactgatcagaagcgccccaaactttgcagggatactgaaaggaaaagaattaacctgttttatcacattagcttgtcatcagtttttataaaaaattttcaaaattctgcgtctcctattattttatttttttttcaaaattttgaagggcggggggggggggcggttgggcaggaaaaggccaattttgccaaatcggatggccaaaaaggtgacaacataagtgatgcaactctgaataatggaaaatcgattaattcttggccattcattaattgccctaattattggcaattcattaattgccaattttgattatgttcttactaaaattgcacggataataatgaggatgaaaaatggtgaagaaaaatgtttgaagttggtgacaatggccagcaacagcgagcagtacagcacggcagacggaatgccaatggccaaagcgaaaaaaagggggcacaaactcgaattggccaaaatggtcatggcggagaagaacggagcagagacggaggagcccattgggggaggatgaaatggtgtaacggggaggaaataataaattttaaaataaaattagaaaataaattataatgtggcattttgtcgtttaataaaacataatttattgtcaaaatttcatttcaacaaattataatatacaggctgagaaaacattactagaggcctatttgccatttttactgcatattttgagggttttttaaagccttgcctaaaaatattttcggagtcatggcaaaagatacaaaaggcataatgtacaataaaaattatggaaaaatcattataaatttttcaaaaaaaaaaaaactgaaaaacctaaataatatattttttttgccaatctcttattatatttttaattcttctttaatttgaaatttttaaaattttgtacgctttgccaattctcgttttgcctttgtgcgtttctaacattttaatgggtctgttcgggcaatcagcatttgaataaggcccacacaaaatcaaccattgttcaaatttttttttcatattttgcacgcgattttgtcatgtaattaatgaagaaagtattattgttgcattttgtcttcattttcaattcttagaaatgacggataaaccattgacaaa

SEQ ID NO: 40438 - DNA, 840 bp, Heterodera glycines
  unsure (1)..(840): unsure at all n locations
cattatataataattagttatcattagagaatgggggtgaacgggattcctgcgggaaaatcgagaatcccgtttcccgcgtcccagtttttcctgaattcccgtttctcgttctccgctattttcttgtctctgattttcatgcaaacttatagaatttaaaataaagctgcagtgccaactggaagaaagggaaatgggcccaaaccaaaagtctactcgctggacaaattggcccgaaaaggtgcgaacagaatgcacggactgcgggaaaaagatgcgccgtttttccaaaccacggcgcagccatgagcaaattttggccgaaaaacgcgagcaagcctttcggcgcgagcaacgcagaatttcgaagcagcgtgccgaagagaaaaaatggatgttgcgcgttttgcgtgaccaatatttggacctaaaagagcgcattaatgttggggaatatattgacttttacaatcgttcaggaggtggcatgggtctgatgccggctgaaagagcctattcatcaactgatcaagacccaagcaccgactacagcccagcctcgcctgattacacgctccgtgagttgtgatcagacggcagaaggtctgtagtcattgatcggcaatgatcagttgatgacttggcaattttactgcatctagcccaagtgttttctgatatgattagtcgctttttggttaaggaaacttatgttactgctttttatgctttattagataccgatcaattaatataaatttgataaattaatgccggtttttaaaatcacagttgctaatttaacatatttttanattcatgcatttaattaatttg

SEQ ID NO: 40439 - DNA, 1056 bp, Heterodera glycines
gcccttcctatcatgctcgagagcatttgtaacgtataaaatttctcaaaataagagatagtcatttttcttggatataagataaatttaaaaattctctgagaaattaaatggcgattgcgcaccgccctccctctcacgctcgagcgcttttgtaacgtataaaatttctcaaaataagagatagtcatttttcttggatataagataaatttaaaaattctctgtgaaattaaatggcgattgcgcgccgcacttcctatcatgctcgagagcatttgtaacgtataaaatttctcaaaataagagatagtcatttttcttggatataagataaatttaaaaattctctgtgaaattaaatggcgattgcgcaccgcacttcctatcatgctcgagagcatttgtaacgtataaaatttctcaaaataagagatagtcatttttcttggatataagataaatttaaaaattctctgtgaaattaaatggcgattgcgcaccgccctccctctcacgctcgagcgcttttgtaacgtataaaatttctcaaaataagagatagtcatttttcttggatataagataaatttaaaaattctctgtgaaattaaatggcgattgcgcaccgcacttcctatcatgctcgagagcatttgtaacgtataaaatttctcaaaataagagatagtcatttttcttggatataagataaatttaaaaattctctgagaaattaaatggcgattgcgcaccgccctccctctcacgctcgagcgcttttgtaacgtataaaatttctcaaaataagagatagtcatttttcttggatataagataaatttaaaaattctctgtgaaattaaatggcgattgcgcgccgcacttcctatcatgctcgagagcatttgtaacgtataaaatttctcaaaatagagatagtcatttttcttggatataagataaatttaaaattctctgtgaaataaaatggcgattgcgcaccgcacttcctatcatgctcgagagcatttgtaacgtataaaatttctcaaa

SEQ ID NO: 40440 - DNA, 1411 bp, Heterodera glycines
  unsure (1)..(1411): unsure at all n locations
taaatcgcgaaatatggaaaaatatggaaaatatggatatagaaatccttctagaaagcttcnaaccaagctaaaaacatgttttcngtgcgtttcaggcctccaataatccaggaaaaaaatatgattttccatataattacacgccctacttattagcaggaaattttctggctgaatagtcgggtcgctaagcgcgcacacaactgagctaaatttggtgggcgtttcggtgccgacgtttcggcgccagccgggttttttgattgtaacttttttgcattttcgactaaatccaagaatcttattggtatcattcgaaagctcttcataagatttattagccgtataaaagcaaaaaaattttctagcaacagaaaaattattaagaaaaacttaaaaatttcgactttttcgcaattttcatgttataactagggtagcaacttttagtgacgaaaaatcccgaaatagttaactaaaatagtgagtaaaaatgccaaaatagtgaagaaatagtgacaaaaagtccgaaatagtgacgaatagtgacataattttcagccaaaaattgagcaaaaataatttttattcactgattgcagttgcaaatgagtaggactgggatttttaagaccaaaaaccccaaaatagttacctaaaaaaatttttgccaagaaagtaaatttttgagaaaatttttttcatttcttaggagtatattttgaaaaattttagctcgattcttaggggtgtattttttgaaaaaatttttaggtcgattcttaggggtgtattttttggttttattgcatttttgttaaggaattttccaaaaaatgccgaaatagtgaaaaaatagtgacaaaacgccaaaatagtgatttttaactattttagtgacgaagtcgccaaaatagtgatttctagtgacgaaaagtgacgtccaaatgaaaaaattttaacgcagaaatgcgttttttgagctcctttctacattgagcaaaaaaaaagttttttcactaaaagttgcttccctagttataacttttttggtaattgtcgaatccctaagcaagagcttagaaacagcttctaaatatgtaaagatttcgaaagataccaagattgttagatttgatcgacaaatgaaaaaagttacaatccaaaaactcgggctggcgccgaaacgatacgacccttgaaaaatagagtcatccccctgaaataaagcaaaccttccgaggaggttcgaaatagagccctcgggggctgtattttaggaaaaacggtaatataaaaatttaaagctcatttgcaagacggatttatttgtgtttttttaaaattcgtttgtgttaattatgttctttaaggacatttataaaaaaaatatgtaaaggttcaatga

SEQ ID NO: 40441 - DNA, 145 bp, Heterodera glycines
gggacctctagagtccacttcgcggcgctgcgcacgctgggtcagccccttgagtacggcgaaatgctccagcaggtccagcgcgctgacctttggatacacgccaaaatcctgcggcaggtagcccagccggcggcgcacggcg

SEQ ID NO: 40442 - DNA, 1428 bp, Heterodera glycines
  unsure (1)..(1428): unsure at all n locations
ttatattatatttanaagttcaagcaaatatttatttttagagtgaatgatcaaatattttgtatntaaaaaatacactatttttaaagctatttaaatagaaaagaaaatagccaaaaacaaggattaaaatcaatttggaagacaaaacaatgcaattcacatcttttagcatgcattgctttataatttttgtaattttgaagtttcttatttaataacataaattttaattgtctagaaattaaacattatactaatcgtttttaaaaacaataagtaagagaatttaaatttattagtacgaaagcaaaaaaaactattttatagcattaaaaaacaaaaagttacgattattatcattaaaaattatgcattacttaatttataattaattttgttgtcaattcatttgtaaaaaagcttgtaaaattaggaacaaaatttggtagcttttgtatttaaattctgaaggatgtttcctaagaatactattaatttggattatcgtacaaattataattattcttaggcctgaaatctataaatatcttcccaaaataatgaatttaaataagaatttaaattgaaaccatttccttaataaataaaatgcattaatattggatgacgacccttgtttcaaaaaaacgcaaataaaaaattaaaattttgttcacctaacaataaaaatataacaacttcttcttacctctaaataaaaaaaacctatacagaacttacacgcaagcaggataatcgccgaataaagacccaaaggaagaaaaatatcgattaatatttatttacttgcagtcgacctggttgagatttatttacattttggatttttttaatttataaaaaaattttcaaatttcttcaaccactgatttttagactaactcatctaaagttctcaaatgacagatttatacctgtaaataaaaaatttaaattgcaaaaaatgttaacttatttaagaaaaagataatctgaattaaaataactataaatatccttaaaaaattttgcacgataaaatagagaaatatagcataaaataaaataaaaattaatgattacgtaatttacgcgacctatagacaagaacacattaaaaaaaagtaaattctaatatttctttagtttaatttttttcaataattaaaaaaaatcattagttctcgaaaaaacgaagacaaattgatggtcatttttttaaagaaacaaaaatttactattgttgcaaaataccatatatcaaaaaatgttcttgaacagaaatttaaatatcaaaatatatactgacaattctttatgttaacaaatatgccaacattagatatacaaaaaaatttaaataggaaaactaacatattataaaaaacattgcaaattaaaagaaataactttttaaaaataata

SEQ ID NO: 40443 - DNA, 836 bp, Heterodera glycines
tcagacttgttcgaactcggggacccatgggttggttctaaattgatcgaaattagcccctcctccacctgcggtgaaattcatgcacacagcccatggtcacacgcgtcatggagctcacattgcccaggcacatcatgcacttctttcgtgcgatcgcattgcgtgcctgaaaaattgttggaaaatttaaaatgagcaattttaatcaattagttaattaattgcccccccccacgcgcttcactcacatgtccggctcgtccaattgcggcacgcgcaaccatggcatttcgacgattgattttgatgctccgtgctcgcgctgctgatgcccttgtcctggccgttgttgctctgaccatccttgaaaaagcgcacaaaatttatttcattttaaaaaatgaaacaaaaaaaaactgacgggaattattttattgttcagaagcaagatgaagattcgaccgatgggggaaagaatggaagtgaatgcaattgaatgaatggatgcatttggtggggaattcagcgcttaaatacggagaaaatttcataaatttgtcagtcatttttcaaaaaagtataaattgtagaaatttttaggattttttgcattttttttttgtttgaattcatcaaattcactcttccgctctgtccatttctactgcattttacgcgtccaatcaaaagtacgcgtccaattgacttttacgcgtccaatcaaaattttcctatatcgaacatccttttgacataaggtaccaaccattgcaaaaagaaataataatttaaatattaaaacgtaacaccaagagaaataaaaaattactaat

SEQ ID NO: 40444 - DNA, 951 bp, Heterodera glycines
gaaaaaatcggcggtgatcattgatcaccaactttgttaactttacttttttaccgtattcataaatttttcttaatgagagccactttttgaaattaatctgagaaatcccttaaaagtggtcatccatggttctttccctggccccttaatccgtttttccccattttttcttgtcattgatgtccaccatttgccccatgcgctcttcaacatgctcatctgtgcgaccgccccctttttggatccacgcccaagcccaagaagaacccgtataaaagaacgaaggaagacccactcgaccgaattaaatttcccattttaactgccctccaacagttatcaaacgatctttttccaaacgatcaaccgatccaattttcttcacacatttcaatttttcacttattttcattgcgttttttaataaaggttttatccaaaaaacctttcacttttccttcccataaggaaaccccttttttccaaccaattgccctcattcctcctacaggaatttggagcttccatcccaaaccataagccataacattttccaatttattcttttccacccaaaaatttaaacgcaattttccatcccttttcccatactttctgaaccgccgttcccactccgaaaacgggggcgacattgcctagtttttagggtaagcctattattaaaatcaaaatgggagaattgaaaaagaagtggatcacttttgccatcgccgagatcactgcccggcatttgttcgaatcgagtcggccttcgttgccggccccgaaatgtgagtccacaaaatcgccaacgtcgaacagcgtggagttgaccaattcggtgtccagcggagaatgacccccggtgcaacagactgagtttgaacgccagccaaatggaacgcaaagcgaacagacggacagagccgagcgagcgcacaggcgggg

SEQ ID NO: 40445 - DNA, 1714 bp, Heterodera glycines
  unsure (1)..(1714): unsure at all n locations
ccttattttcttctagcctggttggtgctgggatcctatttgaaaaagcatatcaaatcttgctcaaaagtaactaaatatttaattcatgttttttatttggcttcaaattgcaaaagttttgttgactttcaaaaaaaagttatggcaagaagaacctaaaaactagttttttcgaacattatttatcaaaactttttttgaaatttggctggataaaagagaacatttaattttgaaaaatttatgtccatattttgacatttttgccatttatgtccatattttgctatttttggtccatattttatggccatatttcgcattttatatccatatttttggatgccctacttatcaaatgatatcaagaattaacattttatttgttttttagcaaagttataagcaatattttttattttgatgtttttttagtaagtcataactgttaaaatcttaacattttttaaatctgtttaaacaaacatttattttacttacaacatatctagcagggaaggcattccgaggctcaaaaattttcggaaaccgggtttccgtgccatccctgatatgtatggcccagagtcaaaaaaaaatatccaaaacctcctttacaggttttcatagggacggaaaacgacagaaaacccaaaaaattactgggcaaagcgtttaaatcggtttttgaaaaggttcaaaacttgaaaatggacaaaccggaccaattatattccttttaaaaaggcaaaacccggtcaattaagcacctatttgtgggcaatttttggcctttttaatacttattttggaaatttttgcttttatggccaattttgacaatttttggcgtttttgggattatttggcatttttaagccctagtttatgcatttcaactgggtttttaacatttttcaacatggttaaaccaaatattttattcaaaattttaattgttttttgaaattttgagatccaatgggcgctttgatgcgtcggtttggcgaagaaccgttgctgagaattttggagctgatcggtgaggccgaacgcatcgatgtgctgattagtgttcggcaatttgctgaaatgtaagaaaatgtaaaattttaaaagatagtaaaacccaccttttaaaaaacgtcagtcgataattcgtcagaaaatttattattttttgagcaatgatcaaaaatcttgcaaaaattattgatcgatttttaaaaaattacatggattttcacatttatagttacttaataattaattaaattaattattatatggaagtagaaaataaccctaattctttaagaaaagaacaattgggcgtcctgcaattatcttataactagggcatccaattatatggaaatccatatttttttcctggactgtgggaggcctgaaacgcacgaaaaacatgtttttagcttggttgaagcttctaggatgactccatatctatatttttccatatttcacgatttatgtccatatttccatattttggcatttttatccatattttatgtccatattttaaattttttccaaaaaacctctattataactgcccctatcaggtaaattggcatttttgacccctaaaaaatttcagaaaaagacgtttttagcaaaattttgtcgaaaattgattaaatttaattttcttanaaattgtgtaatttatattaaaaataagcaa

SEQ ID NO: 40446 - DNA, 1216 bp, Heterodera glycines
ggggggggggggggggggggggggcccccaaccaaccatatttgcatttatgtattatatatgtgtacatatatgcgcaatcagagcagaatgttgcgctgggcgagagttgctgctgccgcttttttgccgaattgaaactcgagaccgaaagttgagccccgaggggtcgagagtgagatttttgccctttcgcgactctatacaaaactggagcccggaccggatcgggatcctgccagggttttccagagattccgatgctggcgtttttgaaaaagggtcgggatcgagattccggcctgattccaattgaatccataccccaactttttcaaaattccgggctatagatacaacagacttattgttagcctttttttctggttctcgagtctcgaaaaattttggcacctaacaggcctataaattatactacaaaacacattaattgacattttttccgactgatcaatatcaccgttcgatcagttaatttttgtttctcccatactgatcaaattgccgttgttcctgtgctccataaatcacttttttgcactgatagtacacgtgatcgattgaagacgagtgattactgatcacaatcactgctttttggcttccgatcaccgatggttttccgccgccgattcagccgcctcgcgcgtgctgtagcccattttcatgtgcgtgatgatgtaatgcgccaggcgtcgccatgtccgcgtagcgtccgtccgctgctgtgccgagaagtcagccagcgaccgaatgtgcttcgtcagcgcctgttccatggcatcctggaattttttttattggcacaattgcacattccgcctcttttgaaacaatctttcctattttttaatataataaaaacctccagactggactaccataccgagacttgaccaccagactacactatgagaccgaaccttgcccacaagcctcgagactcgagaccgagactctcgagcagcactagctgttactaactgagctaacaataagcatggattattctttgttttccaatttgttttgggtttctcgcgagaccctccctagcgagttctgactatcaaaaattcggttgtccattctcgagccgaagaaatctctatggttttttggggtcccgatctcgattctgggtaaaattcaaaacatcccagtgagacggcacgaatttcgtagcgatattgtg

SEQ ID NO: 40447 - DNA, 821 bp, Heterodera glycines
tttttgcggcgcacttttccaaaaaaaaaaaattagagtataggaggccggcggtgccgataggcgccgccgggaaaaattttatgaaattgggagttttggtagcatttatatcaactaaataaatcataatcacaaataatttaaaaagtttggggaagcctgaaaataaaggacaatcttagaaaaaaggacattttagctttctaagatccggcccctccaaaaaaggaaaaatctttaaaaaaaaggacacttacgagccctgaataataataatgttttcccttgggcacaaattccgatcgctaataataatgtgacccaaattctccgaatgttcggacctccaatggcacttgacaatgtcaacgacgaccaattcgcccgcatttgtggccaccaatcggagaatgaacaactgaatttgtaagggcggtggagcaaatatgagagaaaaactggacaatcctactgtaataccaccgtatcaaacaatacgacccatgacaacgcataaaaattttaaatttttgtgaatttttgggaaaatgcccttctgtgttatttaaatggcattctctgctcaattccgatggttttaccccgtccgatttgagggattcgtccacaaatttgtccaccgaatgcgcactcggcacccgaaatggtcttttgatgaattgtggcatttcgtcctcctccgccatcgcccacttttgttgcgacagttttggcgttctgccgctgcttcgctgttgttcgctgtgttcagcaatttgcataaacttcagcacgtagtccaccccggccatgtgcaa

SEQ ID NO: 40448 - DNA, 1667 bp, Heterodera glycines
gatcacattcgttgtggcctcgatcagaaaacaatgcccaacgggcgcattgggagtgaatgtcattacagcctaatgagttttattcataaaatattaaaaaaaaaatttatttattttaataaatgatgagaaattcaacaattaattaatattgagtttcttttttaaaatatattaaaataattaattcagttattaattagggaatttatttttcaagaaattattgaaatttcctttttaaaatataattaaaatattgatttatttaaccgtcgtcatattttattattctttatttcatctaatctattaaaaattattaaaaacatttaaaatatttcaaagtccaatattaaaatgagatttaaaaaaaaattaattttgactattattttttttgaatttttaattaatgttaaaattcccttttttaaatatatacaaaaaactttttatttaatcgttaatgtttgattattctttatttcatcacatctattaaaattcttaaaaattttaaaaatttcaaagtccgatttgttaaaatgcaattttttaaaatattttttcattttttacttaccaggtttgccataatcggcgtacggtcggcacccgtcaaaacggcacgaaccctggcaccatgtgttcatgtaacgtggtgccgttttacatgtgccattcgcggcccactgaatgcaacacacatcattgtcataacactcgcgttctgtcggtggcgaaggctttacaaaaatttaaaaaatttgataaagaaataattgaaaaattcgattaaaatgtatttaaataaaaaattaaattaattcatcattataatttaaaaagctcggtatttttttttcgaatttgtttcagcctgcttttggttggtttcttacttttggtctgagattattgtagtaatacgaattcttttttattaatagaacttatggttgaagaactaaaattttttctgactcctttcgaaattagaatttttaaatgattctaataaaaacaattttttaatgctaaatttttccagctcaagcaaattgtgtaaattcaaattttcgtgggatctcaggccttacttaccaggaccgtgtttttctgcatttttaatcgctcacttttgtaccaaatttaattgaacatttttaagcgctcatttttttttgttcgtaaaatatatgttaaacaaattaattaaaaacattaaaaatattaaaactaaatacaatttgcttacagtaggcgatggtgtcgtgtccatcgcagcccttatgtacggtgtcaatgttacagtacccacatcatcgattgctgacgctacaatttgcgtgccatgccgatgcaactgtagtacattcggtttttgctgctgcttctgctgctggcatatgccttgaacacaggtcgagttgtagcacgactcttcttctaatcgaaaaataaaattttattttatttttgtcattttaatttttaataaatatataatttataaaaaattattattaattttcttttttaaaatgtttaactgtttccaacaaaaaaggaacaatcgccaccaggtcttattttggcacaacatattgggtcggcataacgttgtaatgtggtatcacagaacaaataaactgtaagca

SEQ ID NO: 40449 - DNA, 1337 bp, Heterodera glycines
cgccgaccgatgcgccggtcgcctcgccggcagcggacggttgtctaccaccaaaaaacattgtccgatgttggcccgcggcgatgccgacgccgctgggcattgctcgcggcaaaatttgagggcggacgacgccgcggggcatcagcggacacgcggaagagttggaggcgcagaatgaggaggtgacctcttgggaatggtggctaacgtagtgatgctctcccgcttcttctgctgagggcagcaccaaagtgttgacgaacaaagggctaaaaccgcggcgatttggccgaaagcggtgccattgccttgaggaggaaataaaccataaggaagaagcagatcgaggcctaaaaaggcctcttgaagcaagggatgataatatccaaaaaggaagggcaaatgccattggtagctaacccaagtggtgaaactgaactcggctacgaaatggacaaagtgttagaactcgtatttggatcgaacatcagtccggttaagttagcaatcggatttcaaactggatttgaaaattagaattcttacgggaagttgcacaattccatgccgccgtttattttgccgttttcgtcgcttttcgcccctttctccgcttcatttgtcgctgcctttttggccaataaaatcagcagttgttcgttggccgatacagcaattattggccgactgtcaatgttttttttgccgatctcttcaacaaacaatggaaattgcgcttcaaatgccgtcgtcgtcgtcctcgtttggcactccgtgccattgtttttgtcattcgcttgtccgtcgcttgtgaataaatttggtgacggaggcggcgcagcgcattggcgacaaatgctgaaatttaaaaaaaaataattcgcttaatttaaatcactttaaattcacccgttaaatcacttttaatgaattatttttaaattcacccgttaaatcacttttaatgaatcatttttaaattcacccgttaaatcacttttaatgaatcatttttaaattcacccgttaaatcacttttaatgaatcatttttaaattcacccgttaaatcacttttaatgaatcatttttaaattcacccgttaaatcacttttaatgaatcatttttaaattcacccgttttttccgtttttatttttcgctgtgttttgtggcggcccaaagcagcgattggtcacattttttgtggtcgacagtttattgaatgttctgccgctggacgaagaggaaaaggacgggcgcaaaaagtgctcttcgccgccgctttggcgcaacaaatgccatcgtcgcaataaatttctaaatttattttc

SEQ ID NO: 40450 - DNA, 1182 bp, Heterodera glycines
  unsure (1)..(1182): unsure at all n locations
aaaaaagttatggccaaaaaatgtttgcaaaccaggttccctgggtactcttggtcatacttttgctcaactttggtcaaattttttgaaacttaggtgagctaatagagaaatgttaaggctatcgaataataccaagaatgtttatntagttggctttgtcaaaagttatggacagttttttggttgaaattttcatttgatggttttttatataacgccctttttgatggtttttatgtaacgacatagcaccgtttttctaatggctttctttctgttttctttttacatattttccgaattatattttattgtttatggaatattttacgaatgttctactgtgccaattcgtacttttatttcgccatgttccaagcaaagatcactacaatgtacgagtactttgattatcgatttttttcaatccatattttcggacccccccccccccgccccatacctattggatgatctttgatcccttcagtcgaaacctattggatggacttgtgcgcgagaatttaattaatttaaattaatttaaatttaaattaattaatttaaatgagcgagagctgcgcgactttttccgataaattgtggaaaatcaaaaacatggtcgcggtctcgaaccgttgagagtggaagtgaggagcttaaccactaggccacaggggcagttgaaaggtatgggataattgttgactttatgatgaaaattccgaaaaattgtgaaaaatcaaaaacatggtagtggactcgaaccgttgagagtggaagcgaggagcttaaccacttggccacagggtgagttgaaaggaatgggataattgttgactaaatggtgaaaaatttcccctttgcttcaccacaagcgctgcggaggcgggcgtgtggcggcgagagaccaaactttttttaataacaggaattaagttttattataaacaataatttattatttttaaacagttaaatgtttaaaaatttgtctttaacaaaaaatttccaataacaattanaattataccanattcttataagaaaaaataatgcattgtaaaaaaagtaagttacactactttgattgaaaaatatttggtggtgtctttgaatatntttcatttctttcatcatggtttccgcttcgcttgnngatatatgacctctcctctt

SEQ ID NO: 40451 - DNA, 404 bp, Heterodera glycines
aagcacttttctagggtagttttaggcgctgatcaagaatctgacgtctaaactgcaaaaatctgattttgtcagattttttgaaaaaacccaaagaatctcttttttttgaaaaacccagaagcagcctcatcccgggtacattgggctataatttttgatagaggcatcgtagaatcctgaaacaagtaccattcgttttctctccagtataggaatcgattgatatatgataagactcgttatttctttttttttaaatcacttgatgaaaagcattgattaaatcatcgatttttgcagttttgacgtcagatttttgatcaccgttcaaaactaccctagaaaagtgctttcctttgtcgggattatgacatttttacggggggtagcaaaacttacaa

SEQ ID NO: 40452 - DNA, 1079 bp, Heterodera glycines
cagatttatgggggagaccgaatcctccgggaatagctttcctatagcctgtactttaattctgcgttggatttttgctctccataattgtttgagtaccccaaacggacacttgaaaaaatcgatttttttgttttcggggcagtccccccgaaccgatgcgcccagatttatggggagaccgaatccttcgggaatagcttccccatagcctgtactttaattctgcgttggatttttgctccccataattgtttgagtaccccaaacggaaaaaatcgattttttttgcttttcgggccgtccccctaccgatgcgctcagatttatggggagaccgaatcctccgggaatagcttccctatagcctgtactttaattctgcgttggatttttgctccccataattgtttgagtaccccaaacggacacttgaaaaaatcgatttttttgttttcggtgcagtccccccgaaccgatgcgcccagatttatggggagaccgaatccttcgggaatagcttccccatagcctgtactttaattctgcgttggatttttgctccccataattgtttgagtaccccaaacggaaaaaatcgattttttttgcttttcgggccgtccccctaccgatgcgctcagatttatggggagaccgaatccttcgggaatagcttccctatagcctgtactttaatttctgcgttggatttttgctccccataattgtttgagtaccccaaacggacacttgaaaaaatcgatttttttgtttttgggcagtccccccaaaccgatgcgcccagatttatggggagaccgaatcctccgggaatagcttccctatagcctgtactttaattctgcgttggttttttgctccccataattgtttgagtaccccaaacggacacttgaaaaaatctatttttttgttttcggggcagtccccccgaaccgatgcgcccagatttatggggagaccgaatacttcgggaatagcttccccatagcctgtactttaattctgcgttggatttttgctccccataatgattgagtacccaaagggaaaaa

SEQ ID NO: 40453 - DNA, 1330 bp, Heterodera glycines
aaggaggtgttttgcagggataatcgaaacccaaagccggggaccctgtttgatgtacaaaattttgtgtcataataaattgtgaaaattgcttgcggggttttcggagacgctgaaatcacgaatctgagctcaatttaccaacccgaactcgaaccaaaagcataaaattccaaatctttcgcatttcaatttttacatgcaaattttgattagggacccggagttgattattcctcggtaaatttgctttccaacaatttcttttttttaatttatgaaaatggcaatgtctaatttgcacacaaaaaaggaaagcacttcgggccgtttcttcgccgctgtgatcgacgccggcacgcggcttcacctcttcgagttcagccacgagttggagcaggagccgagcacgttcaagctgtaggccgagatttacaaggaggtgagcagaaaatgatttcataatttttttttaattttcagtttttcatcaacgcaaaacttttcctataatttttcgtagcttttatatttctaatttttgttattttgcatttttctacaaaattttggctactaatcccctcatccctttgccccatttgacagattaaacttggcgtttcgtgctgcgccaaaacgcccgaataggcggcggagaatgtccgcgaattgttgctgaccgcaaaacggcaaatcccggccgaactttgggccaaaacgcccatcgctttccgcgccacagcgggcgttcgtttgctggcggaaaaggaggcggatgcattaaatgaatttttggcttacaattaaaaaggatacgaaaatgacagataaaaatttgtgaatttattcaaacagtccataataaaaagaggagagcggaaaattacaactgatttttggccaattgacgattattctgtgtaaaattaccccaactagaataaatttaagccaaaataatgggactgtgtcactgcgcggaacaactcgtcccccatatggtttcctttcgatattttttttttgtttaaaaccccaaaaatttttcataaaatcaaagcgttttatttgcatttcttctttccaaaataatttggcacctcataacccggcacattggcaaaaattaaaaccactttgatttttaaattgaaaatttcaaaataaaaattgaaaaaggtttaataaaagaaaaatcgcatcttttacagcccaacgtggtgcactattcgctggaacagctgggcggacaggcccaagtcggcgactttcgcgtcgcggccgaacgaggcgcgcttcattcatttgttaatcaatgcattttatt

SEQ ID NO: 40454 - DNA, 1684 bp, Heterodera glycines
  unsure (1)..(1684): unsure at all n locations
tttgacgaaacgccagccggacgatttttatagtgggggggggggtgaatttttggcattttntggggcaaaaaaaaaatttcatacatacaaatgttgaaggttcatatcatgcatgcatttttaacaaacgcggtgagacgaaatgggtttcaaaacgccaaaattaaaaagtgacggcattttaaagtttgaaatgagtggcccgagtaaggaaggccctatgcagtgtgggcctgatttggtggagccttgaaaataagaaaatccgggaaaccaattaataggcaattaattcattatcccccgattaaaattgctcaatgtcaaataattgaaaaattggggatttttgcaaataaataatatatatatatatatatatatacaacaatacaaataaacatttatttatttatttatttacgatttttgtttgccattattgggccaagaaaaaataaataaataaaatgatggcttttttgggcaaaaaatgatgaagattgcttatgatggggaaagaaatatgaatgtatggggaggagcactactcactttccaacacctaacattataacattccatggccaaaaaaatgattttttggcgctggcagaaaatgcaaaaaatggaaaaaatgcattaaaaaaatatttaatggaaataaaaaatggaattttggaaaaagtaaaaaaaatgcaatttaaaaaatattaatggagcaatcagtgaattttacatgaaaatcattgtttaaagtttgccaaatgagaaaattcataaatattttttaaaaaatattagaaataaaaatgaataaaaatataattttataaatttcatgaaaatatttttaaaaaaagaaaattcttgaaaataaaaattaaaagaaaatttaataaagttgcaaaataaataactaaaaaaagatattttataattccaaattaaaaataaattgttaaaaaggatttttttataaatttaaaatgaaaaacgaaaaataaaaattatattaaaatgaaaaaaaatatttttgacttttattaatatcagacaatttacaaaaaaattaagaaactaatttaacactctaacaaaaattacaaaaatctttcattacatttgttatttaattaacaaattaaaaaaaaattatttaattcaaaaattgaaaaataaaattaattccataaaaatgaaaattcaatgaaaaaatttaaatatttttatttacaaattattgtcttaatgatgatgatggattttgccaccagcagcttaatttgcttttcagcagcagccatcaaccacccccattagtgacgttaatatgtaatgttaactaacgcaaatgattcgacaaattctgacaaaaataaagcaaaaatttttttttttgaattatgccatgaaaaagtgccaaaatctgacgtaaaaaggggtgcaaaatatatgataggtaataattatgtgcgtaattgctgtcaggagatttaaaaaaatttagacaaaattatttacgaatttaatacactcacagaggtgggatttttaggattcaaattagattaaaaagatccccaattttcgggttttggcacgtctaaaaaatctgtttttaccaatttcgggtttggcatatcgaaaaatctgtttttatcttctggcatctattttt

SEQ ID NO: 40455 - DNA, 995 bp, Heterodera glycines
  unsure (1)..(995): unsure at all n locations
tatagtctgtactttaagtgtgcgtgggattttgctcccacataaatgagtgagtcccacaaacgcacacttgaaaaaatcgatttttttgttttcggggcagtccccccgaaccgatgcgcacagatgtatggggagaccgaatcctgcgagaatagcttccctatagtctgtactgtaattctgcgttggatttttgctccccataaatgtttgagtaccccaaacggacacttgaaaaaatcgatttttttgttttcggggcagtccccccgaaccgatgcgcccagatttatggggagaccgaatccttcgggaatagcttccctatagcctgtactttaattctgcgttggatttttgctccccataattgtttgagtaccccaaacggacacttgaaaaaatcgatttttttgttttcggggcagtccccccgaaccgatgcgcccagatttatggggagaccgaatccttccggaatagcttccctatagcctgtactttaattctgcgttggatttttgctccccataattgtttgagtaccccaaacggacacttgaaaaaatcgatttttttgttttcggggcagtccccccgaaccgatgcgcccagatttatggggagaccgaatccttccggaatagcttccctatagcctgtactttaattctgcgttggatttttgctccccataattgtttgagtaccccaaacggacacttgaaaaaatcgatttttttgttttcggggcagtccccccgaaccgatgcgcccagatttatggggagaccgaatccttccggaatagcttccctatagcctgtactttaattctgcgttggatttttgctccccataattgtttgagtaccccaaacggacacttgaaaaaatcgatttatttttgttttcggggcagtccccccgaaccgatgcgcccagatttatggggagaccgaatcccttcggggaccnntgcaggcccatgc

SEQ ID NO: 40456 - DNA, 999 bp, Heterodera glycines
  unsure (1)..(999): unsure at all n locations
tgagagggagggcggtgcgcaatcgccatttaatttcacagagaatttttaaatttatcttatatccaagaaaaatgactatctcttattttgagaaattttatacgttacaaaagcgctcgagcgtgagagggagggcggtgcgcaatcgccatttaatttctcagagaatttttaaatttatcttatatccaagaaaaatgactatctcttattttgagaaattttatacgttacaaatgctctcgagcatgataggaagtgcggtgcgcaatcgccatttaatttcacagagaatttttaaatttatcttatatccaagaaaaatgactatctcttattttgagaaattttatacgttacaaatgctctcgagcatgataggaagtgcggcgcgcaatcgccatttaatttcacagagaatttttaaatttatcttatatccaagaaaaatgactatctcttattttgagaaattttatacgttacaaaagcgctcgagcgtgagagggagggcggtgcgcaatcgccatttaatttcacagagaatttttaaatttatcttatatccaagaaaaatgactatctcttattttgagaaattttatacgttacaaaagcgctcgagcgtgagagggagggcggtgcgcaatcgccatttaatttctcagagaatttttaaatttatcttatatccaagaaaaatgactatctcttattttgagaaattttatacgttacaaatgctctcgagcatgataggaagtgcggtgcgcaatcgccatttaatttcacagagaatttttaattatcttatatccaagaaaaatgactatctcttattttgagaaattttatacgttacaaatgctctcgagcatgataggaagtgcggcgcgcaatcgccatttaattcacagagaatttttaattatcttatatccnagaaaatgactatctcttattttgagaaatttatacngtacaaagcgctcgagc

SEQ ID NO: 40457 - DNA, 990 bp, Heterodera glycines
  unsure (1)..(990): unsure at all n locations
aaaaaaaggttagaaaatgaaaaaaggaaagatgaaaaaaatggcagaaaatacttctgctttcataaagaaaataatgcaaaatggtacataataatttctttaatacataactgaaattaaaattaggcagtatttactatttgtatttataattattatcttatttaaattaataacttgtaaaaaaattgaattaatttaaaaaaatcattcaaaaaaaaataataaaataatgaataaaaacagctagaattggtgggacccgaaccctcgaccaccaccaccaaaggcaagcacactaaacactccaccactgggtcgcttgactcaagcccatttaattcccttttccctttccttcttttttggaagaaatcccgaccaaaagtgcttgtcctccctttttagagcacttcccggacccggtccaaaacaaccctggtatcattcgaaagccaagagtttgttgatgtgcacaaacatattaaagttttgatttgacccatttaaggtatgcaaaaagcattcaaaaatgagagatccaaaaaaagtcatttttgggacagtttttcgaatgtagttcgaatagttctaaaccgatcgaaatggctatagttttgccttataggcattgaaaaactgcgtggattgaccccactctcgccccaaatcactctgtagaaagccttaaattagtttttaagcttggatcaagggtagaaacttcttataaggtgaatttaaatttacattanatgtatatccagccaaaataatttgatcgtcgagattaatgccgagaattgccgcgacgtatttatcgtccaaaattgcgtgatcagaaggaggggaaaagcaaatgaagacattaacgcaataagcaaatgggaaacaaagcatcagaaaaagcagcaaaaaatatttgagggacgaaatggttttgtcacttaaacttggaaaattattttgaataattaaatattttga

SEQ ID NO: 40458 - DNA, 967 bp, Heterodera glycines
aactctgtttttctctctcttcctctctatttttttctttcttttttctctctcattcatgttcttttttttatcacttttaacaaaattctgtataaggtcaggcatttttttaaatttctcctacttcccacatgggtaagctgaaatgggtgttataagaaaaaaaccatcaaatgaaaattttcaacaaaaaaactacccatattttgcttaaactaattcttaatatcattcgatagccctaatagttctctatgacgcaaaatttcaaaaaaaattttcgtcaaatttgaacaaagttacggccaaaagtgcaccagggactaggttttcaaacattattggccataactttttgaaacttaatgaaatttcgaaatttgtaggcctgtaaaagacacttagggctatcgaataatatcaagatcacatatttttgttggttctaagaaagttttaatcagaatttttgatgatcaaaattattttaaaattttgttataaattatttttattttttattttcttgctatcattcgatatccctaaatcttttctaatcgcctgcaaaattcaaatagggctatcgaatgatattaagaattaaaagtctaactcatgctgtctgtctctcatttggcaggcaaaaagcctcatttttacaaatttattcaaaacaaatttaaaatgttcaaatgttatatttttgattgtccatgatcaatttgagcaattttttgttagaaatagttaagcattttgtgaaattctgagcatgaaaaatcgaagttgatttttttgtggcgcttttccaaataacttttagggaacaaggagggcctggcggtgccgataggcgccatcgggaaaattttgtaatttttaatgcgacttgttaacacatttgtccacaaaaatggccaaatttttgcgattttgagcaaatttttaagaaaataaagga

SEQ ID NO: 40459 - DNA, 919 bp, Heterodera glycines
  unsure (1)..(919): unsure at all n locations
gggcggaggtaaacgcaaaggggttttatgcattcattggtttttcccctacccatttttcggttcctgtcgtcgttttcaacgattcgcccctttcgcccgccaacggaagtggcggagaggtgtcgcctgtcgaacggtgagcgcgtggttggccattcccacccggcgatcagccgagtgttggagattggctgtgtgtgcaacaactcgcacttggccaatggcacaatcatcggacagccgacggaaggggcacttttggtactggcgacagaggtggaaaacaaacgataaaaaacaacgaagaagacagagttgcaaaaatagacccaattggacatttctcgctcatatttccgccgtctcaacgaaatgccgttcaattcggacaacaaatggatgggtgttcaggtggaacccatcaatcgggttagaatcattcttataatcctatataaatcatattgcgctccccgatcccccgngtcggtttttggaaaaacagaaatcccggtcccggtttttggaaaaacagaaatcccggtcccggttttgccagtcccggtcccggcgggactaaataagcactggtaagaatgggggtctgggtgaaaagagaagggattggtgagggatcagaaatttttgataaaaataaattaaattatttattttcatttatagcatgtgttcatatgcctaagtggtcaattgtctaaacctttttactttcattatttgtctcttcggttcaattccctgatggaatagaaaatttttttatattttctttaccattattttaattgaatttaattaataaaaatattttaatttaaaatcattattttttaaatttttaatagcctaaaaacccataaattaaccaaatatttggttattttttgacaaattc

SEQ ID NO: 40460 - DNA, 864 bp, Heterodera glycines
aattttatttatttattttttggttggtattttctgttcaataagattacacattttctaaatttgtcttataaatattcgaaaatgataaattattttttcttatgaaattgattctatttgtaaaagaaagccaagcatgtaaaaaataaaataaataaaaatccatttaggttaatttaataaaagatataaagaatccatgcgcttaacaaaaaaaaatatataaaaaatgctaaaattagaatcacaaaaaaacatattctaattcaaaattatttcaaaagaatatttgatataaatccaaattgatttagagccttaacatctggtaggtttatgtccaagttaaagaaaaaacattgaatgtatctttatatataaatttgataatttgaatagacataaaagatttttcaaaagcattgaaaataacaataaatataaaatatttgttcgaatttttgtgagtatcaaaaaattaaataaatttataattactaggatatatgaataatttttccagttttttttttttgaaaaattcgtagaatatgttaccttataagagataaaaatttaaaaattaaaaattaataaaaattataaaattgttagaaaggaaaaaatttaaatatttataatgaatttatttaatttttgaaaaaaatttaaaataacattaataataatttatattttcaatcttacaatggataattaacaaaaagaataagttttttaatttaaatttttaatttgtttgacaaatttgagttaaaatataaattgtaataccagaaaaaaacagcagttaaattcactaatactattttgcattttaaatattatctttttttatta

SEQ ID NO: 40461 - DNA, 89 bp, Heterodera glycines
gtgctgcgcacgccgcaggactacccgcagctgtatcgcaccctggaagaggtgaagcagaacgccagaaacagcggcctgtttatggt

SEQ ID NO: 40462 - DNA, 1396 bp, Heterodera glycines
ttgcaaaaacaatataataaggataaatcattatttatcctacggtgccacctgcttgctgttgcccatcagtttggtgccggacacggacagttggccataggctggcgccacagccgaaagagcttcagagtttgccgagagacagcagaggagcacgagagcagcaagcagaacttggaccatttcgagatgagtttgaacttgttggatgtgaatttcgaagattgggtggcctttttatattcaaattggccggggattggcgaagtgatttgatgaaatatttgtttgttcactttaatgatcagaaccattcccggcggaacacaaccacaaaagtatttgttcacctttttaacattgaattcgcatagaaaattcgtcaaatttcagtacaatggcacttttcaaatgttcagcttatttatatttgaaaggttaaaaaacccgatttctttaaagcgtttttataaaatatatgtccatattttcggcattttatgtccatattttttgcatccctatagattacatttgatttttttgttttaaaattcaaaaatattcaaacaattgtttttaggaaatctgtgagtttatttaaatttttataaggtaatttataatatgaattaaaatttgcttaactcagcttcataaccacttaattaattcccctttttcctaatttatccgttgttcgatttgccaactgagacaatgaaatgtttaaacacaataaaaataataagcatttataatcgagacgcaaaatcatgacaaaacgcttggcgaaagtacagaggccgccaaaaatgtttcagtcaaaattgccggagaaccgacggttggggaaagaatggcaccgccaaggatttgtggggataaaatgtcaggactgagaacctgaaaagcagcagattaataaattaaataaagaattaagttttataaaaaagataaatgaagctttttgtcgtcgattttgattttatatttcctaagaaaataatgacttttactacaaaagctaagaaatgttttccctgcgacgccttacacaacagacggatttactctattttttaaaataatcttttaagcttgaaaaaacaatttccaccaatttattttttgggccattttattgaaatttcccccaaaaatatttttcggtttaccgtcggactgagaatcagcggactcatcgcaaaagggttaagaatattgggcgaaagaacgtaaggcgtaagctaaaataattaacaaaaacattaaataacacttaattgctttacaatgactggtgccattgccattggtgacaaaatgtacggactaagcacatagggcgacagaaatcacggcatcggtgccgcgggcgacagaatga

SEQ ID NO: 40463 - DNA, 1367 bp, Heterodera glycines
acaacgacttaagttccaccgacgtggcggtcggtattcttttaattattttattcttcggttatcaattcgcaaatgtttgccacttttcagatgatccgccgaaaaaatcgaaagttcaaaatgcgtgagctgaaggcggcgagctacgcaacgcggctgcagcaattgcagacgcaactgcagcaaatgggggcgagtcaggggacgaggtcgggcgcagatgcgatggagcaactgatgtccagctgatcggagcagggccccttttggacgcactgatttagggacgatcgaattgtccgattgtgaaaccgatttgtcgtattccctccctttacccaaatatttgtttctacttttcgcttcacggatgacttattttcgtgttctaaataatgaaaaacggacaagtatattaagcgaattgttccattatccctttttctggtccaaactttattaaggcattcggtctgcccgttgatattcagaagtgttactcttaactgagcaagataaaaaatggctattacacttttgtcttccggttcatcattttattgtttttttttgaattttgcttttagtatcgccagttttaaggatttttattatgaaagtaacatttgaccagtaataattgtgaatgtggtagggtgtaaggcgctactgtaaaagttggcctttattgaaacaaaagggcgggacccttttgttttgcaaaatttttttaagataaaaaaccatgataattttttatccggggtttaaaaggacgctaatcacgaatctgagatgaattttgactaatttctaatccctaacccgaactctaataaaaatcaaaattttgaatttctaaaattatgattttttgcgcctgttaaattatgaatatcgattaatgattaaattatgtgcacgattgccgatttttgcgattctgagccaaatatcggagaatatttatattttatttgtatcaccgctttaaattgcggcgttgatccttatgcatattctgaattatggtgggtttcaaagagaaccagcctattaaggattgcacgcggactctcgcgaattatcttatgctatttgagtcctttttcttttaacagtcaatgtttgcccgccatcttcagggctggggcgtaaatatattgctggccggtcatcatgcaaaattgcacatttgccaaacgtgttggggaaaaccttttttacatttccctttacgattttaaacaaggacgcccacagtcatgaaactgatactttgaaaataatccacgcactttacgaataaaaatagccccacccacacctgtcatttttatttggctcgtcgggaaatatgtgcc

SEQ ID NO: 40464 - DNA, 70 bp, Heterodera glycines
ttcatcagaaaagggcgacgggctggcgtacactgtcaccgacgccagccgggagcggtaaaagcgcccg

SEQ ID NO: 40465 - DNA, 691 bp, Heterodera glycines
tttttctttttcacttaaaaatcgattaaaacatataagaaatttaaaaaatcaatctttggaggtttattctaacatttttgcttttttacttatttaaaatatcgtcatttttccttttcacatgatgattttttataccatatttttgtcgcgcactttttcaaataacttttcggtaatagtgtcaggcggtgccgaaaaggaccgccggggaaaattttgaaagtttagtgtactttgttaacagatttcaacaaaaaaattaccaaatttggcattttgagctaattttttaagaaaaaattagtggttttaggagacgctgagtaaaagtgcaaattttagccctatttattaaataaaccataattatcataatatggatttttattcttgatttatatttaaaaagcactaaaaatttattttgaattttccattgaaaaatgggtgccggcggtgccgaaaggcgccgccggaaaaattttgaaattttagtgcactttgttaatagatttagtccaaaaatgacaatattttatgattttaaaaatgttagaattataattgaattcccatcgaaaaaggaataattttgaaaaattagaagaaaaaacaactacttggaggggaactgatccaaggcaaaaattaggaaccaaaccaataggacaatccactggaccac

SEQ ID NO: 40466 - DNA, 805 bp, Heterodera glycines
tcttatgtttttgataaaaaatagtgtttgttctgtcattttagtgtgaccaataatgtgtcttatgtttttgataactttagagtttgttctatgacttcattatgaaatttctttgcaatatgttaaaattaaccaaatataattatttaagcaatgaagtgtgtactgactgggctgaccattggatctcttcaaaagaataatgattttgttattggttaactgatcgtaaatagtaaaattttaaataaataataaattttatgttatgaattttattcatctgattttcatttcaaatatcttcaactttttttattttaaattaatttttaggtatttattattatggcttcaataaacgatttagattatgttcgagattatgattatgtttatgattagattttgatgaaattgaagaatgtgttgagattttagatcaagaaaatgaaagaaatattaggaattatgatgtgtttgaagagcataactatgctaagagacaaagatttgtggatggtggtcccagtcagggataaatgaatttggatgctgaggttgcggggtcatcccgtatgactgacagtcaatttgaagataggagacttgagaatttgcgaaagaaaagagagagagataggattagatggtagaataagtcacaagaatccagaaatgtgcgcttagaacagatgagaaatagaaattgtaatgcaatagcagatgaatctgtagcacaaagacggatgcgtttagaacaatgagaaatagaaattgtaaatgtatagcagatgaatct

SEQ ID NO: 40467 - DNA, 1137 bp, Heterodera glycines
taggaaagatgacagactagggaagagacataatcttagaaagagagagggagggcggaggggaagaaaacgacgagataaaaaaggatgacggctaattgggaggattatacattacgccaaagaatgggagagacattgcgtgtaaggaagtgacgacagaccgacagacagacaaagataagtaaaagcatagtttggcagagtgacacagagaaaaaaagaaaacggaacggacaaggcagagaacacggaaaaatgccctagggcaaacaaacagagcgaaagttgaagaaggaaaaacttttaaatttaaatagcgaattggaagtttatgggggagggattgtgggaaatgttttaaaaattgagaagagatttggagaaaaagcaaaatggcatggcatttcgtagaagggaaggattttgccaatcattcattcaatcattggcaaaagagtaattatcattaattaatgatcaattcgcttcgttcgcttttccgtgcctttgtccctcccggggcacgcttcttacatttagccggccattttaagcattttatggaccctcaaattgaatttcgaagtttggagaaagggagggtccttaaacattcattcgcccaattcggcgccactcattggcacttcagcacattctcgtttggcacggcatttatttacgccaaaacaaattgaaaaaataaatgatacgctgaaaaagaaacgattggtacgatgagtcatttttggcacttttcatttgcctttttcgccggcatttcctttcatttgccttcgatttgccatgtccaccaattcgttgccgcattgtcatttgtcattttgcatttccccggctcaatttgctgcggaggactcagatgtcaatctgaacaatgaatgagcgaatcccccgcccgagggcgtttcgaattgcaaagatttctttcggattgtcccggaattttcatggacaaacagccattgcatttcgaagtgaatgactcctcaaaaatggcgaaaagtgccagtttttgtaggctgaaaccacttgaaaaagaaatatatttttactttttacggcccactatttaccgcctccctccgaaaatttatcggctcatttgtcctt

SEQ ID NO: 40468 - DNA, 903 bp, Heterodera glycines
gattggcagcgaacatcggaagcaatgacatcgcaaatggcacggtaatgggaggaatgatcagtgaaatgggaggcgtcgagcagataaatgggcgacaaagccaactgaacaacggaggagggcacaaacggacgaacggactcaccgcggaaatgctaacgcaagcgaaggacagcgcccaaaggggggaaggaccaagcggcggacagaacaaagagatcggcgacaacacggggcaacggagcggcagcagcacgtcgagtcggaacagcagaaaacgtctgaacagcttggagttgggcagcacggaatacgacgcattgggtgggcagggaggcgaagacgggggggggggggggaccagcgagcatttgtccttccgaaagtgccggatgaaaaagtgcgattcggcactcttcggttggcttcctttttgattcgattgtctttcttcgtcgggaatgtccactcctttttgagtttttaagccgattttacgattcttttcagaaggcacttcctccgccgaggcaaaagttgcagaaaaaaaccatcaaaagttaaacgaaaagaatgaaacggcgtcggaacagaaacaaaacgaattattaaacggtcaaatggcaaacgacggcacgacggacaaaaaggacggcgacaacggcacagtgaggagaagaggcgaaaacggtcgtattgcctatctctacggtcagtgaccattcttcggggtcggtttttacgcctttgatttccgcttctcatcaggcatttatggagcgcatcgtgacgcgtcgacgacggcattcgccgtcactgaagaaagccacccgcggcagcagcggcggtcggcgtttgcgaaccaagcgaatacgcccggaaaccgcgacgcgagttggg

SEQ ID NO: 40469 - DNA, 829 bp, Heterodera glycines
tgttttccggacgttatcgagaagtcgccgatcaacttttttctttgcctcatctacctgtttggagctgctggcactgcgactgcgggattttacctgtttttgagggagaaacggattcgtcgcaggaatggacaatcggttcatcgacagagctctctttgagaactcggcgacgaaaaaatattttgttggcacattcccggccgatcgattgccaaagtgcaccaaatttccctgcagtctaattgtcaatttagttagtacccataaaatacattaaaatacatcttgccattttaggatccatcgggaatgccgggaaccaaaaagcgctcaaatccgcgtattccattgtatttttcgtagtgctcgagcatcacttgtgtatttcccgtcatcattttcaatgtgtcccttaacctgcggaaatttgtttatttgctgtataaatattcaatttttacaaaaatacctgaattttggctcatgatttttgcgtgcctaaattttataaaaattattactttaaagaaaaataaatattatatctattgaaataaagcaaaaaaaaaattgatttaaaaaagtggtcataaaaaaatgtgcacaatttggactgaaagatgtaatatagatcacaataaatggagaaataaaataaattttagcaaaaggaatataaactggtgtcaaattacataaatgaaatggggaaaactaattccgagacaaatcttttaatttatgacaaaaatattaaagaagtggtgtcaaatatgtgcaggtgtgagggaggggcaacgcaaagatgtgaaattaaaaatca

SEQ ID NO: 40470 - DNA, 682 bp, Heterodera glycines
  unsure (1)..(682): unsure at all n locations
gtcaaaagtgaccacgcaaaacaaatggactttaataaagagaaaatatcagcncaaaaataaaaagatacttatcaaacgcaattaaagaaatgttcgcattttgatttatnntaaccaaattatgaagacccatntagttttgcaanaatttcgtctagtcatagaaaatttttttttttccgtagtacaaaattttcggggtcgcttaatcacgaatctagcatcccatttgacctatccgattccgaactcagaaatttaaaaactttgattcgcacctttaaaaaaaaattttgtaaaccaaatgtgttaaattttagaaagcatatctttttaattatggccgcttatcctacacaaaattcagcaaaatattcaaaaacactcaattcaaaaaactgcttaattaaacacgacgacacaccattgacgaaagcgtttccagcacccagaagatgtctccggcacactctcttctatttcatctgctgttgaagccaatttagtgacaggtggagagcatttccccagcattgtcgatgaatttgtttctgcattattttttattattggcatatattgaaaatataatataaaattttcaatttcaatcaaatttattatattaacgaaggaattaattgtgcatgaaaccattcaatttaaactgaacatttga

SEQ ID NO: 40471 - DNA, 1393 bp, Heterodera glycines
atttttgagggcttttaggggaaaatccttcagactctttaaaatttttgattaaattggcattatgtttggcaattaaaagaattttttaaatgaaaaaatatgctaaaaatatggtcaaaattcttaatttttctcccggcgggcgcctatcggcaccgccggacagtaaaaatccttaatttacaagcaaaaatttgctcaaaatcgcaaaatttggtcatttttcggacaaattctgttaacaaatcgcattgaaattacaaaatttttcccggcggcgcctatcggcgccgccggccccccgtgcgccccaaaagttttttgggaaaagcgccgcaaaaaaatcaacttcgtttttctttataaaagtaatcgataaaggacatgaaaatgtcaaatgtctgatttgatggttttttgactaacgccccagcaccatttaaattaacaaatatttttaaattatttaataatcaatatattttagttttttaaattaaataatattacatatttgctatttattattcacttggggtagtgatgttgcggctgcttcagcctctgtccccttttccgcctttctctcattgtcctccaaatcgtacaatgccaaaatggtcggtgacaaattccccccgtttttttcttcctccgctgcttctggcaacaatggcacaaatcgtgggctcatcattttgaagttcgaattggcgccgcccgtcgcgcttcgcaatttgttcagtaattggatgcccatttttagaattccactgccacttttcttaattttaaaataataattattatttaagtatcttaattagggtaaaaattaccgtactttttcttttggcccaagtgtaggttcgttacgcgcaagcaccaacttcatacattcgcgtctcataagcacctaattattttctgtttttgtatatctacggatttactcgcgcgacaacatgccttacccgtttctgatcgtcaataccaacaaattgacgacgatgaatgataatccgagatggagtaggaagaaatggctcaagcggagtcggcggaggagacttacgagcatgcaagtgagtttcaatcattttatttataaaaaaatatcaaatattcaatttttagtggacttctactttcagttggacaattatgtccaaatgtcgcagaatttgaccattgatgaccaacttccgccgggatgggacgcaacagcagaagtgcgagtttattgcgcgacgccgacagtggaagcctctaccccagccgggtggaccatccatgcggtagcttcaaatttcactttgctcggatgatacaggggcatattttgaacagatgaatccttctacggatacaagtacaatttttaagtgcc

SEQ ID NO: 40472 - DNA, 801 bp, Heterodera glycines
tatataaattatttgcttcctcttacaggccatggctttctattgacgggttgattttccgcgcttcgttccacgaaagcggtcacacgcttctgctgtatctgttgagagatgccgataaacacattagagtaaattgttttttaatttctgttttatattagcattttcaatactgttcacagtgtaaatgggcttcgaccccccccccccccccgcgcagtggtgcaccccaaaatcacgatggccgaaatcacgccgctagaaattaaaagattttagaaaatttctagaaagaattttttgaaaaaaatcgaaaaacggtaatttatcatcaaattccaaaaaaaaatcgcttaaaatttttgaaattttcatattttttccttgaaaaaattattttgaaatttttttttaatttctagcggcgtcattttgtcctagcgtcattttgttctgttacccctgcatacgtatgtccgtagccagaaggggaaaattcccaccgctcccgaaatgaaatatttttcagtaaaaagcgacaaacttgaaaaattttctgaataagtgtttgtatttcaagaagtatttaatgccaacgcctatcggcaccgccgagacttcattttatgctatgttcgatctaatttgaatatttaggtggattttatgatctttttaaaaattttcttcaattttctcaaggaattccctcctttgtgtgagggggacgggggataagatatcaaacaacaccccggaattataaatttttcgagatgtcttagaaattcctttttt

SEQ ID NO: 40473 - DNA, 1038 bp, Heterodera glycines
atgataatgaggataaaaaagataaatttgtgagtctgacagtgatttttggttaatctttgaatgcctaaatttcggtatattctttttttgaaatgaaaaataaaatttaattatttaaatgtgtttccaagagcccatcaaattattcaaaagtgattattaattttgtgttgattgatgataatgaggataaaaaagataaatttgtgcgtctagcagtgattttttggggtaatttttgaacacctaaatttcgctatttattttttttaattgtaaaaaaaattttaattttttactaattttttaaatgtgtttccatttttaaactaaaaaatttacatgggaatttatacggaccgatgagcttatacgaaaaaagaaagaaaccttttgccatttccaattaacgcaaaataaaacgccattaaacgggcgtaaaattgccatatttggacattttttaggggagagggaatctgccggaaatgtgtgaaaattggttcttatttaggaacgggattaattccaaaaataaaacggaattataaaacaaataaaaagggaataaaaataaatttaaggaataattttaatttaaaatatattataattgtatttaatacaagaagccggtttttttattaggtatattattgcaaatcggtccaactttttcaaactttaacaaaaattcgcgggaaattttcacaaaaatttatgcaatcgaattgaaagcaaaatttttaaggtaccgtatccaaagacaataaataccatagcaattttgaagatgtccatgttaaatgattttaaaataagcaaattgaaagagaaaaaaaacacagagaatgataacacgacattactgtaattctgaattacagtatgtctaattaaataaacacaaaattttaccacttcttttttctttaatcaaattaaatttcatgttttctttttttttttataacatttcacccattttaagcaacatggcctgatttttcatacatactcactcatacagatgca

SEQ ID NO: 40474 - DNA, 1623 bp, Heterodera glycines
atttcgaaccgaccgatcagcaccaaacgaatgccaacttcaagggccgcctctacgacggccaaatcgagcccaaatttttcatcatccgcatggtgaacgtagtgaaatctttttgaaaaaaccaaatttcaatttttgaaaaatcaatttgaattttttgaatttttgcaaaatttgtttgcattattcgtcgattgactcactcactcgccaactgtggtgatgccagctgacagcatttcgcgaaaagtgccgacgcaaatttgaaattgtatgcaatttaagtgtgaaaattattgaatgccaaaaaattcggcaaaaattcaagaaaatcattgaatttctcgagaaatacaaaagtctgggaggtaaaatgttcacttttttcatccgcgcatagtcaatgtgccgcaccaggttgtacatgtcttggcgccatttccaaaaattgttggtcccttggccaccgatttgggaccggcctcgcaaacagcggtgaaacgcgtgcgaatgtgcgttcacaaagccaggcaacagggcctaacaacaaattcgtagttcgctcggttccgagactcgagaaaggtttttttttagatcgcagttcgttgatcagtgatattcatttcgaaaaatttccgaacccctggccaaattcgaacaaaaagccgaataataaattttttgaatttttcatttacatccaaggctgcatggaaagataataatttatgcttaatgccttttgaaatattcttgagtatttaaatcatttctaagccaaaatgaaatcggaaaattccctgggttcggaaattgttcgaaatgaattcatattctgatcagcaacccccgaagtctttaggcattgtgacttttcgactcaggaaacaatactcttgagcagtcttcgaaacctcaaaaaccgggaatttctcgactcgagagtctcggaggcaccacaaggcacctaccgtattgtccaggcgacagtatcccgccgccattccgtcgtcgcactgtttttcagcttcgtgatgcccttccattatttgcacaatttttcccttgtcatcaattttaagatggacattttggcgaaactgtccgtccaaccaaatccatggcgccgtcaaaattttgccccgaaaatccactaacattggcgcaatttttgaaaaacaattttgggtggcaaaatgtattattaactctttttataagggatgattatattaatttggttgcaaattacctaatcaattaacctttaagtgattgattaattatggaaagggcgtctgatgatcaatgaatgaatgcattgtgggttaaaatgatttttcattacgtaaaaaataaaaaattattaatttttgctgaggtcagaaccgaaattgaaaacgttgaatgatcaggtgagaatttggtaaatatatatatatatatatatatataatatataattaaataaataaatatatttgggttatttttatttaaaaatgataaaatagtaaaaaaaaaattggccgattgcaagcagttaaatcaggcagaattgtatggtaattttaaaaatatgattatgataatatggcgatgaatagaagaacaaaa

SEQ ID NO: 40475 - DNA, 902 bp, Heterodera glycines
  unsure (1)..(902): unsure at all n locations
catcgtgtttcatcactttggcctatttaaccatcaaattattatatttgtccaatgtttttgcgcagctttactttatgatcaagtaaaagagaacaacaaaagtcatttagtcaattaattgtttattaataaataaaataatcaatcaaattccaaattaatttaattgtttattatttccaattttttagatttcttgaaactgaccgttacaattggtacggattgggtgttttccttgacattatggccggcattccctggcaaacttcgggctattttccgcgcgtttcgctttgtgattttaccgtattatttttaatcaataattattttatttttaattactaaatatataatattttaattttttaggtccgccaagtcgcaaacattcagaaatattctgtccaatgtgttctagtaattaacatttttaacgagtaaaatgccattgaattggatggcattttctttcattttccaaatttaggaaaattttcatccttttatggttttggtacgcccttttgctgctggtcacttccatttccttcatttattggtcccttaaaagcgtttctcttctgattcttccattgttttaggcttacaatgctaattttcccccaatttggccgttggtatgtggcccaggcattggagcttaattacctttacccaaaagtcggacaaagacaaattgacaaaagtaaatgatgatgatgatcatccgtttgggttttaagaaaccatttaaaaattagtaacctttaggggagccagggtattttaaaacatttcgtcgnncgcttttctcnggcccgncggcgtttttgcgcttcgnttggttccgtttttctgcccatttaaggttttttcttgttttctcccttttt

SEQ ID NO: 40476 - DNA, 883 bp, Heterodera glycines
gtcgctgaacgcgaatctaacatctatttcgaccaatttcctaaacccggacccgaattcgaacaaaaaacgaaagttcaaattttcgatttttcatttcgatataaaacattagatgatcttttattgtagaagtgatagattttagttgtttccgtgtgtttaaaccgattttagaccaaaaacccaaaattcgaaagtttgaactttagatttttctgtaatagttcaggtccagttttaggaatttggttgaaatggatgtcagattcgtgatcagcgatcccgaaaaaccctaccccgaaaaccacctagaatttttatatgattaaaaaaaaatttttttgggtggctaaaccatataagtacctgataggtatgtggttttttacccacgaaaaccaacagaaacacgttttcatgaaaacaagcctttttcaaggttttcacaatctaatctgattaaattgttggcctcaaaaatactaagttatctcccgctcccgctaaccttttttgctccgcacataattttttctcctcattcaaaaaaaatttttttgttttttgaggctagagtgtcaggctggaaaattttgatcatgaacatttttgagtcatttaaaaaattcaaaggaaattttgaaaaagattttttagattattcaaaaatgagacaagttaggttaggattgccagtcaccgcatagttctttttcccctgcttcaatggtgcagcgggagggcagggattaatgttaatggttgtgagcagggacagagctggtcaaatgcattaactgcactatttgttcgatttttaataatttatttagctttaaaatctgctaaatttcccccgttttgttcttctttgccgacc

SEQ ID NO: 40477 - DNA, 1342 bp, Heterodera glycines
cggtcgaggagtgaaaatccaatgtgacctccgcttgtccatgtgacatcatggcattgtcatcgcccggaaaattcaatgaagagatcggcgtcacataaattgacaacgcgaagtgacggaaaatcgtagagaaatgatgggatcaatctgcgcaagcggcgatatacatcggaaagcaaaaaaatgccacaaatgttttctgcgaagatgggccaaatattgcgtacaccacggcgaaaacgtcctggcccgtttttatgtagcttaggcgacatttcgacgcagcgaaatttcgacgcggcgacattttgacagcgcgccgggcggtgccgtcggaaaaaattttgaaatttgaggcattattctgtacttggggcccaaacgaccccggggcccaaaaacgagggcccaaaaacgggggcccaaacgcgggggcccaaaaacgagggcccaaaaacgggggcccaaacgcgggggcccaaaaacgggggcccaaacgaccccgggcccaaaaacgggggcccaaacgcccccgcatgtcgattggagcgtcagaacagaaatctgccaatttaaaaaatggcacttttcaccgtttccagacatttgtgcctatgtttaaaatcggattcaaacactgtcatttgtgtaattttctttaaactaccagggactgaaaaaaaacttaagtttgaacccaaatataaaaaaatggatcacttttggaatttctgttcataaagacacgggatgtttctaatttttacaccttttgcgcaactattttggcattttgtgcgtttttagttttttagcacatattttcactttttggcaactatttaccgtagaaacaacttctaaatacgtaaatctttcgaaaaataatattaaaaatagtgtatagaaatgaaattctctgtcgctatttttagcgactgccaaatgtccttatgtatttttgtaagatttgtccctatttcggcttaccgatcgcaatttgttgttttttcttaaaattactcataaataaaagaaaggtctcaaaattgcaaaaattgggtcattttctggacaaaatctgtaaacaaagtgcactcaaattggctctaatgctgttgtttacccgtctaatcgacttttaaatcagtgaacgtcctccatttcttgaaaaacaaaattaattctcatcggaaactgtttgttgattgataaatgagttagattttttggctctttatccgatgttcggatgggaaacataaagataaaaaaatttgtttaattttaataaaataaaaaatttatggttctagtcggttttatgcgccccatgaat

SEQ ID NO: 40478 - DNA, 987 bp, Heterodera glycines
caaattccccttcccccccgtgtctcgcctatctctgttctgatcaagatcaaatcactcgcattccctctgttgatcacttttcgtctttgtacgccctcgccgagccgatcacttcgctttgcttctgacccatctgacccaatccatcgtttgatcattttaattatttagcgtcacatttatttattcaataataaaaatattataaattttcaaaaaaccaactaaaaatggaagggacactccaaattgaaaaagttttcaactttaaaaaaataagtacatttttacattaacgttaattgagggtgactttttgtggttggacaacaaaaattacgggagcgatggcgttgcgattggcgcccgagttttatcagttttttgtgacaatcgaacggcgtcagaggaaaagcgcattttgttaatggacgacgagggaaaagtaaacgaaaaaatatgccaaaaattattattaaaaagatttttttaaactaaacataaaattaaatttaaaaaataaataaagtaatcattagaaaccgactaaaaaggcaccaaaaatcacgaaaaagtcactataataggcaccaaaacattgaaaagaaggcattaaaaggcacgaaaatagacatttaagatttttttattaagaattttaggaagcaaaacacgtaaaactaaatcaaaaaaaaccaattttggtgttcatttaaataacgattattaatatttttatatttgtattagatgtgtattttctaaaatcttttcgcggcatttcttaggggtatatttttcttttttattacatttttgtaaggaactttttcggaaaaaaacgccaaaaaaggcaccgaaacgcaaaaaaggcataataaaagttcggagaagcttcaaaccaagtggaaaaatgtgtttttaagcttaatatatcggaactaattcgcagaaaaaaggcatatgcctcaaaagtcagtctct

SEQ ID NO: 40479 - DNA, 880 bp, Heterodera glycines
tttttataatcattttttatttctcattaatttttaattatcattttagatgcaattaaatcgttagtttaattagttaattagaaattaatttaacaaaaagattgatctggatatgtccattgatgataaatcaccattttacttccgaattgcggaccatcgcctggggcgttgcgcgccgccgcggcagagagcgccgccgccgttggcggcattgggtatgttttgcaatggcattattatttttttttaaattaaattccttaaatttaatctctccgggggaataattagggattaaacggtaattcattaatttgttagacagcagagcgagtgatccaccgacgactgccgggccgcgaatggtcgccggacgcttcggcgcccatggatgagccggagctgaaggcggccaaaccgcagcaggcgtcggtggtgtgattggtcagcccggccgtggacgacagaaggggagggatgggattttctgatcaggcccgtgaccaggggggaggcgaggcgaggggaagtcagttggccaccgcccccccccccccccgaaaagagaatatctctttttttacagaaatatatacctcacaaaagcgcttgcgtctgatatcgaagccatatgcacaatcgccattttatttcacaggaggactcttatatttacaggttatcccagaaatatggttatctctttttttgataaattttatacacatacatatgctctcgagcatgatagggagggcggtgcgcaatttaccttttatttttgagggaatttttaaatttatactctatcccagaaaaatggctatctctttttttgataaattttatacacatacaaatgctctcgagcatg

SEQ ID NO: 40480 - DNA, 455 bp, Heterodera glycines
caaccccaaatacagtccaaagacatatgtatagagcaaaaaatgcgtgtgaagagctaagcgaaattttggaagaaattcagagaaaacgcgtagaaatggcagagtttgcaaaaaaattgcagttgcagcgcgcgaaaataaggaaagagattatgtagacttttgtacacagcttgacattgaggcaaaaattaatcgagcagtgattaagaaaaatgaatggcaatacaaaaaaagaacaattggaagatgtttttgacataaaccctcaaaattcgctaaatagcacaattcttacactccaagaaatcagccaatcaaaagagtgaaaattccacaaatacaattgaaaaaatttgatgggtcagttgaaaatggataccattttgggagacattcagagtacatgtccacgaggatgattcggttaccaaaattgaaaagcataattt

SEQ ID NO: 40481 - DNA, 1044 bp, Heterodera glycines
attgttttgcaaaaatttttttgagataaaaaatcgtgaatatatttttattcgccataattatgctgttaatacttaatattcatcattatgtgtcaaaaaaacaaaaaaaaatttttccaaaaaaagtgaaaaaattttcaaaatagtgctctttgcaagtagcgcccaaattttctaatttagcatttttggttcaaaaacagcataaatgatctcttatgcagtattgatggcttatagtttgtttccgtgtattaattaaacagatttttaagaaaaaatctaatttcgaaattttgacttttcgattttttgttcgagttcgggtccggggttggaaattgagaacgattttcttatagaagtttagtcctatattacaatactaatgccatagaaatttattttaaaatatttgtatcactgacgcattttccaatgaccgattcgcgaaaagatttcttagcctttaaaaaaaatgaagaaaaaacttcaaaatttcgaccttttcgattttccggtcacgaatcaaatgcaatcaatcaataattagtcaatcgtttaatgaacaattaagtagctcgatcacctccttgaaagtgttgatccatgttatttcacaaaaataagcacagcaatacaattcattcgcttttccatttttgctcggcgtgtgcaaccatttggacaacgcttggccggcagttgcttttggcccatcgtcagaaattccatcgggtaacagagcaccagaatcaattgaattcaattgatcaagatcagtgagaagtgtcggcgaagtgtgacgacgcaaattgtaaaaatgattggcattaggaaagcacaaatggcgaacgtttgtcgcaaaaataggcaaaatttcgcgggtaaaaacatcccaaattggttggacatccgtatcaattgaatgcacaaacacttccaatttggtgccacttttgtcaaagaatcgctttttggagcggagaaatttgatcacggaatggtcaatgtagctgaagaaagataaaaatgctttag

SEQ ID NO: 40482 - DNA, 764 bp, Heterodera glycines
aatctcctcaaaccgtttcagaattcaataaaaataccttccccggtgcaaaaaaggggttttgaaaattttattgggaaaaaaagactttacaaaataatacccctgggagaagggagtgggaaacatgatttcaaaattttcaattttttctagtctaatctactcaaaccggttcagaattcaataaaaatacaattcacggtgcgaaaaatggggtttgaaaagtttattttgaaaaaaagactttacaaaataatacccctgggagaagggagtgggaaacatgatttcaaaattttcaattttttctagtctaatctactcaaaccggttcagaattcaataaaaataacattcacggtgcgaaaaatggggtttgaaaagtttattggggaaaaaaagactttacaaaataatacccctgggagaagggagtgggaaacatgatttcaaaattttcaattttttatagtctaatctactcaaaacggttcagaattcaataaaaataacattcacggtgcgaaaaatggggtatgaaaagtttattggggaaaaaaagactttacaaaataatacccctgggagaagggagtgggaaacatgatttcaaaattttcaattttttctagtctaatctactcaaaacggctcagaattcaataaaaataacattcacggtgcgaaaaatggggtttgaaaagtttattggggaaaaaaagactttacaaaataatacccctgggagaagggagtgggaa

SEQ ID NO: 40483 - DNA, 1092 bp, Heterodera glycines
  unsure (1)..(1092): unsure at all n locations
tttaattaaatttaatgcaagtatatattaaacagaaaataataaattttcaatatttgtaattttcatacttaaaaaacattatcataataaatttaatttaaatganaatggaaaacattcnntntaattaatgatcaacgtaagaaatgcatagccaaaatactcagcagtataaaagtgtacaataaaaaatcatcgtaattatcgtaaagatattaattattttattttttctataaattccaaatgtttgttaacaatataaaaatatgtttttaaaagtatataaatatgacaagtaaatacattttttatgctatctatattcgaaattcatttaattattcttcattttcccgcaaattgatttgaataatttcacagactcatacgtgagagagtgaactctaaaaaatttttaaaaaataaatttaatttaaaatatttaaacaatttgctatttacaaatttttaaataaaataacaaaataattattttgaaaggagataaagccgacaaaaatttgtaatttaaagttataaaaatgaacgatttcgtaggagaagcgatgtcttccttacactattaaaaagacttgaaagcaagaattataaatgttatttatttatccataataaaacatattaaaattctaaagcctaaaactgcatttttaaaacacatacaaataattatatgtcaaaaataattttacaaataaattaatatgaaagaaaataaaaaaacaaaaataatcaaaaacatctttttatacactcttgaaaaaatactgttaaatataaatatatttgcaaatacgaactttattaaaatataacgagtccatagttgagatggaaaacgaaagttaataactttttagaaattaaaccttacaatattatcttaaatttaaatacaaatcaaaaaattttttataaaatctaaatatttgctaaatattataatactgaatggtgaattattgagttatttcaaattagtagaggcgtgccgtgattgaaaaaaccgtgataatgaccgtgnnttgtttatttctctggcgccgaattttttaataagttttg

SEQ ID NO: 40484 - DNA, 831 bp, Heterodera glycines
cccccgccacgccaacgattgctcaatgacaaatccatcattgtttccggatatcatttcattttttgccttaactattttacgattttggtggtactcccgagaggaagaaaagttaattaaaaatgttactaattgttgaaaaacagttgagtaagttaaaaaatagagggaggagagagaggggggaggggaggaaagaagggaagggaataagggggagggaaaaaggaggagaatgaggagagaataggaaggaatggggggggggggttaaatggaaaagaagcggccgattggctgttcttctgttcgtcctcctttgcgccgacagtcgtcgtccgtccacccttcccttatcacttccctttgctgtcctttccgatgagtccccaaacatttgggcactttcttctgacatttttagcttttacctcgggaattggaattatttcacgataataaaaaagaaaatgtgtgtcttcatttattcgtttctttcgctgtaatttcttagaatttaaaaaagggaaagtgacgcggcaaaaacaatgaaatgaaaaaaagaaaagaaaagggggaaaaggggggggggtaagaaattggcgacatgaagtttgggcaccgggaagtttgggcaccaggaagtttgggcaccaggaagtttgggcaccaggaagtttgggcaccagaaatttgggcaccgggaagtttgggcaccagagggagggatttcaaaaaaataaaacaatataaatatataaatgttatataaatcattaaaatttagtaaatttaacaacccttgtgctcaaaaatttctatgttctt

SEQ ID NO: 40485 - DNA, 1316 bp, Heterodera glycines
cattatatctgttaatattgcgaaaatttaaagcttctccatcaccagttgacaaagcggaagaagatgaattcttggaaaaagattatgcagatccaaaaacatccccaccaatacacaaaaaggcccacaaatgaaccttgaaacaattttaacatcacccttatttttgtatgtgatgattgatcggaattgtttggattgaaagaataattacccttttcaaaatgcaaaccaattaaacaacatatttcgcttttacatatttatttttttattgttttcgggatttttctatctctatgattattctgttctaatttgtgctttttaataatttcattttgctttatctgtggtaaatgcattttaattaacgataattgagtgtgaaaggttcaatatcaatgactcaagaaaaaatgacccaaaacgaaacattaaaaacccaagaataattggaaaagaaactgagaatctcgagtatcataattgaggtggtttgtttgtgcgataaagccttcggttttacttataaatatctaaatgaaaaaatataacaaaaattagacgaaaacacaaaaaagataaaaaattagactaaaaacaatcaattttgcatatccaacaacaatgttaaaattataattaatactaggcctaccactacgggggaaaattcgggcgatcgtgaattaaatttaaaaaaaactttaaaaaatgaaaaaagcaatttttgatttatttagaataataagatttgaaatattttgttttatttatttaattttatatttcattcttgaaaatttttaatgaacattttcaaatttcacttaatattaatttaacgcgaattttgccttttttaataaattctcttgtgaaaaggcaaaaaataggcttttttaaatatgcctatttaaattactttaatttctgtcctttcgcttacgaccataccacgttgaaagcacgccatcccgtccgatctggcaagttaagcaacgttgggccttcttagtacttggaacggagacgtcctgggaatcgaaggtgttgtaagcttttttacttttttcacttataaatttatttaaattttcaattttttttggcttttttcaaaaaattttgtctattttttcggcaggcactgcctctgaaaatgttttttatttatttagaaaaataaatttattttttttctttttgattattttaattgtatttcatcctgaaattttttaataaacattttcaaactttcaccttattaatttaaggcgaattttgccttttttaataaattctct

SEQ ID NO: 40486 - DNA, 1175 bp, Heterodera glycines
  unsure (1)..(1175): unsure at all n locations
ttattgttagaaatttgtttccagaattttattaaaaaaaaatntcgggaccaatgaaccgaaagattgcccaaaacattttccgggcgcctcataatagaaatattggagctctttgtattcaataaatttacggaaattgtgcataaaaaccttttactctagaaaaaaacacatttaacattatattttccagggaatctgaaaagccctcctctgacagagccaaagtcatcagttcgtcgtccgccgattcgcaacacaagcgacgttcgtctcacaccaaaaaacacctgccttccccgccgcctgtccatcgcgatgcttttcctcccgccaaaaatccttccccgtcgcgcgctcgctcaccgtcacgtaacggtaaaagcggagacgctaaacggacgccaccgcgacgaacgcatccgttgccaccaaagacacacggcgaacgcagcgtaaatattaaaaaaaacggaggggttgaggaaaataaattaaaataatcagaaaaatggcaaaattgaaatgaaaaaacaaccgaaaaatgcaatgaaagggacacaaattggaagaaaagagacggaaaaacggaaacaatttgggaaagataagcagaaaaagagtggcaccaaagaaaagcattttacggtaatttatgagcaaaatatgatataattcaaatacactggtaattaaacccttcattagtctaaaagttattcgcatggaataaggaaaatggcttttatgaaaatcaaccttattcgcattatttcttttatgacaattttgaaagtttattttatcactttaccaatgtttccatttttccacagatttcccctgccgccgatcgcaaatccgtcgttttgcccagcaaaggtccgccagcacttcgttccgtcgtctctgtgcctgtccaatttgtgcccaccacgcatccccgcgtccgtgccgtcgcccgttccccatccccgccgccctctcccccgcttccgtcttcttccccgctccgtctgtcggtcgcatcaccaaaaataatgcttagcggcggcgttgtgcccgtagagacggcagcaccaaaaagtcataaaagaattgtcaaccaattggacatcgcagccgtcggcaaggaagaaacggagaacgacggccgagggaggagcaaaagc

SEQ ID NO: 40487 - DNA, 801 bp, Heterodera glycines
gtgattagaagaggtacaacagtcattagaagaggtacaaaattgttagaagaggtacaactgtgattagaagaggtacaaaagtgattagaagaggtacaacattcattaaaagaggtacaacagtcattagaaaggtacaaaagtgattagaagaggtacaacagtcattagaagttagctctggttaaggagatttggaattttttaaaaaatatctgggacttttaggccgcttcgcggcctcgaacgggcgcttcgcgcccgttttttaaattttgttgggcttatacgggcgcttcgctcccgtttctaaatttgttgggctattaaggcagcttcgaggcctcagacgggcgcttcgcgcccgtttctaaatttgttgggctattaaggctgcttcgcggcctcagacgggcgctacgactcttacctcagattgaagtgaacattttaaggattccgcgaaaaaaaaacatttggaaaagccatttttacaagaattctagagatcggtattttgaaaggagccccgatatttgcggtcccgacatttgtggcccgacatttgcggaccaacatttgcggccccaacatttgtggccccagacaataaccgacatttgcggccccagccaataaccgacatttgtggccccaatcaataaccgacatttgcggtccgacttttggggcccgacattagcggccgatttcttaagggttatttccccgacactttgcggcccgaacatttgccggcccccaaattactccatttaaaaatttaacaaaaattaa

SEQ ID NO: 40488 - DNA, 1236 bp, Heterodera glycines
  unsure (1)..(1236): unsure at all n locations
taaatcgtccgttacgctttcccctcattttcctccatttcttggcttttccccttttaatttcctccccaattttcacttgncagcaatgcgtttggccgtccctcgcactcgtcgcgcagcgttccttggatcggtttttgcgccacattcgcaccgccgggttgcgcggttcggagcgcgtgaattcgtatccgtcggggttcagacagggcagcaccaaaatgtcgactctctccagacatttgagcaacctttggtcattcccaaggcgaatttggttggcaaagtaaaagatgaagtaagcggcggtgtgcacctgcggaggcgaaaacaaaacatcaaacagccgatgctgtgcaatgttcttacggctgtccattctctggcgtggattcccgcgtcgatccaaacgacgggccgacttttgtccgatggattgccaaactgccaaatgaatgaatgaatattaaataactttcatccccccccccttccaacgactccctctttcatcccttccctccgttcttccccctttctccacctgaatgccctgcagcggccgtccctcggccgtccatccgatggtgcgcaactgtgccctgctcggcatcgcgttttgcacattttgcataaatgccaacaaatcagcgaagctgtgatagtcgcccatgcgtaggccgaacccctcaaaacgatcgaaagtgtcgcggagaattggcccatttttggacaatttggcgtacggagaaggcccaatttccttttcttcaataagtctaaagaaatgtaagaaaaacttgccaaaatcctccaaatgatttctcactttgataaatcgtctaccaacactttgaattcgacttggaatttgcgtaaaaagtccaaaaaatgtcttccgttgcgcaaaacatcgaccataacatccccagaggaattgacgaagggcggcggacgccaaaaatcaatctgaaagtcttctaatcacccattattaaaaagtcaggcactcactctccgctcccaataattcattcgtatttatcctttccccaaccactcggtccactttccccaattttcgattcacttcccctgcacccttttcgccaatcaatttcccctaattcaatctccaatcacttttctcccctcttcactacacttttctccgccacttttttccccaaatccaatcacttttccctcactcacccgcccccttgctgctcc

SEQ ID NO: 40489 - DNA, 228 bp, Heterodera glycines
aaatttttcaaaaaatccacaaatttttgatgaaaatctgctaaaaatggctcaaaatttggtcattttttggacaaaatctgttaacaaaccgcatttaaaaccgtaaaaattttccctcgcggcacctatcggcaccgccggaccccctgtcccccaaaaatttttttggaaaaaccgcgccacaaaaaaaagggtgtaaaaaaaaaaaggtcgtcgcccggaggg

SEQ ID NO: 40490 - DNA, 238 bp, Heterodera glycines
tgcggacatctacatttttgaattgaaaaaaattggtaccttttctttctttttctccacattgaccatcatactcatattctccccacccttttcttcttccgccacccacctccctctcttgatagtttaaactgaaggcgggaaacgacaatccgatccccatcaagctagcttctgcaggtcctgctcgagcggccgcccggggatcgatccccgatctagtaacatagatgac

SEQ ID NO: 40491 - DNA, 1039 bp, Heterodera glycines
  unsure (1)..(1039): unsure at all n locations
atccgcttggagatgcgttagaaaagaaagaaaaatatgttcggacagcttttgaagagctgcattgaatgctgcagttgccgctgctgtacgcccacccgttgctgagttagggtcgagagcggcatgaaaaaagacaaaaaggaggaaaatgaaacaaattcgcggctttgccctcgcgttggagaaagcaatgcgcagaataactggggagacttagggttagcgcatcaattatttttttcagaatgtgatcggggtacaaaaaatacgggtccaaaaatgggtgcaactccgcttggagatgcgttagaaaagaaagaaaaatatgttcggacagcttttgaagagctgcattgaatgctgcagttgccgctgctgtacgcccacccgttgctgagttagggtcgagagcggcatgaaaaaagacaaaaaggaggaaaatgaaacaaattcgcggctttgccctcgcgttggagaaagcaatgcgcagaataactggggagacttagggttagcgcatcaattatttttttcagaatgtgatcggggtacaaaaaatacgggtcaaaaaatgggtgtaaatccgcttggagatgcgttagaaaagaaagaaaaatatgttcggacagcttttgaagagctgcattgaatgctgcagttgccgctgctgtacgcccacccgttgctgagttagggtcgagagcggcatgaaaaaagacaaaaaggaggaaaatgaaacaaattcgcggctttgccctcgcgttggagaaagcaatgcgcagaataactggggagacttagggttagcgcatcaattatttttttcagaatgtgatgggtacaaaaaatacgggtccaaaaatgggtgtaactccgcttggagatgcgttagaaaagagagaaaaatatgttcggacagcttttgaagagctgcattgaatgctgcagtcgccgctgctgtacgcccacgcgttgctgagatagggtcgagagcggcatgagaanagacaaaaaggaggaaaatgagacaaattcg

SEQ ID NO: 40492 - DNA, 975 bp, Heterodera glycines
  unsure (1)..(975): unsure at all n locations
aaaatttgagaggggctantttatatgtaatattcgaaagtgncaagataattagcgattcatgcgcacattgaggctgaattaagccattttccctttgatcggtacaaaattggccgaaaaagagatagccattttttgaggccagaaggaaaatttgagagggctaatttatatgtaatattcgaaagtgccaagctaattagcgattcaggcgcacattggggcctgaattaagccattttccctttgatcggtacaaaattggccgaaaaagagatagccattttctgaggcccgaaggaaaatttgagagggctaatttatatgtaatattcgaaagtgccaagctaattagcgattcaggcgcacattggggcctgaattaagccattttccctttgatcggtacaaaattggccgaaaaagagatagccattttctgaggcccgaaggaaaatttgagagggctaatttatatgtaatattcgaaagtgccaagctaattagcgattcaggcgcacattggggcctgaattaagccattttccctttgatcggtacaaaattggccgaaaaagagatagccattttctgaggcccgaaggaaaatttcagagggctaatttatatgtaatattcgaaagtgccaagctaattagcgattcaggcgcacattggggcctgaattaagccattttccctttgatcggtacaaaattggccgaaaaagagatagccattttctgaggcccgaaggaaaatttgagagggctaatttatatgtaatattcgaaagtgccaagctaattagcgattcaggcgcacattggggcctgaattaagccattttccctttgatcggtacaaaattggccgaaaaagagatagctatattctgaggcccgaaggaaaatttgagagggctaatttaggggggatattcgaaagtgccaagctaattagcgattcagg

SEQ ID NO: 40493 - DNA, 938 bp, Heterodera glycines
  unsure (1)..(938): unsure at all n locations
ctcagaattttgaaaattttttataaaaacntgatgaccactcttatgtgataaaacaggttaattcttttcctttcagtatccctgcaaagtttggggcgcttctgatcagtttctgaaaaaaaagttaagcctaaactttttggcctgtttaaaaaggaattaaaaatttttaaaaattttattcatctccctttttgatagaaaaagcatcagagtgcctaaactaacatgtaaataaaatttggtgcgtttcagaaccctttctgaaaaaatatttaagaattaattttgcaaaaaataaataaaaacgaaagactcagattttcgaaaatttttttgagccagctagctcggcgctcatttcagtgtaagttagtcctttaccggggagtatccctgcaaagtttggtacgcttctgctcaattagcaaaaaatatgagtgatcgaattttcactaaaaaagttaagcctacattttttggcatatttaaaaagcaattaaaaaatttttaaaatttaataattttcctgcaccgaaggtactcactcggcctcttcgcggcctcgtggtgggccttcgcccccccccctcccacgcccttcagagcacgacaaatatttcaacaaaaattttgaaaaattgactagagcaatcgaacgctaacggacgacctaatggaaaaaaatccccgaaggagagaatttaattaaatccattccttcgggggaccgtgccgggtgccgcggggtaagcagtgctggttcgtttcatcacggcaccgaaccttttggctagtcagcaatcgttgcttaacttgccagatcggacgggtgcgcatgattccactggtcccagcaccccccccaaagcaaaaacaatataaccaaaatataaggaaaaattttttcctcccacttccctttttgatactaa

SEQ ID NO: 40494 - DNA, 1582 bp, Heterodera glycines
ccttggggggagagggtgaaggggaagaagacaaagcagtagtagaaattggagaagttcgggaagaagaagagacactccatggagatggtcctcagtggtaatgtccgccacttttgcccgcctcgacgaaatatcctggcggagtgcgcggctccggacagtggtcgcagctgcccttctcgccgtcttggccggggggtccggaaggtcccttcggtgtttggttcggtgagaaacgcgtgaaaacacttacagttcctccgggacgcccttctcgaccaggtcgaccagcatctccagggggtccgggaggaccttcgaaagattgtccgtcgggcccgggctgacccttcggtctgaaaaagaacataaatggtcaaccgtaagacacaaacccttgttctccgggaggtccagaaggcccaggcggtccttaagatggcattaaaatgataataatggacaattccttgccttgcggtccagggacgggaatgagtcgtccgggctgtccgggggctccacgcggcccctcgcggcctgggcgtccgacaggaccgggctgaccctgcattccctgctctcccggtactccgtctttgggcggctctcctgggcttcccttcggtcccgggggtcctttcggtccggcgggtccttggggaccggcgggcccgggcgggcaaatctgtcaattagtcacacttatcacagcacgcactttctgcccgccaatgcttacgatgcatggctcttcaagaggtgctgggatggactgcgcgtccctcccgggggctccgtcctttccgttgtgtccatcgtctccatccgccccggcggctccctccggcccaattggtccgggagggccctggtgacaagtgcctaagtccaacgtaaagaagagatacacatttttttaactcacaacagacgggcgacacttcgggagcttgtaccggctgatatccggcggctccttgcccatattgtccacctgccggctgagatgggccagcagaaaccgcggcagaagggccagcgggcacagccccgacgggtgccgaagcagaagacggagcacctcccgacggagcaccgccggatggcccacctccttaggggagcgaaggtgacaaatggaaaagaaacccaaaaaagcccaatgaaggctcatcagtcgagtgtttacccgcagcgtaagcatcggcgccgctctcgggcacccattggccgaacaaccagccccttttgatgcggttcacatgtcccttgccaatttggagggcggtcatctccagccacatgtcacgagcacgggcctttaaaaagtgcgagtggtctttgaacacttcgaaaagggcactttgcagtaatccgtctcaaccatcagatgactttggaaggactggacgtaattgtaaagcattggcaaagtaacgacggaagcaatcacagcaaccttaaaagagaatttggtaaaaattgtccgatttcgtcactttttcgcaccgtcgaaacaacgaccgcaacgaaagcgatagggcgcatctgacggtgctcatccgtctctttcatg

SEQ ID NO: 40495 - DNA, 690 bp, Heterodera glycines
accatgacgaaaacatgtcgaataatttttggacttttttggcacaatttggctgtcttaaaacagcaaaatttaatgaattttttttgcttggataataaagaaccactcacaactcttaaagctattgaatggataataaaaagatttgcactcaatcactcccacctcataaatcatgaccaattcctgatcagcttcaaatgcatcatgcaaattgatcaacactggatggagcacttcgctcattgtactgcgcagtgaaagctctaaagatacatacaattcttaaaaaatgaaaataattttttttctaattttacacgtatttctagaaaattccttttttaaatatctttatcattatgtctccgattcaactgttgaattatattgttattattttgcacgcacgaaatgcttgttagcttaaaatacatttgcagagccttatgcaaccgaaaaaatatttttacaaaaatttttacacagagagacaaaaacttgaaacacaccgtatctcactgcgtacaggatgcctctcctgatcccctcctctgatcggcacaaatttggccgcatacacatgccccgtgcctttctccacacatcggtgtaccatgccaaacgcgccggtgccaatctcctccaacacggagtattgctcgtacactgatgcctttttgattt

SEQ ID NO: 40496 - DNA, 216 bp, Heterodera glycines
cgatgaatgtgatatatgcaaaaatatggggggggggggaacgagttttgtgtccagccaaagcccaagcaaaggcaaaatatgcataaaaagagattatgcgtgagtgtactatcggattgccgacgaccagcagaacagtcagccgaagaatttggggaaaattgggggtgatcagtgggggggggggggaaagaagcagcaacagcagctgat

SEQ ID NO: 40497 - DNA, 1021 bp, Heterodera glycines
aagcggaagaagaagacgaagaagaagcggatgaagaagacgaagaagaagcggatgaagaagacgaagaagaagcggatgaagaagaagaagcggatgaagaagacgtagaagaagcggatgaagaagacgaagaagaagcggatgaagaagacgaagaagaagcgtaatcagcggaagaagaagaagcggatcaaagcaactaaatgtacagaaatgattaattaattatatttgttgaaatgatcaatctcactaattggaatttgatttgatgctcattttatctcagaaatgctttgttgattctttcgttcgaattcatatatatgtatattattttaaattagggttgcgactccgaaatgtcgggattttatgaaagtcgtcatattggattttttgtaggtatttatgcattttttctgtatattttgtgtaaaaaaagaagacgaagaaaaattgtcggcatcagcggaagaagaagaagcggatcaaagcaacggaaattaatttatatttgatgaaatgcccatctcactaattggaatttgatttgatagaattatttttttatatttacttaaaggcaataggcaaaaaataattctcgaatatactcggaaaaaatgaatttcgtgttacataatttattttttaatgccagtacttgctcttttcttgcatttataaaatcccgagactttaagcttggtaatactggaaaacaaaaaagccattagtaatcattgcaatttactgaaagtttcgaggacacatcattttaaaaagttaaataattccttcacaaaattatatcttcgtcaatacataatgattagggttgtaaattatatggattaacatatattttctgcgcatatgctatgaagaaaggggctcaaaaatagcctttttacgttaaaattttttgatttagtgaaggtttttagtctatataaatcaatatttttggggggtttcgggaaataaatccatatttagccatttttgccttttt

SEQ ID NO: 40498 - DNA, 69 bp, Heterodera glycines
gaacgaagaaggacacatgccggccagcctaagtgttccagagcagtagcaagctaccatggctcagcg

SEQ ID NO: 40499 - DNA, 688 bp, Heterodera glycines
ttttgattatttatttttttcttgaaaattttggacattttaacatacttaaatttaaatatatttaaataaaaatggaaatttccgttatattgtaatagcgtccacccggtacatctcattgaaattcctgaaaatttttgtgaaaattaaaaattttgaaaatgcacaggttgaaactttaaaattttcccacgtaaaaaatatactgaactaaaagatcacaggcacttcttgttaagctagtaacaaattaaaaattttattttcataccatataatttaatacccaatttattatctattgaaaaataatttcaccgggttacgatcaagggcatagccagacccttggctttgaggggggctgaagtcaaaaattcgatttttaggggtgtatttttcttttttaagtcgatttttaacggtgtgttttggttttttgaaatcccttattatggggtgtattttacaaaatttttcgccgcttttcgccaaaaaattaatattttttgccattttggcctccatttttcaaaaatatggtaaaatggtggtccggcggtgccgataggcgccgccgggaaaatttttgagtattttaatgcaattttgttaaaaaattgcttaaaatttcaaaaaatttactgaaaattttttactttttgggttccgggggggggggggg

SEQ ID NO: 40500 - DNA, 750 bp, Heterodera glycines
ggcgaataaatttttactcgttcctcaagaaatttatcgtggtctcacctccgtgtctgacacgggtgacctcaatctggatgctgttcgacacgatttgaaccgagccaggggtgagcgaacaaatccctcaacaaaaaatgtccactacaaccaacagctaaggcgctatttgaaaatgaggagggatcttgccgacagaccagccaaagttgagctaaccaaaggcatgagtgtgttgttaaggagaggtggtgaagatgaagatggtgaggttgtggacactacaccccgaccccctgctccacccccaccacctccaccgccagggagacgtcctccgcgtggaccccctcctccaccgacggggagacgccctccctctggaccaactactcctcgtccctccccacccggaagtcctccgcctcgtcctgaacgtccccaaagaccaagtagagcttctcggagaggtggtcgtctggagaaatggaggaaaggtcgatacaatatacagcaacggcagccggtggtgcgggaccttctagcggaagcagcagctgccccattgcccgaaagtgacgatgaagatgactatatgctggagagtggattcgcgctgccagcgccgtcacaatattatggcgatttgcctgtgctacccgacaacgcgaacgaaattgaggagatggacactgctcagcacaggattgccaccagaagaaattacaaaaggatgaggcaaatgat

SEQ ID NO: 40501 - DNA, 1061 bp, Heterodera glycines
gacggcgaactgtatttgaaaaacagcatttcatgaaattctgatcccgttgttttctggtttaccgactccttttgctttttttgttatcgattttagatatttacagaccattaaaatatttatctaatgtattcataagtcggtatttgaaaaaagcgccgaccaaaaatcggtatttattgaaaaatttccagaaaagcacaattttttgtaggtattttgaaaaaaagagcgttgaacataatcaaatatagctctttaaaataaaaataattaaattcaattaaagtagcctctcaactcttcaattaaagtagcctctcaactctttaaaataaaaataattaaattcaattaaagtagcctctcaactctttaaaataaaaataattaaattcaccctgggctcctaatacaactaattcaaaaagcatggtacattttatttattcggttatcattacttgttctatttaatacaattaaaaatcaaattccttataattctgtcaatcgtaataattccgaaaaatacttttttaattaatttaatcttatgcaaatggttctgtattttatcatataaagaatttttgttttagaaaattccttctgttctatcatataaagaaaaaaaatttaaatgttattctaaatttgatatatttattttacaaaatattcttatctcaatatatataaatgcgatttagataatttcacataaaaataaattaaccttaaatcagggtgtgagagaattttttttaatatcattttttaaattttattatttattcagactagttttttttgtcgattaatattaatttttaattcaatacaaatagcaattttgagttgacaattttttaatttatcaaaattcgtatttttagttttagaatataaaagaactatattaatactactttaattatttctatattctcatttttcgaatacttgttagcaaaataattactttttcatgcaatgcattagatttagttgcaaatttatcatggtaaaatattaatatagcttattttaattct

SEQ ID NO: 40502 - DNA, 162 bp, Heterodera glycines
aatacaggaattagtagcgcttttgcgccgcaaaatcacaacttttgcctttattggctcaaagataacggcctggttttgagttaattttatttcaatttaacctagaaataattagttaccggtcggggtcgttttcgcgtggtcgttttttttcgggga

SEQ ID NO: 40503 - DNA, 1069 bp, Heterodera glycines
ttttattattttttaaatttaaatttaattactttttgttaaataaattttataatttaaaattaattatttatttttcatgttttacttcttctaatcactcatccaatcactgttgtacctcttctaatcactgttgtacctcttcaattcactgttgtacctcttctaatcactgttgtacctcttctaatcactgttgtacctcttctaatcactgttgtacctctctaataactgttgtacctcttcaattcactgttgtacctcttctaatcactgttgtacctcttctaatcactgttgtacctcttctaatcactgttgtacctctctaataactgttgtacctcttcaattcactgttgtacctcttctatcactgttgtacctcttctaatcactgttgtacctcttctaatcactgttgtacctcttccatttacttttgtacctcttctgatcactgttgtacctcttctaatcactgttgtacctctctaataactgttgtacctcttctaatcactgttgtacctcttctaatcactgttgtacctcttctaatcacagttttacctcttctaatcactgttgtacctcttctaacaattttgtacctcttctaatgactgttgtaccacttctaatcactgttgtacctcttctaatcacttttctaatcgctgttgtacctcaaaatttaaaaaacgggcgcgaaacgcccgtatgagttcaacgaatttaaaaaacgggcgcgaagcgcccgttcaaggctaacaaaaattgaaaaaccgggcgaagcgcccgactgaggccgcgaagcggcctaacaagctaaaaaactggcgcaaagcgcccgtatgagttcaacggatttaaaaaacgggcgcgaagcgcccgttcaaggccaacaaaaattgaaaaaccggcgcaaagcgccccgactgaggccgctaagcggccttaatagcccaacaaatttataaacgggcgcgaaacgccccgtctgaagccgcgaagcggccttataacccaacaaatttataaaacggggcgaagcgcccgt

SEQ ID NO: 40504 - DNA, 977 bp, Heterodera glycines
cggggcagtccccctgaacctatgcgcccagatttatggggagaccgaatccttccggaatagcttcactatagcctgtactttaattctgcgttggatttttgctccccataattgtttgagtaccccaaacggacacttgaaaaaatcgatttatttttgttttcggggcagtccccccgaaccgatgcgcccagatttatggggagaccgaatccttcgggaatagcttccctatagcctgtactttaattctgcgttggatttttgctccccataattgtttgagtaccccaaacggacacttgaaaaaatcgatttttttgttttcggggcagtccccccgaaccgatgcgcccagatttatggggagaccgaatccttcgggaatagcttccctatagcctgtactttaattctgcgttggatttttactccccataattgtttgagtaccccaaacggacacttgaaaaaatcgatttttttgttttcggggcagtccccccgagccgatgcgcccagatttatggggagaccgaatccttccggaatagcttccctatagcctgtactttaattctgcgttggatttttgctccccataattgtttgagtaccccaaacggacacttgaaaaaatcgatttttttgttttcggggcagtccccccgaaccgatgcgcccagatttatggggagaccgaatccttccggaatagcttccctatagcctgtactttaattctgcgttggatttttgctccccataattgtttgagtaccccaaacggacacttgaaaaaatcgatttttttgttttcggggcagtccccccgaaccgatgcgcccagatttatggggagaccgaatcctttcggaatagcttccctatagcctgtactttaatctgcggtggattttgctcccataaatgtttgagtaccccaaacggacacttgaaaaatcgattttttg

SEQ ID NO: 40505 - DNA, 916 bp, Heterodera glycines
ttttatttattttttgcaaaattaattcttaaatatttctttagaaagggttctgaaacgcaccaaattttatttacatgttattttaggcactctgatgctttttctatcaaaaagggagatgaataaaatttttaaaaatttttaattcctttttaaacaggccaaaaagtttaggcttaactttttttttcagaaactgatcagaagcgcaccaaactttgcagggatactgaaaggaagagaaataacctattttaaatattatctagtcagttcatttaaataatttttatccaaaaaatttttttttgggttttcggggcagtccccctgaaccgatgcgcccagatttatggggagaccgaatccttcgggaatagcttccctatagcctgtactttaattctgcgttggatttttgctccccataaatgtttgagtaccccaaacggacacttgaaaaaatcgatttttttgtttcataaatatttttttcagaaagtgctctaaagcgcaccaaattttatttacaacttaattttagcactctgatgctttagtatcaaaaaggaagatggagaaaaaatgttttaaaaaatttttccttatattttggttatatcgttttgcttttggtggggtgcttggaacagtggaatcatgcgcacccgtccgatctggcaagttaagcaacgattgctgactagccaaaaggttcggtgccgtgatgaaacgaaccagcactgcttaccccgcggcacccggcacggtccccccgaaggaatggatttaattaaattctctcctttcgggattttttttcattaggtcgtccgttagcgttcgattgctctagtcatttttaaaaattttttgttgaatatttgtcgtgctctgaaaggcgggggggggg

SEQ ID NO: 40506 - DNA, 1002 bp, Heterodera glycines
ctctctctctctcgctctctctctctcgctctttctctctttctctctctctctctcatctcttttttttatcatttctcgtgtccttttctgcccatggtccattaaaatgacctttgcccactcaattgctctttgtttgatttcccctttttactttttaatcatttttttaccttttagatggctttcgaaatttcataatattagtctttcgttaatttcttgtcttcatccccctcacttttgaggcgtttttaaattatttctccgcaatgattttttctccgatttttccgatcattttccaatggttttgtctttcgttcgttctgtcggtgcaaagctcaaaggttagttgtcattttggttttgttaaattggcacattttgctcatttatttttttgttttaattgtttttcttctttcccttttctttctttgctcatttgccatcgttttctgaattgcttaaatggtccataaaatgtgagatgacttttctcaattcctctctttttttcctcccttagaatggcacaattacttgcatttggcatttttgggtaaatttgaaattagctatgatttgattgaaaatattatggaggggggggggcgattagcgctaataattcttcctgaattaataaaaatgggagtaatcgctgcccatagatcattaatttgcattgcccgtccaatagttcggttgcgtgaatggccggcccccttggcccatccctcccctttgtgtccttccctttcccccattgtctttttgcccaacatttgcatcgttttccctgctggacatccccgccggcgattcacttctctcacttttgccccgtttataattcccattaaagagaaagcggaagaaaggacatttataaatgaccaccaccaccattcaccctttctttctctttttctcccccccccccagccaaagctctgctgataattgtgcccatctgtgacgacgaacaaaaat

SEQ ID NO: 40507 - DNA, 943 bp, Heterodera glycines
  unsure (1)..(943): unsure at all n locations
gaattatttgtcctttgtttcagaaacgtgcacaattttccgcaccctgcagcaatggaaacagccaacggtcgaagacgacggcagacaggaatattattacaacaattcacgtagaaatgattattactgattggttgtgagtgagtgacatgggattgttacggaaagtttttctttgcccatttctttttatttttaaaattcaaaaacccaccatccggtactttttctccctcgctctcctcctcctcttcttcctcctcctcgtcttcgtcctcctcctcgtcttcttcctcatcttcctcttcactttcctcttcatccaatgagtcatcctcctcctcctccgcttcgtccattgcaatttccgttccttgtacgataccgtcgcttggcaaagggtatgccgaacgtcgaatggttgggtcgggctgttccgacggaaagtcaggaagttcagtgtaaccattgcatttctaaatgttgaaaaaaaactaattaataaaccaaataaatgaatggattctatcagtgtaagctaataatcataattttcgcctggttgagcaggtgagaaagagtgcccaattggaaatgctcagcccgatcagtgaaagaattattcacagcaggcgcaggacgttcttgcaggaaaatgtccaaaggaaattttaactgaaaataaataaaatattttaatttaacatttatatgaganaatttaaactcactgaattttggtctttgtcnaaccaaaaattgcgcagaaaacggcatctgtctcggatgtcataagaacggtcatagcgggcgagttggacacatatttgacgagcagagcacatttttccttcgcggttttcggaaatcatagcccaaattcggacagccaaattttcatgctggagctaaattgggaacgaagttgaaataaagttac

SEQ ID NO: 40508 - DNA, 857 bp, Heterodera glycines
  unsure (1)..(857): unsure at all n locations
ttaaatccggaataagagcaaatttacaaaaatttaattaaaataaaataacaatcctatcgaataaaatttaaattgccttaacaaaaagtaaaatataaaaacaattgattactacatacttaatttccagctacacgtaaaatattcatcatccaaaattcaaataaacttattcggtataacacagggttgccagatgaagattttcaaaatcatcattttcaaataaaaaatcatcatttggggtcaaaaatcagcatttttgaaagtttaaagatcaataaacaaaatgtttttgcggcgcgttttttccaaaaaacctatggggaacaagagggggtgggttcggcggtgccggtaggcgccgccggggaaatttttgagaatttgagtgtaatttgctaaaagattttcactaaaaacgacaattttttgcgtttgagcctttttatgaaaaataagtttcgggggctcggcggtgcaataggcgcctcagggtgaaaaatggaaattttgaccattttaaacaaattttataaaaagtcacacacagaaaaatcaacatattgccataaatttgaaaatttgggagttttggtagcagttttacataaaatggacaaaggatttttccaaaaaatcagcataaatcatcaaatttctcaaaaatgatcaaaaatcagcaaatcatcatctcaaaaataacatcatcattgacccctcgaaatcattaaaatgatgataaatcatcacatctggcaaccctgatttaacanttcattgggggtgtgagccggccaatccaggcatagaaagcacactttccgagttgngcacattttgcacatggacac

SEQ ID NO: 40509 - DNA, 277 bp, Heterodera glycines
cggtgtcatctatgttactagatcggggatcgatccccgggcggccgctcgagcaggacctgcagaagctagcttgatggggatcagattgtcgtttccgccttcagtttaaactatcaagagaggagcacgaaggggaggggagcggcgcgtagcgggggaggtgggtggtggaagaagaaaagggtggggggagtatgagtatgatggtcaatatggagaaaaagaaagagtaattaccaattttttttcaattcaaaaatgtagatgtccgcag

SEQ ID NO: 40510 - DNA, 1332 bp, Heterodera glycines
ttttatactcagaaaaactttcaattacgtaaaaaaatattctttatttaagcgtccaagtcagtgacactatcctcagtttcttaggccacaaattttaagaatgtttgctctattctttatttaagcgtgcgtcaaagtcagtgactaccctcagtttcttaggccatcaatttttttcttgcttcgtaaaaatttcaatgagaaaacctggaatttaatttaagagtatattcaagataattttttgtcttttaccttttgtccataatttagttatataaaaattcggtagacttagggctttcatttgatgccatgaatgttggcactgacccagggaaaaaaaaagttagggccaaagaaactgaggatgctcattgatattggacgcgtaaactagaataaagccaggaatatttacctaaaattagtgcccggattcttagttttttagtatttattttttctgcggcttaaattcaatgagaaaagcacgaaaaaaaacctttttagcgcgaaaattcttcgttttaaggctcctctatacgtccctaggaatccctatttttgaattgtcgcccctaaaatagggggtacctattttggcacttttggcatatcgcccttattttgacccctatttcggcatttttgaaaaatttcttaccaaaaatgcaattaaaaaatgcaccataaggaccgacttcttgaaaatttttcaaaaattgcaaaaatagaaataatttttaagattttggacaaaaaaaaattaaaaactttctctttgaatatagacttcaaatgaaaaataagctgaaaaatcgaactttcattaagcaaatttttttttgctttttattcaaaaaaatgaaatttaattttttgtgaataaaatttgttgaataagttatttacactgggtcttaatttatttttcattgaaaaaaagcacaaatttttttaaaattttccccaatattttaccattttccgcactatttagggggttttttcgccttctatttaggcctccaaaattggggttttccgcaccctaaaaatccaggcccttagggggaatgggattttggcaaggatttttttggaaaaaatacgaaaaaattttggctcagtttccccaattttttgcccaaaaaaatttttgtaacccaaaggaatttttttcaaaaaggggaatttttttatttttttattaaaaaaatttttttttatttcccccttatttcccccccttttaaaaatttttttttttttttttttttattttttttttttttttttcccccccttttttttttattttttttt

SEQ ID NO: 40511 - DNA, 1259 bp, Heterodera glycines
atccctgtatacaaccgtcctgaaatgtccgtttcgtttcggttagtctcgtttaattttaataatttgcctgctgtgcatgtgttccaagccgagaatgacttcggacccgtaaaacatcacttccgtctcattgaatacgccgtgctgggagagatggtagtgcaaatcgccgccgttcatcaaatccaaaatgaagcacaatttgtcgggagtctgataaaatataattttgttttgctgtgcatttggcgttttgtttgcctgaaatgcgtatgtcatgcagacgatgaacggacagtcctgccccgtgctgaccaaactcagcattatccctgcatttggtcggaggcaattagtgacaaattttgcgccgattggcactcactttcgtttagagcgagtgtttcccctgtaaatgttctaataaatgtttggtttgtgctcgtcacttgccctgcttgagtttgatccgctttttgtccaggcatttcatcgcgtacattttgcccgtgtccgcctttcggcagccgtacacttcgccgaaccctccgcgtccaattattcgatgaactaaatgaaggccaaatatttgttgttttttttctcctttttgtgctactaccggaaaagtcgctcatcgccaattgcatgttcagttccaaattctgaaaatatgctattattccttccaaattcaaaattatgttttttgaatagggattgggtcaaaaatgaatatttaagaattttgcttttcccattgtcaaatggccgagtgttcgtcccctttacgctttgctcttcgttccgaccttccattggcaataccgcgtgaatttgtcactgtccaagaattttgggaacacgtcctccttcaactggtcacagatttccgtcacatatggctaaatttaagttgccattctcaaaatgccattgaagttggacctctaacctgaaacaagtccggcgccacattgtttttcatcagattcctttgtacgtgttgcaacgaagcttttgtgtaattctgaaaatagggagaagaaaacggaattaccttaatggtaatttggacacttttcggcactcacatgcgaatgtgctagcatttcgacctgaaaatggcaaaagtttattcccacggtccgatgccctcagcccaccattatgtgatggtcgtaaatttcgcgtgctttggtcagccgttcctccggcgtttctaacttttcgtattctttgatctataaaattaa

SEQ ID NO: 40512 - DNA, 1421 bp, Heterodera glycines
  unsure (1)..(1421): unsure at all n locations
ctggaaaatttttttcatatttaatcagaaaaaccaaacaatacaaataaattctcctgatttttctttattttttaagctttatccactaacattgtccaaccctgaagcgagagcgcgccgtgagtttcactgccgaaaaccttgagaaatttttgatttgaaattgcaaaaacaaccagtaaaattatgaggaataaaattttttaaattaatttacacccctaattttcaagttttttttttgtgcatattgtgcatattttacgatttttgtgcatattttggcccttttcgtgcgtattttgcagccctgttaattagacttatgtataatcatcatccggtttggggttcagaattggtcaaaaataaggtcggattcgtgttcagcacaataaaatggccctgtaaaaatttttccatgattcaaacaaaaaaaaaacgggaccagtaaactacatgattggggaaaattaaatacttgacttctcaatagattcactagctcattcgaacgctctttttaagctctacaacatctgtgtatgagttttttacgcccattaaatttcttaaaatttttggaaaaattcaagtacttgataaaaagtcatagacaaaatcaatgattttcaaaatctgagttcagattcgtgatcagcgtatttttctaccccagaaaaaaggctttttaaaattttagtattttttcccatcgggaccacaattctgcacctttgccttaattttctatgattttttaaaatttagttattaatccctaggggtcatatgagttggggtgtgcgttcgagcccgcttggctgcagtttatttttttatgcttattggtgaaaaatcatagacaaaattaaggttcttgcaaaatcagagctcagattcgtgatctgcatatttttacccccaaattcattgggaaaaaattttttacagagattaaaaattaaaaaaatcaagtaatgtacttgataaaaagtnctagggttgccaccccgaccccgccccgaaccccgacattttaggccatttttcggggttaaccccgaccccgacgcttccaaccccgactcggggtcggggctaaatatacacccctaagaatggcattttcgtgagagaaaaggcaaaaaaattacaaaaatttgaattttttttaaccattttgccaaatttttataacctaaaaatattgctcaaaatcgaattataatttttgggcaaaatctgttacatatctatccaaattttcaaaaaaaaaatttcccccggcggcgcctatcggcaccgccggacccctttctcctaacagtctttataataagtgcgttgcgaaaaaaagatgttgaatactaaaaatgtttcgggaaccatgtgccggcggcgtcagtaagcgccgc

SEQ ID NO: 40513 - DNA, 779 bp, Heterodera glycines
gctgcaggtctttgaaatctgcatgaagttgtaaatgtttatttaatcttttaaattgaaagaattatcaaaaagcattaaaaaataacttttaattaattaaaaaataaattacctatttttaaagtaaaaatttatcgttagagcattgggaggaactcaatatggaatatgaattcaaaattctctgcattaaaaaaatttacaatagaaatcaataaaatttattaaatctgaataaaataaaaattacatatttaattttaaggaacatttaatttataaaataatccaagaaagtacctaactttaaaaaaataaaaggtttaaataaacaccttttcataaagtacaagtatactattaactctcaaaaaatataaaaagtatataaatgtagaaggggatcaatctatcataaaatatgttaaaacaaatttaaattctaactacctttaataataaaaaaaacaatacttaatgtaatgaaattaaattaatttggtgtgaaattgacttaaatggtattgattttataaacaataaaatatgtatcaaagtttttaaactttgggatcatttttcaaggggtattaaaatgcgtgacataattaatgccgaccaatctgcttttgaatttgaattatacaaatagagagatttaataaaattaatttggatataacattaactctgatttcttatagtgtaataattaatggatcctgatgcagacataaattccaatacacaagaaagtataaataaaactttttttt

SEQ ID NO: 40514 - DNA, 1179 bp, Heterodera glycines
  unsure (1)..(1179): unsure at all n locations
ctatataaatttttcaaaaaatgattcatctttttatgggtagcgcatatgtctctagctttatagaaacggtcnccgaatctgcgaggaactactttttagagaatttctatagattattattttgcatgaatccttcgcttaaattcccatttatcttataaagtcagattaaattaattacccngatttgttttagaattggtccaaacacgcttgctaatagcttttcttttcgaaaagagaggcgaggaaaaataaaggttgcatccaaatgtaatttttttttacattgaagcatttggatggcttgctgtttacagttggctaagtcttctttgcaagaagtagcacaacttttgtttgggccaacgaccccaaaccattcgaatagcaatcgattgggctgactagactgcatatttgcaggaatagcaatggcaggtctatcttaaaggcctgacgagttatgtttcgacaaacatcctgtacaccataaatcgattagcaaatttagccgaactatataaatttttcaaaaaatgattcatcttttttatggttagcgcatatgtctctagctttatagaaacggtccccgaatctgcgaggaactactttttagagaatttctatagattattattttgcatgaatccttcgcttaaattcccatttatcttataaagtcagattaaattaattaccccgatttgttttagaattggtccaaacacgcttgctaatagcttttcttttcgaaaagagaggcgaggaaaaataaaggttgcatccaaatgtaatttttttttacattgaagcatttggatggcttgctgtttacagttggcttagtcttctttgcaagaagcagcacaacttttgtttgggccaacgaccccaaaccattcgaatagcaatcgattgggctgactagactgcatatttgcaggaatagcaatggcaggtctatcttaaaggcctgacgagttatgtttcgacaaacatcctgtacaccataaatcgatttgcaaatttagtcgaactatataaatttttcaaaaaatgattcatcttttttatggttagcgcatatgtctctagctttatagaaacggtccccgaatctgcgaggaactactttttagagaatttctatagattattattctgcatgaa

SEQ ID NO: 40515 - DNA, 998 bp, Heterodera glycines
  unsure (1)..(998): unsure at all n locations
tttttctagcgacgaatttttccgtttttcaaaataaagaattttcgagctaaaaatatgctcacaaccttcttggtcattcatccttttcttgccactttttttcattgctgcttccaaaattttgtttaattggtcttggaaaaaacggtttttctgcattattttcgatttgttaatttcttggtaaaaggcgtaaaagtccgatatgtgttgtttcgagtcaattttggacctcttcgaatttcgcaatcgatggtacgtttcacggaagagactgaaaaatcttaattaattaattagctataatcgataatcttagtgggttaattcgacaaataaaagagacagataatcagagcgtgaccgggaaatgggtagtgaaaaaatagtcaatagaaaatgcgtcatagaatcagaatttcttgaaaaacgagatacggtagtattatttttggagataataagcgtgggttggtatgtaaacattctaattatttttagagatttgggtaaattttcaaagtgaaaaaattcagaaccaaaatttttatacaatttttaccttttataatacaatattaatactacagtacattattttaaaaatgccatattactgatgcttttccattgacgcattttcggtgagccaatcaaagattaatggattttttaaagtaaaacaaaacgttggaaaattctattgaacagaaattgttgttattcagaaaaaaattccattttaggagcgtatttttttttaattttataattttcctgataaatcattttccatttattgcaaagttttactaaggctagagacaggatttttaggtgctaaaaaacttgaattttgctcaagttgattttgcccattcgcttgngagttatcagtagggcgtccattatatggaaatccatatttttttttggactgtggggggcctgagacgtacgaaaacatgtttttagcttggtttgagcttctagga

SEQ ID NO: 40516 - DNA, 1360 bp, Heterodera glycines
  unsure (1)..(1360): unsure at all n locations
aaaattttcaaaaaaccattctttgggtattttctcgattattaataggtaaaaagataactttctgaaaaaattcaaaatgtatgccaaaaatgagtcttttttggggcaaaaattgaatatttatgcaatttgtgcccaagttgcagtacgattttattcagtatgctaaaggaatgcactaaatttcaagaaaataattttaaatcattccaactatagtttgacaaaatgttgaaaaaggtaatcaatcgccaaaagaaattaatcattaaatttcaaattcattatgatcgataagattggaattcgaattttagagagaatgatcaaaagttattttttgaataagagagttttgattaatgatttttggaaatttttctttttaactcaaaaaaattttaaaaaaagtcatttaagtaaataggccaatcaaaaatgatgaaattaatccggcgattcatgttcttcgatttcttaaaggagcctttctgggtatttgaagacaggcccaaaattggcctcaattttgtcaccaggccaaaacaacgaaacacaagggaacagttcgggtgaagaagcattggcagaaatattgacagaacctgtgtaaaaatcaaaattaaaatttttgtgaaaaacaaataaaaactttctcttaaaattttgatttaaaaaattgtaatccccaaaaattgttattcaaatttaatcatattgagaatgaacgtaacaaataaacagttaggttacatggatacggtatttgggcaaaaaccaggtccgggtatcgccaggcccaaaaaagccgggttcgagtccaagtttttaaaccgagcccgggtatccggttgaaattgtatattcgagtttaatcatattgagtacgataatgcgtacaaataaaaagagcgttatgattggacggtgttaaaaggctttaataaagcggagacataaagaaaggcccacaaaaagaaaggcgaattgaattttaattaaaaaaatattttatgtaattaaggtccgtgtaaattaattacactaattagaattactctaaataggccttgaaaattattttctgtgtcgttgttttatttatttatttttatattttaaattacttttattgcactttcccccattccattcacatacccaagtgttttccattcagtgtgtaagtgattcggccgccaactcggttaacaccacagccaacaatgtcaccgacatccaacgagggtgtgccatcaatggcactgctggcaccatcgcgggtgctgccagctgccgatgtgctctgcccactcgtgccangcgaaaataggtcgtcataattaagtgcttaaat

SEQ ID NO: 40517 - DNA, 795 bp, Heterodera glycines
ttatatgcacataattcacgaagtttaaaaagctatttttttttactgaaatagcattttttgtaaaatatgaaattaaattgaaaaaatttgtgcctaatcgaaacctttcgaaactctttatgccaaatttgcaaaaaaattgaatggtaagaaaaaaaattttatttgattttttgtttgatttttctgatttttggatttatggataatttttaaaattcattttccatccaaaatcgattcgtttccgatggaatggccaactattggccgaccattcttttttccgatggttttattatgcaaaacaatcacagaattggattttccatctcatttattaaattggagttgaaaaattaaacaaaaatttgtataaattatgatcatttaattgtgcaattataattgctttaatttttgaaagctcagtgagacccgaataaatagatgaaaaatcatagaaaaaataaagaaatgaaaatctgagatcggattcatgatcagcgaactcatttacccctagaaacatgtttttaatattaaataaaaatttttggatcaaaataatttggtggatttttgcgatacttctcagacgacaaatttgaggggcggtgttgagtagaccgcgcgggattttgcgggatcccaatccgcaatttgcgggaatttgcgtgatttatacctgtgggatcacgtcccgcaaaattttgagttcttaatcccgcagcgggatccgcaaatttgattttttgtgcgggattttaatgattttttttgaaaattttt

SEQ ID NO: 40518 - DNA, 1398 bp, Heterodera glycines
tttatctctctccctcccgttctctctcctcactatgggtcaagcacactgtgcagagaaaagcctagtactatctcgtcgttttctttttctttgtaatttctctcactttggcgtactatctattcattttaattatgtaaaaaacaacattcacttcgctctatagaacttttttttcgccttacggattttctttaaattttgcaaatcgatagacaaaaaaatactgaacatttttaacgctcgaagttaatttttttacgctccgatccaaaattttaactcaaacaaaattaataatttcttctctccttttggcgtactattttcatgtctctaacacatgaaaaaacaccaaattcgaaaattctaataattttggttataagggtacaaaatcactttgaacatttagaatcaatagaaaaaagaataaatttagcatttttggtgaaaacagcagtttaggacttgagttataacgtgataaaaatttgaaagtatcacaacttttttctgagatgtcaaattgcttagcattcgcttagaaaaagattctccttttcaaaaactttttttagataccaaatttgttcagtttagttgggaatgaagcgagttatggcagaacaacaaaataaaaaatacgaaaaaggcattttccagtataaattttgaaatagcgcgcaaaaatttacgccaaatgcgctatttggcgttatgagcaattttgtctaacactgggcttgacccatagtgcatatacacacataggtattattcgaaaataaattggcttaatataaatattatatattttgttaaacaattcaaattcaaaaaacgaataaaaaattggaggacaaaatttaagagcaagcatatttatgtagcaggattggccgacatttgcgccaaaaaatgcaaattttcagtttgtatttacaattatcatttatcattggaattttccaatcacatttacaattgtaatttaattaccgtaaactgagcattttcaattcgtgtttacaattattatcatttaatcattggatcattttccaattacatttacaattgtaatttaattaccgtaaactgagcattttcaattcgtgtttacaattattatcatttatcattggaattttccaatcacatttacaattgtaatttaattaccgtaaactgagcattttcaattcgtgtttacaattattatcatttaatcattggatcattttccaattacatttacaattgtaatttaattaccgaaaaatgagcattttcaattcgtatttacaattattatcatttaatcattggatcattttccaattacatttacaattgtaatttaattaccgtaaactgagcattttcaattcg

SEQ ID NO: 40519 - DNA, 1424 bp, Heterodera glycines
gggcgcttcgcgcctgttttttagcttgttaggccgcttcgcggccttggacgggcgcttagcgcccgttatttaaattttgaggtacaaaagtgatgagaagaggtgcaacagtgattagaagaggtgcaacagtgattagaagaggtgcaacagtgattagaagaggtgcaacagtgattagaagaggtgcaacagtgattagaagaggtgcaacagtgattagaagaggtgcaacagtgattagaagaggtgcaacagtgattagaagaggtgcaacagtgattagaagaggtgcaacagtgattagaagaggtgcaacagtgattagaagaggtgcaacagtgattagaagaggtactaaagtgattaaaagaggtacaaaagttattagaagaggtaaaaaatgataaaagaggtacaatgattagaagaggtgcaacagtgattagaagaggtgcaacagtgattagaagaggtgaaacagtgattagaaggggtataagtgattgaatgtggtacaaaaatgattagaagaggtacaaaaattgaatgcaatttattataaattttaaaaaataaatgaattattccttttattaattaaaaagataattttgaaatgtacaagaattgaatatttaaattaatatgaaattaatttttataaattcaattaaaaaaaatatgaaattctttattaaaagataattattattttttacataaattcttttattattaatttacaacaaatctttaaatataaattgatacaacagtgattagaagaggtacaacagtgattagtaaattcattaaattaaaacgaaaatattttttaacaaatttaattaaaaaaatacatgaaattctatcaattaaaaaaataattaatttaaacttataaaatttatttatcaataaaaaattaaattaaatataattatttatttattaactcaacaaaatattttaaattaattaaaatcattgaaaataaaaccaaacatttaaatttattaaaagtaatgaaaattaacccaaaaaatacaaagaaaaataatttacaccggccggattcgaacctgccgcccccccccccccagaagtgtccgatccccatcccgggatttaggctaacgagtcaagtaaatctgatcacgtttcgtgatcagcggcccgataacccctaaagacgatgtttttggaagatttttgtcgaaaaaattttttcgcacgaaaaccgtgtgcgcccccacattggtcccgaatctcgaaatcacttttatttttataaaaattcttaaaagaagtgataaaaatgccgaataaaatttatataagagagcgaaaaactgcggatttttggagtattttatttttccgagaatatcttttcagaaccgagttatgaatttttt

SEQ ID NO: 40520 - DNA, 1267 bp, Heterodera glycines
tgcgatgcggtgcccagtgtcgatgttcctccagccggtgccgctgcggtcttctgcgatgcggtgcccagtgtcgatgttcctccagccggtgccgctgcggtcttctgcgatgcggtgcccagtgtcgatgttcctccagccggtgccgctgcggtcttctgcgatgcggtgcccagtgccgatgctcctccagccggtgccgctgcggtcttctgcgatgcggtgcccagtgccgatgctcctccagccggtgccgctgcggtcttctgcgctgcggtgcccagtgtcgatgttcctccagccggtgccgctgcggtcttctgcgatgcggtgcccagtgccgatgctcctccagccggtgccgctgcggtcttctgcgctgcggtgcccagtgccgatgttcctccagccggtgccgctgcggtcttctgcgatgcggtgcccagtgccgatgctcctccagccggtgccgctgcggtcttctgcgctgcggtgcccagtgccgatgttcctccagccggtgccgctgcggtcttctgcgctgcggtgcccagtgccgatgttcctccagccggtgccgcttaatgctgcggcagtggacagaaggtagcgatgcttctgtcgtggctgattttttaaaatcatttcccttttcattttcagaacacggaagagccgcaaatgccggccggaccggaaggggcggaggccagcgccaaaccgacgggacagagcgcagcacctggtggaacttccgcggtgggacagccggcacggtgatgactttgagcacaacatcgcagaaaattttccgactttttcactaattttcggcttggcgacattttgactcaaaataattttttttttttcgtgatcagtagggatgggatttaactcgacgagaaatgcacgaaaaacacattttttgttcggaaaaccttcgttttcacgccactatccgaccctagaaatccctattttggatgttcgcccctaaaaatccctattttgagtgttcgaccctaaaataagtttttatccctattttggcgtttcgcccttattttcgccctatttcgcgatttttgggaaatttattaacaaaaatgcaataaaaacgaaaaatacacccctaaaaatcgacaaaaaaatttcggaaaaatatacccctaagaatcgacctaaaaattttcaaaaaatacactcctaagaatcgacccaaaaaatttcgaaaaatacacccctgagaatcgacccttaa

SEQ ID NO: 40521 - DNA, 556 bp, Heterodera glycines
taagcggagcggagcagcaccaggacgaccagcggaaagaaaggtgagcaaattgcgcacggaggacggcggcgaattggaaatgcattttaattcatttatttatgtatttattggtcgggattaagcataaagggaaaagaaaaagcggaggaaaagccgacgaggacagctgaaccaacactttgacagcaacaattttgttggccaaaaaataggagaataaatgggaaaattattccatgcatttgtttatgggacgaaaacccatggcgagaaatttatgtgcaagatggaagagatttttggcatttatttgattgttatcagtgatcactgttcaaatcacattgattctgtcgccaaattttctatgccatggggcattttgcatgtgccaagggcatcggcttcaaggggtcaccgcccactctcaactcaatggcgcacgcattcctcgggggacaataaatccaacaaagtgtcattttttggggaagggatttgtcccaaaaatgtgtccccattcgaaggcacagataaaatctttaacata

SEQ ID NO: 40522 - DNA, 1035 bp, Heterodera glycines
cagaaaaatgtctatctcttttaggacaattttctatctcgtaaccccgatgcttatccgtccggagagcctcttcaaaatttttccattaccataagagctgcggaaattgtgaattacccctcagaaaaatggctatctctttttaggacaattttctatctcgtaaccccgatgctaatccgttccggagagcctcttcaaaattttttccattaccgtaagagctgcggaaattgtgaattaattctcagaaaaatggctatctctttttaggacaattttctatctcgtaaccccgatgctaatccgttccggagagcctcttcaaaattttttccttaccctaagagctgcggaaattgtgaattaattctcagaaaaatggctatctctttttaggacaattttctatctcgtaaccccgatgctaatccgttccggagagcctcttcaaaattttttccattaccgtaagagctgcggaaattgtgaattaattctcagaaaaatggctatctctttttaagacaattttctatctcgtaaccccgatgctaaatggttatctctttttaggacaattttctatctaccccgatgctaatccgttccggagagcctcttcaaaattttttccattaccataagagctgcggaaattgtgaattaattctcagaaaaatggctatctctttttaagacaattttctatctcgtaaccccgatgctaatccgttccggagagcctcttcaaaattttttccattaccctaagagctgcggaaattgtgaattaattctcagaaaaatggttatctcattttaggacaattttctatctcgtaaccccgatgctaatccgttccggagagcctcttcaaaattttttccattaccctaagagctgcggaaattgtgaattaattctcagaaaaatggctatctctttttaggacaattttctatctcgtaaccccgatgctaatccgttccggagagcctcttcaaaattttttcccattcccataagag

SEQ ID NO: 40523 - DNA, 1641 bp, Heterodera glycines
  unsure (1)..(1641): unsure at all n locations
ctcttaactttaatgaccatttgtcatgggttcggatcctctcgacagatgatgaattattttgaatttttttcaatgtattattccacttaacatatttttattctgttattttaatttattttatgatgctatttgatagcaaattgtttgctgatcatttttaaaagaagtttatggctctatcatttgttttaagttttttatgaatttttaaaaattttgtcattttcatcgattttgcagaacgttgatcacttttttctgatcagtttgggggtcagggccaaaaattcaaaaattaacaatagcaaatcgactatgctctacacgatagaaatggttttaaagtgatctgggtggttacagttcggaatgttcacttgtcagcacctctatgcatacatttgatgccaactgacatttgccagaataggtatattaattttatttatgctaaatagtaccaataattaaacgaaaattataataaagaaaatattattttaagagtatggagttggtcggcgatttgactgtatgcaaagcataagccttaaaagccaagatattacatattcttttaaatattattattattactatattgcaaattttctttttttttaatgtatcagcagatgtcatggtaaccttgtctgcgttaattatgaaaatatgcgtatttatttctttataactttactgtagttgataacgtttcaaaatttaatcatggggtggtataattactggttcccttgtcgcttcgcaataaaggtccaatgatattttttcaattcgcaaccctggctcttttttcaattactttatgaattcgatctttaaaatattctttaaatttcttttacaccttcactattttaataatgaatctcgtatgggtgtggagttggtcggcgatttttacagtatgtcaaacataagctgaattttatgatgcattcttgaatcgcaaatgttttttagattagccagaaagttaagttttataataatttagttttttagtagtttttttttattgtttattaatttcttttcttcatagaaaataagatgttaaatacatcatattgtataaataataattgaatattcttatcattgaccatttttattatattctatgagtgattgattgttcattactaaaataaagcagtaaagcgcaccagactcttattccttcggtggcaacactttcatcaatgacgagtaaatcaaatcttcccaaagtaattgcatttgaaaataagaattaattttataatttttctcacttacattgagtatttttctattcgtttttataatatacatttttagagttaacattttttcacatcatttcattccatttttttgttctgtaattaataatactctatttttattacacatcagttcttcttttccaatcttatatacctaagaaacataaaaatttgtatataaattcagaataatagtttaatagcaaacacattcttttgattctttattcgtgaatttattaaggtattgaatttacattcaatcaaggtgttgcatttaagctttctctgtttatccagaacataggcagtcatatttcccantaattttcggaggttttca

SEQ ID NO: 40524 - DNA, 1032 bp, Heterodera glycines
tataatttaaattaaaaaagtgcatttgtgtgcttcttcctcaattattccttggccctcggcgctttccataagctcttttgcgaacaaaatattatactgagttgtccgcaatatgaattcatcttcaatgtcatccaactttgccaacactgacaaaaaattatgcaatttttaattcccctcactctccacaccttgtccaaatttaggattggtctggagctcatcagctatcgaagctgggacgctttcgcccaatagcgcagacagtacagcgtcgactgttgccactgtcccaaatctttcaatgtactctgtacagtcggtgtcctccgacaaacaccatgagttgcgaccgcgaaagcctataattgcgagaaaaaatgagagaagaaaatggattggttaatggaaaaagaaaaagaaaatttaaagtgaaatagcaagagaggtagcgaagctaaactgtgttaactcggcccacaccctcaaattattccgttccaaaagtggcgaagctaaaccaggttaactcggcacacgtttggaattttacaataaattttcaatttccttatccatccgtccaccttttcattcacacattttttctttcaatttcatcatcaaactcaccgagccactccaagaaatagcatttcctccccgatgcatgagtgaattgcgccaaaacgctcttgacctggtactggcgagtttttgggttcggcagtacaccgggcggaacattggggcaatcggcattcacatttatctaggaagtgaatgtgtgtgtgtgtgtgtgtgtgtgtttggcttgaatttgcaaattttttcttaccggtacgcgtccacttttgttgtaattcttcctctgtcttcgggaggcattggacgaagtcgaagaaagtgcgggcgacgccgtgcgcgagactgtgctgcgcgagccggacgatgaaatgcattgattggccaccgcccgccgcaacaatggttccccttcaaattaaaggaataattttttggaaa

SEQ ID NO: 40525 - DNA, 1089 bp, Heterodera glycines
aaaagacgagagcgagagttcggtgagaggcgagagtccccaaaaacacgagagttggcgagagtcgagaggacgagaggcgagagtttttcaattttttctgtagccttatttttaatttaaaaaacttcaaaatcgtatattaaattaggggtacgggcctgggtatttgggcaaataccgggtcagggtattgccgggtacagaaagccgggtcagagtcctagtttttaaaccgagtccaagtcatgaaaaatccaaacaaaaatctttaaaattttttcatgaaaattaaaaaatattttcatgaaatatatttattttagaaacaaactttattatttgtccatttttccacctttttttttgcggtgcgttttttaaaacttcggggacagttggggtcgggcggtgccggtaggcgccgccgaaaaaattttgaaaattgtcttcggatttgttaacagattttattcaaaaaatgaccaaaacttgtttttttaattttttgtttttaagtcgctttttttgtggcgctgtttttccaaaaaaaatttttttggaacattgggtgcggggtccggcggtgccgaatctgcaccgccgataggcgccgccggaaaaattctaaaattttgagtgtaatatattaacagaacttgtcaaaaaattatcaaagttttggttaaatttgcagttttaggctgtttaaaaaaagaaaaaataataatttttaaattgaaatattttttattaattaaaatttcaattgaaaataatttaaagaaattattaaaaaaattctgtaccgttggggaattgaaccaaagagaaaaataatgaaaggcagaaggtttagccagcagaccatatttgaattggagctatccaaaaatagagaaaacattaaggaaggaaagaaagagatttaagatttttttttcgcgtaaatttgaaaatttttctggctgctcaaaagtttaatctttaggggtgtattttcaactctcgcctctcgtcacaaaaaacgagaggcgagagacgagaggagagagtaccaaaaatggcgagagttggcgagaggcgaga

SEQ ID NO: 40526 - DNA, 959 bp, Heterodera glycines
  unsure (1)..(959): unsure at all n locations
ctagagtcaatcatttgaaattttacaaacacnttagaagaataaaatttgaatatttctttgctttttaaaccagactaaaaattcatattgatctttttagctgcaaatcatttttaacaattgtgcaaaatatcccggccgcattaccgatccggtcgatccgtgtccaaaatacacgggtaaatggcgaatctggggcaaaattattgacagaaattggaaagggaattttagttaaataaattgaatgttttatttaaaatatttccttctattgttcttgtagcttgtcatcgaaaaaatgtggatttccatataattccgaatccaacaaataacacaaaagacaagcaaatcaaacaatcagtgtaagcgaatgactcatcaatcataaaccttaattatatcattaaaatatcttcggcatactggacattgtttctttgatggttctctgtttgctatggtcattaactccttcttacagtcaacgcaaatgcatttgtgtccgcagggcacaaaaatgaattttggcttaatttcaaagattaattacagtatattatgtaaaagtcgaacacataaattttcaaaaatcaatccaaaattctccaaaattcatcaaattcgttaaatctaagttgtcttcgcgaaaattgctaaataaagtatgaaaaatcattaaaaaaaatacaaaaagcttaactttattaatttgaaagaaaatccataaattacgtttttgagatacatttttttataaatattttatccagaaaatacccaaaaattatttttctgaagatttttcagtctccttagggttcaaaatggccgctttaataaagagatttgttttaatagatgcttttanaaattgccaaaatatgcacataaaatatacatataaatcgcgaaaacacaaatatgtatggaaatattttttgaagcttcaa

SEQ ID NO: 40527 - DNA, 808 bp, Heterodera glycines
ctccttttccttttcattctcccttttcctccattccttctgtactttttctccaatgttggcactgtccttctcccactctcttttttcttccgccgcttttcctgctttcttcaattgctctcttttcaagacactctctgtctcctcttccttctttttctcttcttcctctctgtttttctcttccccttttcggtttttctctcctcccttcgctctctcttcctccctctgtctcttttcttctctcctcttctcttcttcttgcttcctcttctcatcattcccattaattccgtctccattttgcgtcccaatgatcggctgacggaagaatccgccgccccttccgcctctccccgccagcagcgcaattgcttccgtttcagtcgggcgtataaaagagccgtccggcccaattatcggacccctccctccgcggtttgtgcccgcccctccggcgatattccacgatgtgcgaaatggcactgctcgcgcaccattcacgcgccgtggtaaaacaaattgtcctgctcggaatgacaccagcggcacaaattgcgacggctgccgacccccgacaagcggcgcacttttcttttcttcggcagcgctttcttcctgctgttgttgttgttgtgtttcgagtactgcttgcggcggtgggggagcatttgccaaaacggcggaatggacggaatcggacggagagcgaagttcggaattggcaatactcttttcctcttcagcacccaaagcaaaggaagcaaatgacaaaattatgcccaagtgaatggaatgaaaa

SEQ ID NO: 40528 - DNA, 1571 bp, Heterodera glycines
gggaggcgatgtacaataacaataattaattaattaccgtcagagaaaatcataaaccctctaagaatgtcatttttgtctctattttggatttttattaactgtcaaaagaatctacccctaagaattgaaaatttttttctcaaaattgatcgccaaaatttaattttttttattgtaagaattttaggtttaataatttttcttcaaaaaaaaggttataaaataattaataatcatttaaatgaccaaattaaagtttttttttttgaatttctacgagttttgctccttaaatattgtattatataattcaatgtcatggaaatgctaacacttttaaaaatacatttaaaatgaaaacataggaaaagaaaagaaatagagaatgaagaagaaaattattgaatttccggcatcaaaaataaattgccctcagacaaaagttattcgacatggagcgacctctaatgattttgtcattaaataaattctacaaattaaaatgtagaaatgcaacagcagccttctcatatccgagatcgatcgttttcaaaggacataagaggaaaatttgcgaattcaagaaatttcaaaaaaaaattatcaaatgcaataaataaatgtaaatttaaattggcgcccggcggtgcccatagggcaaggctgagaaaaaattgaaaattgataaaattttataagttttttgtagatttttttttttttgattttggaccaatattttttctggtgatttggcgttagtcaaaaatttaaatttaatttaatttatcgagcaaaccaaaggcacattagcgctcttacatggtgccaaaaaaatgaaaacaaataaaaatttgatcaaataaaaatacaaaaaaataaatcaaatgttaaattcacaggtgattaaatatagtgtaaatgtggcacagaaaatgcatactaatagtgaacatatgttctatcgaattaaaacaaattttgaaatttggtattgatttcgagcgaactttaatataatggtttaaaattggagagcggctttaaattttctaattagcatagtggcaccgagttttttcctttcaatgctccgctatttatacactccgttgtgccgcggatggtcctgttctacccaattatttttatagcgtttttaacgcctcacttatttgttttaattggtatggagaagacctgttgtaatatttatattaattgggattggaaacttccttttgtaatgaattttttcattttttttcgttttgtatttatttaaaaagcgaagttatttcaatttaaaaaaaattaataaaataaattaattacacatttaaaaattgaggcaaaattttgcgtaaattatctcatttttaccaataattggtttccccacaaaatgatgaaatatgattataagtttgtatatatcatgcaaggttttctctgcttctctgatttacagaaaccttaattttaaagtatgtatagatattatatgtttctctaattgtacaaaaatgtaatttttaagtattgcaacgtttctctgcttctctgat

SEQ ID NO: 40529 - DNA, 641 bp, Heterodera glycines
aaaaaaattttgtgtgtcttcataggtcctgcctgctttgatcatccacaccatttttttgtcccttattctacgatatatatattttttttttattctgctgaacagtgtcgtcacgagtacctaccgtatttttctctgattatatgcccgccgcccgtctccattaatctacctatccgtctccaattctctccccccccctttctgctgaggaggttgaaaaataatatacccgggcatataattagagaaaacacggtaagtggttttcgttgttcgccctcccgacgacctcttttttttaaatctacgaaattataaataatactaatgaatatatcatattattacggaccaggccgttttcgtttggatcgagttcttgaactataacttttttcattgtcaaccaaatcccattcgatagccccaagagtccgttattaatcaccaaaattacgaaaaattccgtttagattcaaaaaaatatgaccagaaaacttcaaaaaactggtttaatgacaccaagattgttcgattttatagctcttaaacttggcccaagcgaaaacgaccccgaccctttgctcatcaaaatgtttaatgcgtgggctacccaaaaaaatttataaaaaaaa

SEQ ID NO: 40530 - DNA, 1165 bp, Heterodera glycines
  unsure (1)..(1165): unsure at all n locations
ataaagtcagataaaataattaccccgatttgttttagaattgtccaaacacgcttgctaatagcttttctttcgaaaagagaggcgaggaaaaataaagggtgcatccaaatgtaaattttttacatgaaagcatttggatggcttgctgtttacagttggctaagtcttattngcaagaagcagcacaacttttgtttgggccaatgaccncaaaccattcgaatagaaatcgattgggctgactagtctcaatatttgcaggaatagcaatggcaggtctatcttaaaggcctgacgagttatgtttcgacaaacatcctgtacaccataaatcgatttgcaaatttagtcgaactatataaatttttcaaaaaatgattcatcttttttatggttagcgcatatgtctctagctttatagaaacggtccccgaatctgcgaggaactactttttagagaatttctatagattattattttgcatgaatccttcgcttaaattcccatttatcttataaagtcagattaaattaattaccccgatttgttttagaattggtccaaacacgcttgctaatagcttttcttttcgaaaagagaggcgaggaaaaataaaggttgcatccaaatgtaatttttttttacattgaagcatttggatggcttgctgtttacagttggctaagtcttattttcaagaagcagcacaacttttgtttgggccaacgaccccaaaccattcgaatagcaatcgattgggctgactagactccatatttgcaggaatagcaatggcaggtctatcttaaaggcctgacgagttatgtttcgacaaacatcctgtacaccataaatcgatttgcaaatttagtcgaactatataaatttttcaaaaaatgattcatcttttttatggttagcgcatatgtctctagctttatagaaacggtccccgaatctgcgaggaactactttttttagaatttctatagattattattttgcatgaatccttcgcttaaattcccatttatcttataaagtcagattaaattaattaccccgatttgttttagaattggtcaaacacgcttgctaatagcttttcttttcgaaaagagaggcgaggaaaaataagggtgcatccaatgtaattttttt

SEQ ID NO: 40531 - DNA, 979 bp, Heterodera glycines
  unsure (1)..(979): unsure at all n locations
ttttggttctttcgactttnnggtttcaattggttagaacatgtataaaaaaaattatggttcaagaaacccagggctgctagtaattagagttgtaaaatgccattggactgataaactcgaattggaattataaaatgccatcggactgataaactttaattggaattataaaatgccattggactgataaactcgaattggaattataaaatgccatcggactgataaactttaattggaattataaaatgccatcggactgataaactttaattggaattataaaatgccatcggactgataaaccctaattggaattataaaatgtcattggactcacagttcaatagaaccccgattttcacgttttccgtatttttccaagtttttttaaattgccccaatttttgccagttttttttgttaaatgttttatatttttgcttttttttaaacagtgacgaaaaaacgcaccaaaaagaattggaagccaagcaacagaaatgtgtgtgggaaatgctcagcgcaatgagccggggggaacgtgaaaaggccaaggaatgtgtgaagggctcactgttcattcagatgttcttccaccaggtgttctccaaagaaacaaaggaaaaaattattgaaacgaaaggtaattaacgaattggtaatggttacggtaatgagggtacgagaggggggggggagttggagtcgaaaacacgaaaaattgcttgaaaaaaatccttgtcgagaggcgaaatccgttgactggctggaacagaaaatcccaaacagtgaaaatcctttttttggaatgacttaatttgaaattttaaaatagttaatataaataaaataccgactggaaaatctaaaaaattggaaatcctgtacacaaaataggaaaccgaaaattccgaaactagaaaatccagatcaagagaaactcgaaaacacaaaatcataatgaccgctgcaa

SEQ ID NO: 40532 - DNA, 1504 bp, Heterodera glycines
gataaatgttcaaataaatgtcagaacaaagaaataagtaaaaaaatgaaaaacattaatttacttcagccctaaatttatgccacgaggataaaatttaattcattcgattagttaataattaaacaatggatatgaataaaaggtttataaataatgagatattggtaatttatgaagaccagaaatgcgcatataaaaaaggaaaataacagaatcaagttgatatattttttctatttaacaccatcaattcgtttaatgtgtatttccattaaaaatattgaaaacaaatatgaacttatgcatagaaaataaaaaatgtataatattaaacgaaagaactcatataaaattacagtcatttaataatacagaaatgaatttataaaaaaaattaatatatttataattgcatacttaatatcgtaaccaataaatatttattcaataaaataaaaatttgttatgataaaataacttattttaaataaaggaatcgagaaaaaatttcttttaaataattaataaataatcgggaaatatacgttcaatctttaaggatttaataccaaatgcaataaaaacaaatttaaaagataaaaacgatggaaaaataagaattaaaaagctaagataataaatatttaaaaaacaatttgaaaaaataagaatcgaaaatgaataaatgcataaaaataaaataattttacacattactaataaaaacaaaagtaagaaatagataaatgtgcaaaacgcttgcaaaattatttaatatataagataattaaaactttacaacatgtaaaatcataaaaattaacttttttttaaatttcgatgaatataagatacacaatttcgtgaaaattaatgtctttacaaatgtataataactcaaaaggctgattttaagtgctgaagaaccagtgccggttcatgattaaaaggatgaaatagaaaataatttattaaatgatattgagaaaacaatattaataagtattaaatatatattttttaataaaaataagtcttagaaaaaaaatatattaatataatattattttcgagagagcaaactcataaatttataaaacaaatatattcatttataaaaatgtttaaaattaattaacttgaatacctctaaattataataaaaagttatgaaatggatagaatatgctttaattcttgtactggactggaaataatactaactgattaaagtaaatttgattatttcaaaattatagtgaataaacgaaagaaaatacaaataactatcaaaattagacaaaacaaaataagcaaaaaaatcgataataatatatgcaattcttttttaatcgaaatttaagttgaaataaaattatcaacttctatatttgatgccttaaatataaaatcaataattaataattaaataaatatatattggcttattcagattaaaagtttacatgattttaaattaatttaaaactaataaatagaa

SEQ ID NO: 40533 - DNA, 964 bp, Heterodera glycines
cagaaccctttctgaaaaaatatttaagaattaattttgcaataaataaataaaaacgaaagactcagattttcgaaaattttttttgagccagctagctcggcgctcatttcagtgtaagttagtcctttaccggggagtatccctgcatagtttggtacgcttctgctcaattagcaaaaaatatgagtgatcgaattttcactaaaaaagttaagcctacattttttggcatatttaaaaagcaattaaaaaattttaaaatttaataattttcctgcaccgaaggtactcactcggcctcttcgcggcctcgtggtgggccttcgcccccccccctcccacgcccttcagagcacgacaaatatttcaacaaaaattttgaaaaattgactagagcaatcgaacgctaacggacgacctaatggaaaaaaatccccgaaggagagaatttaattaaatccattccttcgggggaccgtgccgggtgccgcggggtaagcagtgctggttcgtttcatcacggcaccgaaccttttggctagtcagcaatcgttgcttaacttgccagatcggacgggtgcgcatgactttctgaaaaaaatatttatgaaacaaaaaaatcgattttttcaagtgtccgtttggggtactcaaacatttatggggagcaaaaatccaacgcagaattaaagtacaggctatagggaagctattcccgaaggattcggtctccccataaatctgggcgcatcggttcggggggactgccccgaaaacaaaaaaatcgattttttcaagtgtccgtttggggtactcaaacaattatggggagcaaaaatccaacgcagaattaaagtacaggctatagggaagctattccggaaggattcggtctccccataaatctgggcgcatcgggttcggggggactgcccccgaaacaaaaaaatcgatttttttc

SEQ ID NO: 40534 - DNA, 1750 bp, Heterodera glycines
  unsure (1)..(1750): unsure at all n locations
aacaaaaaaaaaatgtaaaaaaaacttgtatgcaatttagaaattaaatatagttaatcgtcgtcatttttcatgcttgctatgcgagaaaagcatacgacaaagcaaaatttgatcaagaatcaaacatttcatattggtcgataaaaaacattttattaaatacatgcaaaattgtntaaagaatttttaggaaaagaaatttactttgtgtcaaggaaaccaagaagaacactaaaataaatatattattaagaaataaattatttagcattaaattctttttaatgattttttatgttcaatttttattaatttttaaataagacgatgaaataaacaaaagatatttagaatgaggaagaaaggcacttcctctaaaaaacatcaaaccaaaaaacaccctaaagaaatttaaaatatcataaaattcaataatttttcaaaaaatttttgatcttaaagtttaaaaaatatattaaaactatattatacaagattaaatagaacagcatatcgcaattataagttaaaccgaaaatgacgaaaactaatggttaaataaataattaaaccgcaaactttgattgttatgcggcccgatgggaaggggcaagagaggattttacatggggcagagggttaaccataatggtttccttaaaatattagtaaaaataaaaacaaaatgattatgtaaataaatttctttattccttttttggacaagaaatgcttaggaaaattttttactaaaataaaataaaaacgaaaatacatcccgctaagaaatgaaaaattctcgaaaaatttaaagtaatttgttaaaaattgaatcgaatcaagatgtccattaaaaagcgttaataaaacttttatttgcatattttattaatgcatattagcccataaattagtgatttctaacagcgctgctttctgctgcaggctaattgattagtcacgctcaacaaattcaagggctattaacccatatttaaaaatgaataatgaaatatttgattgaaaaaataaaaataaaaacaattaacaaagaataaagaataaaaaaataaagtaaattttgaaataaatcttttgaaaattttaaagattatagtaatagtagaatattccaaaataaaatgactgaagtaaacactaaactaagttactcgattaataaaattcattcaaattaaaaatagattgaagacttccttaaatttaaataatatgccgccgatgaattgagcaattggtctagtatttaaaaaatgcatcgcttaaaatgaaaaataaaaaaatagaaagaaaatattaatgaaaacgccaaaactaaaaacttatataaaattataataaaaaaattaaatttaataaataaaaaaaccccattaaatttacagttaaaaatacgaaaaagccaaagagaagtctcgaaaagaaagagatttgataaccgttggactcttgattggagcagcaactgcatttctgatgtcgaccacaatgggttgaaattcaataagaatttcgtagattccaattaataaaatttagaaaagtcacaagataaacacaatattaatatatgaaacagttcagcaacagttgaacaaactcaacaacaacaacacccacaacgattaacttcttctgtttgacaaccaaaaaaatcatccagcaaatttaaagatggaaagaaattgcttgaaaacaatgtttataaatttaaaaattcattttt

SEQ ID NO: 40535 - DNA, 377 bp, Heterodera glycines
cactagggtcgcaacttttagtgaaaaaactttttttttgctcaattgttttgaagaaaggagctcaaaaaacgcatttctgcgttaaaattttttcatttggacgtcacttttcgtcactagaaatcactattttggcgacttcgtcactaaaatagttaaaaatcactattttggcgttttgtcactattttttcactatttcgacattttttggaaaattctttaacaaaaatgcaataaaaccaaaaaatacacccctaagaatctatctaaaaattttttcaaaaaatacacccctaagaatcgacagctaaaattttttcaaaatacacccctaagaagtgaggcaaaatttctcaaaaatgtactttctt

SEQ ID NO: 40536 - DNA, 663 bp, Heterodera glycines
agaaatctatcaatttaaatatatgtaatatttttattccttttatatattttaggtaaatttgaatttttatttaaattctttgaagttcataataatttattgcaatagaatcttaattttcgtcagtgatgaatgaatatttatgatggcaaataaatagagaattagtttttatgtaatgctaatttgtaagataagtagatttatgttcttcaacgttgattaatcaattaaactgtaaatttgttattttattgaattatgaatgaaacttttatttatatatctatgaaaatttatcattctgtatctttgatttttttttatttgatacttctctgtatttaataatttcatatattttttattaacacatatacattacccgagtcctcagtacgtaatgattgtaaggtctcattgaaaatgaaatttctaaatatttgtctaatatttgttttatgtataaatatttcaacgtaataaattaataattagttagttaaatatatatttatctattttttcttggttagccgacttttgcgccgcggacatttgcgccgcaccatttgcgccgcgacacttgcgccgctcagcaaaaaagacaattgcgccgcggacatttgcgccgtgccatctgctccgcgacacttgcgc

SEQ ID NO: 40537 - DNA, 1232 bp, Heterodera glycines
  unsure (1)..(1232): unsure at all n locations
ctcactgttgctcgcttcttcctgtgttacttctggtccatttaaggangnngnnngantgnnnaannngantnnnaatcctttgtgattaaaatagaaantntggnattagngtnaaggnnaggaatgtgttggaatggggattnttgaatttnaatttnngattntantgangnattttnnantgangnatttttngggnggatnnangtttttaanggnaanaattgttngnnattttgantggtgtnattgtnannagnattngnatnattgtgntgttgatcatttcttgttgctgctgttctactgtttttattttataggcataatttaaataagctatatcttccaaatcaaaccaaaatttttaggtctgggtctactcccttgatttagagaaaagttgattttttttaaaactaaaatcaggccccaattatgaatgattacattttttgcttcttaccgttcggcactgtgtcctcctcttcctcgtttttctgtttctgcctacgtaataatttgccaatttttgtaccgaatcggatttggggcaaatggcgccgtgccaaattttccctgtgttcttcagtagatttatcgcttgacattgattgctactcagaaaaaataaatagatatttgacagttaattattgctgctattaccaacagagctttcactgttgtaggaaaaggttaatttatttgtttggtgttttcatgttaccatggcagccaaaatattattaaagctcactaatgggttgtagaggaaaaataaaatttaaaaaaacaaggatgaaattaaacatttttcttcaccactaattgaaaatgagaaaataagtttccgcccccccccccctgccaagaaaatttttttttaaaaatattctcaattttggtattgagccacagagctccctgagaaataatgataaaaatggcatttattcgtgaaggaaggaaagtattaggaaatttaacgccataatcacccacccatccataataagtattatcttcatttctgtacattcttcactttgttcaatgttcgcttttccctctccttgtcgcttatgcttttttggccgccatcattttctttttgagtgccatcgcggaagagcggggcgggcacgggcagtagccactgtctttgccctgttggccgggtgccccgggctgtccgggttggccgctgttgccagacaggccgggca

SEQ ID NO: 40538 - DNA, 147 bp, Heterodera glycines
ctttccctcttttccttttcttctccgtccatctttatcttttccaatgtctattgtctccacgaccaccaaatttgcaaacaatgaggtgaagtgctgcttctgacagagggtgatgttctcccccctccgggggggggggggggg

SEQ ID NO: 40539 - DNA, 1053 bp, Heterodera glycines
  unsure (1)..(1053): unsure at all n locations
cgaccctgaaccaggcgtgccaatggatgtaactccaacgttgcaatgtgcattcgaatgttttgtgttcaaggtttctgcagttcgcactaattatcgcagttggctgcgttcttcatcgatccacgagccgagtgatccaccgataagactagaattcattcttcaacagaagtgtaaaaaaaaataatgaaaaaaaaagaaaaagctggcggtgcccgagctgacactcattgagtcttaagcctcgtgctaggccaagcacgggccctaccgcgtcgtctcatcacggccacggacgtagcagcaagcacaaacacaccgctagttacggcacgtaagaccgggaacgaaaccaccatccccagtcagtgtgttatgtgcctgccacaacaaccgctcaacgacgcacagacgccagcacagccgttaggtcgccccacgagcgtgcatcccacattggcgcagcgaaccaaccaagcgaggcggcccgccaccgacacattgccacgcagcagccatacacaggctttcacatgtgcagcactgagcggtataccacagctccaacgtatggaagcaccccaaaagcatggctcgtgaggcagctgccccgtaatgttgggcagcgtccacaagtcatctcgaacgacctgtgcccatcagcggacgggggcatttggttgtgccaacgctagcccaacaggacagcaggtaggtggtgaataggaatcacttgggtaatgatccagcagcaggttcacctacagctaccttgttacgacttttgcccggttcaagccactgcgattaaatcggttccagtctgcataccgaccgaagccggaacactaaccgtccccgaatttctcgaaatggctcagtcccgggcagcgacgggcggtgtgtacaaagggcagggacgtattcagagcgagttgatgactcgcccctacaaggaattcctcgttcacggacaataattgcaatgtccgatcccaatcacggcaaattttcacccggtttaccaacccccctttcgnggactctaga

SEQ ID NO: 40540 - DNA, 836 bp, Heterodera glycines
ttttcagcggacctctcccttttttcatgtataaacacatcatttcggctaatttaaatggaagagagcgataaacataactcaagatggtaacaataatattgagtgtgtaccgccaaaatatcatccggaatgggcggcgcaacgccgcgccaaacgcgcctctcaatgccactcggagacggcgactgtccgctgcttggtttgaccttagatggcactggtgccggtttcggcgctcccaatttgtccgatgggtccaaccgctgccaaaccacaaatggccgctcagagtcctcaattttcttgccgtcggctgccatggtcagaagcagttcagaacaaaatccgatcacatttattatttcatgaataaaatgaaagcacaaataatttgaactgtgatgaaaacagtaaatcttgttatgttaaagacacaaaagtcaattaaataggaaaataaaacaaattttggcaaaaaaattcatttgatataaaacaagaaaaaatgaacgataaaacaattccaaaatttctgcccctaaatttccgttccaacaacaattcacttcatacacatctgaactgctcgtgcaaccgttcgccatgcattatccggcgcatgtcaaacttccgcaaattgaccgtcgaataggcaaagtcgaagatgcgttccatgaacattcggccagcagcgattgccatttggggcccatagccgccgaagccgcacaattggaagaacgactcgtccatcaaatgctcgccaatcactggcaaattgtcgaacgtgttgaagtcctcgtaggagtgccaggcattgatcaccttggaca

SEQ ID NO: 40541 - DNA, 1061 bp, Heterodera glycines
  unsure (1)..(1061): unsure at all n locations
aggcgggcccgccccagggcggactgagaaacaccgcgtcgacgccgtgcggataactgcaacattttttaataaaagtataattgaaaattgaatgtaaaattttcagaattagcgaaatttactgagaaaattttaattttacatttcgggagagaattccaaatttcccccccccccccagagctcgccacagtaaagtagtaaaagtgtcattgatgatcccaaattatgttgttttcccggcactctcatccgatccggatcaatttttggaccagggatacgtcgggaccgggacaatttcaaaaataatctcttccaccaggcataacaacggatggatggtatagggtgggagagagtcaaccacgaatcccttccgaccaaaaatgaattcattctatggcacggcttcctccttcggcctcccaatccagagcctgaccaggatgttcattttttggtgaacatctctggatggatggtatagggttgagagagacaaccaggaatcccatctggccaaaaatgaattcattctatggcacggcttcctccttcggcctcncaattcaagagcctgaccaggatgttcattttttggtgaacatctcttccaccaggcataacaacggatggatggtataggggttggagagagacaaccaggaatcccttccgaccaaaaatgaattcattctatggcacggcttcctccttcggcctcccaatccaagagcctgaccatgatattcattttttggtggacatctcttccaccaggcatagcagcggatggatggtatagggttggagagagacaaccaggaatcccttccggccaaaaatgaattcattctatggcacggcttcctctttcggcctcccaattcaagagcctgaccaggatgttcattttttggtgaacatctcttccaccaggcataacaacggatggatggtataggggttggagagagacaaccaggaatcccttccggccaaaaatgaattcattctatggcacggcttcctccttcggcctcccaatccaagag

SEQ ID NO: 40542 - DNA, 738 bp, Heterodera glycines
atctccgtttggctcaaatcggtgtcgcacaggcgagcgctaaaaagcgctattgaaattttcaaataaataaatattcatcattttgaaataaatgggatgaaccaaagggaggggaggcaatatataaatcggcaaaaaggaagcgaccggagtttggttttggcttgactgccctttatctttgtcaagcgcagtttcaactcagcttcagcagagagtgagtgagcatagaattctgcaaactttttctctccaatgtggggcgatgcaccaaaaatagtaaaaatcggggaaaagctgaagaagagaaaaagaaaagggggagagagagggagagggggagggggcgctttcgcactctgtccattcgcaagtgattgccgggggggggcggcacttccaaataaaagtgtccgtccgttaagcgcacgtttccccatggagcgattgcgtggtcaattgggaagaatgggaagatgaggagaaaagggagggaggcgatcggaggatgagcgacagctgagaatcacagggggaggacggaggcgacggcccaacgaacaccaaaaggacggaaagaaagacccattcctaattgggccaccagaattggcctctccgtccgacatgaagcacctccaaggaagagagggggaagagagaaagagagagagagggggagagagagagggggagagagagagaccgggggagagagagggggagagagagagg

SEQ ID NO: 40543 - DNA, 944 bp, Heterodera glycines
  unsure (1)..(944): unsure at all n locations
acattttaaatcaaaatcctaataaaaatttcgttgaatttcttcgcctcttatttgtgcaaaatttcgaaaaagtaattttctatttaaaattaaaaaattcagaagcaaattcaagaatttttttatttttaaatgcattttttaccacatgaattatgattaaatttttgcgtttcgaattcattttggaattaagaaaaataaaaattgataatcatttgatcatttttagcgcactttaagcaccgccgttaggcagcgcagttccaaaatttattccatgccacagatattatgggcaggacacgccaagtacctcaaacttgggtaattaaaccgaagaaagaagtgcagtggggaagaatgacgcccaaaatgaaggaaatattcgatgctgtgcgaactctttgtgacccctctctgactctgccaatgcagcagttgacaatttttaccactatttttctctcactcatcgtctgctagtctctcctttattataagctattttccaaagccaacgacgcccttttctccctcttttctgttagtcatttctcattggtgttgacgatccaacattcagtgtacaaatttgttaaacctctcaacattttaaatcaaagtcctaataaaaatttcgttgaatttcttcgcctcttatttgtgcaaaattttcgaaaaagtaattttctatgtaaaattaaaaaattcagaagcaaattcaagaattttttttatttttaaatgcattttttaccacatgaattatgattaaatttttgcgtttctaattaattgtggaattaagaaaaataaaaattgataagcatttgatcatttttaccactatttttctctcactcatcgtctgctcgtctctcccttanttatagctattttcctaagccaacgcccttttctccctnnctttctgtagt

SEQ ID NO: 40544 - DNA, 1070 bp, Heterodera glycines
atccctcccttttgtgcactatttcgtttcaaattgaatcatttttttttgtcttttgaaataaattgtgaaaaatatacgaaaattattttcggttttaattatgctgtacaatgcttttaagccccgcctgcggcggctccccttttgtgcactattttagtttttaaaattggttccggactttttggctttttgaaataaattgtgaaaaatatacgaaaattattttagcttttaattacgctgtacaatgcttttaagccccgccgtgaggcgggacagttccaaaattttgtaccacattttactgtggaaagtccaagtaccttattggacaactacgtgtcaatgagcacagtcgcctttggccagttgtggaacggaaaaatgggaatatcagatggggtgcgctcttttctaaaaattcctcttttcgtctaaccatccctcccttttgtgcactatttcgtttcaaaattgaatcatttttttttgtcttttgaaataaattgtgaaaaatatacgaaaattattttcggttttaattatgctgtacaatgtttttaagccccgccgtgaggcgggacagttccaaaattttgtaccacattttactgtggaaagtccaagtaccttattggacaactacgtgtcaatgagcacagtcgcctttggccagttgtggaacggaaaaatgggaatatcagatggggtgcgctcttttctaaaaattcctcttttcgtctaaccatccttcccttttgtgcactatttcgtttcaaaattgaatcattttttttggctttttgaaataattgtgaaaaatatacgaaaattattttagcttttaattatgcagtacaatgcttttaagccccgccgtgaggcgggacagttccaaaattttgtaccacattttactgtggaaagtccaagtaccttattggacaactacgtgtcaatgagcacagtcgcctttggccagttgtggaacggaaaaatgggaatatcagatggggtgcgctcttatctaaaaattcctcttttcgtctaaccatccctccctt

SEQ ID NO: 40545 - DNA, 949 bp, Heterodera glycines
  unsure (1)..(949): unsure at all n locations
agtcaggacggtactgaactggcgagctgtgagagaccattaaaagggaaanagnngannatnnnatnnnnnnngntgcccttttcagaggnngnannnnnnnaanngangngngngngnnnannngnnnnnannggnnganaagnngnaagnattcccgacatttcatttgtaatttacaatctgtggggtgcataatgcccgtgttcagaatgataatctttgttaaatgtctagccgactgaataaagttgattatttgataaattgctattttgaaatttatactaaactattaatttttcttctgttggccatccccgcactatgtaaataaaatacttgctaacattgttttacaataattacgaaaaaataatacttcgcttacccaattgtttgtgtttgttgtacctgttcagtgtgcctattgtatctatcattcatatcattaaacatttcgtaatgttccctcgtcttttccaaaaatgatcagccttgctaattataatcacgttacgacctgtaattgttcaattcaccatccatcatgcattacccgacgaacaatgggacgccgtcatcagcaatcaagcggaagcactcgcactttgacaggagttcgtccagcaacatttatgagaaatcgcccacccaattgtacccgatgaccgcgacagcaatgccgagttcgtccaaaaagccatttgtcagtgcgcagcgtcggtatgacaatgtgcgggtgcgggactccgagttccacacgcgtgtttgtctcgagtgtggcgctgtgttggccggggccgagaaggactaccaagtacgcacaaaatgcccacagccccagggtgtccttttaaatagccgctggtttaattcgactagcaaatttcttgagattttttctgatagcaacatatgtatttaatctatcatctctaaaactaaa

SEQ ID NO: 40546 - DNA, 1403 bp, Heterodera glycines
  unsure (1)..(1403): unsure at all n locations
acagaacacactttgccaagagcccaaccaaaatcggctgagtttgcctcaacagcaaaagaatgtcacaaaatgaatccctcgacaacgcacaacacnagcaacagaaacagcagcagaacccgaacacggaggccgaattggccttgcaacaggcccaagttggactcaatctcttctggctgatccaacaagcggcagcgatgcaacagcagcaacaacaagttgaagaaggacaaggaacggcaccgacttcctctttaactgagtaaatgacaatttgagctcggttaaatccatgccgagttgtaagcagttcgttcttttcaggcgacagaatgtgtcgctgcactcggcactttccaatttggttggctttgctaaggcatcgtcgcctccaaattgtccgtcgccttttttactgccgacacaacaacaagcaaatggaattagtactttgaacgatgaaaaaaggagaaggtgatcggccgaacttttcgggataccgtacccaaaaaaaggaaaatcggtcatttccctctcctctggaaggcgtcagtgactagtgatcagccttgatcagcctgcattcagtagctatcggggttaccgtacccataaaattggccaatccgggacgaccatttccctcgagggactgccattgactaaaaaagagctgcgcacgcatcgccaattccaatcttttagagatttgtcaatcattgggagacggtgggagtatgtgagcgacgtgcagagcttcgtcgagttcgagcagctccgctgccggcatcaagtgtcgcgcaaccgcacattcgctcacggcattcgctattcgtgcacccaaaagacccaactgagaagcaattgcccctatttgctgttgtgcttattctctgatggagcaggtccaattggtgggagatttattccaaattaattagccaattacaggcgaacacagtgcgccgggggtcggcaccatttcggtgtactctcgaaacaaacacacgcacccggtgaatggcaaggggaaggtgccaattcaccaaaagcattccgagttcaggtcaaagtgatcaaagcgcgacagccgcgacgattcgccaaattggcgaaaagagaaaagaaatgggacaaaaaggaggaggaggagcagcagagaaatggaaaaagaaaggggggaaacgaaattggcgaacccaaagagaaagaaggagacgaagagaaaggaggcgaggcaaaggaagaggcggaaatgggcggaatggcgggagaagcactgatcgaatactctcaaaatgttagccgagcagcaaaaggacggcgaaggggcgaaatacgaataaatgggacaagaaagaaagcggaaaagaaagaaagaaacgacgatttaaact

SEQ ID NO: 40547 - DNA, 1451 bp, Heterodera glycines
cagggaccccgcgggcagagactttctccaggcgcgcggcactacgccgagaatgttacgcggcgcagaaggaatcatcgaggcaattgagaagaaattgggttggccaaaaaggcgaacttttaaccctttttatgcaaagcgaatttaggcatcaaaaagggagggactacggcggacggactcttttcgctgcatgaggtctaatggctcgcggcttgtgttaacgctccgatggtgcaggtgtacttgccatatggcttctgctatgaacttttggagagaagttgacagatcactgacgaatactacaaagacatgacccctcgggagattgaagagataatcggcgagttcactgcgtctgagcgacctttgcccgggcctctgatcttttcgtatgagaccgctgacccgtcaagctccagaatactgtgacggaaagaccgccgagtttgcattttggtcttcgaatgcgatatttcagtactaattttatatatcattgcacattacattcctcgttttatataaccccatgcataaatgggccgattcaaccttaaaagcagagagacagacgctttttataatgtaacgcgaaaaatatggagtttttcactccatctgcgcgtattctgaaatcgcttctcttcttttttaggaaatcgatgagacggaagctcgagaattatgaagcgtaatgaccagcaattttgtataataattaattgaattcgatatttcagtactaattttatatatcattgcacatttcgttcctcgttttatataaccccatgcataaatgggccgattcaaccttaaaagcagagagacagacgctttttataatgtaacgcgaaaaatatggagttttcactccatctgcgcgtattctgaaatcacttctcttcttttttaggaaatcgatgagagggaagctcgagaattatgaagcgtaatgaccagcaattttgtataataattaaaggaattcgatatttcagtactaattttatatatcattgcacatttcgttcctcgttttatataaccccatgcataaatgggccgattcaaccttaaaagcagagagacagacgctttttataatgtaacgcgaaaaatatggagttttcactccatctgcgcgtattctgaaatcgcttctcttcttttttaggaaatcgatgagagggaagctcgagaattatgaagcgtaatgaccagcaattttgtataataattaattgaattcgatatttcagtactaattttatatatcattgcacatttcgttcctcgttttatataaccccatgcataaatgggccgattcaaccttaaaagctgagagacagacgctttttataatgtaacgcgaaaaatatggaggttttcactccatctgcgcgtattctgaaatcgctcctcttcttttttaggaa

SEQ ID NO: 40548 - DNA, 866 bp, Heterodera glycines
aaaaagggggtttgaaaagtttttttttgaaaaaaagacttttccaaataatacccttgggagaaggggagtgggaaacaggaattcaaaaattttccatttttttatagtctaatctactcaaaacggttccagaattcaattaaaaataccattcacggtgcgaaaaagggggtttgacaagtttattggggaaaaaagactttacaaaataatccccctgggagaagggagtgggaaacatgatttcaaaattttcaattttttctagtctaatctactcaaaacggttcagaattcaataaaaataacattcacggtgcgaaaaatggggtttgaaaagtttattggggaaaaaaagactttacaaaataatacccttgggagaagggagtgggaaacatgatttcaaaattttcaattttttctagtctaatctactcaaaacggttcagaattcaataattttcctgcgccgaaggcccaccacgaggccgcgaagaggccgagtgagtaccttcggtgcaggaaaattattaaattttaaaaattttttaattgctttttaaatatgccaaaaaatgtaggcttaacttttttagtgaaaattcgatcactcatattttttgctaattgagcagaagcgtaccaaactttgcagggatactccccggtaaaggactaacttacactgaaatgagcgccgagctagcttgctctaaaaaatttttcgaaaatctgagtctttcgtttttatttgttttttgcataattaattcataaatatttttttcagaaaatgctctgaaacgcaccaaattttatttacatgctagtttaggcactctgatgctttttctatcaaa

SEQ ID NO: 40549 - DNA, 336 bp, Heterodera glycines
gaatgtacaatgagcgttcgtttatatcggtttggctataattcactaaatacggtagttatagaaaaaccgatataaacgaacgctcattgtacactctctcatttagcatgcattgaaaatcacccggacaagtggctgtcacggctggccaacagcggctggctccagtacgttgtggacgcgctgaccgccgccgccacggtggcccaagtggtgcactgcatggacgaaggtagtggcggaggtgagagaagagcagcggcggagaggtgccgtgccggaaccgaaatgggactgactttgccgtccccggttcccaagggaaatttgtct

SEQ ID NO: 40550 - DNA, 296 bp, Heterodera glycines
ggcagcatcagtgccgaaggccgcggggccgccgaaccgatcgtgcagtgcgagcagcgcaaccgccgcgagctgattgcctgcctggcaccgaaccggcgggtgcagatcgcgggaatggcccatccgcgctgagattcctgcaccggggcatgaccccggtattccgagtcccccctgaccgtcggcaggacgtggcaacgtctcccccgtcaaccacgcctgccggcggctcaggttttccatggtgcccgcgatgaatgcccaattcctgcctctttccatgaagacggaaa

SEQ ID NO: 40551 - DNA, 1036 bp, Heterodera glycines
  unsure (1)..(1036): unsure at all n locations
cgctgctcgtccgtcacccacccgtcactgttcgccgccgcttctcctcccttccattccatttcgggcccatttgttgtcggcatttgccaatgatcagcattgccctgctgctgcactacggcattttgttgtgccaccattagtggtggtgttggcttttgatgttgccgccatggtcgaccaccgtcagctgcagcagaagtgccaccaccgacagaaaagggaccaccgtcataaccggagacggcaccattgaagcttaagtgaaatgcgatggaggggcaggggtcattaaggtggattaaggctcaaagcgcaaggctaattggtttaatgcactaaacccatgcctcagcgcagggcagcgatgcggacggaaaagtgccgaaagacgcggaaaaaggggagggcggtatggcaaaaagtgatggcacgaaaggacactcgcgaacacaattacaatcagctggtgaaaatggacgacagagaaatgagacgcgacacgccatttttggttaacgaattttttgaaataggataacagagaatatttagagctattgaatgagaaattttgggaatgattgactcggattcgaaaaggatcaaaatggatgccagaatcggattctccgaccctgaaaccccataaaaataaaaaaaatttcgaaaagggtggctaccatcagaatattaccaaaaaatgaaatcgaaaataataagccaactcgttttttgttttgttcaagtatttcaggagtttagcggtttatgcgaacggagggcgtagccaaaccttggcttcgggggcggcggttgactaacccaccccagaagagcgacgaattgaccgtttgcccttcgtccacttatgtttcgccacaattttaagtaatttttgaatggtagggggtgaattttggccgcgttcaacaattttcttttcataaaaatagagtgaacatgagcaaaaaaaaaattttttttgtttttgcccgaccagaccngaggccccaatcccaaanggtattta

SEQ ID NO: 40552 - DNA, 767 bp, Heterodera glycines
attaaagtacaggctatagggaagctactcccgaaggattcgtgtctccccataaatctgggcgcatcggttcggggggactgccccgaaaacaaaaaaatctattttttcaagtgtccgtttggggtactcaaacatttatggggagcaaaaatccaacgcagaattaaagtacagactatagggaagctattcccgaaggattcggtctccccataaatctgggcgcatcggttcggggggactgccccgaaaacaaaaataaatcgattttttcaagtgtccgtttggggtactcaaacaattatggggagcaaaaatccaacgcagaattaaagtacaggctatagggaagctactcccgaaggattcggtctccccataaatctgggcgcatcggttcggggggactgccccgaaaacaaaaaaatcgattttttcaagtgtccgtttggggtactcaaacaattatggggagcaaaaatccaacgcagaattaaagtacaggctatagggaagctattcccgaaggattcggtctccccataaatctgggcgcatcggttcggggggactgccccgaaaacaaaataaatcgatttttcaagtgtccgtttggggtactcaaacatttatgggagcaaaatccaacgcagaattaaagtacagactatagtgaagctatttcggaaggattcggtctccccataatctgggcgcatccgttcggggggactgccccgaaaacaaaaataaatcgatttttt

SEQ ID NO: 40553 - DNA, 897 bp, Heterodera glycines
agatatttattagtaagaaaagctacctttgtttgtaaaataaccaaaaatattatttaaatgttcttctataaaagagacggcatttgtcgtacgtaatccttttaccaatcatggcttgcgattgtccgtcacagttttccaccgtttgcgtcaattcgccccgtcaattctcaacgatttgccgttgttatgcattggcaaattccatgctcatgatgatgatgttgacgatctcttcgccgaatttccatgcaatgacagtgccgcggcatcagatggacaagcggtggccaaatggcttttcactccacttcaaagcaatgtgccaaaggtgttcaaatgcgggttggacatggattatgtgaagaattggtcgtcgaatattgaacaattcaaaacggtgcattcatttatctttcatttttctttatcaatttccccatattttaggcatttgcctcggcttcttcccccgtcaatttcatcgttttcatttgcattccgttgccttttgctgactccgttttggcctttgattttaccaacgaattgactcgggaacaattgacactgaaaagaactgactttcactactgttttctgttcgtccgttgtccaattgcgcgagacgaaagcaaatggacaaaatgggaagaggaagcgattggctggcgaacagatgatccctggaacagaattatcattcatattagggttgcaaccccgaccccgccccgaccccgaaccccgacataacccggttgactgtttcctttttaatttatttttatgtgattaatagaattctcctaaaagtctttagaaaaagagcgccgcgaaaaaaagatgattcgaaaaacaaaaaaaaaggaaaggtgatcagaaatttttggg

SEQ ID NO: 40554 - DNA, 1375 bp, Heterodera glycines
ctgcttttgctgctgttcttctcgttgctttctctgctgttcttctctctgctttctctgctcttcctgctgctttctcttctgctgctcttctcgctgctttctctgctcttcctgctgctttctctgctgctgctcttctcgctgctgtcgccgtttatcctcctcctccctctcttttttgtctcgctcatgcttcaagcgaagttgatcaagttttgtgcgatttttcaacggatttaatggtgcttcttcaggctcttcctcctcaacgacttccatgtcaacaatctccccctcatccgggtattgtattgacctttttcgggtcaggtgtcgttccatttccgctatcatgccgtggtgcattccccgttcaagctgctgaggcgaaaggaagctgccccttggcactctgaaccggaacttgagaccaccgcgcaggtgcaccactacgtattgcctctccagggtccctacagtcgcccagctaaactgtacaagggcaatgagaactgtacaaacccacccacctgttgggatatattatgccagacatgcccaccatccatcccggcccatcaaacactaatttctttggcaagtgtactttgaatttattcgttttattgccgacaaatcccggcgtattgctgggcaaaattacaaagaaagagttgctcatttcaacgaaaaatcaatgaatgaatgatcagagatcacttttccatcttaaaataggtgttccgtcctacgttcttctgtgcagatggtccgtcatctttcttttggtgtttcatgatcaggtcggtgcagtcaaagttcaacttggcacagtcttggcagaatgtttgggtgaactccagcttctcttggccactgccagtgttgaggatgaagcgcttgtcgcctcgcttgaagttttcgttacggcattcgttgcacataaaggtgaacaccccatactgcaacggaagaagaacattgtagggctgccaccagagcaaacattacctttgggcgtgcgagcttccagaaaattgttgggtagtcgaagacgttggctgctttgcgttcgtcgacatctgtgacttcaacctctgcggggttggacttctttgcgttgttcacgtcctccagcagtttttcccagcgagactttcggcccctcttcttgagcacagggcgttcctctgcgtgagatgactgagagttaaccaatatgacgtcatcatcaatatctgaaaaaagagaaaaaaatccaaaatttttgtaaaatttatgaaaaattttacccattttatgttttctttgattgttttgtgcttcttccacggtggttcgcttctataaaatgcttatattttgtgtttta

SEQ ID NO: 40555 - DNA, 188 bp, Heterodera glycines
cggtgtcatctatgttactagatccggggatcgatccccctttttggccgctcgagcaggacctgcagaagctagcttgatggggatcagattgtcgtttcccgccttcagtttaaactatcaagagagggaggagagcggcgcgtatcgggggaggtgggtggcggaagaagaaaagggtgggggga

SEQ ID NO: 40556 - DNA, 1219 bp, Heterodera glycines
aaaaaaaaaaaatttttacaaaaaaaatcaactcccccggggggggggagggggggggggggaaaccatttattttcaaaaattttttattttttttttttttttttttattttcctccaaaacgggtttcaatattttaaaaaaaaaaataacctttcccgggggggaaaaagggggttttaaaaattttttgggaaaaaaaaaaacctttacaaaaataaatccccctggggagaagggaggggggaacatgtattccaaatttttcaattttttttttatttttattttcctcaaaacggtttcagaattcgaaaaaaaataccattcccgggggggaaaaatggggtatgaaaaatttattggggaaaaaaacgtctttacaaaataataccccggggagaagggagggggaaacaagatttcaaatttttcatttttttttagtttaatctactcaaaacggttcagaatccaataaaaataccattcacggtgggaaaaatgggtttggaaaagtttatgggggaaaaaagactttacaaaataatacccttgggagaagggagtgggaaacatgatttcaaaattttcaattttttctagtctaatctactcaaaccggttcagaattcaataaaaataccattcacggtgcgaaaaatggggtttgacaagtttattggggaaaaaagactttacaaaataatacccctgggagaagggagtgggaaacatgatttcaaaattttcaattttttctagtctaatctactcaaaccggttcagaattcaataaaaataacattcacggtgcgaaaaatggggtttgaaaagtttattggggaaaaaaagactttacaaaataatacccctgggagaagggagtgggaaacatgatttcaaaattttcaattttttctagtctaatctactcaaaacggctcagaattcaataaaaataacattcacggtgcgaaaaatggggtttgacaagtttattggggaaaaaagactttacaaaataatacccctgggagaagggagtgggaaacatgatttcaaaattttcaattttttctagtctaatctactcaaaacggctcagaattcaataaaaataacattcacggtgcgaaaaatggggtttgacaagtttattggggaaaaaagactatacaaaataatacccctggagaagggagtgggaaacatgat

SEQ ID NO: 40557 - DNA, 858 bp, Heterodera glycines
ggggggaattgccccggaaaacaaaaaaaatggattttttcaaagtgtccgtttgggggtactcaaaacatttatggggagcaaaaaatccaaacgcagaattaaagtacaggctatagggaagctattcccgaaggattcggtctccccataaatctgggcgcatcggttcggggggactgccccgaaaacaaaaaaatcgattttttcaagtgtccgtttggggtactcaaacaattatggggagcaaaaatccaacgcagaattaaagtacaggctatagggaagctattccggaaggattcggtctccccataaatctgggcgcatcggttcggggggactgccccgaaaacaaaaaaatcgattttttcaagtgtccgtttggggtactcaaacaattatggggagcaaaaatccaacgcagaattaaagtacaggctatagggaaactattccggaaggattcggtctccccataaatctgggcgcatcggttcggggagactgccccgaaaacaaaaaaatcgattttttcaagtgtccgtttggggtactcaaacaattatggggagcaaaaatccaacgcagaattaaagtacaggctatagggaagctattcccgaaggattcggtctccccataaatctgggcgcatcggttcggggggactgccccgaaaacaaaaaaaatcgattttttcaagtgtccgtttggggtactcaaacaattatggggagcaaaaatccaacgcagaattaaagtacaggctatagggaagctattccggaaggattcggtctccccataaatctgggcgcatcggttcagggggactgccccgaaaacccaaaaaaa

SEQ ID NO: 40558 - DNA, 925 bp, Heterodera glycines
  unsure (1)..(925): unsure at all n locations
catacctatatgcacataaaagttattttttatatccatttncaatacaattggcaatgcttgcgatactaatggaattcactgcagctaatttatctaganntnaanttaatatttcnncataataatttctgatttttctcaagtaatannantaannttcccattggccatagtgtttcaattcattttatttatccttcaatttatgctttcgtttcgctgctttttgtactcaaaataaaccaaaaagcgtgttttttgtacggatgtgagaaaaaagttagagttgacatgaatcaccaccaccaatttgtcattaaatggcaaatccacggggggagggtggtgattcaaaatcgaattaaatggtatatgagtcaattaggaaaaataattaggatataaaatgaattttggacgatgttattatgagaccaacatactcaatggatgaatgatgcgtgccaaaaaaagatgaagcaattttttcctactatataataaaaatcacgccttaatattgtacatttaaaagccgaatttgtccattaatttattatataaatcaaaaaaaaattaaattaattagaaagattatgaacaaattgatgcaccaaataattattaaactttcgcctgttcgcgagaaagctgtgaatccgctgtataattaacccccaaaaaattaaacattctgtgcaattgtcaaaaacacaaactataattttatgttccaaaatttagctggggtgaataatgaatgggaatccaaatttagaaaacatttaaattagttaattaaaaatttaatcaattgttaaccaattattaaccgaaaatttaaaacccttgtttgcaatctgaaatttatcctgggagggggggggggggtataacgttcacaagtcggaaccatggatag

SEQ ID NO: 40559 - DNA, 246 bp, Heterodera glycines
gttgtgatcaataaatagcctgctaatcaatgtggtttaaaccccaggttctggccattgggattctcagcttttccatggctgatagagctgggaagtttcttcgagaatttttttttaattaggaaaaattcaaaaaaactcagaatttctgtgggaggggtggggggattgggggaaatgaactgcttgctccttcctgccactaaagaatttgtaacgattttttcgtcagcaatttcaggg

SEQ ID NO: 40560 - DNA, 184 bp, Heterodera glycines
cagataatctttaataaattgtaactaaatttttcctaattttcgccaacgagcaccaccagacaaattcattttttaggtagcgtatacggaagtaaaatgacgaaatttcgggggttacctatgaatgtttgaattatgttcatggaggacggcacaatgttcagttttatttttaaattta

SEQ ID NO: 40561 - DNA, 998 bp, Heterodera glycines
ggaatcccggaaggtcgtcgaagacccactggcaaccttcaccaagtggttgctgaacttcgaaacggaagtcctcggcatggagcccggtgcgaagaagcgcagaaaaaggaagaatgccgaaaacaccgacggcgaggctatggaatgcgaagaagaagaggatgccgtagatgaggacgccgagaacaactggatgctggggtatgaagaagccggggagaagccggagtcggtgacaacatacgcgtacgcccacgccggtaattttggaattattttaaaaaaaaacttggaagaaataaaatttaaaggttcccgctacgatcatgtgctgatttatggtgaaatgctgcgcatgggtgtccgccctgaactcatccgccaggggaaccatctcctggaaatgaaggcccgcaaaacaggagtctacacaaccaccgttttccgggacaggtaaatattttgaatattaaatatttttaaaatttttgatcactttagttacaagttgatcccaataaaacttgccaattttgtcaagacgtttggcctagaaattgagggcgtggaaaacaagaaatattttccacacaaattcaataaggtaagaggaatttataaaaaaattaaataaaaattaatacaatcttaggcggaaaattatggcactgtgttggacaccctgccaccgattgagaattattacctcaggtggactcttcccggcagagcgcgcaaagtttgaacaatggtacgacgagaaccgggaaactggttttgagctcagtgaagtcatcgcggactactgcaagacaggtacaatttttgaagaaaaaacgtgcaaaaataacgaaaaaaattgaagatgtccaaatcctggcacgtggtatggtaaagatgaggcggctgtttttgtctgagacgcggcacgacgtaaccgactcggtcaccgtcccgtccggttggcggggtgggttgggtgcagttggctcacc

SEQ ID NO: 40562 - DNA, 925 bp, Heterodera glycines
aaattatcagagtgccgaaaatcgcatgtgatctaagtctccacagaatggtctaagtaaaaatcgtaattacgctcaaaacgcttctcaaacaattttagcgcttccaattccttctacaatcgcctttatacatcccattatgagcgctaaaattctcagagtgccgaaaatcgcatttgatctaagcctagaaaaaatggtctaagtaaaaatcgtaattacgctcaaaaagcttctcaaacaattttagcgcttccaattccttctacaatcgcctttatacatcccattatgagcgctaaaattatcagagtgccgaaaatcgcatgtgatctaagcctagaaaaaatggtctaagtaaaaatcgtaattacgctcaaaaagcttctcaaacaattttagcgcttccaattccttctacaatcgcctttatacatcccattatgagcgctaaaattatcagagcgccgaaaatcgcatgtgatctaagcctagaaaaaatggtctaagtaaaaatcgtaattacgctcaaaaagcttctcaaacaattttagcgcttccaattccttctacaatcgcctttatacatcccattatgagcgctaaaattatcagagtgccgaaaatcgcatgtgatctaagcctagaaaaaaatggtctaagtaaaaatcgtaattacgctcaaaaagcttctcaaacaattttagcgcttccaattccttctacaatcgcctttatacatcccattatgagcgctaaaattatcagagtgccgaaaatcgcatgtgatctaagcctagcaaaaatggtctaagtaaaaatcgtaattacgctcaaaaagcttctcaaacaattttagcgcttccaattccttctacaatcgcccttatacatcccattatgagcgctaaaaatatcagag

SEQ ID NO: 40563 - DNA, 917 bp, Heterodera glycines
  unsure (1)..(917): unsure at all n locations
cgtacttttgacccagcgcaattctttaccggagcggaccttttaagatgnccggncccgnacngnggacccagcgcaactctttaccggagcggaagnannaagaggnccgancccggcggacggagggcccagcgcaagacagcaccggagcggaatcgagaagaccgccggccccggaccgacgacccagcgcaaaacagcaccggagcggaagagaaaagaagcccggacccgcaccgaggacccagcgcaacacgacaccggagcggaanaaanaagagaaccggccccgaacgcccggcccagcgcaacacngcaccggagcggaagaagaaagaanaccggccccgcaccgggggcccagcgcaacacaacaccggagcggaatttttaagatttccggtcccgtacttttggcccagcgcaattcttaaccggagcgggattttacgggatttccggtcccgtacttttgacccagcgcaattcttcaccggagcggaatttttaagatttccggtcccgtacttttggcccagcgcaattcttcaccatagcggaatttttaagatttccggtcccgtacttttgacccagcgcaattcttcaccggagcggaatttttaagatttccggtcccgtacttttggcccagcgcaattcttaaccggagcggaattttacgggatttccggtcccgtacttttggcccagcgcaattcttcaccagaacggaatttttaagatttccggtcccgtacttttggcccagcgcaattcttccccggagcggaatttttaattttccgggcccggacttttggcccagcggaattcttcaccggagcggaatttttaatatttccggtcccgtacttttggcccagcgccattcttccccggaggggaatttt

SEQ ID NO: 40564 - DNA, 712 bp, Heterodera glycines
tgatacgatgcagatactgtttcttagatttattgatcttaaatcatgtttatatgtattttttaataaatcgatgcaattttattttatttattaaaataattttacattataaatattttctcattaatattttgcaagttgttgatggctcttttggcgaagatactccggccgaaatattgcacgattagtgcaaattatttggatttttaactagctttcagtttactattctattccgcttttcttgaatttatgcaattttttttaaaaattaaatttacatataatattttctcattaatatttctaatttttttaaattatatgttatttatattcatattaaaataaattttttctcaactcggacaacaatttgacaatcatcctaaaaattcaagcaatgagaaaaaaacgaaatttcgatttgcaccccccccccccctccccgacctgtttttgttccgccggtttcaccacttttttaatacgttctgtgccgcttggattgggaatggcggatgtccttttgacgggacgtgaagacgacactgacaattgttataaaattcatttattttgtaaattgaaaacaaaaaaatacatttattttcaaaacggcataaattaatgcagataattaaaaataaacaatgaatttatgagacaacaacgaaaaataaataattgaatttatttttacaca

SEQ ID NO: 40565 - DNA, 920 bp, Heterodera glycines
tattaaatagaatatagataatattccattatttttttatatctctttactcaaatacagaattattgagttttttcatttaaattttttaataagatattttgttaaattaatattacaacattaatattcaacaaaacttaaacaattaattatatgttttttcggttacaataaataaaatatttattaattttattattcttattaattttatttaatacagttattaacatttaataggtttaatttatttataatttgtttcattaattaattgtcataattattttagcgtccttgactttattttcttttttcctttattattgatttaaatttttaatttgaaatatgctcaggttaatggttgatttattttttacattataatttttcatcgttaaatttatgtactcctatgaaatattttttgtctaccttggcatgaactgttccatcttttacaaaatgaaataagtttctaaatgtttttaaaaattaacaatagattcaatttaaacaaaatcgaaagaattaaagcttaaaaactaaaagtaaaaatggtcaatggtcagccttgcatctctttcactgaggctgcaataaggcacggtcttcttgaggatgacaaaatatgggacaaaactctcgctgaggcagcattgtcccggtggcctgatcaaatgaggtggctcttcatgagcatcctcgtttatggccaccccagtaatgccgtcgaattgtggaacaagtacaaagaccaaatgtactttcctcaaggcattaccacaccggcacaacgccaagcagcagagcttgaagccctagccgaccttgattggcggctgcacagctgctttaacttaagctgtgtgcattttggcctgccaaaccccccaaactcaattgccaaaaat

SEQ ID NO: 40566 - DNA, 103 bp, Heterodera glycines
caggcgttgtcggcatcgtgggcgtgcagcttcgtcgagcgcttgatgtacttgccgtacagcgcgtgcttgacctgacgctcaaccaggacggtaaccgtct

SEQ ID NO: 40567 - DNA, 1203 bp, Heterodera glycines
tcagaattcaataaaaataaccattcacggttcggaaaaagggggagtggcaagttctattggggaaaaaaaagactttaccaaaataataacccctgggagaaggggagtgggaaacgatgatttcaaaattttccaattttttttagtctaatctactcaaaacgggttcagaattcgataaaaataacattcacgttgcggtgcgaaaaatgggggtttgacaagtttattgggggaaaaaaaagactttacaaaaataatacccctgggagaagggagtgggaaacatgatttcaaaattttcaatgttttctagtctaatctactcaaaacggttcagaattcaataaaaataacattcacggtgcgaaaaaaggggtttgaaaagtttattggggaaaaaagactttacaaaataatacccctgggagaagggagtgggaaacatgatttcaaaattttcaatgttttctagtctaatctactcaaaacggctcagaattcaataaaaataacattcacggtgcgaaaaaaggggtttgaaaagtttattggggaaaaaagactttacaaaataatacccctgggagaagggagtgggaaacatgatttcaaaattttcaattttttctagtctaatctactcaaaacggttcagaattcaataaaaataacattcacggtgcgaaaaatggggtttgacaagtttattggggaaaaaagactttacaaaataatacccctgggagaagggagtgggaaacatgatttcaaaattttcaattttttctagtctaatctactcaaaacggttcagaattcaataaaaataacattcacggtgcgaaaaatggggtttgacaagtttattggggaaaaaaagactttacaaaataatacccctgggagaagggagtgggaaacatgatttcaaaattttcaattttttctagtctaatctactcaaaacggttcagaattcaataaaaataacattcacggtgcgaaaaatggggtttgacaagtttattggggaaaaaaagactttacaaaataatacccctgggagaagggagtgggaaacatgatttcaaaattttcaattttttctagtctaatctactcaaaccggttcagaattcaataaaaataacattcacggtgcgaaaaatggggtttgaaaagtttattttggaaaaa

SEQ ID NO: 40568 - DNA, 558 bp, Heterodera glycines
agaaacccattgccccaatgtgtacattcgtccacctgaacactctgtccaagaaatcgtcctccttctgtcccttcgccctgcacatttccttgcgcacggcgtcaattacttcaaagcagatgctttccccttcactgtcacagtccaaaaacaacaataaaaactcgcaattcgccgcctcggaagcgaggaactgaacaaaatgggggagggctcatttccaaactgatttatgaacagattttggcaaaaaatatgatcaattttcttcaggttgggcaaatttgaaaaaaatatatcaaagaatttgtacactcttgatgtaaatggcccgaatttggtataaaaaaatagggcaaaaaacaacttactgcattcaaattgtgcattgggttggtcattctcggctcaatggggcacttgaaaaggacctttgggtcgtcgttccggcaccaggaagtgaactcagaggtaaaattggtgcctaaaaaccaggaattaaagcaccaattaagtggacgattgtcaaaaatagaattaattttttgaatttga

SEQ ID NO: 40569 - DNA, 905 bp, Heterodera glycines
cctccgcttttacctttgccattgtccctccgctgagctttttcagctgacgcccttcgtcgacctttgcggttgcttctgtttctgctgcggcggatgttggcccttccctcgatgtccgcccaacttttgctgcagtcccttccaccgtttgatgcgtttgccgccgttggccaccgccacactgtccgaagtgccatcggtgtgattttcctcctcaaaaatggacgacgaagacgacgaagcggaggaggaggaggagccgaagcagcagcagcaccagcgcatgcggacggagcagagaagggaaaatgggcggaggaaaagtcagcggacggcacaaaagagacggacggggccagcagcagaggaaggcattggacaaaggcaaattgggctaattgagcagcacaggcacaacaattgggcctatctgctggggcggcacggaatgaacgcgggagagagtggcggcacgccagtggcccaaaaacagcgaaaattcactaaacgtcactttattaatgcttattgttattgtttgttatgtttattttgtggggaaaagcggatgaaaagagtcggcagagaaaaaaaactgtcacaacaaaaggcaaaaaaaaagagggagaaaaaatgatggacgacgtaaaaaaagggggggggggagaaattgcgttaattacgggggaagacacttttatattattcattcatcgctctctctcgttataataatcatccgtcgtcgtccatagcttcgatgaattgatgagatgggaaataaacattttatgggcgcgggaggggaaatattggccagggacccgggaaagtgcccccccccccccggggcgggagaccaccgccaaagggtcgtccgccgacatcgcttcacttcaccc

SEQ ID NO: 40570 - DNA, 338 bp, Heterodera glycines
aaagcgcttcgcgctttcggagcttcgctacctagattagctctgagttgtgaagatatttggaaattttaaaaaagctcagacgggcgctttgcgtccgtttttaaattttgttagcatagacgggcgcttcgagcccgttttttaaattttgttggcatagacgggcgcttctcgcccgtttctaaattttgttgtgctcttaaggccgattcgcagcctcagacgggcgcttcgcgcccgtttctaaattttgttgggctcttagggccgattcccagcctctgacgggcgcttcgcgcccgtttttaaatttagttgggctcagacggtcactt

SEQ ID NO: 40571 - DNA, 1100 bp, Heterodera glycines
  unsure (1)..(1100): unsure at all n locations
tttccgttttttcttcaattttattaataatttttgtctctttttcattttcctttttgaaattttcttttgcatctgtaacaatttcttctttatctaatgaatctgaggataaataatcgtttgcactgatatattcggtcttaaagttttttctttaaaattttggcattttaactaataaaattaccggtgataacagtttcctaatttttgcattgtcttcgccttttaagaaagttttcaacaatttctctaaatgaaattcgcttttattttttaaaatctctatatttaaattaaccattttttgagaaaagttctttgaattcgtccccttttgattgattgtcaattaattggctaattttctcgaaatgcattctcgacaaaaatttatccttttttgttttcctttttaaatttttgctcatacaaataataaatgttacgccaattgactcagcaaaatttctcagtgctttctttttgctctcataatttttaattcggtccattttgtgcatttcgtcgaatgattcttccgcgcatatttttagtgcctttaaaagagtgacgtcttccggcccattctcccacaacacaaagaattcctggcattaacatatttaaaattatctttaaaatttaataatgtaaaattgttatttgtatttcggttaggcatttagcacatttttgcttttcgagcagctaaaaatccaattttactaattagaatgaaaaatatttgatgcaattttttgaaaaataaatctttatgtattgctaacgaagatccttttacaaattccattttagtcctcattaactgtggattaaacttaaactaataaaaataattaaacaattaattaaattaccttttgcttttctttagccgttttcttctcaagtgtaatgcgattttccacaattaattgctcaattttcgctgcttttcccttactttcgagcgcaatttgctcgattttgccacaaatttctttgtctttggtcaaaatccttccanaaatacagccaaatgtcttttaaatcgtcaattatttcccgtcgcatttccataaattcgttgtcgt

SEQ ID NO: 40572 - DNA, 808 bp, Heterodera glycines
  unsure (1)..(808): unsure at all n locations
ccaacccgggaatttttaaaaattcaaaaaaatttaaaaaaatatcaaattttaatttatttcgagtgaaaaaatacaaaattaaatttttattttgttttttatttaataaaatccaaaagttaaagctaaattaaattaatgaaaattttcaaaccaaatttatttcaattatttcaaacaataatcaattttggacctacataaatgatcgaataatattaaaattgatttacttttcacatcactttttttaggcacgttttttccaaaaaacttttggggaagaagggggtccggcggtgccgataggcggaaattttgaaatttaggtgtaatttgttaacagattttcaacaaaaaaggttggtttttgggattactaagctcaatttgtacggattttctttaaaaaatgataaacatgtatcaattaaaaaaacaatgaggaatcatattttgtcgatacgaaaccaatgagtgtacaaaaagaaaattcaaaaatattttattcctgtagagggattgaaccaagggaaggaagaagggaaagtaaaggatactagccactaggccatttgcacaattgtcagtgcgacttttaaagaatatattaatgtttttttttttaattttttttctttaactccaagtttcgttcctaatttttcactcagacccccattcttaccagtgcttgtttttcccggttgccctaccgggaccgggacctgagcttttcaaaatccgggaccgggacctctgaggaccgggnattcccatcccggtcccggcgcactctactcta

SEQ ID NO: 40573 - DNA, 451 bp, Heterodera glycines
  unsure (1)..(451): unsure at all n locations
tggatttctatatatttttttcttatttcgcgatttatatacctatttccataaaaataagaaaaaaatgacaatttcgcttttcaggttgatttttcgctaaaatgagtaaattttaagctatgttatgttttttccttctaaaatgatttttaataccatttttcgccatttttgaaagttttactgtgcgtttagcatatttaagaaattttgaaaaattatacactcaatttggaaaaatctgtccatttttttgccattttatttccatatttcgcgatttttggtccatatttttaccagccctagttataagattctcttttcattatttcttcaatatgtttggcaaggcattgacggacggacataagcacaaaagtgatatgtttgtgctngtgttggtggtgttcaatttaatgattttancattttgaaggcgcatttt

SEQ ID NO: 40574 - DNA, 1007 bp, Heterodera glycines
  unsure (1)..(1007): unsure at all n locations
aaaaactcacccataatccaatgattttttatttaatgtatgtgaggacgcatcaaaaaacatttacagtaagcaaaaaattggatgatttcttaattgcctgctgtccccgccccctgggcctaatggcatttttattttttttatgatttaaaaaagaaattatttagacgaatttatgagatgggagggtgagcccaaaaagcttggaatcaccggaatcagtgtgaaatgtcaacacaaacataattttatttttttgttggtattttgagggtgtacgcaatctgtggatttccgaagagctttctcggaaaaaaatatatattttaaattttattaattatttttgtatatgttcattatggaaaatagttggaaagactttgtagaaggggagagagaagagagagcggtggaaaggaaggagcagaagctgtgagaattggaggaaaatatttaaaaattcaatcaatatgtgtgtgtgtggcgatttttatgcaatgcaatgattaatgatgcgacaatatgtgctgagcatttttaaaaggtgtccacccgcaaaaaaaggggaataaatgggggggggggaaagggatccgccgccatttcccatttccatcaaatcatcttctgtatatagtaacaacaacaacaataacaaaacaacaacaataattgcataggtacaataataatcccataataatattattggcaacaaaaattcacagggaaaacggtgagccatccgccggcggcacaaaaaaacgccccaaggccaaattgtgaaaagggtcagtagagagcgaaagagagtggcatttgtatgtgtgttgctagtcggtcgtcccgtctcnaaaagtcgtcagtaaatgcgctcgtagaacaataagaatgcctgtaaaaacaacagatacaaattaggaaagagtttttgtcggaaaatattaagatttttccaatttttccaaatttttaatagaaaatccataaaatataattat

SEQ ID NO: 40575 - DNA, 770 bp, Heterodera glycines
tatctgttccatcaaacttacatatcaccatggcaccgtttttatggatttcattattttttaacataatatttcaccctcaaaatcaattaatgtattatttttaatttaattttatgcttcttggatgcatttttatttccatatttttcaatatataaactatatttcgatatttatatgaaaattcaagaatcccactcattttaatcgaatcttttttcaagatttattgttttttagtgtaacaactttcatttttcaactgtttactgttgtttccccttctacttaaacaatattgcattgtattgtaatttgtaactttctgtctttgtgttttcttttcattaataaaaaattttctcttaaacctcctctaataataagctgcttttcaaatattgctgctggcaattttgttgaatttctaatgattttgaattgcctgtccaatattgttgcggtacccaaatgtccctccccccaaattcgttttaaagagttaaagctgggcgggaggacctccagtacttttcatcttcgatccagtgttttctgtttttttagcttttttattgtaaatggcattttacttataattcttttgccaacgcatgtcccttcatttgcggcccgacgcttgcgcctttgtccaaaatcgggtcaaaatacagcttttttcagtacctgatcgcctaaacagctttaaataagcgattgaaaatgattgtctccaatcatttgatcttcaatgaatttttgaaaaa

SEQ ID NO: 40576 - DNA, 890 bp, Heterodera glycines
atgtgtataaaatttatcaaaaaaagagatagacattctttactgggatagagtataaatttaaaaattccctcaaaaataaaaggtctattgcgcaccgccctccctatcatgctcgagagcatttgtatgtgtataaaatttatcaaaaaaagagatagccatttttctgggatagagtctaaatataaaaatcctctcaaaaataaaatggcgattgcgcacagccctccctctcatgctcaagagcttttgtatgtgtataaaatttctcaaaaaaagagatagccatttttctgggatagagtataaatttaaaaattccctcaaaaataaaaggtctattgcgcaccgccctccctatcatgctcgagagcatttgtatgtgtataaaatttatcaaaaaaagagatagccatttttctgggatagagtataaatttaaaaattccctcaaaaataaaaggtctattgcgcaccgccctccctatcatgctcgagagcatttgtatgtgtataaaatttatcaaaaaaagagatagccatttttctgggataacctctaaatataaaaatcctctgtgaaataaaatggcgattgtgcaccgccctccctatcatgctcgagagcttttgtgaggtataaaatttctcaaaaaaagagatagacatttttctgggatagagtataaatttaaaaattccctcaaaaataaaaggtctattgcgcaccgccctccctatcatgctcgagagcatttgtatgtgtataaaatttatcaaaaaaagagatagccatttttctgggatagagtataaatataaaaattccctcagaaataaaaggtctattgcgcaccgccctccctatcatgctcgagagcatttgt

SEQ ID NO: 40577 - DNA, 1434 bp, Heterodera glycines
aaattgaaaaaggaaatcgaagaagagaaaaccaaaattgaaatttggaaccaaaaatcaaaccgaacaaagaaaaagcaaaaagagagacgaaaagcactttgggaaaagttcaaagaaatgaaaaagcattttgccaataaattggaggcaaacaattcgactgttggtgaaggcggcgccaaagaaatcgcttgagatttcatgagaatggatttgatgtattttgagattttattcttttttttttggggggggggagacgtatatcttttgatccttggggcttttcatccgttggctttatcctttattttggtttttctatcgggaaatttcatttttttccattttgggattttcagggcaataggaaaaaatccgggaatgtgagctcaaattaaatttaactgaaaattggattgaaaaaaaaaattccaattttaacgagaaaattatgaaatttagaaaaatgaaatctattggcacaaaaactcatggggaaattcctgttgcccagcagaacattattggctatcttcttggtgattatgattattattatatcacttttgtacattcatttccttggattttcaattttactgtcctttttaaattcttttgtataaagttttcctaaccacattttgaccaaaagattaatcattttgttgatgggtgactgatttttgacagaaattctaacaataagtatttaaaaatatcttttaaaacaaattttaatgggaatttcttttttgaaggttatttatgtaattctgaaaagtatgtttgtgtgggatattgccgaggatggggttcaataacaaaagattgattaccaaccgacaaagaccaaaaaatatttaaaaaaacatctttttgttttttttcaattttttttttgatgaaaaaaatatatatttaaaaaaacatctctttgttttttttcaatttttttttgataaaaaaaatatttcgtttcgttggataaaattaatccagatttcatactgaaacattgatcccgacttcgacgaacgactcaagtaggaatgaggtgataataatttgggtagggtaaagtgattaataattgaggcatttagatttggatcaggcattcagcaggcacagtgattagtcaatgtgccaaaaatcttttaataatcaattttgataaatactgttttgagtgtactaatttatttgtttgtttaaatcgccaaattatgcaaaatgttcaataacaaatttatcattaaaaacattgaaaacaaaaattatgttttaaatttatttgatttcaatccaaagattttttatattttttacataaagttttctgttctcattcatatgcaataacatttattgtaaacatttcaccacctaaaataaataaataaatttaaatattatattttttaa

SEQ ID NO: 40578 - DNA, 874 bp, Heterodera glycines
  unsure (1)..(874): unsure at all n locations
aaagaatgcatatatcctaaagatttgtccggtgccgtcgcgtaaaattgacaaattttgggagttaatttttctgttagaaaaacccattaaaaaattttttggtaattttttcgagtttttttctacctaaaaaataagaatttttcaagttttctagaaaaaaaaattcaacccgttaaatttggctattgcatttaaaaaaaatccatagataccgccgccttgataattggccattttttcgtgatttataccaaatcctcccgatctctaaaaaccccacttggccaagaattctttccaccccgagacatcgatagctatgacaatccttaattttaccattttttggtttaaaattaagagaatttgttccaaattattatttttttgcagtattcggtgacgcacaattgttaattaattattcggatgcgctttttcatgatggcacaacactgatccatgtgattggcactctgtccgctcagctcagtgtttggattcgttggatggattctgaactaatggagaagcaaaattcaatgcggatagtcgatagaaaaatctacgagaaaatatgggccaatgcaaggctggaatttgaggtgaagaagggggtcttgttggaacttttcgcaaaaaataaaaatacgaaattgaattgcacaaatattgaaaatttcgccaatattatgattttgataattagggctgccaaaaatatttgcaaaaatggtcaaactatgtacataaatatgtaagaaaaatagccaattatgtaagaaatatatacaaaaaacccaaaaatatgaactanatatgtaaataanattttaaaatggttatttttttgaaaaaaattcttcgt

SEQ ID NO: 40579 - DNA, 924 bp, Heterodera glycines
tcataaaaaacaaaaaaaaacgggttaatgattgtaaatgaatgggttatttgggcggattatttgagatgtttttttttcgcattttccgttttttttaattctatccaaaattcactgacaatggcactttctttgctccacaaaattgttgccggacaattgctctcgctaaaccagcaggtggccatcgatgttgaactccccactgatgcgcatgcaattagtggaaatgactgaaaaatttttgaattggcatatattaattaatgcaaaaaatgttaattcattaatttaatttcattaattttcattttataaaattttttttcaaaaaaaaagaaaattacactgtccaataagctgcaaatcggcggacgtcgtgttgttgttgtcatgcccacaaaactcgacaaggttaacacaaacgttcatgagttcgttcacctgtaaataaccaatgatggagatgatttgttaaatttaaatattaaatattttatgaaataattttcgttaaacaaattattttaaaaaaggggagcagggattttaatgatatttcggagtcaatagccagttctttcgtacaatgaattttcgtacaaaaaaacactcttttttaagagttcaattaaaacattgatttttttttaaaaaatcaaaataaattttgaaattaaaaaaacataaaaatgtttaaaattgaaactaaatttatttgatttttgaaaaaaattctaagttttagttgaaaattcttaaaaaaattgtattaattctatctaacaaactgccaattgtacgaactgacatgaaaccgatttttcgatagttaaattatatgatatcaagaaaaacaatattggatttttgcagtactttttaaatgaattatcggcttaaaacattttggcgaacctt

SEQ ID NO: 40580 - DNA, 914 bp, Heterodera glycines
ttcgaaagtgcaaagctaattagcgattcaggcgcaccttggggcctgaattaagccattttccctttgatcggtacacaattggccgaaaaagagatagccattttctgaggcccgaaggaaaatttgagagggctaatttatatgtaatattcgaaagtgcaaagctaattagcgattcaggcgcacattggggcctgaattaagccattttccctttgatcggtacaaaattggccgaaaaagagatagccattttctgaggcccgaaggaaaatttgagagggctaatttatatgtaatattcgaaagtgcaaagctaattagcgattcaggcgcacattggggcctgaattaagccattttccctttgatcggtacaaaattggccgaaaaagagatagccattttctgaggcccgaaggaaaatttgagagggctaatttatatgtaatattcgaaagtgcaaagctaattagcgattcaggcgcacattggggcctgaattaagccattttccctttgatcggtacaaaattggccgaaaaagagatagccattttctgaggcccgaaggaaaatttgagagggctaatttatatgtaatattcgaaagtgcaaagctaattagcgattcaggcgcacattggggcctgaattaagccattttccctttgatcggtacaaaattggccgaaaaagagatagccattttctgaggcccgaaggaaaatttgagagggctaatttatatgtaatattcgaaagtgcaaagctaattagcgattcaggcgcacattggggcctgaattaagccattttccctttgatcggtacaaaattggtcgaaaaagagatagccattttctgaggcccgaaggaaaatttgagagggctaatttatatgtaatatt

SEQ ID NO: 40581 - DNA, 896 bp, Heterodera glycines
atttgggcaaataccgggtcagggtattgcccgttacagaaagccgggtcagagtcctagtttttaaaccgagtccaagtcatgaaaaatccaaacaaaaatctttaaaattttttcatgaaaattaaaaaatattttcatgaaatatatttattttagaaacaaactttattatttgtccattttttccaccttttttttgcggtgcgttttttaaaacttcggggacagttggggtcgggcggtgccggtaggcgccgccgaaaaaattttgaaaattgtcttcggatttgttaacagattttattcaaaaaatgatcaaaacttgttttttaaattttttgtttttaagtcgctttttttgtggcgctgtttttccaaaaaaaaattttttggaacattgggtgcggggtccggcggtgccgaatcggcaccgccgataggcgccgccggaaaaattctaaaattttgagtgtaatatattaacagaacttgtcaaaaaatgatcaaagttttggttaaatttgcagttttaggctgtttaaaaaaagaaaaaataataatttttaaattgaaatattttttattaattaaaatttcaattgaaaataatttaaagaaattattaaaaaaattctgtaccgttgggtaattgaacccaagagaaaaataatgaaaggcagaaggtttagccagcagaccatatttgaattggagctatccaaaaatagagaaaacattaaggaaggaaagaaagagatttaagatttttttttcgcgtaaatttgaaaatttttctggctgctcaaaagttcaatctttaggggtgtattttcaactctcgcctctcgtcccaaaaaacgagagacgagaggcgagagtaccaaaaatggcga

SEQ ID NO: 40582 - DNA, 906 bp, Heterodera glycines
  unsure (1)..(906): unsure at all n locations
aatttctttttagattaattcttcctttatgccattttcagactttttttgaccaaatttgtaaaaattgtgggcagaaaataatatcaaaaaaaatctgattttcatttcaggggcttgagaatttttttaaaagttttaaaaaaaagtcattttatctgttaaaaaaatacaaatacattaaaaaaaagtagaaaaggacagaagaaaaagaggagaagctaaactatttaaaatgaatgactataaaattttaaaaaaagagcagtaattctaggattttttaaaaaaatttttcgttctttttttgtttggtaatgaagtcgttcaacattctgacttcaaagattgtccgttcagcatgaaatcttactaaaaataattaaatttaaaaaactaataaaactatgtaaaatgaaaaattgcataaataaaatcattttcaacttaaaaataaaatataaaattacatctaaatatttcgcagtaaattcattgccttttgtaatatcctctttcctcacaatttcggccgcgtttccgttgaaaatggcactttttaattcaaaatcaatctttaataattttagattaaatttttttatcatttatttaaataaatttgatttagaaaatggcctaccttgatctcattttctgtttcttcttttttgatgtaagaagttttagttaatagtagtttatttggttgctttgatttgtccgtttcattttgtccgtctgttacattttgtccgtattttccattttgtccgtctttttcttcttcatatttgaaattaagacaggaagagcatttaagtttanacagaagattaacacttttgcctggttcaatcatttttttcataaatccaacataaacatttanatcagtccgataat

SEQ ID NO: 40583 - DNA, 1368 bp, Heterodera glycines
aaaaaaaaaaaaaaaaaaaaattatttttttttttttttttttttttttttttttttttttttattatatattattttttttttattccaaacaaaaaaaaaaaaacttttttttttttttttttaaaaaaaaaaaaaaaaaaaaaaaaaaaaattttttttttttttttttttttttttttttttttataaaattatttttttttagagcccccaaaaaaaaaagaattttttgtttttattttttttaaaaaaaaaaaaaaaaaaaaaaaaaaaaatttttggtcaaaaattttttttgtttttttttaaaaataaaaaatttgataggggcagacaagaaaaaaaaaccgttttttccaaattttgtataaaaaaaagaaaaaaaaaaaaaagctatttttggtcaaaaattttttttgtttgcgtttcaaatatcgtaagattttttgataggcccagacaagagaaggcaactgttggtactatgtttgcagtaaaaaaaagacaaaaaagagatagccattttttggtcaagaattttttttgtttgcgtttcaaatatcgtaagattgtttgatagggccagacaagagaaggcaactgttggtaccaagtttgcggtaaaaaaatgagaaaaaagagatagctattttttggtcaagaattttttttgtttgcgtttcaaatatcgtaagattgtttgatagggccagacaagagaaggcaactgttggtaccaagtttgcggtaaaaaaatgagaaaaaagagatagctattttttggtcaagaattttttttgtttgcgtttcaaatatcgtaagattgtttgatagggccagacaagagaaggcaactgttggtaccaagtttgcggtaaaaaaatgagaaaaaagagatagccattttttggtcaagaattttttttgtttgcgtttcaaatatcgtaagattgtttgatagggccagacaagagaaggcaactgttggtaccaagtttgcggtaaaaaaatgagaaaaaagagatagctattttttggtcaagaattttttttgtttgcgtttcaaatatcgtaagattgtttgatagggccagacaagagaaggcaactgttggtaccaagtttgcggtaaaaaaatgagaaaaaagagatagccattttttggtcaagaattttttttgtttgcgtttcaaatatcgtaagattgtttgatagggccagacaagagaaggcaactgttggtaccaagtttgcggtaaaaaaatgagaaaaaagagatagctatattttggtcaagaattttttttgtttgcgtttcaaatatcaaaaaattgtttgatagggccagacaagagaaggcaactg

SEQ ID NO: 40584 - DNA, 500 bp, Heterodera glycines
ttcctttcagtattcctgcaaagtttggtgcgcttctgatcagtttctgaaaaaaaagttaaacctaaactttttggcctgtttaaaaaggaattaaaaatttttaaaaattttattcatctccctttttgatagaaaaagcatcagagtgcctaaactaacatgtaaataaaatttggtgcgtttcagaaccctttctgaaaaaatatttaagaattaattttgcaaaaaataaataaaaacgaaagactcagattttcgaaaatttttttgagccagctagctcggcgctcatttcagtgtaagttagtcctttaccggggagtatccctgcaaagtttggtacgcttctgctcaattagcaaaaaatatgagtgatcgaattttcactaaaaaagttaagcctacattttttggcatatttaaaaagcaactaaaaaatttttaaaatttaataattttcctgcaccgaaggtactcactcggccgcttcgcggccg

SEQ ID NO: 40585 - DNA, 878 bp, Heterodera glycines
  unsure (1)..(878): unsure at all n locations
tgtgctcaatggtatgatatttcacaaacacctccttaaggaggagcnccngnaaaggannangggnanaggcccctaatacgaacaccggaatcaggcgaaagcgaggggggagaagaagctgccgcgaagcaaaggccaaccgaccggacgagcncgaaaaaagacacgggcgngcgaaaacccggccccggaacaaaaccaaagggccnaggcccgcaggccggccgaacccagcaaagaagcggcacaaaaaggcagcggngcagnaaaaacgaaacccctcttcccataatcccgttgacggtaaattatagtaatcggcaacaatgtgctgccagcgaccaaatcttttacaatgtgctgccagcgaccaaatcttttaaacactcgcttaacaaaatgcttaacactgggttaggttcaagaagcatttctataatagattaatcggcctacgaatcagaaagttaattattagactgatatttttcaagtaaattatttttctcatttgtaactttcataaattttagaccaacattgggattcaacaatggctcatgtccagcgggcgctcttccataatgtccattttgaccaccggcggatggctgcacgaatcgctgtttctgcggctgaatcccacacatttcggtgccgtcgttagaagaagtgctgctgctgtgcagaagttaatgaattaattagattcaaatcctctcttttattagttctttatgggaagaatcaaccattttttgcttatattgcctgtgctacccactggcggaaatattgaaatgctggtttttatgattttttttcataatcttttaaattttaaatgacaaaataaatatttgggatcgggttct

SEQ ID NO: 40586 - DNA, 902 bp, Heterodera glycines
cgatcagaaagccagtgtatttgagttctggaataagtcgtttagtctgacggagtgtgtctggtcatataaggcacagtgcacgcgtcagtgccagccgaagtttctctgtctccaacgacagtctaaaaaaaataattaaaaatcaatgaattttcaaatgaaaggacacaaaaaaaactgttgttggacctgtcttgggtattgcaaataactctccgcaatgtaagcgaagaattgtttattggtgattgcgtgttggttttggttgttcttaagcgctttatcataattgtccatagtaacatttgcaggcatcggaagcatttcgatgctgacattcaaaggcaaaggcagaatagccaaataatagcaactgaaattgaatgataaatatgaatagaatacaaaaagcaattctcttacacaataggcccattttcttggttcggctcgtgctcaaaacgaagaccaaacgacgaaatgttgggacgagaggcgacgctgggcggttcaatgtgttcaggctccgcataatccataacacattggctaccgatagagacggcaatgctactcccggccttattttcagcccacacagtggccgaatagttccgatttggctaaaaattagattttgtgtgcgttaaatttaattgctttgcacaaaactaaagcaaaatgtacctttaatggcccatatttgcaggaaaacaacatcggtgaagcggcagattcgatgtaatgctgcccaatttgttcggccttcgagcagtcctcactttccggataatggtcctgtggatgcattttgctttcgggcgaaacataacgaattcgaccagaaatttggacctaatccagcgcaaaccttctttttttaatcaaatgaacgtctc

SEQ ID NO: 40587 - DNA, 289 bp, Heterodera glycines
tattttacgatttttcttacatataaatcgcagccctagttatgagcaaaggaactcaaaatagtagatttttagatttttttttgattttttgaaatttggcaggataatagagaacattagggcttccgaataataacaagaaaaagtttaaaagtatattgttgctttttaggaaagttatgtaagcaaaatttttattttggggttttttagtaacatctgaacaccttctactcacctttagccaacgaatttaaagatcagcttagtgttcagcgcttaaaat

SEQ ID NO: 40588 - DNA, 687 bp, Heterodera glycines
  unsure (1)..(687): unsure at all n locations
aaaaaagacgaaacaaaagaagacccccgggagaagggagggggaaacacgacgccaaaaccggcaaccacggcgaggcgaaacaacgcaaaacgggacagaaagcaagaaaaacaacagacacggggcgaaaaaggggcggagacaagaaaaaaggggaaaaaaagacaaaacaaaacaacaccccagggagaagggagagggaaacaagagcacaaaagggccaaacaagcccagacgaacccacacaaaccggaacagaacacaacaaaaacaacacgcacggagcgaaaaaaggggacagaaaagccgacaaggaaaaaaagacgcgacaaaacaagaccccggggagaagggagcgggaaacaaganaccaaaaggngcaagaaaagagagacaaaacaacacaaaacgggacagaanncaagaaaaaaaacagncacggcgcgaaaaaaggggcnagacaagaaaagaggggaaaaaaagacannacaaaanaaaaccccggggagacgggagagggaaacangannncgaaacnnaaagagnagggaacccnaancgacacaaaccggaccagaaggcaacaaaaaaaaacaacacggagcgaaaaaaggggnangaaaaagnnaanaggggaaaaaacacnnaacaaaanaanacccccgggagaagggagagggaaac

SEQ ID NO: 40589 - DNA, 1025 bp, Heterodera glycines
  unsure (1)..(1025): unsure at all n locations
attatttttttaaataataaaaactattcaattaaaaccacctaattttttcaacggacacataataaaaattttgcattgatatgtaaatgcctttttttaatgtgcatctcaaggacagaaaataaaaaccctgagttgtaactcatatgcaattaataattataaaatcagttcttaataaatcacttgatttttctaaacatcggtaataaaagtgttgcattgaaaattatattattaaattaagattttaataaacaaaaataaaagtcccacaaatgaaactcatgtgcaattaaaatattaaatataataattagtccataaaaacaaccaaatttatttaagcatacataataaaacagttgcgttggtaaatatatttttatatccaaatttcgcgttttttagtccatataatttacaaccctaattatgacaagtcgatactcaatgaaatttagcccggataaagcggtgtacaaaaacagaaaatggccatgctgatgaagcagtttaaaaaaggacaaagtgccaaaaggtaattaacggagccacggaatgccctaataattataattaaaggggggcctattttaaaaaatactttgtcctaattgttacgtaaatgatacaaaaattgaaaatgattccaaatgtggcgatggttgcccataaaagtacacagccaattagagaacagctgggatttatgtctttgaatgtcaaatgaaactaaaaattgctaatttgaaaattgtttattttaattgaaatttttaccgaattgttattaatgccgtccataattttggcaaaattagaaaaaataattttgttaaaaactgaaatatttaaaaaattaatgatactgtaagtggccgctanattttcatgataataaaacaatctaaaagctatcgtatgatacccccagattattttttaggttatgtttaagaaaagatatgancgatttttcacganaattctttaaattaacagttttacgaaacgccaat

SEQ ID NO: 40590 - DNA, 1080 bp, Heterodera glycines
ataatttattgatgattggccaatgtccaccaaaagtgcgtactcggcgccaatagtcgtggggctgatgccaagaggagggataagtgagacgatggctaaagagggagagaaatgacagttccgcccgggggaagggctcgcctggccacgtgacatttgtacggttgggtgcccttgaaaattggcgagaaatagtaaaacttgtcgaaccaatggttgtccatctgcaaatatgtaatcattgcatcctccaatcttggcaccattaccacaaacgatggtcggtacattctgctcgaccacaatgcgctcgagtcattttgggacagacgcgacgaacgcggagaaaagcgatcaaaatcacgggagaaacggttgacatcgatcagagaggagcaacggacgagctaaagagccaaaagaaaagggcactgggattatcagaacgggggggggggcagttaccaacaacggcactcactcaccgacggattcggccttggctcgaatgcgctgagccgagtgaccgactcggcacggcccaacccgaaagacatggcggagaatggcactttagaagggtcggagcaatgtgccacgaaagagagggatgctggagcaaaatgacacttttaagcaaagagagcagcggagagggagaggaaaaagggatggaagagcagagaaagagaaaagcggatcagagacacaaaagtggggaaaagcaaaagcaaaagacaaaaagcatggaaaaagcaaaagcatggagaaagagcagctgtcaaatgggagggggagaagctgatcagactgatcaatcaatcaaaagaaaacaaaaagcatttattaatagtctaatcattttacaatgaatgaatgattcacagaaattcgctttaaatgccttcgatttgctcaagtgtgccatccatctttttccatttcaaatttctttcattaaatttgttcgatttctctccgtttgttcgtcgtccgtttggtacctgcgaattaacggcattttgaccacctcttttctgtaattaccagtaatttttgtatcttgcccagtaaatg

SEQ ID NO: 40591 - DNA, 1191 bp, Heterodera glycines
cctgtttgacattttggagaaattgaagaagaaaaggggcgaagaattcgcgaagaaactgccacaaatgcgaagggactgttccgatatcgcagagttagaggtttggcgcacaaccaaaaacgtgctggggcaaatgcgctgacactgaaatccgtcaatcctgcgatttccgtttcccaaatactcaaaaagtttgcggtttcttattctaaattattaaactctttaaaaatgcaaacttttgcattgtgttgcttttttacagagtccccagccgttcgatgagtcccgtttttgtaagcatatttttaacaatcgcataatcaattaaaaaaattgctcaaaaataaaacttttgagtaaaactaacgaaaatttaaaaaaaatcgtttgtggttaaattcttaatttttgagttccgtgctaccgtcagtcagctgagcgttcgtgtagttgccatcaccacgaattctatcaaagtccagtggtacccgatcaccgcaggccaaattgacaacaagaaaattgtcaaatacaagttgcactacaaatgcacctctccagaccaccaatggagtgagactgatgcttatgaggtaaaatttgaggagagattgtactttgactttgtatgatttctgatattaatttaaagtggagaaactgacaattgatttaaaaatggcaatgttttgaagacaaaatttggttttcccaccaaacaaaaatggtaaaaacttatggtttgttccctccggtgcaggacaagcttgctggatttcggactggaatctcgtaaatcccgcgcgggatcccgggtaatagtctagtttgttccctccccccattttcgaaaaatgtattttttaattttgagaaaaatttgtattaggggttttaagggccagagaacccgaaactggattcgagcaaaaagtcgaaaattcttcaacctatgtcaaactccgaacctggattcgtgcaaaaagtcgaaaattcaaattttcactttttggtcttaatatacatatatgaaacaactaaaagtcagcataatttaaaccattttaagaccaaaaagtgaaattcgacaatttgaattttcgactttttgctcaaatccgggtttggagtttaacataagtcaaaaataatgtcagattcggttatttggcccttaaactccat

SEQ ID NO: 40592 - DNA, 952 bp, Heterodera glycines
ggtctgggcacagcaaaacggccttttttccccgttgcgttgacacgcccttcaattacgtggggtcaaatcgacaaagtacgcttcggtatagtctaaaagcaaaagctcgaatcgtacgagcacaacacggaaatttcgccgccatagaaaacgtttttttcgttcttcataaatatcgcttttaagcattttaatcgaaagaatttctcgggattcttaatcgattccttccattaatttaatgtgcctcatttgcgcttcttacccattccgggcgttaagcgccaatcgtacggagccgcgaagagattgcagcctttggtatagccaaaattgaccaaacatttgttgatcagtggtgcaaaatacgtttcgtcctcggggtcgggagaagacgaactcaacgcacaaccgccggggaaagagtcactaacccaacaggtggaagggcaagtgcttaattaattgccaaaaacgataattattcatttaaaaaacataaatgtaaatatattataaaaagaaattaattaatttaaattgctaattaataaaagaaaattgaattgtaaaatattattacacaataggtgcaataagataagttaaaaatgagagcaaagcgacttaccaaccaaattcttttctcgcgagaaaagtgacgtcaacgcccgtttggtttcggtaagtgtccgttgtttggtcatagctcagtctcaattagtttaattgatcaattagcaattttaccaattttaaatttcttacgacattaaatagaagagacattcctggatgttggtcacattcaaagtgccgacagccaaaagcggatttatccatcctttgatggagtaacggccagcgaagagttgggtgcacagaagcgggaaattggccgggaacgacatattttttccatccaaatacattttattgccgaaaaacc

SEQ ID NO: 40593 - DNA, 1108 bp, Heterodera glycines
cttcttctccttttccgcatttgttccatttcaatttgttctcagtttgttcctcattctttctcagttttgcaaatttgattgtctcttttggcacttcccccccccccctctctctgccgttacccctcatttgagaagacttttcatctattctttcgttgggtgaagaacattacgtggacaaaggaatgaatgtgtatgccaatttcatctttgctcgtccgctataatatgttttgccgcttttcgccccccattcactgcccaagtgcatcatctcccatctctcatctcccgcctcttccccgaagggctttttcgggcgaagacttcgcccggcggaaaggggggggggcgtgaaaacggagggactcataaaaggggctaaggttggatttttcagtaaaaaggaaggtgtcaataaagaggggggcacactcgtaattgaccgcttaaaattagcctgttgccgttggacaaatggcccaattaagtccgttcattttcaatttctctattaattgtaaataacaccttttgtgttggcattcattctctatattttgcctttcacagtcactgaccatgattgaccgaggagaacgcggatgaactctcgactcgcagtgcaacggttacatggccatcccggatagatatctcttctttcccacaggaggtttcggatacgcaggtccatgtccttagctttcgtcagggtttcactccaactaggcccaccaacgattacattgagaaagaggtacctcgctactggggcgatcgtactagcgaaggccgcacgcaactccccgaaggtatgttccgtgcatagcaaggtgcgcattctctcaaacatcttggtacggactcggtcccacgcatcctcgaaaacgataccaaatctctcttcgattccaaggaatttattaagtgtctcggagaccaaggagcgggatatcacttccagtttcctcgttctctcttttcaggggggtgtaccagagcgcatttcctcttattgattttccacccgagggttgaaacggttcgctccaatgttacaaacatccctagtcaaggacgtttcactaagaggaaaccc

SEQ ID NO: 40594 - DNA, 89 bp, Heterodera glycines
ttagtaatcaggtgtaatgaactctcatcttttctttcaaaggactttccttcataacgattagtcgaaccatcaggttgtgaaatata

SEQ ID NO: 40595 - DNA, 617 bp, Heterodera glycines
ttccagctgaaccatttgaattcgttgccctgttgctgtttaattaaattttttttaaaattgctttttattcaataaactttttgctcaaattcactaatgcggctgatcttctcgaagaatgggatgttgtagctggcaaagtaccctttctgcttcagccattgtgtcatgtctttgtacacaattattgtgctgaaagtggcaccaaattgacgaaaatccccagactttcatttcaaaagctcgggttctattacttaattgcccgttttgatgttgcccgccatttgttacttaatgggttgttctttgttcatttgtactgttgcttccttctaagacaaactttttacactaaccatcgcgtgtgtggccgagaggttaaggcgttgcgagctatgtcgcaatggcggggtggagttggcggggtggagttggcggggtggagttggcggggtggagttggcggggtggagttggcggggtggagttggcggggtggagtttgcggggtggagttggcggggtggagttggcggggtggagttggcggggtggagttggcggggtggaaaaggggggtggagttggcggggtggagtggcggggtggag

SEQ ID NO: 40596 - DNA, 1493 bp, Heterodera glycines
  unsure (1)..(1493): unsure at all n locations
gtctgtgcgtcgtgagcgggtgtgtggggcaggcacataacacactgactggggatggtggtntcgttcccggtcttacgtgccgtaactagcggtgtgtttgtgcttgctgctacgtccgtggccgtgatgagacgacgtggtagggcccgtgcttggcctagcacgtggcttaagactcaatgagtgtcagctcgggcaccgccagctttttcttttttttcattatttttttttacacttctgttgaagaatgaattctagtcttatcggtggatcactcggctcgtggatcgatgaagaacgcagccaactgcgataattagtgcgaactgcagaaaccttgaacacaaaacattcgaatgcacattgcgccattggagttacatccattggcacgcctggttcagggtcgttaccataaaatgcactgcttgtgcgttgcttcgtgggatcatgtacttgtacgtgttcttacgttacttgcttagctcggctgtggggttttggtgtgctggcgcgaacttgtggttctaattcgcgttttacggaccgtaactcgggcgcaccaatgctttgcatgctgtggcggagtgcctggattactggcattcctgctttgatttttcgacctgaactcacggcggggacancccgtggaaacttaacatttacataagcggaggaaaagaaactaacgannggatcccgtagtacgggcgagtgaactgggaagagtccagcgctgaatcgcagctcctctggggttgcgaggtgtagcgtatagaccgtgagcttgggttggcccgcttgttcaagtttcccttgaccggggctccagagaaggtgcaagacctgtccaactggcggtgcctacccatctttacgtgtcttggagtcgggttgtttgggatcgcagcccaaatcaggtggtaaacttcatctaagactaaatacggccacgagtccgatagcgaacaagtaccgtgagggaaagttgcaaagcactttgaagagagagttaaagaggacgtgaaaccgatgaggtggaaacggacagagctggcgtatctggtctgcattcacccgtttgttgctgtacgttggcctgctagcctccagactggggtttgctgtccttctgttcagtggcgaatggggcatttgcaggcggagtgcgctgagatgctcggagtagctgcgtgagctcggtcttgaggccagcctttcggggtctggtacccggatcgggggagtgctgtttactctgggtgaattgtgcaatggtttcgggtccgtgttgactcgagctgggggtcggtggcggtcgcgtgcgacacgtaccagcaaccagttcggtccagctcgggctctcagttgtgcgttctcggtgtaaaagccggtcatctgttcgacccgtcttgaaacacggaccaaggagtttagcgtatgcgcaagtcattgggtgttcaaaacccaanaggcgccaatga

SEQ ID NO: 40597 - DNA, 1157 bp, Heterodera glycines
tatttatttgatctatttatattttcatagggaacatatttcgcgcatttggggcatatccagaaattatcaaaaaatgatgtaccgaaatgcaaaagactgtgctttttacacctgctacaaatctcgtaatgacagggacagtaatgacaacacttaattttatgtgggcagttcatttttcaatttaattttattttgggttgctatttatagaaggggtatataaagggagtgaaaggaccatttgattgataccttgtatcaaaaatgcaaagaccgataatcgtaaatataattgctctcgctaatctcggtaccggaattaaactaaactctctgacgatcaccgaatgcgaatttaagtataaccctagaaaattcaatgccgcggttatcaaatgtataagccccatcaaagccacggcattattatgggaatccgggaaaatgatatgtctggggacgaaaagtctgatagactgtgaaaatgctattaaaaaatttatagaaataattaagtgctcggggtgtccgggggcttcttacaccggacacacgattgaaaatattgtttcgacctttaaattcggacatgaaattgaactgaacgaattcagaaaaaatcgtcgtgccttttatgaaccagaaatattttgcggtttaaatttcaagcggggtaaaagcatgacagcgttaattttctggaccggtaaagtcgtaattacgggaactaaaaacaattctgaaattgaggaaatgtatcatcatattctcccctatttgaaaatggctcaaaagaagttagggagacgataaaaaaattttcatttattgggacggtcccccaatttatagttctgttgggtatttattttgttatcgattacttcgcgcggcgccggcatcgcggcgcaccggcggggcggagaggaaatgcatggttttggcaaattttcaaaatgagttttaatttcaggataaaaatcatataaaaaatctcaggatttgagaaaataccccaaaaggtttggaatcaaaaaaggaattaattggcaaaagaatttccttcacctgtcactttggtgacaggtggatgattgatgaccttcccgcggcgctgcgcggcgtgggtgaaaaaaacacccgcacggatt

SEQ ID NO: 40598 - DNA, 860 bp, Heterodera glycines
ttccttgaattttcttaataatttttttcgaatttatctatttttttttgatttaggctaggtaactaaattttaaataatttttttaattaaaacaaaaatttgcggctacgttttgtccccccccccccccccggaccacacctccttgaaactgttgacccaatcagtgttcgcttgtgcgttgtaattatagcaacgcaatcgcttgggttggccatcttttctcggagagtgcaaccatttggacaatgcttggccagcagaaattgttgaatttggcccatcaaaaccatcaccaaacgcagcgggaaacaaatcataggaattgattgaattcaatttgttgagatcggtgagaattgtcggtgaaatttgacgaagcaaattgtccaaatgatcaccatcgttaaagcccaagtggcgaatgttttcagaaaaaattggccaaatttcacgaacaaaaatgtcccaaatcagctgctggccatccgtgttgtgtggtgatgaaagccacaaatataaattggtgcctcttttgtcgaaaatttggtgatttgaacgaagaaaagcgatgacgaagtgatcgatgtaactgtgaaaatggaaggaatgcttttattgccataaagctttgatttttaattactaaatccgaaggtgattaaaacggattttgctggtcaacggataatcgggcaatggaaattccacaattttgtcatccatccacacagatagtttcggttctggtcctttgtccttgcgacgaattgcgattggtctccaaattgtcaattcgcttttgccattgaaatgtttgtccaccaacgcattgaaacgtggcgaaagaagtgcca

SEQ ID NO: 40599 - DNA, 1144 bp, Heterodera glycines
  unsure (1)..(1144): unsure at all n locations
cccccccccccctgcccccgctgcacccccaaaacaaaaaganaattggcgagacggggaagggcgaagagtgagagagagagagagagaggcagtgtggaattatgatcatcattatcataataataataatacttaatatagcgctaatgatgatgatgattatgacggattttgatggattgattggtcggcggcgcccgggggaaaaatattttgggaaggtggtctcgaagaaaaattgttggcgtcgcgcgggcgcgaaaaatgcgtttagcttctctctccctctctgttaatggtgcaaaatttgtgtggtgctttgcgggtaataataacgggagacgggagaccaccacagcgccccgcgcaaaaccatttgatttccctcccactttttgaaagtgtttggcgatctgttgcaaaattcctatctactgatcgcaagtgattggtggggtaaattgttgatcagagaatccctaaaggaatgttgctgatcggaaatgcttagttaataaactttaatttttagatggaaaaattttaattagtttgatcgacttatggggatttaccgggtaacgggaatggaaaaagcgggaattcgcgccttttcccggcttttcacagattgactggaaaatagaaacggaattttccgccggaaatttcccgttcgtttacggtttttcctacaagaagttttactgtaccgatcactaaatttaattatttaataatgaaattgagtgattccgggaatccctaccctgaatttttaagaaaagtctaagccgatgctatcggatttcatccgagactcggaaccattcaaggttttagccaaacaaaaagtttttaaaattcccaatccatattttttaagcattagcagcagatttggatgtgaattaactctttttttttattcgcggaataaataagtcaacattttttaaatatttttcggaaataatatttattaatttccataataatatttgtattgtttttatatttttttatttcttttttatcagaaattttgtatagaattaatttttttttttcttgaaattttaaaattttttattacttattttgttttccaaaacatctttttttcacgtcgctcttttct

SEQ ID NO: 40600 - DNA, 59 bp, Heterodera glycines
ttggttttaaaaattaatgtaggtacctgctggcattactggtcccataaaaaagataa

SEQ ID NO: 40601 - DNA, 1076 bp, Heterodera glycines
  unsure (1)..(1076): unsure at all n locations
ttattantccggtaattaaactattaacttgacataattcaacaaacacgctaatttaacattttaaatggggaaaatttttttaacatttttctcattagatttggagcacaattagtttaaggttttcatcgttaaaaaataaatcaaccaaaatttttaattcgtgcctctattgtttttcagcgggtctgatctgaaggcttgcaatgagaaaatgcacaaaagaatcgctgaaaggataattatgcattaaaatgtgaaacattttctcaattaatatgctggcgcgttttttaaatctgtcatcccccccccctcacaaaatatgtactgatttaactctttgctcttcgtttatcatttatctttatatgattaagaatatttaaagaaactttgtattattatttctctcaaaacttagcacccattttttgataaaatttagcaaatgtttatgtcagaaatcttcagaaatgaaaattttgtttcttttagtgacccaagatttaaaaaaattcaaacttttattattcggttaatttttgtgtgatggtcatttactccgtgatcaagaaaatgtcattctgtttaaaatgtcatgtcgaaaaaaacggcagcaaactttttcccctctctctgacaattttgccaccaaaaaattctcagactcatactcagtattaaaatgcttttttaaaggagtgattctgggcttttcattcataccattttctctttaattttgcttcacctgctggtcaaaacactttgttatgggtgagcttcgatttgggagcaaacaaaattgccccaggcaattaggggaggaatggaactccccatattttcatgcccaacatgaaaatgccgggaaggcccaacatccctcacaaaaatccatatcattataaggtgcaacagcaaaacagaaaccaagtgcagtacaagcaacagaaaacgattgaggaaacaatccaagaacaagagaaaggccgcagcagcgtcctcggtaaaaaacttcgccacggggggaggggaaatccggttcatgctttgaactatggtaagca

SEQ ID NO: 40602 - DNA, 1445 bp, Heterodera glycines
  unsure (1)..(1445): unsure at all n locations
gttcggcaacaatcgggcattagcagcgccatttagaagatcatgttgttgttcatgtggaagtcgttgttcagtacaatagtcagagtccgatcatggtaggcacgccacgcaactagtgcatagaacatgcaaaagcgacgctccgcttctccagttttccggatccggatccgactccgctcgttgtagccccacttctggtatggataaaagcagggtccactaacctacggaggcgccacaaaaggagaccgcccccccccccncccctcagagcacgacaaatatttcaacaaaaatttttaaaaattgactagagcaatcgaacgctaacggacgacctaatggaaaaaaatccccgaaggagagaatttaattaaatccattccttcgggggaccgtgccgggtgccgcggggtaagcagtgctggttcgttcatcacggcaccgaaccttttggctagtcagcaatcgttgcttaacttgccagatcggacgggtgcgcatgattccactgttccaagcaccccaccaaaagcaaaacgatataaccaaaatataaggaaaaattttttaaaaaattttttctccatcttcctttttgatactaaagcatcagagtgctaaaattaagttgtaaataaaatttggtgcgctttagagcactttctgaaaaaaatatttatgaaacaaaaaaatcgattttttcaagtgtccgtttggggtactcaaacatttatggggagcaaaaatccaacgcagaattaaagtacaggctatagggaagctattcccgaaggattcggtctccccataaatctgggcgcatcggttcggggggactgccccgaaaacaaaaaaatcgattttttcaagtgtccgtttggggtactcaaacaattatggggagcaaaaatccaacgcagaattaaagtacaggctatagggaagctattccggaaggattcggtctccccataaatctgggcgcatcggttcggggggactgccccgaaaacaaaaaaatcgattttttcaagtgtccgtttggggtactcaaacaattatggggagcaaaaatccaacgcagaattaaagtacaggctatagggaagctattccggaaggattcggtctccccataaatctgggcgcatcggctcggggggactgccccgaaaacaaaaaaatcgattttttcaagtgtccgtttggggtactcaaacaattatggggagcaaaaatccaacgcagaattaaagtacaggctatagggaagctattcccgaaggattcggtctccccataaatctgggcgcatcggttcggggggactgccccgaaaacaaaaaaattgattttttcaagtgtccgtttggggtactcaaacaattatggggagcaaaaatccaacgcagaattaaagtacaggctatagggaa

SEQ ID NO: 40603 - DNA, 1535 bp, Heterodera glycines
  unsure (1)..(1535): unsure at all n locations
atcagcgcaattccaagnccaagtgtgaaagccggaagcagatcgaacacacanagccaccagtcggcggagatgaagctgaaaaaaatgaaatttatgtgaaattggcattaattttacattgcttttgccatttcttcctccgccgcttcttttcgattgtctgacattttgttgagaggaaataagagagatttcgacggattaaaagcttgaattgagtcaaaaacgaattgaatgtcatcccatttttggtgccaaaattcatatgcgaatgctttttctcccccgcaagcagtagccattcaaaatttgtttgttgcattcacaaaacaggggatgaggggggatcaccaaacatcaaacaaataatgcgaaactcgaaaaatttgagagtttcgactttttgttcgaagttaggtccgagtttgaaattggtcgaatgaatgcactaatattgggctcggcaaattacgagaaaacataaataatatgtgtgctttaaagagtcattgttatttttccttgtcttttatatgattttttggatgaaaaaacgggcccactaaactgaaaaagtgcacaggcgaaagttgaaattagtataagagtggtgtcatttttcattattatccattcgccaattcttttcgtcgctttcttcgaattttgctacctgacaaatccttcgaaatatccctgaacatttttcgtatttttctcgacattttatgtacccttttccttctcattttttggtctgtaccagggatggaattccgagggccaaaaatttttcgcaccagtcggaattccgaggccccaaaaattttcggaaatcggaattccgagggtcaaaaatttttcggaagtcggaattccgtgccatccctgctgcgcacgtcctccttctgctgttcttcagcttacaattaaccctagcccgtaacgatcataaaagtgatttttttatttctttagaaaaacctgaaattaccaactgccatttgtacaaactgtcactgacccgttaaatagcacccacaaaattgtttgtagatttttatttgaaatgaaaaatttattaataaattcattttaaaggtatattaaaaatatacttttttagtttaaaattgaaacattattaatgattcctaagcataagaatatctttttcacaaatgcctacagctaaaaaacagattttgtggtcagaaaccaaaacagaccgaggaaattattttctgtcaccattattttgacctttgtaatacaatacttaatactacagtactttattttacaaatactgtattaatgacgcattttccgggagccaattacgccactcttttggatttattctcaagaaaaatgaaatatattataaattgaaaataatcctaagtataacctttcgaaattttcnaatctaattataaatcacaaaaattgtggacttggctaaaaaagaataaagtattgaaatggttgcccttgtaaaaattttttctattgttaattttcttaaa

SEQ ID NO: 40604 - DNA, 630 bp, Heterodera glycines
  unsure (1)..(630): unsure at all n locations
aattttttttttgtaattcattgaaagataaataatgtagtagtagtatatgacgtattaatccgccccaaatcccccccccccacttcctccaaaatccccccccccttncccttaccaaaatccccccccttcccttaccaaaatccagtagtatatagcgtcaaaagcgagcgggttccgagcgggtgtttcccgcacgaacccgtgcctatgggagggggcatccctttgatgttgccgcccgcacaaacccgtgcctatgggaggggtgcagccctttgaagttgccgcccgctcacatcctgagcctatgggatgttctttgaactctgccgcattgcggatttaaaatttccccaaattgttgcgggtgttttttcaccccgcgccgcgcagcgccgcgggaaggtcatcaatcatccacctgtcaccaaagtgacaggtgaaggaaattcaatttaacttttgcaaattttaatcttttgtttcaaaaccttttagcgttttatcttctcaatcctgaaattttttatgatgattttttgaacggtgaaattaaaaattctttttgaaaattagccaaaatcatagggttttttcatttccactcactccctgccgatgcgc

SEQ ID NO: 40605 - DNA, 1019 bp, Heterodera glycines
  unsure (1)..(1019): unsure at all n locations
cgcctcgtgttcctcccgctgtgtctgttgcaggcgccctttatccgacaaattccgtttactccgtcgctttttccgtcgcaaattcacaagcgggcggcagcagggaacgttcgccctacgcggcccaatttgggtaaaaatttcaacaaaagggaaatttttctgaataattgtatttctgtttcgacattggtgaccgagtaattgtcgacgatggaagggcgggaaaaatcaaattcctcaactatgtcgctgaccaaatttttgccggcattgtgttggaccgaccattgggcgactcggacggaaaatttcaggcacaaatggcatattgaggcatttatataaattcagtgctttttaagggcattcagtacttcaaatgctatcccaaatatgcaacctttttacccgctcatctgctcaaaaaagcagcaacaacaatcgcttcaagtgcattgcctccgaggaaaacgccgcgtccaaccaaagcgtcgcaacttcgaacggacaaaggcacccttttgggaggcatggcatttaaaggcagcagaggtgagtggcaccgttaatcaaaaaaatgtttaaattgtgtaaatacagagtctctggacagtttaatgcgctctcctccgcctggtcacatccacgcctcatctgtgagatctttttttaataatttcatttggattagcagttacagtgcgtgaaactgtctccaactggcattaaggacagcgacgttattgtcagtctgaaggtcggagaaatgatttttttaattttcaaatttacagttgatttaaaacttttagaaatgccttcaagagaaggaagcccacttggccaagctttccatcgaattgagcgagcggagtaacgatgccggtgacaaatattcagaatttgctttgttaaaaataattcatatttcagaccgactggcacatgaaaatctngaatttgaagttgaggattagtgaaattggatgccgatctaaatgcaactgagcgac

SEQ ID NO: 40606 - DNA, 1771 bp, Heterodera glycines
  unsure (1)..(1771): unsure at all n locations
tgaatgaattaatgaatgaaagttggtgagatggaattgtggatgtgatggaagtgttataattcagttggaccaatcacattgctaatcattgcttacgtggccattttatgggcggtagacggaaaataaatccggtggaaaattgatgacaaattgtatacaaaaagcagggggaaaagccaccaacagcagagaaagtcaaccaaaaagataatattttatagaagagatatcatcagacactgatttgatagccaacaaatatttgttggcaaatgcatcaaaaattgaaaaaaatagagaaattattgaaaacaatttataaatttaaatatgaatttacaaaaatggcgaaaattgaaaaatatgatagtgaaaacggaattcgaaacccatgcctgcttaaatttcacgaaaaaatgcttattttttatttgaaatgaaattattattattattattattattattagattaaattatttattttatttagtaaaataaaattgctaaaaagcaattagctccaataaatgaaggaaatgaaaattagtcaatataaaatttcaattgatttttttaataaaataagaaattaaacggcaattaggctgcaacaaatgacgcaaatggcattataaattatgtggcattgattttcactgcgcgcttgaaaatattgctcatttaaaaactccccataaatttgcattatatcaaacaaaattttattttttacaaagataattgttaaaacccataatttaagttgtattaatccatagaactatttaacaattctggtcctccttttctgaattgcgccttaatttatganatanattgctggttgagcttgtactacgccaactccattaatgaagtgaagcagtactgcccatcccattgagaaaataactctgaattacaattttgggttgggccagattcaaattcaggcatatttaaattggcattttattcgtgtcactcgggactgaaaatttcacttgacccaaggctcgagactgccaaaaactcaagaccgagacgtttttttaattttttttttactaaatgatttttttagtaataatgattttgtttttgtttacatttttgactcatctttgcttcatcacaattaatgcaaataatgtcaaaataaccaatgttcttggtgacggaaactgtctattccggtaaaattcctttataatgaatgataacactcattgcttcaattttttacaaaaattttttgaaatttttaattataaataactgcataaccgtaggcagggaatgttagggaggggggggggaggaattcctcactcacaaaaaatttaaaaataaattttttggaatttaaactggagggcgaaaaagggtcaggccttcgcattcacctgacgattttttttttaaattttcccgggatcggacatgggcaaaggctttgatcgccaaattttttttaaaatttgtccttggatttcaaaaataacctgccctaatgtctttggaaagtgtgttctgctaacggatgaaaaagggcccccgggggctaatttaaacacccaatttggtcgttttgttagatcatttgccgtctcattgtatggccatgatgacaacaatgcacataaactgttgcgccaagcagcagcccaaacactgatcgaatttgaagataatgaggcatatgatctggaagataagaagctaatgaaagatattatcactgccaatttggcaccgggcc

SEQ ID NO: 40607 - DNA, 1030 bp, Heterodera glycines
  unsure (1)..(1030): unsure at all n locations
tgaatttttaaattgcatctgtatcccaaaaaaatggctatctcttttttggataattttctataatacaaatactctcgatcatgagagggaggacggtgcgtaatggcccttttattttttaatgaatttttaaattgcatctgtatcccaaaaaaatggctttctcttttttgggtaattttctataatacaaatactctcgatcatgagagggagggcggtgcgtaatggcccttttattttttaatgaatttttaaattgcatctgtatcccaaaaaaatggctttctcttttttgggtaattttctataatacaaatactctcgatcatgagagggagggcggtgcgtaatggcccttttattttttaatgaatttttaaattgcatctgtatcccaaaaaaatggatttctcttttttgggtaattttctataatacaaataaatactctcgatcatgagagggaagacggtgcgtaatggcccttttattttttaatgaatttttaaattgcatctgtatcccaaaaaaatggctatctcttttttggataattttctataatacaaatactctcgatcatgagagggagggcggtgcgtaatggcccttttattttttaatgaatttttaaattgcatctgtatcccaaaaaaatggatttctcttttttgggtaattttctataatacaaatactctcgatcatgagagggaagacggtgcgtaatggcccttttattttttaatgaatttttaaattgcatctgtatcccaaaaaaatggctatctcttttttggataattttctataatacaaatactctcgatcatgagagggaggacggtgcgtaatggcccttttattttttaatgaatttttaaattgcatctgtatcccaaaaaaatggctttctcttttttgggtattntctataatacaatactctcgatcatgagagggnagggcggtgcgtaatggcccttttattttttaatgaanttttaaattgcatctgtatccc

SEQ ID NO: 40608 - DNA, 1015 bp, Heterodera glycines
  unsure (1)..(1015): unsure at all n locations
tttacnttgagcaaatttatacagatancattttgaggaaaatgagctgaaaatgtgaaaatttcacaaagatggtcgtgaaaataataagtcggagattattggagctatcaactcaatatttccgcaacgctgttagagtttatatttagaagataattagctgaaattttgagaatttcacaaggatggtcgtgaaaataataaatcagagaatattattaacccgatccttctacaatattgctgcagtatttatttagagattaagtagcttaaattgtgagattctctatttacatttcattatcactttgaaattctcaaaatttcagctcattatcatggaaatataaattgtataggcgtcgcagaaggatcgagtcgataagcgccaataattttccatttattattttggtttgtccagcttgtataattcttacaatttcagctcattaccccctcaaaataaactgtataagtgttgcggaagtatggagttgataaacgctaataatttccgatttacaatttacttgagcaaatttatacagataatttggaggaaaatgagctgaaaatgtgaaaatttcacaaagatggtcgtgaaaataataagtcggagattattggcgctatcaactcaatatttccgcaacgcagttagagtttatatttagatgataattagctgaaattttgagaatttcacaaggatggtcgtgaaaataataaatcagagaatattattaacccgatcctagctgaaattgtgagattctctatttacatttcattatcactttaaaattctcaaaatttcagctcattatcatggaaatataaattgtataggcgtcgcagaaggatcgagtcgataagcgccaataattttccatttattatctcagcacgtcgatgcataccaacagatatttgtaacccgtcgtatgctttttcactgatcaaatatgcacaatcgcactgccaatcgtatggagccgctcggtac

SEQ ID NO: 40609 - DNA, 1676 bp, Heterodera glycines
taattaaaactcgttgatttttatttgatgaatgttgttgtttatttttgtttttacttcatcttgaatagttttctagtctctttttgtttattgtcaatttacatatttcaatttgtattgtaattgttgcactataaaagactcacttagcgatggtagatgctcattttgctgggtgtgcacatatcaagtcggagtacgtcgtattacgaagcgaaacgcaacggcaagaaggaggcaacaaaccaccaaatgaatccaatccattggaagggaattcgcacgagggaattctgccaagaaatgtgagggcacgcggaatggaccgccaaagagagcaaaaaatggccaaggcccgagcggaaaaccgtcaaaaaatcgtaagaatttgtccatcggttctttttgagagcgaaggaaggaagtgcaaatatggagagaaatgcgacgcggagcactcgctgacaaaatattgggcgaagaaaccgccggacattggcgagttttggcacccaacgccaaacaccatctttctttggaaggtccgtcctgctttttgttcgaccaaatgggcaagtgctctttctcattgagctgctgtttcgcccgagcccatacgaatgagtcggatttgagccagaagagcaaagcggggcactcggaatggcagtccgttctcaacacgcacactttgcccattcagcaacagctcagaaaacgcacttacgacttttctcggttctcccccttttttccttgtttaatttctctctttttctgtcagttctgaacgtgctctgcatgaatcaccatcgggttgtatggaacgcgaagcaccgaagtgggacatgcgcactctccgcggcaaaaaatacttggcccctctgacgacggtgggcaatttgcccttccgccgtttgtgcgttgaattgggcgcggaagtcacttgtggtgaaatggcaattgccacgcatttgttgcaggtgctttgcccttgggctgtggtcattatttgtcctattccttttacagggtcttccttcagaactttctctgatgaaaagacatccgtcggaaaaaatctttggcgttcaattggcaggtaaaagttagggagagagaaacctttgcaatatattttaaggaggctaccccgattcacttggtaaagcagtccaactgatcaccgacaatttcaatgttgatttcatcgatttaaatttggtcggtcattattcgttttgtcaattttccttattttttagggttgtccgctggacagtgtcaatgaaaagggtgcaggctgttcgttggcgaataaatccaacaaattggtttccgttttgcagtgcatgcaaaagagtgccacgggagtgcctgtgtccgtcaaaatgcgttacggagtgaaggaaggagaacggactgcgcattacaccatggggacaattgccgaacggagtccccctcagctgctgaccctccaccctcggtcacggtcagccgaaccttcaaacggacgaattgatgccgtcactatcacagggaacagcgctacacaaaggcggccgagtgggattacgtcttggagtgtgagcagcgaatcaacggacgcttcccattttttgtgtgtggagatgtaatggattacgaagagtattatcaggtgacacact

SEQ ID NO: 40610 - DNA, 1238 bp, Heterodera glycines
  unsure (1)..(1238): unsure at all n locations
gtgccattgaanntggtgacgaaatggacaaaggaaaagctggcatggccnaaagcaaagaaaacggacaattggataatgaaacgatgcaaaattggggagaccgcggcgattcagcagcaaaagaaagatgaaaattggaacactgtgttattttggcttgttgatggcactaattgcattgggtgagcaataaaaacaatttatttttttaaaaaatcaaaattgcggttaattaaggccattgtctccgccatcagcagcaaaagaaggcaaagcgggaaaaagcatcacaaaagagcgcggtcttctgacaatgagtgacggacaaaacaacaaaaacagtgatcagcagaagaagaagaaatgaattacctaattaggaatgaccaatcaatcataatttatcagtagggtgaggatttttagttttttaactattttttctgcggctttatttcgacgagaaatgcacgaaaaacacatttttagctcggaaattcttagttttaacgccactattcatcactaggaatcactattttggagcgttgccactaaaaaaaattatttttgaagttggccactaaaataattttttgccactattttggcattttttggaaaatttcccaaaaaatgcaataaaaatgaaaaatataccccaaaaatcgacctaagaaattcaaaaattacacccctaagaatcgaactaaaaattttcaaaattacacccctaagaatcgaactaaaaattttcaaaattacacccctaagaattggaaaattttctcaaaaattcttcccccaaatttttttttcatgctcaatatttgctaagaaaatgttttgtaactgcaatcagtgaataaaattgtttgtcttaattttaaattattttcaaattaaaaaacagctatttaaaaaattacacccctaaatttggaactttttcgccactatttttgtcactatttaggcattttttctccaattttcacattctccaaaaatgacaaaaaaacgacggcaaaattctccaaaccaaaatgatgaagacgatgtcatcgctcgtctcgaacgactcgaaaaatgcttgaggggtcagggaatcctgcgcttnaactcattatccnnacgctcgnaaaagtggaaattttgtgcagcaacttngtgagggcgagaatcngtgtggaaatcgatttgctgacccccagcacgcctcccactcttcgtcc

SEQ ID NO: 40611 - DNA, 1300 bp, Heterodera glycines
tcctcttttcccctttgctagcctcccccccccctatatgtatgttaataatactacaaattaccaagaataagtcagattaaatcgaaatatgggtagccttttaattagagtagagcgggaccgggaattttgggcaaaaccgggacttgccgggacctgagaagccgggaccgggaccgggacctcgatttttcttcgggaccgggaccgggaaccgggaccaaccgggaatttttaaaaattcaaaaaaattcaaaaaatttaaaaaatttaaaaaaaaaatcaaattttaatttatttcaagtgaaaatattaaataattaaatttttatttagttttttatttaataaaacccaaaagttaaagctaataaattaatgaaaattttcaaatcaaattttcttcattactttcaaacaattaatcatttttggactaagtgatcgaatattattagaaattcagatttacgtttcacataaattttttcggcgcgctttttccaaaaacttagcggaagaaagggggaccggcggtgccgataggcgccgccgggggaaattttaaaaatttgggtgcaatttgttaacagattttcaacaaaaaaggctggttttgggattactaggctcaatttgtacggattttctttaaaaatgataaaatacaattaaaaaaaaattaagaatcatattttgtcgataggaaagccatgagtatatataaaaagaaatttcaaaatattttcatttctgtagagggatcgaaccaggggaaagaagaagggaaagtgaagagactagccactaggccatttgcacagttggtcttgctactttatgaatatatttaattattatttctaaattttctgcaaatgccataattttttggaaaatttccgaatttttacaatcaccgtttgcattgttggcacggacaacattcattttggtaaggagaaactgtgccaaatcgctgggccacagcatttggcccttttttctttgcaggaattcgattacggcatttttgaaatggcctcctggcaatgtttttgaacatagttttgttgccaaatcggcaaaattatgtcgaaattgttcgttctcattttgttctttcgacttttgaagttccttctctgctgccttcatatcggaaagaattagtgggccgttcgttgtcaacttttgaatttggcgcttcatttcatcactgttcatggcattccgttcactttggcacatttcgccaatgcttttctcaatttctgcaatttccttttgtccttct

SEQ ID NO: 40612 - DNA, 907 bp, Heterodera glycines
agacggaacaagtacacgcgtgatgattgagcactatgataaatacaatgggttatgtggatttgaatcgtttttggcgtcatgtgcttttaccttttttggattttttgttcccgtttcctatgaagatgatgatgatttaattttaaaataattttaattcatatattgtgtttcacaaattcataaacaaattcatccgaattacttggccttttcaaaaattgcataataaactcaaaatcaaatcctaaggacataaaataaataaaaactaaaacataatgaccacaaacattagagaaaatcgattgaaattttcttcaattaaaataaattttccgaaaattatttgccaaatattttttgatcagatcgtttggcatctcgccataggagtcaaaaaagtaggccacccccggcgaacgcgcccatattgcgcaccaatgggttcccggcattcccgacgggtcctgaagtggcaaaatttatttaatgtattttttgacactcaccaaattgacaattagactgcagggaaatttcgtgcactttggcaatcggtcggccggaaaagtgccaacaaattattttctcgtcgcccggttctcaaagagagctctgtcaatgaaccgattgtccattcctgcgacgaatccgcctctcgctcaaaaacaggtaaaatcccgcagccgcagtacctgctgcaccaaacaggtagatgaggcagagaaaaaagttgattggcgacttctcgatcacatccggaaaacacagtacaatcccttcgtgtgcagcattggaggagggcatttgaacaaaatcggaggaataattctcaccattcatactgtaaggtcactagtgattgatctgttccggtcaatcagaatgagcccgtcagcct

SEQ ID NO: 40613 - DNA, 1521 bp, Heterodera glycines
  unsure (1)..(1521): unsure at all n locations
taataccaataatgtgtaattttgatgcttgtacaatgcattaaaattgtcaaatattttatggtcgtgttgttcatatggggcaccacttgcacatgtattggtacttgtgcagtttacggggcagatgaacggtagcgctggtctgagcccggtttcgtgatcagcgacctcgaaaaccccataaaacattttctttgatttctaaaattcagttttttttgaaaatgtatgtgaaattgccccgtaaactgcacaagtaccnnccatgtatttaatgattttttagtaaatgtaaccaaccgatccggatttgaagaatctctgcggttgttgggtggcgcggtgttggcgctgggagtcggcagcggagggtacggaggtcggcaattcgagctgatcctccgtttgttgctgctgatagggagttggtgcagaagcttccgtggcatgcggaagcaaaacagctaaaattggataaagaaacactaataaagccaattttaaagggttttcaaaagggaccatcggcggaagaagcggaagtggaagggcgttgttgttggaacacttgctgctgttgctgttgttggatgagaggcgcactaaccagcattggtgacagaaaacaactgacttagtaggtattattactgctggtagcttaaccgtttctttgtttaaatataacttctaaaaagaataattaaacaaagcaaagactctctgagtttgttagtttaataattagtaaaaacaatcctaattggggctttctcatccattcttcagtgatttaccattgtggtntagcccaaataattcggataaatttagtcacatgaactgaactaacggaactcacaaaacattcatttcatgcagcaaaagtaatcgattaaatgttccttccactctctctttctctcctcctcttcccgtctctcttcaaattttccttttttcttttctctgtccctctacactctctctctttttctctttttcctctttctctcgctttttcctctctctctctctctctctcgctctttcaaagttaaaatcgaaattacagattaaacatttgtgaattttgccctaaagcgaaaaataaaaaaacttatgggggcctgaggtcccattcccagctgtatttataaaaaaatcaaaaacctaactaggacaggaattacatttataaaaatcccgataaatttacgaaaaacgcagaatttttcaaatataattttccacattaagttttggcgttatatatttacatatttgaaaatactgcggaatttttcaaaactctgatctagagctcggtatattttgaaaaaagcctacatgtacctgtacctgtatttcccaattggcctgtacctgtattttctggacaaaagtacaggaaaatacaggtacaggaaaaatacatgttgccgaaaatttgcctgtacctgtacctggatccaggaaaaatacaggcctggatccaagtacaggccgagctctact

SEQ ID NO: 40614 - DNA, 536 bp, Heterodera glycines
aattcattactcaaaagtaaaacatttttaaatgcaatttattttgtcatttaatatttcaataaaatataaattttttattttaattaaataataatgcatttttattaaaatttatatgaaaaaatgaataaaaaaaacaccgcggtggccaatacgcactcggccagctcgagaattttgagcgggtcggaatgcggcaaatagcacgggtgaactatagtgaacgccccgtgaaaaaatgggtcaaatgatataccaatcgattcctctcgacgagataagcaaggaaaaatatgactcgaggcggcggctttttaacgcaataaccaaaatgacctatttgcaccagtttcactgcgcaataattttaaattaccgtatttgctctaattatcccccatggtggattatttttcaacctcctcgtggactgggggataactggagattgggggattatgatagagtgattatttttcaaacatctcatagactgggggataattggagatggattaatagagattggggga

SEQ ID NO: 40615 - DNA, 1715 bp, Heterodera glycines
  unsure (1)..(1715): unsure at all n locations
atcggtaatgaatgaaaagttaatttngttctgaattgtatttgacgataaacaaatgtcctccttaaaaataggtaattgaanaggaatatataacgaatgcttacatcatttgcaatggacgcagttgacatgtaaactttgagtaaatgcgaaatgaatgaaactgtacaagaaaacgcatggagaaatggagacgattctaacagtttcggttggacgagaaagcataaattggtgttaagctaaataaaagaaattatattatgcgttgtcacccgataacgagtggtaccgtctgatcaggcgattgtccagttaaccatgacgccaacaaagaatatgaggcatcaaaaatcccgataatatcagcaaactttaatttgttgagtatgtcctacaaaataattttttcaattaatgtttgtattttaatttggtataaccattgtattactggtgaaaaaatcaagtttccgctcaacatatttcatacccgaatccattttttcattcatcaattcttaattcaaaattgattcaacgaaaattaagaaaaaataccaatcgcactcatagcatccgaaagtttgaaggacgcatccattgaaaactgttgactcttgagaactgcagaagaattatttaattataccggtaatcaacttctcacgtttacagtcgtcaaaaaattgacaagtaatttcaatagccgaggcattagatgaagtgacaaacaaatccatttcaaaagtaatatgtagggttgtaaattatatggattaacatattttttctgcgcatatgctatgaagaaaggggcttaaaaatagcatttctgcgttaaaattttttgatttggtgaaggtttttagttgcatatacacccagattttgggggttttcgggaatagatccatatttcaccatttttggagcatatttcggcattttttctgttttttcatacgaaaagtgcaaaaaaaacgaaaatatacccctaagaatcgactttttgggaataaaaaaacacacccttaaaaaattatgaacttttgtgagaacttttgaataaaatttatttaattttgttttagcatataataaaaatttaaaaattcgaaattgcataaaaattttaaaatcacgtttttttgcaatagtccaaaagagtttaaaaattcgaaattgcataaaaattttaaaatcacgttttttttgtaatagtctaaaagttattgttttggtgtttttaaagtaaattctgaatttttacaccatttttggcatatttttttgtggattcaaagtcgttttggcagtttttaaggcatattttagtgcattttggtcatttttcggggttttagggcatattttaggcatttttggtgcatattttatgtgcataattggcatttttttagtgcataaacttataagcttagacataacattaaattttttgtcattttatttcatttttatatttgtttattttctttttaaatggtaaattttaaaattttatttaaagatcgatcaaacaaattattattttttctagcgctttgagaaaaaatattttagcaaaatgaaaatgatttttaatccaaatttagcttattaaaaaaattaaagataaattaaaaaatcaaatataggaaaatattggtgttaaagtacttaaaacatttaatctaataattatcaga

SEQ ID NO: 40616 - DNA, 1085 bp, Heterodera glycines
atgatctcagcaaagtgatttttcagagccaagacccatgcatcatacaattcgaaatgctttttcggcgctattggagcaaaaaaattagagtgcaataaaaaaaattctgggagtgggattaccgtctgtttcccgttcccgtaaaaatcccgggcaatagttacgatggtttccccttttttgaaaaaaattttttgtcctgactaaactgtgccggtccataatttttataataagaaaatttaaaatattgatgttttaaagttagaaaattttgagattttaaatgcaatatttaagtgtctgagataaagaagaagaagcatccccgagaggaagattaatggatcactggagagggcagggttgtctggtttttgcttattaaattcaatttttgaaggtcaagaacaaaataaaattttgaaacttatacctaaagctataaaaggtgaatatttggaatacacttcagggttttcgcgggttaagaaaaatgtcgggtttcgggattttgttttcatgttggatctttttacgaaaacattttaatatttcattaattaaattattctaaatatttaaatcaatatgtaaatcaaaataaaatttttgctcgattataaacctatattttggcaagtcacttaaatatcgttaaaataatttctatttgtgccccgtctttgctacttttattttggttatttttcggctttttaaggcatatttcagtgctgttagtgcatattttcgtgaccggaaaatcggtcagtggaaaatgcgtcagtggaaaatgcgtcagtagaaaacatcgttctgcattcggaacgccggacccgaactcgaacaaaaaatcgaaaagtcaaaatttcgaaattacagtttttcttcaaaattggtttaaatacacggaaacaaactaaaagccatcaaccagtctttcaataatagatcatgtatgccgttttgaaccaaaattgctaaattcgaaaattaggactttcgagtttttgctcgaactcgggtcaggggtaccgattagccctaaatggatcccggactcatggcatgtgcccccg

SEQ ID NO: 40617 - DNA, 1454 bp, Heterodera glycines
aaaaggacataatcaaacacataatgtacagtcctagcctgcatgcgggtgtggttgaacgggcgaatcgaacactcaaggagcgcttatacaaatattttagtgaaaataacactctaaggtggttaggggtgatagataaaatcgcaaataatgtgaacagtactacaaatcgtaccattggtacaaatccagcttctgtaacctttaagaatgctccgcgttaagaaaacgtctatataaagaacacactgatgacaaggaaatcaaaataaacacaaaattcaaatttggtgatattgtaagaattagcaaagagaaaggccaattttcaaaaggttactatcccaattttacagacgaactttttagggtccaacgtgtaaacaacacagacccgcactcgtacagaatacgtgatttgaacggagaagacataaagggaattttctacgatcaagaacttgtaaagacaacggaaaacggtacccatcgcgcagaagtgctaaaatcgcgtacacgaaacggagtcaaagaacatttcgtccgttgggttggcttgtctgacaaatacaacagctgggtctgtgactcagacctagtgaaacgtcgagcatttgaataaagttaaataatggaagatttttacattgtacttccctcaaacacacctggtccaggaaatactgcctcaaattttacggttagacttccacacaccttagagcttgactccaaatggtccgtcgcattatcagcaataatctatccatattcattcccgtcgatcagtgtggacgaggatgactctatctctgtcaaactggttaatcctaactatagagaagatgccggaaattctgacgaggaatcgcaaaagtttatcaatttgtcagtgaagattccaaatgtacaattccaaagtgtgcaaagtttacaaaaaacactgaatcaaataatccagaatgcttacgatacaaaattggcggctcatcattaaatgatggtacacccaacaaaagagccaaacgacaaaccgaattgtcagaatcaggcgctggagtaatcgaagtagagaatttcttcactcgaaatccttttgattactggcaacagattggagaactgagaaaaaagcactatcagctcagagaaagggttgaaaaaatgacaaaggagtacaattcaacagcggatggcgaacgaaaaacatttctctcaacggaacttggggtttttcaagggcgagaaacttttctgaaaaaacatttgcatttgattgaagaagaggcgaagagaagggacggtgagcagcaagaatccaatgaacaaagactcattgaccgtttctttgcccgataccctgccaattatagagagcagctggacgagtggaggtcaagttacctccgagatgtgctagatctacagacaaagatgggagagtatgaagg

SEQ ID NO: 40618 - DNA, 988 bp, Heterodera glycines
aacgggttgacgagacgccaaaaatgatgttcgtccgcacaaattggccacatataataagagcaataacaataacaataagaaatgaatgactttcctttttatgttctttgtctgtgtgtttgtccataggtaataaatcgggtcaaaacgggcggtggatggatgatcagacgatcaaagtgtatcaattaattagctaatgagcttaatgacatgcgtaaccgttcaatgtttttgcttaatcctcacggatttgtgagaggcgacgactgcaaatggcaaaaacggctgctgctgatgtgcgaggtgcgtttattgtcgcgtttcacatttttgatcaaatgacgggcaaagcgataaagcatgatttattagcattaaaaagtaacaaaaaagaagccatcttcgctacctaagctcaaatatatttaatagaaataatacaaacataaaaaaggaataaaaaaagaaaataattaattttcaaaaaaataatgaattttaaaaatctatgctgttcaaaagtttgtgttaaaagattcatcggtcaaatcatcattaggatcattttcaagatgttctctcaaaggaaatatttgattaatttccccaaaatttttttattatttttcactatttaaatcaaaaaaaaagaaattttgtcaaagttacattgggtggaaggaatggaaattattctcctaattaattaaaaaactcaatttctatcgtttatttgacaataaatgttttcacaaatctctttgttcttattcttatgtttagtaatcagaaaaaaaattgtttgacaaatctattgaaattcaaaagataattgctttacatattatgtaaatttataaattttattgattaaaatatccagtaatgattatgtaaattcttaggttttactgaacattatttgtatttatgttacacagcgactgacgaattaacattgccgtcgtgactaggaaaaaat

SEQ ID NO: 40619 - DNA, 971 bp, Heterodera glycines
catacaaaaaagtagagtgccacgggaccgggaatttttgccaaaaccgggaccgggacttgccgggacctgagaagccgggaccgggacctcgattttttttcgggaccggcaccgggaccgcaagaaaaaccgggaaccgggaccaacggggaaattttaaaaattcaaaaaaattttaaaaatttaaaaaaaattcaaattttaatttatatcaagtgaaaataatacaaaattatttggttttttatttaataaattaaattaatgaaaattttcaaacaaattttcttcaattatttcgaacaattaatcatttttggactaaatcatcgaatattaatagaaattcagatttgattttcacatcactttttttcggagcgctttttcaaaaaacttttgggaaagaaggggtccggcggtgccgataggcgccgccgggggaaattttaaaaatttgggtgcaatttgttaacagattttcaacaaaaaaaggttggtttttgcgattattaaaaccaaatagagtctttttcgttggtcatttggtctaaattacaaagaggaaaattgtctataaaatgaacgatgaatgtataaatattttctgattgcatattccatttaaatgcgcgagaaaattggaattttggtcgttttcaaaattttataccttcaaatctaaatattcaaaaagaaaatcgcttcaataaattttctttataaaaattttgccctaaaaaatgcgcggcgcgccgcgcacagaaaaatcccgcggtcgcggatcgcgcatcgcggattcaaattgccgcggtcgcggatcgcggatcgcgcaaaaaaaacgccgcgaatcgcggatcgcgcatcgcggatcgcggtcgcgtcccagccctggtccgttgtgcaacatgaatattttttattttttgtccaaaaataaaaaactacaattttcagaaaattatttt

SEQ ID NO: 40620 - DNA, 840 bp, Heterodera glycines
tttgttgtcacgaaattattttattattgagatgatgatttgctgatttttgagaaatttgatgattttttggaaaaaatccttaaaaatggccatttttagcctatcgacatcccccgcaaattcctctaaaattttggcaaaattgccaattttcgatgaaaatctgattaaaaaatggtcaaaattttctatttttaccccggcggcgcctaactgcaccgctggaccccaaaaacttttttcttaaaaaattgactcaaaatcgcaaaaatttgtcattttttgtgaaaatctgttaacaaatcgcactcaaattttcaaaacttttactggcggcgcctactggaaccactgaacccttgtttccaaatagtttttggaaaaacgcgccgtaaaaacatttttattgatttttattcgaaaaaattttccaaaatgctgatttttggccccaaatggtgatttgttgtttgaaaaacgaagattttgaaaattttcatttggcaacactgcctataaatgattgaaaagaaaaagagaaaataagttacatggattatattttgaattctaattaatttttgattatggcattgtggcctacttgtttggacttcatttccattgtccaactgaacagagacgaactccttcatcagctggagaaagcgcttcttatatttattttcagtgagttcattggagacttaaatttataaatgtaattaaaattttttaaattcatattttatttattaatgtattattcgacattgattttatttttcttaatttttgcctttgaacttttgccaaaatttggctaactctgctacc

SEQ ID NO: 40621 - DNA, 1309 bp, Heterodera glycines
ctatgatgctttttctatcaaaaagggagatgaatacacttattaaaaatttgtaattcctttttaaacaggccaacaagtttaggcttaacttttttttcagaaactgatcagaagcgcaccaacttctgcagggatactgaaaggaagagaaataacctattttaaatattatatagtcagttcatctaaataattgttatccaaaaaatttttttttgggttttcggggcagtccccctgaaccgatgcgcccagatttatggggagaccgaatccttccggaatagcttcactatagcctgtactttaattctgcgttggatttttgctccccataattgtttgagtaccccaaacggacactggaaaaaatcgatctattcttgttttcggggcagtccccccgaaccgatgcgcccagatttatggggagaccgaatccttcgggaatagcttccctatagcctgtactttaattctgcgttggatttttgctccccataattgtttgagtaccccaaacggacacttgaaaaaatcgatttttttgttttcggggcagtccccccgaaccgatgcgcccagatttatggggagaccgaatccttccggaatagcttccctatagcctgtactttaattctgcgttggatttttgctccccataattgtttgagtaccccaaacggacacttgaaaaaatcgatttttttgttttcggggcagtccccccgaaccgatgcgcccagatttatggggagaccgaatccttcgggaatagcttccctatagcctgtactttaattctgcgttggatttttgctccccataaatgtttgagtaccccaaacggacacttgaaaaaatcgatttttttgtttcataaatatttttttcagaaagtgctctaaagcgcaccaaattttatttacaacttaattttagcactctgatgctttagtatcaaaaaggaagatggagaaaaaaatttttaaaaaatttttccttatattttggttatatcgttttgcttttggtggggtgcttggaacagtggaatcatgcgcacccgtccgatctggcaagttaagcaacgattgctgactagccaaaaggttcggtgccgtgatgaaacgaaccagcactgcttaccccgcggcacccggcacggtcccccgaaggaatggatttaattaaattctctccttcggggatttttttccattaggtcgtccgttagcgttcaattgctctagtcaatttttaaaaatttttgttgaaatatttgtcgtgctctgaagggcgg

SEQ ID NO: 40622 - DNA, 1005 bp, Heterodera glycines
  unsure (1)..(1005): unsure at all n locations
tcatttatctcattatttacttctttttcccaactttgtctctttttctgtcatttgtcgtcgtccactgattttgttgccagtaatttcattcattaattcatttttattgtttattttttcagtgttatttaatatattttgaaaatgaaaaaaatcttaattttagtggctttttcttataaaaaaaatgctcattgtttctttattttttgttttctgtcaaattttgctgctgttgacagtaaaaggcgatggaaattacagtcgacaaagcgattacggtagtgccggtgtttccgacggttctccgccgcccatttcttcgggtacaaatctgtacaataagcaaaaactgatccaaaataattgaattgtattaaataatctcgttacattaaaacttacaaaaaaataaaaataaaaattttatttaggggctgaaaaaacggtagacgaatttctgtccaaattcgaagcgttgtccgcccgaactgattccgatgatgtcggcgttctcatggcacaactttcccaaaatatttcctccttttttgaattggctctccccgtcggttcactcatcgcgggggcccttcaaattagcgacaaagtaattcataattatcattcaacggaatatacggtagttcggcgtaatgcatactgtaattgattagaaaagcaattaattaataattgtgccaaaaatattttgctttgttagcccgaatctgaacaatacaaagcgatggagaaactgcacgataaatttgatgcaaaacttaaagaattggacacgaaaattgtgagatcttggcaaaagattgacgtgagcacgcgaatattcaacagttacgaagatgtaattagctaattatagtaattaaaggcaattanacactcatcaaaaggctaaacacccaaattaattattattttattttttatgaaattattattaatttgttcaacttttctttttttgcttttattattttgctt

SEQ ID NO: 40623 - DNA, 952 bp, Heterodera glycines
  unsure (1)..(952): unsure at all n locations
ttcattacttttgcggtgagtgagtaatccattgaatagtctaattatgggtaattaaggaattgatggacccgagcaaaggattttacaacaaagaagaggacaaagtcatgttagccattgatgtcactgtacaataaacaaaacgggggccaaatatatattgatctgctgggaagatcttgtcattgaattatcattatatggacctgtttttttaatcaaatttattatgtttatatttattgattttgcaaaattgatttattaattaaatactggagctgtttagagaaatctctttctttggtgtagggtttcaagaaaaatcgcgaaatatggacataagatggcaaaaatatggacataaattttaactttttcaaaatttcttcaaattcgcttaattaaatgtaaaacgctaaaaaatggctaaatacgtttttaaaaatcattttcgaatgttaaacctaaaatttactaatttttagcgaaacatcaacccgaaaagtgaaattttcgattttttgcttatttttaacacaaatttatcaatttttaagaaattgaaatgttttcaatattctcgatacaattttgctaaaaaatgattttttttttttggaaaatttttccggtccttggggtaaaaaaggctaatttagctgctgggggccgttttaatagaggttttttggaaaaatgccaaaatctcgacataaaatatggataaaaatgccaaaatatggacaaattatggatttccatataattctattccctagtgattagggtcaatgaatgtttgtcattttatggactggcaatttaaattttgcccaatttgattttatcaaacttacaacggtgaaataaattaaataacaacaaaaacaaatattttttacacaagtgttcattttaattacagaaantaaatcttattgacaga

SEQ ID NO: 40624 - DNA, 1038 bp, Heterodera glycines
  unsure (1)..(1038): unsure at all n locations
ttgagtttatgggccgtaagaagcgagagaatgccgacgatgccatccgttaaaaacatcacactgatgaaccaagaaattttgaaggcgatgatgaaaatctaccaagaaattattgggaaggtctgagatagacgagaattttgcaatttgctgattgggatttggagagatgaattaatgtgggtttccgaaattttaaatgataatttaaatatttatgtaaaactgtttcaaacaagaaaaaataaatttatacaaattgcattccattaaattcacaaattatttaatgaataattaataaaaattgattaaaatgtgaaattgttttaaatgtgttgcttaaaagatagtgggtataaagcaataaaaaaagcatagaacaaatatttgggcaatgaactcaaaaaatatgaggcgataagaaaaaaaaaagttgccaaaaaatgtccaccgattttgatcaattgggataattgtcaacaatgatgaaaaaattgtaaatacaattgatcagactttgccagtgaaaataaaccatggaaaaagctttaaagaaatattttgaaaaggatgggacgagggagcagaagaaaatatatacccaagtatttaaatgattttgaaaaagtgctgatcagaaaatcaaattgaacaaaatgatcgacaaattcaagtaataaattttcaacatccatgctcttaaaattcatattttttaacaacctaatttctttaaaaaaatatgttttccacatttttaataaattttatttaaatatggaatttgaaaggcacataaaaattttaggaattaaaataattcgattatgtaaaaataatttctagcttgttgtaagagttttttaaaagcattanatgaataatttcaaatatattatgaaaatgtgattttannattgactttaatatgtttcccaggtagtatagtggttagtatccgcgcctgtcgcgtgcgagacccgtgttcgattcccngcctgtgagttaatttttaatttttttatgcgtttt

SEQ ID NO: 40625 - DNA, 853 bp, Heterodera glycines
tgaaatgatttccaaatgcaacggagtttgtcggctttctattgggtgagtgcagtaaattcacagacacacattccatttaattgcaaattcatttaaattttccagttttcgatcgctaacgagcgctcagcgcgagaaacacactttgccggaccttccgtaaactcccaaactttcagttgtttattttacacttccaatttcatttagctacgattacaatgcacttgaacctgcaatttctgctcagattatgcaacttcaccaccagaaacaccatgccacttatgtgaacgttttgaatactgccgaggaaaagactcaggaagctctttcaaagggtaacacttagtaaattggaagcaaaccaagaaacagctgtataaatttgtctctgtttttaagcatagttccatcgtttcgttagcgctttatatttccctcccgacttcatttgtcttcccatttctaggtgactttcgcaccgcaattcaactgcagccaatgctcaaattcaacgggggcggccacatcaatcacagcatcttttggacagtgttggcaaaagatggcggcgagcccagcggcgatcttttgaagaccattgaacgcgacttcggttcggtgcagaaaatgcaggagaaagttagcacgaaagctgtcggagtgcaaggctccggttggagttggcttggctacaacaaagagctgaagcgattgcaggtggccgcctgcatgagccaagatccgctggaggagaccactggtgagcattcacatacgaacattttaggttaattatatttaaacctggtaaggctatacttattcttccggtccattaaatcca

SEQ ID NO: 40626 - DNA, 1367 bp, Heterodera glycines
tttgggcaaaacgtgggccttcggaggaccgggaaatttgggaaaaaaccggggacttcggagggccggggaattgggaaaaaaccggggacctcggaggcccgggaatttgggaaaaacccgggacctcggaggaccggtaatttgggcaaaacccaggacctcggaaggacccgggaattttccgtcccgggtcccgcccaacatccttttttttttttggataaaaactgtttataaaaatacaataataataattttgtaaaatataatgatttttatttttttaattaaaatgtctaattccttgcaattcaaattcataaacttaatgaaaataaagcgaaaaatgtaaaaaagtaagcaatttttgtaaaatttatgctgtagatttgtcaatatgacatagatgctgaaagttgtaataaatttaaaattccaattaaaattaaaagctcaaaaatttttaattttaatttttaggaattctaaatttagttatccccgtaaaatatacaaaaaagagaatgattttgtattaagggttggttggcatgttaacaaacaaaaccgcaatcaaatgtccttaaaaataaggacaaaaactaactttcacccgccaaatcaaacaatattggtatcactttggtagccctaagtgggggcaccccaaaacgtcgccggtcgaaacgtcgccggaagactttttggaccataactttgttcattgtaaatcaaattaagcattcttggtgttgttcgatagctttatgtgtttactattaaaaggttaaatttaaaaaattttcgttaagtttcaaaaaagttatggccagaaaggaattcaaaaacctagtatttcgaactttttttgctctgattttttttgtacattaataaaaaaattttgaaaaatttgtagataaaaaataaattagaaaaaaaaatttaaaaaaaggacttttttttgttctttaatttaatagagtttttcataagctttggaacaataccaagaatgtttaatatggttgagtaggaaaaaagttatggtccaaaaattcgcccggcgacgtttcggctggcgacgttttttcctggtccgggccaattataatccatttttttgtgtcaaaaatttcaattttgctaattaaaatgcgtaattttttttgtcggttcctaaatattcggaaacttggaccaaagtgtaaaacacaaaagatttatttcaacattcattcacaggttccgttgcaattttttcctcctcccaaacattccgatgaatttccactcaaactttggcaaatgcattgtggccaaatgtgagcaacattcgccctccggccgactggaacaatttt

SEQ ID NO: 40627 - DNA, 692 bp, Heterodera glycines
tccataaaccatggtaaaatttgatttaatccattttactttcaaaattaatttatttatacgaatgttttgccattgaccccaaaaatgccgaatttgagcggaacattccccccaaataattaatcattttttgttgttttcagtgaccatttgctgtccaaacatctccaatccgatgtcccaatggtcactcaatttttgcgtaccatcccacaatttccgcctgcattggacaaaaatggcactgttttgcttggcactgttggcattgatcggatgccgtcaccgtccccacatgcggcaaatgcaccggcaacaaatccgctcaaatgggtgccggccgccgaacgggcggcgcgcgaaggcgaacttcgccgaagcaaacgaaaagtgagtgaatttggggaggaatcgtccgtttgagtcccagcggagcagtacaaagccgcaaaaaaaatcttttttgtggcgaccttatgtcccggcgacattttgtatgtacccgagttccagacaaatgcgtccattcgtagcttaatgaactaacttttgacaaactgttatataattaaaaagggttggtccaacactcgccaaaaagaattgtgttacatttggagcattatataaacactaaaaatgtgaatggaaaatttcaattttagctgccatttgatttttacctctca

SEQ ID NO: 40628 - DNA, 628 bp, Heterodera glycines
  unsure (1)..(628): unsure at all n locations
ttaaagctggcctgaattttagaatcattaaatttttntggaatcaaaagagtccctctccacccctttgattttcatcgtcccgcctaaagtaaagtgccatttttttaccgattttatcttctcacacagcattatgcataatacccccccccccccccccctcattacataatcatcatcatcatcacatttaaacacccttcttctgctgctgctgtcccagcgtcaaatcatttccatttttctgtttgctccccctcccccccccccggcccgtcattcgtccccatttttcccccttttttttctttgtatgtatttggcgtcgtcgtccaattccaaaggtcaattcttcgcccccagcagaagcagtcacttttattttttcccattttaaatgtgttcaatctgcacctgtgttccccatcatccagcaaaactatcaatttttgaagaaaaaaaaatgaaaaaatgacatatcccaaaattctcaaattttggtggaatcccttttttgtcctcccttttttcatacctaacccgaacagggtcagggcacgcatttagaggatgttcctgggtaatagtgaagctggtggcggtgggggtcaattgggccccgccg

SEQ ID NO: 40629 - DNA, 385 bp, Heterodera glycines
  unsure (1)..(385): unsure at all n locations
gaatggacaggttttatggaggcaaatgaaatgacaaattcgaactcaaattgaaagggtggtccgaatgtgagggaaagtgcggacagatgggcaaacggagacggcgacggaagtgcccggggggcgagagggaatgcacggaaccgacggaagagacggagcaatgccggagggttggaaattagggatgggtcgaaacggggaggacaaatgaaaaccattccagaggggggggggtgggggtaaatcttcctaaaagaggggagggggggaggggagagaattgaggttgtgaggttattataaagcacccaaagggaggacggngaatatttgtcgaaatgtccatgcctattttgattattangttgaactgtgcgga

SEQ ID NO: 40630 - DNA, 1032 bp, Heterodera glycines
cgggcaaagaaccggggcaaagccaaagggggataaatttgaggagagaaataagcaaaggaaatgggagaggaaaaggttgccaaaaaagattaaaacaaatgataaaggaaaagcaaagaaaaattgggacgataaaacggaagaaaaggcaaaagaaaggacaaatggtcaaattgggagaagataagagacggaagtgataagggacgatgattcatcagcagaaagaaccaaaaaacaaaacaaaagcctacacaaaactgttggtgaagtgaagcggtgaatttgggcaaagctttcaaagggacgagaaaattttgaaggatttgccgcggcgaaaagagacgccgactccgttgggaagtgagcagcggaatttcgggaggaagaagccatccgacaagcaatcgcagggggaaaaagccaatcagagggaccatctgctcaatggaccaaaaaagagaacgccaatggcgccgaaaataatccccggaaggcatatactcaattttgatctaaacactcgaataattaggtaacaattaacaaattaatcaaccaaacaactcacgccgcctctttcgcacattctctgcgcatgtttgtaaaagaacggtttgtgccattgtccaaatttgttcaacaatctccggtcatttctcggcagtttttgggcgaattttgcacaaatcaacacggaagtgccattgccaaattgaatggcttcgacaaaatcattgcctttctttggcacggattcctcgaggagccgaccgacgagttcctttttttggggttgaaatacgaaaaggatcaaccgactgaccttttgggaaaggcacggttggtagaaaagcttgacgaagggcggacaagggacaattcggagggtggcggacacgagaaagcccaaagagccgagggaccacggaatgccgaagaacagcgactgattctctccatcctttggcatttaaagcatcaaaaaggccaacagtttcttcctttaatcaccttttcggcaattag

SEQ ID NO: 40631 - DNA, 1151 bp, Heterodera glycines
  unsure (1)..(1151): unsure at all n locations
ccccccgccctttagaggacgacaaatatttcaacaattccaatggaaattgactanagnaancgaangntaangnaccttttaagggaaaaaaannnncgaaggagagaannnaannaaannnannnnnnnggggganngngncgggagccctcggggaagnagagntggnnagnnnnatnaaggnagggagagttttgggtagtnagnaattgttgtttaanttgtnagataggaagggtgggnatgattataatgtgttaagnatataattaaaagtaaaatgatataaataaaatataaggaaaaatttttaaaaaaatttttttagatgttgatttttgatagaaaaagaatgagagtgggaaaattaagttgtaaataaaatttggtggggtttagagttatttttgaaaaaatatttatgaaataaaaaaatttatttatttaagtgttggtttggggtaattaaaaaattatggggagttgaaatctaacgacaaatttaggaaatgggtatatggaatttattttagttggatttttgattgatatatagttaaataaatggtatatagataaaattaaaaaattctatgaataattattttttaaaagaaagtgtgatgataaaggaaggttatgaggtgtaagtgggattatgaaatgaaatttggtgggtggatagagtagaaatgggtattttatttttgattttttatataaaagtcaattataaaaaattttttataaaacacatcttttattttttattttatttcattaacaaaaaatttattaaagataataatgtaataaatatcttttcagttcataaaatctaatttttgtctaatactttttgagtaacttatgtgtcaaaatgggttaaaaataagaattttagatcaaaacgttttttggataattgactttggtataaaaagcaaaaaagaaaaaatgaatttgcatgtaggggattccgaaacctagggtttaaaaatcaatgacaagcgcactaccgctacaccactggacactcgattggtgcaaataaatgtttaaatttgtttattcatttaaaaaagcttggccccgtcttaattaggcactcagactcatttttgccagaaaataaaaaaattttttaa

SEQ ID NO: 40632 - DNA, 848 bp, Heterodera glycines
  unsure (1)..(848): unsure at all n locations
tagggctaccgaatgctgctaaattaattcaattcggacaactatgaaaagagttatgctccaaaaagcgggcgctggcgcccagttggttggcgcccagtcgactccaccgtggtctatccccccccccccgcccgctctttcacgcggatggcacaaaaaatttaaatatgcttttcaaaatcgcaggaagcggccaacagccgcgcctcgcaactgagtgtgtcgccggcacctccgcctgagcatccgcaagaccagcagcagtacagtccacaacaaaatcaacagtacagtccacaacaaaatcaattgatgacactgttcccgcccggcatggaactgaacgtgccgttgtcgtcgacgacgacggcacagccggcgccgccgctgtcgccagtcgcacggatggccaacggcggacatggccatcaccaccaccagcaacagcacaataacagcagacatccgcaacaaatgtcctcataaacataaacatgatttttaattgatgttttttatgcatccagagctttctttctatggtcgacccaaaacacaatagataagagaatatcactgatcaaaaaacaagcaaattttgaaaacaaaagcctaaggcttgttttgaaaacaaaagcctaaggcttgaaagggctttgtctaattatgtaaatcaaatgcttttcaaattacgtgtatatttaatttgtctgcaaatttgatttgatttcacatgagcgctattaaattatcatttttgctttttttgtataccanaatcggagaacacaaatgcaagttctgatcatcctttattcatttttttgttgtttattttgctaatt

SEQ ID NO: 40633 - DNA, 1223 bp, Heterodera glycines
tcctttttttgattgtattatttgtgccgaatttgtccccccatttttgtctttattttcccacaaacaaattcaagccgttcattattatatatatttgtgtgttcatcaaaacaaatccaagtctttcattcattttttgttttgtgtgcggacttctttcttttctcttttctgatgagcccttctcctcttcacacaccgaaacactccttttattattttgtaaaaaacaaaacaaattacttacattcgtccaaaaagtcactttttaaattttattccattggccaaattttatttcattttttcgcccatttttttgtattatttttatttgtcttacacaaaacactcccaataattattaaacacagtgccgaccgaaatttggtgtattttacctaacattttttacttactgcgctctttcagcatttttttctttttactttccctgtcccctttcattcattcgcttgtcattattatttttttttatatatatttgttttttatgactattaaatacttcaatgtcagaagaaagtgcgtgcatttttatattaaaggaagcagttaattaattacctgattataccttaattgatttacatctgctgcagcaaaagagagacaaagagcccttcaatttattagcgcgtaagtgtatcgaatatcgccatacccacaattaattttcattttaaatttgaaaaaaatacgcccacaaaacgccaaaacttttttgtgtaagaaaagaaaaaagaggaagagcagagctaacgccaactaacttcgaaaatgttttaagccttcgaactttttaacggccaatgctaacccattataaataagcttttgctttgctcaaattttcctaattttgatttttttttaatgatttctcactcacctggtgaacctcaagacaatgtctaagaatcccctactttttaaattcaatttacatttttatgtctaatggatgcccaataataaattttaaatgttttttcagcctgaaattttatctatcatttgccatttgctgtaaaaaattgaatttttacaaaaaaagcgatggcagaagtgaaaaaggagcccatttttacggaagtgaagaaggagccaatttttgcagcggagacgccagcagccgagccgagaagggacagcgcttagtgaacaatgccacccgactttgacgacgtcaccgcagt

SEQ ID NO: 40634 - DNA, 1768 bp, Heterodera glycines
taagaaaaaaggtaacgaaaccagtggacaactgtcggcctcacctgtcaataatttgtttgaggcttgcgattttttgttttggcattttatcacaatttctagggcgttgagttgccgccgtttactgacaatcagatgaatgtttggtttaagtatttgtcctgcatcaattcgcggatcagagaagtattttttttagattattatatggaacgatgtccgtccttttatttttagattaccgaggatgcatgagattattttatttacctaaaagggaacggatctgaatttatttatcgtttcggtgcaatttaaagctgattcaatttgtaaaaaactatttgactattaaacaatattcgattctgccttaccctatttatttgtgaatgcaaataattattattttttccttgactttttttacactttttgttttcgttggaaatgtcgccgtctgctgataattcatctgacgatgagcaaattgcctgtgatcccgagatcactttccgaggttgtgctccgttctcaatttgcatgttttccttttctctttaggccgctccgttcgtccattgaaatggctttccgaagtgtcttcttgtcgttaccttcccgagggtgaaatggtcacagtctgtcagatcctcgtaacttttatttgtttaattattactggttgatttttcatgtcagatcagtcggcttgcatatatgccaaacactgtctccgtacaatcccctgctaccatttgcggcgatattcatggacaattttacgacctaatgaaattgtttcaaattggaggtgacattctcgaaaccaattatgtgtttctcggtgactacgttgaccggggctattataggcgagtcaatttgaaaatcaaattttattggtcgtccaatgaatgtgcagaatggcaatggggcacacgcaatcacaaattttgcgtatggttccttccacaaattgagaatttgggcctggtttcttaatgagaagctcggccttgttttcattattaatttatccacgtaaaaccaccgaaattaatacacaaaaaaaccttttcatatgataaaatgtttagtttggaaacgatctcttacctaatgctgctgctgctaaaatacccggacagaataacacttctccgcgggaatcatgaaactcgtcgaggtaaccttacgactgggaccttgtctttgagtttggccctaaaactaagttggctgtgaaatttgggtttttcaaaaatgaccaaatttagcggttttgagcaaatatttcaagaaaataaggatttagggtcggtggttccgatagacgccgcccgggataaattgaaaatttcagtgctatttattcatagaattatacaaaaattgctagtttttggctcaaaatcgctaaattggtcgcactctctttgtttattacattgctttttttatttgtagtcttttctttatgttaattgtactataataaaattcatttgcttcaatttcctttttcattaagtctcacatcagtacggcttttacgatgagtgccaacaaaagtacggaaattctgtggtttggtcctggtgttgccgcgtcttcgacgtgctgcccattgccgctgtcgtggacaatcaaattttctgtgtgcacggaggattgagtcctgaacttccgacacttgattcaataatgtgccttcagcgcaacgtggaagtgccggcaaatgggcccctttgcgacttggttt
